United States Patent Application Publication US 2004/0031072 A1 - sequence listing, part 9

SEQ ID NO: 38032 - DNA, 1277 bp, Glycine max
  Clone ID: PAT_MRT3847_134343C.1
gttcttccgaagcatgtaagcggtgtggtgactctcgggttttacaacgcagcttttcatcgttcagtctaaggcacacgcacaccatcaagtcatcttctggtctgctgatatctatggcatattacagagatgatcgatttgcaacatttgaacagttttatcgttgttaccctgtctccttcattgagaagccagatctggaaaagggtgataaaattatcatgcctccctcagcccttgatcgccttgcgtctttgcacatagagtaccccatgttatttcaaattaaaaatccttctgctgaaagagttactcactgtggggtgctagaattcgtatctgatgaagggatcatatatatcccatactggatgatggaaaatatgctcctccaagagggagacattgtaaaagtgaaaaacaccaaccttgcaaaaggaacgtatgtgaagctgcagcctcacacaaaggattttttggatatctccaatccaaaagccatcttagagactacacttaatagctactcatgtttaacaactggtgacacaataatggttccttataacaacaagaagtattacattgacatagttgaaactaaaccctctcctgcagtcagtataattgaaccagactgtgaagttgattttgctccacctcttgattataaagaacctgagaaacaagcaaaacctgttgtatttgacaggaaacgaccaaaagttgaagatgagccgccaacaaagattgcccggttgactccattcactggttctggaagacgtttggatggtaaaccctcagcaccatcagttgaacaaacatcctctccagagttgaaacagagacaaactgacaaagaaatcaagggttctgattctaagtcatcaaataccgtgtctcgtagacattcaggaaagcttgtgtttgggtcaaatgcaactacatctgacattcaaacaacacctaaggtttctcaagaaaacaccagtcaagagaaatctcagaaggaagaagagccaaaattcaaagccttcacgggaaagaagtattcattaaaaagttgatccttgatgggctatttttgtgttgttttttcttttgatttacggaatattagttgagacaacattggttggatcttaatccatattccactcttgcatattcatgttttttttatgtcatatatattcgttagatttacctcgggaaacaaaaatttatcacttttgacagtccaaggaataccttagtccaagattcaccct

SEQ ID NO: 38033 - DNA, 534 bp, Glycine max
  Clone ID: PAT_MRT3847_134344C.1
tcagctccatcagttgaacaaacatcctctccagagttgaaacagagactaactgacaaagaaatcaagggttctgattctaagtcatcaaataccgtgtctcgtagacattcaggaaagcttgtgtttgggtcaaatgcaactacatttgacattcaaacaacacctaaggtagttcttagcagtggtaatcttctggagagacagagaaaagccctaaatctatgattcattaacgtgattttagatgcatttgctttacgtaagaccatctataaccaatattaattgtttttaggtttctcaagaaaacaccagtcaagagaaatctcagaaggaagaagagccaaaattcaaagccttcacgggaaagaagtattcattaaaaagttgatccttgatgggctatttttgtgttgttttttcttttgatttacggaatattagttgagacaacattggttggatcttaatccatattccccccttgcataaaaagataaagaggagtccgagcgcggaatatgcgagcta

SEQ ID NO: 38034 - DNA, 165 bp, Glycine max
  Clone ID: PAT_MRT3847_134345C.1
caaccaagggactatataccctaaaatgtgtgatatgataaaaattttcaagtttttaaatttacaatggagacattttaattacatactgtggatgaacgtaaatatctatcatataagtttactcaagctcatccccttttgtggttttctggcagccgtacc

SEQ ID NO: 38035 - DNA, 431 bp, Glycine max
  Clone ID: PAT_MRT3847_134346C.1
tgctaccgatatccattccaaggaaggtttcccgtcatcactgtatgacgtcctccttctttgggggggggggggggggggactaataagaaaaaagggagaaagtatgaaattataggtggtgtagttagaaaatataggacataagttatggaaataggcgaaagtttacgtctaatctctatggcaaagtagaaaaggtaggaagataagaagtttatgaccgtacgttataggccagttagaggagtccgaagatagagttaagtaatgattatagcgtaatgcttagcgttgaggtcttccggcggctggacagcgggttggcagtgtagtgttagtagtcgttcgcagcgtgcagcgttataacggtacaggcgtatccacaacggctagcagtaagcgatgagtgggcgagcatgtggtattta

SEQ ID NO: 38036 - DNA, 195 bp, Glycine max
  Clone ID: PAT_MRT3847_134347C.1
ggacatttaggaggaagcaaacagatgtttatcgagattcacatgtggtggtttcagcgctgcatagaacctaatatgagagcatgctagtgaagatgcaatcgagcgttctggaatgtcggggcatggagatactcggcgtgatgagctcaatcgcgatcagcatggtccttgtgatcctgtcattgtaatcgc

SEQ ID NO: 38037 - DNA, 199 bp, Glycine max
  Clone ID: PAT_MRT3847_134348C.1
aacagggccaaaagaaaaagggggatttttaacatgaagtgggcttccatcaaagaccgcatagtcactccacatcacagaccgaacacaaagaataccctggcacatacacgtacatattgcgattctgcaagagcagtctgtgcctacacgagagcagccccgacaaaaaccgcaaagaggccagattccagcgagc

SEQ ID NO: 38038 - DNA, 172 bp, Glycine max
  Clone ID: PAT_MRT3847_134349C.1
ggtctatattgaccgaattccacttgccacatctgatggacttccgcatgttaattcacgcgaattcggtgatggaggttttccgagtggagtctctggtgccaagtttttgtgtgttatcgatatcgtgtaagtctgttaccttcagttgctgtcgttgtatatgtgacat

SEQ ID NO: 38039 - DNA, 456 bp, Glycine max
  unsure (1)..(456): unsure at all n locations
  Clone ID: PAT_MRT3847_13434C.1
gctaccacctttatcacctctaaacaaaaaaaccatcaatcacaaggggtaaggagaagggtcacgtcaacgtcntcgtcatcggacacgtcgactccggcaagtccaccaccaccggtcacttgatctacaagtgcggaggtatcgacaagcgtaccatcgagaagtttgagaaggaagccgccgagctcggcaagtcctccttcaagtacgcctgggttctcgacaagctcaaggccgagcgtgagcgtggtatcaccatcgacattgccttgtggaagttcgagacccccaagtacaacgtcaccgtcattgacgcacctgggcaccgtgacttcatcaagaacatgatcaccggtacctcgcaggccgactgtgctatcttgatcatcgccaccggtatcggagagttcgaggctggtatctcgaaagatggccaaacccgcgagcacgctc

SEQ ID NO: 38040 - DNA, 420 bp, Glycine max
  Clone ID: PAT_MRT3847_134350C.1
aggggggggggggttaaccgggaaattccggccgggtccttgggggcattcaatttttttttatggggggaataataaaatttggggaaaaatagggaaaaaggtgtttccggggaaaaatttttttcccctaaaaattccaaaaaaaaaacaagcgggaatataaaggggtaaacctgggggggcaaaaggagggaccaaacccaatttaatgggggggccccaacggcccgtttacaggggggaaacctgggggggccaattaaattaaggaaatggcaaaccccgggggaagggggttttgttttttggcccccaggggggttttttttttatccggggaaacgggcaaaatttgatggcctttaccgggttgcccctgaaagagttaaaaagggggccccctttgggttccccaaa

SEQ ID NO: 38041 - DNA, 360 bp, Glycine max
  unsure (1)..(360): unsure at all n locations
  Clone ID: PAT_MRT3847_134351C.1
gacatacaccaatgcacagctttgatctccccttgacatgaagcttacaccttgaactcattcgtttagctcaaaatcagtttttttaaaaattcgaagcccactgaaaaatcgacaattactaccctgagaacaatactaaagcctgcaccctactgctatcatatgaccaccctatgggaatacactccagagcctcataaacactgaaaactgacctcagactgagggctaaccaacacggattacctcgataatgctttgcacgcacacaagaataactgggggtcctatactccatactacaagcgccctcacagagacaatacaccttctcctttccccagcgnggggacaggg

SEQ ID NO: 38042 - DNA, 318 bp, Glycine max
  Clone ID: PAT_MRT3847_134352C.1
aaaaagaaaagccggcttggaagttaaacaactaatggggcccgggcctaaaaaaaaaaaaggttctcttaaaaaaaacaaaacttttccctaattcacgctaaactaaaaaatgatctgctacagggttaaaagggaataccctaaaaaaaaagggttttaaggaccaagggcccacattccccagttctgggagggggattaacttgggaaacaaagctccatttggttttaccaattgagggcccgaaggaagccccttaaaaaaaaaaaacaacttttgggaaaaataaacagctttggaaagcggatataggc

SEQ ID NO: 38043 - DNA, 466 bp, Glycine max
  Clone ID: PAT_MRT3847_134353C.1
ggtgccctatgtttcttttttttgaaatttgtttgttagaaaaatggcatgcgtacgaagctgataaaaacgtggcccctgtgctaacacagaaaatgtaagcatgccagatcaaaaacaatggtgtttaatatacaggctgttgccattatctaaagagaccatttggataatccttaagggcatcaaaccaaaaatcccccgaaaactagggcttttagttcccaaaagggaaccctataaaaaaaacctatgtattggcccctactccggcgttcactaccagaaaaaataaacttcccataagctttaagccggttttttgttgggggctccattaccaccctccggatcagcaatttttggcactttatttccataaaaggggagaataagggtgtacaaaacactcctgccatggaaggcaggaatatccagctccaaaggtaaatagggttttcggcgg

SEQ ID NO: 38044 - DNA, 624 bp, Glycine max
  Clone ID: PAT_MRT3847_134354C.1
actagatgttagcacacattcatttatcctttccttcccatcaaaccacacaaacccaaacaaatccccccttgttcgttctccttgaaacatagatatcaaccacctttcctccctttgaaaactccctattgaaatccatagttctcacactgtctgggatgtttgtgaattaataggtcgtgatcctattcccttcccagacgttcctcccaacaccccttggcctcacccctgtgacagcatgacatgttttcaaaggccgagaagacgtcgtctgttttcaatcctaaatgcgtcaccctcgtccagaagcttgcaattttcgtcgtcctaaacgctgccagcgacggttttctggaggtccactagcgttgtcggcgacggaagctgcgagggggagatgatgtgcctcgtagtccaggttgaaggagactgggagtgggaacttttttttttatgaaagtaaaaaagataataacgattgattaaatatatttaataattattttattctatattatttgattgaatcaattttaaattattaaaatgatagttaatgtaatatattattattaagtttgacagtaaaaaaagtataataaattttaaacttattgt

SEQ ID NO: 38045 - DNA, 441 bp, Glycine max
  Clone ID: PAT_MRT3847_134355C.1
ggctcgagcgacggtggtgattgttctttgatctcttaactttcaaaggttgtgattggttgctttttcctccccaaaccaccgatggcttttttatttcagaaattttaagcggctgcgaaaacccttgcaaaaaatcctgctttagctagggatcctaggcaactacagtttgaagctgacattaaccgcttattcctttatacaggctacaatctgttgggaaagaatgctgatgaagcatatgccgaagagattattgtaattgccaataaagcctgttttgctgatcaacaaacgcaagtaaaagaaaatgtatcattctgaaatcaaagcattttggacgtacatggatgaaatgcttcttccaaatgaaaagagggtgaatgatcccatggcattatctcagcatgaaaacagttcacctcaccatagtgggct

SEQ ID NO: 38046 - DNA, 351 bp, Glycine max
  Clone ID: PAT_MRT3847_134356C.1
gcacataatgacactcatttaactttaacgagaacttactgatcattaaccatccagggatttacgacccaaggaaccagtccatccctggagggtgaatttggatgaaaacacctggaaggacatctttacacagaactagattccagataaattcaataatacacaatttgttttttattttgatttgcccgcctctagaaaacaacggtgggaagctgcatcgcgggtgttgctgataaagacaccctaataagcccggccagcgattccacctcctatgtgaggtcctgcccagtcaatacaggggtctgctcagggacctctcacgactgcatgcccaaatgtaca

SEQ ID NO: 38047 - DNA, 482 bp, Glycine max
  Clone ID: PAT_MRT3847_134357C.1
tgattttcgtgtctttagatacgtatcttttgtttcttcttgtaacaagtgtatgcaaggccaggagactatttttcgtttattgtgtgattgtaatacctctcgcaaggtgtagcagtagctgaagcttaatcgtacttcagatttctacactgcaaattagattgaatgactggtgaccaacttgaacaactctaatggaaccccttttgctgtctcgtgttggattctttggaaaagtagcaatgctcttatcttttgggacatcagatggagcgtctggcaaattattaaccaagtgcatattctccactcagacgtgattaaggttcttggtcatcctaaacaagcgactactactaggctcgtgagttgggaacccctttctctaccctttgtgaagttgaacacaaacaacaacctaggagactcaggctttggaggtattatttaggatcatcttggcaattggatctcagctt

SEQ ID NO: 38048 - DNA, 156 bp, Glycine max
  Clone ID: PAT_MRT3847_134358C.1
cggcggcgcagtacggcgtatcggcgccgcaggtgctggccacgctgcaaagcctggtcgagggcgagaagatcacgcagatcgtcgaggggggacggcgctttgcactggtgctcaagctgcctgactcggcacgctcgctcgacggcctgagcc

SEQ ID NO: 38049 - DNA, 169 bp, Glycine max
  Clone ID: PAT_MRT3847_134359C.1
gaaatcttgttcagtctttcaacatatatattgcattcgaaatttggaatttcatctcatttaagatgctgtttgataaacttttcatttataggagaatgaaatgagaagggaaaatgaattgaatttctgttgaaagattaaatcaacttatgctcttcaattttat

SEQ ID NO: 38050 - DNA, 457 bp, Glycine max
  Clone ID: PAT_MRT3847_13435C.1
gtgttttagacttcagggggtcgataagcgggtggctcgtgccttgtgtggattccaacacagtatgaaagcagtgctggtcacctatgatactggtgattcggctgaagacacttcttcatagccacaacatatctatatctatgtgtctgtgtctatagaagagcataaccatttccagtttccacccgtggttgctattactgatgtgtacatgctagaactgactcattgttcattacgtaaagtaactcttgactacaataatgctctcacattctctgcagaaatctacagaggcctaaccgatatctcgggccactatattagagttccagcttgcaattccacttataaaatggacccacaacgcatgacttctgccacagattatactgacaatgtaatttagacaaatctatatatcctatgcgcatatgaacgaccaatccctagt

SEQ ID NO: 38051 - DNA, 422 bp, Glycine max
  Clone ID: PAT_MRT3847_134360C.1
ggcagacagcaataatcaattcaattacattacatagctgcctgcaagcaccaacctccttctactctcttctcctctttttctctctcgcgcccaattcaccttcaccgattcactctctctctccccacctcctccctaatttccgtcaaatccttgatcggaacagacgatcggaagcgaacgccactccgtgccggagtcttctagaaggtggattggacttccataatttcaatgaatatttgttagcttcttcgaaaataacttgatggaagacaaggaagaaccaaaagagataaagatatctggtaatgaattagatactgatgaaataatacagagtggtgtaaaacaatttgttgagagtcctcatcacgaaaatgtaaattctagcagcagttttggggttgaacttatag

SEQ ID NO: 38052 - DNA, 123 bp, Glycine max
  Clone ID: PAT_MRT3847_134361C.1
gagcataccatggtgatgtgcctgaccgtcctcgggccgtgtcagtggcaacgcaacgagcggacccgcgagagtcccaacttgccaccgcgccgagtcacacaacactggccccggcccaaa

SEQ ID NO: 38053 - DNA, 259 bp, Glycine max
  Clone ID: PAT_MRT3847_134362C.1
ggacatagcttccttcttctgaacctgaagcgaatatggggacattgtttttcttccattcaccgattcctcagttttcactcccttccatgccaaaacccattgcacttcctcctctttcttgtttgaggaataatggagatgtcaatagcttacatgaacagaagtcagagggtaacaaaaatgtggacatgtcccagtccatgtgtgatgatgaccagaatgtgaaacaagataatatttggcaattgttcaaaga

SEQ ID NO: 38054 - DNA, 126 bp, Glycine max
  Clone ID: PAT_MRT3847_134363C.1
ttttcaccttcaagtttcaattcttctattcacgcctgtgtcttctgattctccattatccattttattggttcctgctataatatttttagggctgcaaacgggattcttggcaaagaagcgaca

SEQ ID NO: 38055 - DNA, 443 bp, Glycine max
  Clone ID: PAT_MRT3847_134364C.1
gaagaacaagcaacagagaactaacaacgacatacaaatcacttcatcaatcatatattgcccacgtatacgcactgctaactgagcctgtgccggcatcgtatctatactcacacaactcacatacactcatatatctcacattattataacatacatttacataacctatacttctaaccaccaatgccgaatgcatcaaatatacatgatccaacaagctaccacaaccaacatgcaaacattataatacttgtacctccatcaaccttcacacttcttaaaccatctaccttacgacaataggaacgtacggaacattagctcacaccaactaccacagcacgacatctacaacctcgattgctactaatacccactttatactcttacattcatacaactctatcattcgaccacctatcttcatttgcactcaactt

SEQ ID NO: 38056 - DNA, 485 bp, Glycine max
  Clone ID: PAT_MRT3847_134365C.1
aattcggctcgagcggctacgagaagacgacagaagggaggatttgacataaatagatatgctgagagaatgaaagaggatgacaagaagactccctctctctggacaagggaaaactctccatcatcagtcccaactcatgctcctttagattcgactaggttagaatcagatactgatgcttcagacaatgagaaaatagactcttcccctgaccccgtgatggatacaggtatcattaaccctgatcagaaaatcttggttaatgaaggagaaaaaaatgccagtgcagatattcattagaatgagaaattacaaaccttgggcctttgaaataatatacaggcactaaggtagcaagatgctgtgacattcttattttgaagttagaatcaagagaccttttgttaatttgatgttggatttaacatgatcacagatgtttttgccttgtgaattctatcttttaacgggcatgaaatgct

SEQ ID NO: 38057 - DNA, 1744 bp, Glycine max
  Clone ID: PAT_MRT3847_134366C.1
tggggctcttgcgagcgcctacataggataggtgggaggctttgaagtcattcagagtcagcatcgctttctccaaaacaaaagtactaccgctttttcgtcttctccattttcttcatcagcatagcgacacaaacgcacaacaagcaccgctccctcgtttcactccatttctttccccatcagcgaaaagacagaacaagctctgttgactttttccattttccaattttctcggtgattctatcagcctccgacacaatcgcgcgccaaacgctgaatcggtgccaccactcagggggagagtgtataacagaccaacatgagtgtggatccaaagagaagtgcctctaatggccaggagaaaatgttaccatcactagaacagcaagcattgatcaatgaggtgagaaagttaattgggccacagtctggtaaggcgtccattttttggattgatgcatctcaaggtatttgagagcacggaattggaatgttaagaaggcagtgaaaatgttgaagctgaccttgaaatggagagaggaatacaagctggtatagcataggagaactgtcctagtaatgagacgtagtcgtcagaactcgaaatcaacaccttaaactcggaattcggctaaaggccaaattaaatatttggtatactgcatggagaatgctattctaaatcttccaccagaacaggaacagatggtctggttgattgatttccagggtttcaatatgtcacacatatcaataaaggtgacacgtgaaacagcccatgtattacaagaacattatcctgaacgtcttggtctggcaatactgtacaatgcacctaagttctttgaaccatttttcacgatggtaaagcccttattagagactaagacttataataaagtcaagttcggttactctgatgatcagaacaccaagaagattatggaggatttgtttgattttgatcatcttgaatctgcatttggcgggaatgatgatacaggatttgacataaatagatatgctgagagaatgaaagaggatgataagaagacttactctctctggacaagggaaaactctccaccatcagtcccaaatcttgctctttctttagattcgactaggttagaatcagatactgatgcttcagacagtgagaaaatagactcttcccctgacctcgtgatggatacaggtatcattaaccctgatcagaaaagcttggttaatgaaggagaaaaaaatgccagtgcagatattcattagaatgagaaattacataccttgggcctttgaaataacatacaggcactgaggatacaatatgctatgagaattcttattttgaagttagaatcaagaaaccttttgttagtttgatgtttggatttaacatgatcacagatgtttttgccttgtgaattctatcttttaacgggcatgaaatgcttgcttgtgcagtcagcagtgttttgctgctgttgtggtagaaattttttttcctccctcgtggatggaagaatggttttagttatttatagcaagcaggttcttcttacccttcacccaatatcatgcttgtgtagggtagggtagtaaggtttcatgtggatttgtttcttttaaaagagatgagatgtgcaaagtaaaaaaaataataaaggtatatgtaaccattgatttaaaattagtcaagattacaaggtttttttttaattcaaataaacagtagatatat

SEQ ID NO: 38058 - DNA, 142 bp, Glycine max
  Clone ID: PAT_MRT3847_134367C.1
tagcgaaggagcgaaagcctgaaagtagggagcaaattccagaccaggagcctgattcacggcttcagacccttattgacacggaggacaaagatgcctttggacgaattaatgaacaagaagcaaaagagatcatcaccta

SEQ ID NO: 38059 - DNA, 490 bp, Glycine max
  Clone ID: PAT_MRT3847_134368C.1
atgaaatcgatatttctcatgaatttttaaaattggagggaacaaggagcatggcggttccggcagaatccaattattgaagaagaagaagaaatagagcagggtggccccatgcaccacccttctgctccgtcacacgagttgatccgagttacataatcttgttgataagaaaaagcttctgccgttggattctgcttctcggagtagcttgagtgaagttgcttcacttggccctaatcaagaaggagaagaagaaggggcttcgccctctgcttctgtttcgagtgatgaaaacgttaaatcgtccaagaataaatctgagaatatggatgttgatgtttccgctgaattttcgcgtggagaatgtcaagatactggtgatggaattgaacattccggtgtctcggtcggagaagacgcgtgggaggaatatggttgcattttgtgggatttagctgccagtaaaacacacgccggaactcatgga

SEQ ID NO: 38060 - DNA, 837 bp, Glycine max
  Clone ID: PAT_MRT3847_134369C.1
cgagcgcttacataaacaacatatcggaatcatcgttcattcagagtcagcatcgctatctccaaaacaaaagtactaccgttttttcgtcttctccattttcttcatcagcatagcgacacaaacgcacaacaagcaccgttgactttttccaattttccaatttcctcggtgattctatcatctccgtcacaatcgcgcgccaaacgctgaatcgatcggtgccaccgtgccaccactcagaaaattggttaaagtggtttggacacgtataaagaacaacttctcagctttgggactgtgtattcatttttgacttttagagagagtctctaacaggccaacatgagtgtggattcaaagaaaagtgcctctaatggccaggagaaaatgttgctatcacaagaacagcaagcattgatcaatgaggtgagaaagttaatcgggccacagtctggtaaggcgtccattttttgttctgatgcatgcatctcaaggtatttgagagcacggaattggaatgtcaagaaggcagtgaaaatgttgaagctgaccctgaaatggagagaggaatacaaaccagaagagattcgctgggaagatattgctcatgaagcagagacaggaaaaatctatagaacaaattacattgacaagcatgggagaacagtcctagtaatgagacctagtcgtcagaactcgaaatcaacaaaaggccaaattaaatatttggtatactgcatggagaatgctattctaaatcttccaccagaacaggaacagatggtctggttgattgatttccagggtttcaatatgtcacacatatcaataaag

SEQ ID NO: 38061 - DNA, 317 bp, Glycine max
  Clone ID: PAT_MRT3847_13436C.1
ggcttcctcgagggccaagggacaattccaatagcctcagtttcttgagactggggcttggtcttgaacgaagattggataaacaccttaaaaccactcatttacagaggtggtgttctataaaagcttcccattgggaccccacccaaggcctagccagaagggtacctgataggtttttccaggttgtaaggaggcccttatccagtgatatacgcttgcacttaaaaaccgtgcatgggaaacatgcctagctttgcgtttttaattcccttcaccttccaaagtgcagctgggaagggtacttttgaatcccc

SEQ ID NO: 38062 - DNA, 365 bp, Glycine max
  Clone ID: PAT_MRT3847_134370C.1
accactcgtacatgacgatgcaagcagaccacgcaatggaagaacatgaatggaataacggaaaatatgcgaacacaggattctgtataccaggatgtctagaatgaaccgaggaatgtggtcgtagcatgcgaatttgacaccagtactgtgcacttcataaagaatgcagatcacgaagagttgcgatagctgcgttctggtacatctgggactgggtaccatggaaaatggacaggatcaaatgatgcatttaaaatgaataaagaaatgctgcttcgctggtcgatcttgagaacaagaaatattgaccatagagttaatggcgggaagcatgacatactttccaagctgaaccatccaaa

SEQ ID NO: 38063 - DNA, 102 bp, Glycine max
  Clone ID: PAT_MRT3847_134371C.1
tacagctgtgagaagactacagaagggcgatagcaaaacagacagttgtttcaataactgatcagtagatcactcgatccttcttgagtatgcctcatcatc

SEQ ID NO: 38064 - DNA, 721 bp, Glycine max
  Clone ID: PAT_MRT3847_134372C.1
aaagagcgtagttcccacacagcacacaagagacagaacagagtgacaacactacaattgattgcatccatactgcgttctccccgggtcccaccatgccagctgccactgcttcttcttcttcttcttcttgtacattttctcactcttctcttggtgtcttctgaagtgggtggaatgaatagcaataccaccggcgctgcagcaatgaacgaccagctctccaacaccacctccatcttcggcctccgcctatgggtggttctcggggtgtgcgtgggcgccgccatcgtcctcatcctcttcctcatctctgtctggctcgccttcaagcgctcttccaaaaccaaccctgtttccatccccgacgtctccaaagagatccaagaaatcaggctcgacaccaaccccactctccaacccgaaccttaccccgaacctgaccccgttcctcccaccgaagaggaaaccaactccctcggctaccacagaatccagttcgagattgggaagaaccaccgaatctcgtacccggagcgtgccttgcttcgctccagctccaatgaccccagcagcggcgaggttcagcttccctccgtcattcccgaagtttctcacttgggttggggccactggtacactctaagagacttggaagacgccactaacggcttcacacctgagaatgacatcggagaaggaggatacggaattgcccatc

SEQ ID NO: 38065 - DNA, 935 bp, Glycine max
  unsure (1)..(935): unsure at all n locations
  Clone ID: PAT_MRT3847_134373C.1
aaattgtagattttttttttgtgatttttgaagatgatccacatggaattgttttcccaatttgaagctcttcccgtattgttaaagtgttggtatatccacaggttaagagggatgtaaatcttttagcacattagttgcagctgcattgtgatttgaaggtcataggttcaatttaaatcctagaaacagtctgttgggacttaggaagttaggatccagttgcaaggcatgagacttgagtcacatattggaagtatggcatgttagtgtgggatttacaacaacagctagtttttgtggtgtggttcttctaaagtttctcatcaatttgtatcagagccttacactatgtctcccagctgcaaacaagtggtgctggttgcgatgatggcattgcagtgtttgactggagctatacatgggagcaggggctgtggcctgtggagtgtggtggaatgttggggtccaatttcaaggtatggaacttgaatcctatgggattctaatgtaaggtttatgtggctttggactctctccaacgacaatggctagcttttgtggtatggtttcccctcatattaaatatacatactcttcacacannngatgtttcgggagattgtgatactgtttgaagtccacacttagtatgaggagcttcagcaacttcattagataagcaaatcagctagtactttcgttaacacatttgcatgatgtaaacatgccagcagtagatggtatgttgtctgtgattcttgacactggcataacaacagcatgctacttagttctaatgagctatcacgggctgtcnnngatagttggatttaattcctctgaaacaaaactgtgcaactgtatccaatggttgagattatgataaaatacacgtactatgtgatnnnctatggaagttgttaaaatttcag

SEQ ID NO: 38066 - DNA, 387 bp, Glycine max
  Clone ID: PAT_MRT3847_134374C.1
ctaggacttctgctgaagcactcacccaagtaacgctcctgcctctgcaagctcaggagaggaaacatgggtctcagcagctctactgggaagcgcccagctgcaaactcagagagcaaggggcatgtcgccaagataagcagcacatctgacaggtgggagcagtgcacctagtaatgccatgagaggcgcttgagcatccatgcctataagcatgaatacaggagcatgttcctggaccatcagcagcaagacttatatggagataagacattcgccttcagagaatgggccaactatagcatctcatgatattactgatgagcgacacaatctccctggctatattagtatggacactcggatacagactcacaggagcctcat

SEQ ID NO: 38067 - DNA, 480 bp, Glycine max
  Clone ID: PAT_MRT3847_134375C.1
acggctgcgagaagacgacagaaggggtagcccagtaacgtggctactttgatccattgggtaataagaggtcacaatctataaatgtgtgtgtgtttgtttgtagttgttgtaaccttaaacggatgtatgttcaaacgtaccaagaaatatattttgttgatgcagtctcaaacgattaaccaaagtgtcaaaaggcatgattctgggcttgaatgtataggaatatgtgcaaaccaagaaccagacacagctctaatataatccatgactattttgtaatactatttgtatgtaactgttggaagagggtgacgcaaaacagtatcttttgttttaggattttacaaaagtagtcagacaatatctgaaaaaggcttctggagtctggacttctggtttcaataaaaataggaaacacataacctgacccgaagtttttatgttttgacagaacctaccgtaattattttttaaata

SEQ ID NO: 38068 - DNA, 447 bp, Glycine max
  Clone ID: PAT_MRT3847_134376C.1
ggaaaaaaaaaaaaaaaatccctttttggggggaatttccccgccattaaaggggcccccgggttgggcttttacaaagggggcccttttcccctgacaggggtttttgtcccaaatttccccttgggtttagcggctccttttttgggcccttggggttgggccccccccccaatttcttgggggggcccggaattcttcaggtaccccaggcggggggccaaattaaaagcggggccccttaaaacccccccccccagagccttgggtcccccaaaaaagggaccccggggggcaacagggggggcgctttttcccaaaacagggcggcctaaaatggggggcgctttttttttggcccccctgggaagtaattcttccaccccttgggtattggggggggcctcaaagcgacctgggttttgggttggcccaagggggtttttt

SEQ ID NO: 38069 - DNA, 136 bp, Glycine max
  Clone ID: PAT_MRT3847_134377C.1
cctcgagccattcggctcagaacctctcagcccctctccgacaaatggccaccgaatgacgccagccgtgaccaaccaccgtctgaatccgagagtgcgcatctctcaaatacgcagttccggatacgtgtaatag

SEQ ID NO: 38070 - DNA, 1090 bp, Glycine max
  unsure (1)..(1090): unsure at all n locations
  Clone ID: PAT_MRT3847_134378C.1
ccacaagaaagaaacagcttaaatgtttttctctgttacccaaaatctcttcatagctccattatctctatcaccacattcatagttccacttgccccaagttcccacctttcccacattcaaccacaagtttctgttctctttctcttcacattcccaggaaaatttgtaacaatttttctgagaatgtgattttctttggttcaaatccaaaattttcattattgttattttttttattaatcttcactccttttgtgataaacatttttccctttctctttctctgcttcaccattcccttttttggttcacgttcatcgtcgtcacccacaaaccccaaccttcaagatttgatttttccatcaatgtatgacgcaaaatcgaaaatttcctcaaacccatttcaaatgcggatctcaatttcacggtagaccccacattgctcggattttccgatcgagatctagggtttgcttccccttttcaaagctttgtcagaaatcagcactcttgggttcaattgattccaattcttccttatgagtttaattttcatctgaaaggttcgtaattcgttgatttaagcttctgggtcgcaatgctcaagcaaatcctcagcaagcttccccggaagtcgttgaagcctgactcggacgagttgactaggggagactcggcgcgttccgctgattcgccgcgtgctgctggcagaagctacaaactacacggtgtaagttcttccactgccaagcgagcttcgtcgtcggccgtgtttccggcgagcatggtgtccggaattgaacctttggtgccgtttaaggatgttcctaatgctgagaagatgaacctgtttgtgagcaaattgagcctttgttgtgtcacatttgatttcactgaccctggtaagagcattgcagataaagatgtgaaaaggaagactntggttgagcttgttgattttgtggcttgtgggacattgaggtttagtgagcctgctatccttgctatgtgtagaatgtgtgctattaatttgtttagagtttttcctccaaattatagggcaaggggtggtggtgagaatgatgat

SEQ ID NO: 38071 - DNA, 441 bp, Glycine max
  Clone ID: PAT_MRT3847_134379C.1
ggggggttttttttttttttttttttttttttttttttttttttttttttttggaccccccaaaactattggcctttttttaaccaaacccaaaggggcttggtttatttaaacctaccccctttcgccatgggtgcccccccccccccaggggtggggggggggcccccctgggtgcctggaaacttgaaatcttccccccccaaccactgggggggtttgaaaaagggggggtggtgcacccatgggtgcagccacccccccaggggggggcctcatgcccaatttgttcctaaactcaactccaatcaccccctccgcattttttcgcggcaccgccttatccgggggaagcttctcctttgcatccgtaaaaacataaaacaagggtgttttgggaaagggggacccactacgagttttccgggggggtggtgaccc

SEQ ID NO: 38072 - DNA, 756 bp, Glycine max
  Clone ID: PAT_MRT3847_13437C.1
ccacgcgtccgcaaataggaagccatgcactagagatcgtggaatctttaaaattgaaggaccaaacctcaatgctcaatggctctaacatgaaaagtatgtatggatagagtctagaataaccagaggaggggcaaagcctattgataagccaagtgtccttaatgaaaatgagttgtgagtgattgaactttcaatactatcggacagaaactttcgccctaggatttattcttccacgaaatattcattggcactagcatttagttattttaccttttttgcgtagtgctagagtatgcttgagaaatattatgcttcttttttatggcctggctatttatttattatattgattttaatatttttttatagaaattatgtgtattttttttattagaaacagttttattcaagttatgtatgacctgcattaataataaaatttatttttaaatatttaatataattgtatatgtagaactcgaactcaaagtcacttatcaaatcaaaattatcttgtgtcaattaataaataaattaagagatcaaattaaaccttttaaaaataaaataatcaaattatacttacaaaataaattaaaagatctagtaattaaaccttcattctcaaaagatacaaatactattcttatccttataggaaagcatgtttctttaaccttaacccaaacatatgctaaattgttccaactacaacaaaacgttttggttttcgagaatgtgattttgtcg

SEQ ID NO: 38073 - DNA, 249 bp, Glycine max
  Clone ID: PAT_MRT3847_134380C.1
cccacgcgtccgtacggctgcgagaagacgacagaaggggtccattccattccatcaccctctgtgcaacacagcttctatttcaccttccccagaaaatacccttggctttttccctcaccagcattgttcctttgctgttattctagcttcattaatcacacactcacacgcgtagcgccaggtggagtaaaatacactagccaaacggccatgctttagagctcaagaaccttcccagcaaccgga

SEQ ID NO: 38074 - DNA, 266 bp, Glycine max
  Clone ID: PAT_MRT3847_134381C.1
gaggggagaaagagttaataaagatcagtttggtgcacaacagagtggcccttaaggtgtgtttgttgcttccatcacttgtaggggttcgatgtgttgtcatggatatgagcttcctcataaatgatgaatcagcaacttatgatgatgatgaatacataatcaatgcagtgatttctgtctgtacaaacgcacaatgaatactgaatgcacctgtcacaatattaggctgaattcatgcgacgcacatagttgtaactgtttat

SEQ ID NO: 38075 - DNA, 999 bp, Glycine max
  unsure (1)..(999): unsure at all n locations
  Clone ID: PAT_MRT3847_134382C.1
gttccggcccctctctttcgctgccaaccgatgtcttcgggcaacgtcctcttcctcaccgcccctgcatccgcttcttctaccatccgagaagacgactcaagggggcatcacacacacacaacataaactattcaattcagtctctttcgttatcaaattatttcttcgatcaaggtcgttttcgaaacttcaccaacatgagctactacgatcatcagcaacagcctccaattggtgttcctccccctcaagggtatccaggaaaggacgcttaccctccaccagggtaccctgcacaaggttaccctccaccagggtaccctccccaaagctatgccccacagtatgctcaacaacctcctcccaggcaagaagttggttttcttgaaggatgtttggctgcactctgctgctgttgcatgcttgatgcttgcttttaagttctgaaagagacgtggaaggtggtgactgaatcagagacattctgtgaagcggcattctcatcaatattgtgttctgttaattcaatagtagaactgaatattaacatttgtttaggtttaaattcttgcagtgtctatgagtctatgaattctgtatttaaactggttagttcatgggttggtttctaactttgaatttaagggactggatttatgctactctatgcttaaaaccgaaaaacgcaaagaaaaataactaaggaagataaaattgtcttgttctgcagtttggcgtgcactctgctgctgttgcatgcttgatgcttgcttttaagttctgaaagagacgtggaaggtggtgactgaatcagagacattctgtgaagcggcattctcatcaatattgtgttctgttaattcaatagtagaactgaatattaacatttgtttaggtttaaattcttgcagtgtgtatgagtctatgaattctgtatttaaactggttagttcatgggttggtttctaacttnnatttaagggnnnnnatgtatgc

SEQ ID NO: 38076 - DNA, 479 bp, Glycine max
  Clone ID: PAT_MRT3847_134383C.1
gctgctttgccaagctcaccaacacctactgtctggtagcgatcggaggctcagagaacttctacagtgtgttcgagggcgagctctccgataccatccccgtggtgcacgcgtctatcgccggctgccgcatcatcgggcgcatgtgtgtggggaacaggcacggtctcctggtacccaacaataccaccgaccaggagctgcaacacattcgcaacagcctcccagacacagtgcagattaggcgggtggaggagcggctctcatccttgggcaatgtcaccacctgcaatgactacgtggccttggtccacccagacttggacagggagacagaagaaattctggcagatgtgctcaaggtggaagtcttcagacagacagtggccgaccaggtgctagtaggaagctactagtgtcttcagcaatcagggagggctggtgcatcccaagacttgcattgaagaccaggatgagct

SEQ ID NO: 38077 - DNA, 116 bp, Glycine max
  Clone ID: PAT_MRT3847_134384C.1
atcaaaggtgcctagttcccaaacacccaaactttttttttgcggggaccaggccctaacctttttggaacttccctttcggaacacagatattctttccggcggttctttcggtt

SEQ ID NO: 38078 - DNA, 494 bp, Glycine max
  Clone ID: PAT_MRT3847_134385C.1
tgcttggaacctttgggctgattgagtgcttgcatggtcgtgagatgatagaagggggaagagcgaagagaacggtctttaagggcccaattcgctcggtcgcgccaacacgtgccctagtatcgctatcgagcttcctcgccgtgggggaagggtaaaacaacggttccgccacgaatcctcataaggaactacgtttctaggtcgaagatactactatagagtaagctaagtcctctcataagtgttataagaatatcgtccctcttcggtctaggaatactccttacgatcgcgtcgcctagagccgcgacgtcctatcgccgtcggatcttataagaaggagtccgctcgagaaggaaatagacagaagtcccgggccgagaaaccctaagcataccgagattactaaagaagtcccggaaagagaacgtttcggagccgccctacgcgtcgacacttccggctctcccgctagagacggtaccgccctg

SEQ ID NO: 38079 - DNA, 368 bp, Glycine max
  unsure (1)..(368): unsure at all n locations
  Clone ID: PAT_MRT3847_134386C.1
cccactcgtncanagacgcgtaagcagacaacataatattaccacactatcangcttccttgggtggattaaaaaaaaccgtgctaacaaatctaacaatcaacataccttatattgagaggatatgaattcctgttttacaccaacaacttatactttccaacaccattgtctctgtttacctacacacagcactttttgttggttcctctggtgaggcacaagagactcaaaaagatatggctgcactctgaagaatcctagcatactgtctctatgctgccaatccctaccatttatatacggaggcttgaattcaaataattaaccaagcctttactagcaagccatttaaaaaaaccaagggt

SEQ ID NO: 38080 - DNA, 404 bp, Glycine max
  Clone ID: PAT_MRT3847_134387C.1
ccacgcgtccgaatcgagataactagaaacggtgggaggaatatgatagtccttgatttgttcgatgctacgatctaggaagcacggcaaagccatgcttacgatatggacgctctcataatgaacactggctatggtgcctgtacttgggaggtgaaaggcgcatgatgaatgcttgctgcggaagcacacatgagtctttgactctgaaaccattcctgatgagtgcgaagtatcaacggaggaatacatgcatgaccaacaatataaatcagactccaaaacagttaaccaacaagcttacttttatgccggagacctgctaacaccatcccaaggacgcatttgcgctcagattacacggcacctgcctgtctaggattccatactacaaaacacatgca

SEQ ID NO: 38081 - DNA, 499 bp, Glycine max
  Clone ID: PAT_MRT3847_134388C.1
ggctctaggagaaacttttgcatgttcacagtgtggcagatcgtaacaatgatcctcaactaggagacttcattgagagcgagttcttgtatgagcaggttaaatcaattaaaaagattgcagagtatgtgactcaactgagattagttggaaagggtcatggtgtgtggcactttgatcaaaggcttcttcatgatgaagatctataatctttgaacagcctctgttttctatacatatggtcctatgtgaagttatcaccgtgttgttctgtttgtagtaatagtgaataagtgtgttgttctgtttgtagcaatagtgaatagtgaataagtgttcctctcctaggtgataaaaatgtagggaactttgtccttgtattatagttgttggtagaatggtagtagtagtattattatgtgcaatctcatatatgtttgtaccatgtaatcattttattagaaataaaaaatgacgttcggttaagaaaactatatag

SEQ ID NO: 38082 - DNA, 276 bp, Glycine max
  Clone ID: PAT_MRT3847_134389C.1
ttaatgctaccgctgctacacgaccacagatgggtactggtgccataagacaacggatggggattcaagcacttgttaacaaagatccatctatacttcatgttttacgtgcaaaaggttcttcaactgcatcaaaggctaacaatcttttaaaacaatgggatatggttttagcaatcaacattgaaccagtcacatgctctcgtgacattgaaaatgcttgccaatctttacacaaattcgactcccatgatggcaaacttcacttgactattt

SEQ ID NO: 38083 - DNA, 1542 bp, Glycine max
  Clone ID: PAT_MRT3847_13438C.1
cccactccaaccctaattcaactcttccgatctgatcactgtgaggtgctttctttcactctttgatcctctctctttaccctttttctcaaccaaagtttcgatctttttttttttattgttctctctgaaaatctctataaattgaatccccctacccccaatttttttttgtctttcagtggaaaatctgagaattggtcaagattttcgctttgattgattgtccagctcctcgatctattgtgtttgtaaaaattctaaatgagccgggcacaggatgcaaaccgatcattcttcccttttggaaatccttttaggatgatatcaccgaaaggcccaaaaatttcttcacagctgttgttaatattacatgcttttgaagcaactttggaagagaggctgaaaaagcttattcccaagagcaaggatgagatcctcagcttgtcttggatgactttggccatgcaggcactttgtgagagtcataatgacattaaaaccctcataacagagcttgagcttcctgtacatgattgggatgagaaatggatagatgtgtacttggatattagtgtgaagttactagatatatgtattgcatttagctctgaattatcacgcctgaaccagggccatcttttacttcattgtgcattgcacaatttaggttcttcctcttcagagcagtatgttcgggcatgctcttcacttgatggttggaaacagcatattggttctggaaaccctagggttgagaaatgtggcagcattttggatgatcttctgcggtcacttgatctgccaaaggttaaaaagtctgctaaagggaaggttttgatgcaagctatgtatggagtaaaggtgcagacagtatttttatgcagtgtgtttgctgcggctttttcgggctctacaaagaatatgtcagatttggatgtggctgatgtatattcttgggctccaacctttaaaagtttgcaagatcttgtaaatggggaaattagagttagaagtgggcgatttactatattgaatgagttggaagtagttgattcctctgtgaaggaattatatcctattatccagggcgtctcagatgccattgagacagaatcacttgcgaagattgttggggaattaggcagagcaacagagaagctttcacaaggactagatcttcttacaaaggaagtcgatagctttttccaagtggtcttgactggtcgtgatgccttgctatctagtttgaggtcaggtgcaactttcattgacagcattcaggcgggtaacagagatgcacaaatagtcaattgaatgtgttgcagcctaactctggtacataccgatggatctaggtattggtttttctgttttaagattgatggttttcaatcatgtttggcttattgtattcaagttagaatgagtaataggttatatgattatattatggttcttaaatgtatatttgtgatgttctgtgtaatattatatgataaaatatatataagaaagttgcttgtgctcactgaagtttgc

SEQ ID NO: 38084 - DNA, 634 bp, Glycine max
  Clone ID: PAT_MRT3847_134390C.1
tttttttttttttttttttttttttttttttttttttttaaaagattcaaataacggtatgcattaaattataatacggcaaactgccaaaataatagtaataatttagttacaactaaccacgaaatctaagttgctgcgaactacatcatgcaactcttgatgcagagctataaacagatcaaaaactgatctcttaagttatcatatatctctcagaaccacaaaaaactgatctcttaagttatctataaccattaactatgactttctaactttgtttgggcgatctactgcagattcattctctctggacctggagtatttgccccctctaccatgttttccaccccttcctcggttttttgtgcatcctcggatctttccctgattaccacgaagcagggtccagtattctctctcagcctcaccagttactggatctagagtagcaatataatttttcacttcttagccctccgtttctggtagcgctgcagcagcacggagcttccggtgcggctccccgctctgcgtattgtctgtcccctgactctgctccttccttgtgaattgatttaaaaaaattagagaactaaattgaaccaaaaaaaattagaggattaaattgaat

SEQ ID NO: 38085 - DNA, 103 bp, Glycine max
  Clone ID: PAT_MRT3847_134391C.1
agttttatacacaaaagttagtcgttttcactgactaacagtcgacttacagggttgaatgccagttacagtgcaaaacagatgatcatttagtgttttgatc

SEQ ID NO: 38086 - DNA, 623 bp, Glycine max
  Clone ID: PAT_MRT3847_134392C.1
ccacgcgtccgtggctaagtcagctctcacaaatactagtagaaacaaaaaccgcggaagccgccatggccgaagcagaacacaacgatcccacctcgccggagcgcgaggaccaaaccaaaagcaacaaaaagaagctccgaaagagaaaaagacctcaaaagaccgagcagaaacaagaggaggagaagaacgatgcgaacattgatagcgcccaaacacaaactgaagatgaaggagagaatcaagaagacacaaatgtgaacaacaacgtctcatctggaatcatgagcaccgagtctttctcctctctgggcttgtccgaacccacttccaaagccattgcagacatgagcttccaccgtatgactcagattcaagcgaaggcaattccgacgcttctgaccgggaatgacgtgcttggtgcggcgagaacgggtgctgggaaaaccctagcgtttttggttccggcggtggagttgttgtacaacgttcagtttacgccgcggaacgggacgggtgttgttgtcatatgcccgacgagggagctggcgattcagacgcacgccgtggcgaaagagctgctgaagtatcactcgctgacgcttgggttggtgattggg

SEQ ID NO: 38087 - DNA, 818 bp, Glycine max
  Clone ID: PAT_MRT3847_134393C.1
accggctcgagctagacctgttggtcgtcaggacactgtacagttactgattactttgatgcttttagcagatctttctgtcactctcctcatgttgcttcagttctactggattgctcttgcggcttttctttctgttctactaattcttcctctctctctactttctccatttcctgctggtctgaatgcattattcagtaaagaacctagtagagcttcactttctcgagtatatgcactgtggaatgctacttctttatctaatattggagtggcttttatttgttgtctccttcattattcattatcccacttttaccaccctgatgaggcaagcacacgtaatgttaagagggaagatgataaatgctggcttttgcctatcatcctttttctattcaagtctgtacaggcccgttttgtcaattggcacatagcgaatctagaaatggaagattattctctattttgtccggatccagatgctttttgggctcatgaacctggtttatgacagaaaagaaatagaagcattagaaatgtgaacctggatgttaagtttttggtaaatccaacagttcaaaatgatgcttcgtttcggcgtggagcaggagccttgccgtgtgaatatatatattcagagatgtacaggagaatgaagtacagttctgcactttttcgcttctttgtaaaaaaaatctctagagtttcaaggtataatagttacacggaagacacctctttctagtattgtcttttagtttatatattttttgggttcgctttctcatgattaataccactgaagcttcacc

SEQ ID NO: 38088 - DNA, 508 bp, Glycine max
  Clone ID: PAT_MRT3847_134394C.1
ttctttatctaatattggagtggcttttatttgttgtctccttcattatgcactatcccactttcaccaccctgatgagacaagcacacgtaatgttaagagggaagatgataagtgctggcttttgcccatcatcctttttctattcaagtcaatacaggcccgttttgtgaattggcacatagcgaatctagaaattgaagatttttctctattttgtccggatccagatgctttttgggctcatgaacctggtttatgacaaaacaaacattgtgaacctggtttgtgacagaaaagaaacagaagcattagaatgtgaacctggatgttaagtttttggtaaatccaacagttcaaaaggatgcttcatttcggcgtggaacagcagccttgcctgtgaatatatattcagagatgtacaggagaatgaagtacagttctgcactttttcgcttctttgtaaaaaaatctctagaggttcaagggataatagttacacgaaata

SEQ ID NO: 38089 - DNA, 1359 bp, Glycine max
  unsure (1)..(1359): unsure at all n locations
  Clone ID: PAT_MRT3847_134395C.1
ngttcgnactagaacagttgacataccccaaatctacctacgcctactagttcagatatcaaattagctatggcaacccaaagtgaagattatgctacaaaattccttcaagcttatacccagattgatgatcatagtttgagattcatacactccatgtcccttaaatgtgcaattgacttaagcataccagacatcatacacaagtatggccaacccatgccactctcacaactcattgcttcactaccaatccacccatccaagacttgctacatccatcgcttgatgcgactctttactcattccggtttcttctctcggcacgatttggtcgaaaacgaacaagaagtgatcacgtatgagctaactgatgcatctagactactcctcaaggaccacccttttagtttgaggcctttgttgctagtcacacttgatccaagtgtgattaagtcatggtgtcaattctctacttggctcacaagtgaagaccgtacaccgtttcaaacggagaatggggtgacatattttgattatgctaagcgtgaccccaaattcggtcacttttacaatgatgcaatggctaaggacactcgattcgcttctagtgtggtgattgaaaactacaaggaagtgttcgagggattgaagtcaattgttgatgttggaggaggaatagggaccatggctaaggccattgctaaggcattcccacaagtgaagtgcactgtgtttgatctcccacatgttgttgatggcttgcaaggaacagaaaacatagaatatgttggaggagacatgtttgaagtaattcctgcagctgattgcattatgctgaagtgggtattgcattgttggaatgacgaggaatgcatgaaaatattgaagaaatgcaaggaggcaatacctagcgacggaaaggttatcatcatggaattagtgatggagcataacaaggaagacaataaattaattgagatgcagctgtgctgtgatatgcttatgatgtcgctttttgcaggaaaagatagaactgagaaagaatgggcacatctgattgcctctgctggtttcagtaactacaagataactcatattttcgatttatatcatatcattgtggtttatccctagtgtaggggtggaaatgagtcgagctgcttgtcgaggatctttggctcggcctatgtaaggttcggcttggctcggcttgtttactataaaggtcaagctcaagctttttaaaaagtttttttagataaaaaggccaagctcaaactataaaaaaaagcttgttaaacttgacaagccaacttgtttaactaacaataataataataataactttattttatc

SEQ ID NO: 38090 - DNA, 363 bp, Glycine max
  Clone ID: PAT_MRT3847_134396C.1
ggctcgaggcacacgttactgtacacagtatcaattattaccatacttcatgggatactactgtgggcggtacatcatcaatctccgaatgaaaacatagcaccgtgtcaccttagcactcacacaatgtgcgtcactccacttgctacggtaactattcacacttcacatgcgacctgtgcagtaagataatcaccgatactgtatttgaactttgtgcaagaacagaacgtcgttgcatggtccactccaaccgctgaagtattatcaaagacccgagacattgcaattgctcgcatgacagagaagatcgcctatgattctgtctgtcatgacaccctgggatggctgtcttgctagcat

SEQ ID NO: 38091 - DNA, 352 bp, Glycine max
  Clone ID: PAT_MRT3847_134397C.1
cccagggaagtcaacctgctcaatgaaatttgcccatgattttattaggggaaaaatggccctgtccgggggggactaaaatctaacgaagcccgctaaaaatgcccccctgtggctggctattcgatattatgccttccaaagcctttgccaacatgagggtattttgccaccttccttgttgttgaaaacccagctcctctcttttgcttggacccactatttctttgccttggtccaaggtatgttcaaaattctccacctcttggaccaacaacccttttttgaaggactatcccactgagcacgccaaaactatctttgaggggggggtccttcaatggaacaagag

SEQ ID NO: 38092 - DNA, 421 bp, Glycine max
  Clone ID: PAT_MRT3847_134398C.1
catgttatactcaggcccaaagatcattgcaactctaacacactgtttgaccaacattggcactctggcttcgagaccccaagcagaggtcgatctattgtcccgcaagcagtcatgctttgcgagggctcaaaccatgccgattgtcatttgatgaaacaatgctttgtgcggggcctcgtataaatacatatacccgccaaagatctgatctaatccttctgcaaatataacccattagactcccaatgactaggtcttcctagacataagaaacctgggactgcttgctcaaattgttgtcacctcataagtcacactgtggtagagcacatgctcaatggcacctatgccatgctgacacagtgcagatgcactcatgatgtgcaggccctacagtatgtgccacgtccctttgctg

SEQ ID NO: 38093 - DNA, 194 bp, Glycine max
  Clone ID: PAT_MRT3847_134399C.1
gttctagatcgcgagcggccgccctttctttttttgtttttggtttatatcgaaacacactcatcgcacgagctcatgcatatgtcaccaccctacctgcctattgaactgcaggacctgtctgctgaactcgccttcctagagttatcacatgacacctgtacaaacccgctcaagctttctaagttacaagc

SEQ ID NO: 38094 - DNA, 1606 bp, Glycine max
  Clone ID: PAT_MRT3847_13439C.1
ggctcgaggaacaaaacaaccacccaactaaccctaattcaacttttccgatctgatcacttcgaggtgctttctttcactctttgatcatctcgctttccccttttcctcaaccaaagttttcgatctttcatttatttatttattctctgaaaatctatcgaaatagaattgcctacccccaatttttgtcctttagtggaaaatctgagaattgctcaagtttttcgctttgattgattttccagctactcgatctattgtatttgtaaaaattccaaatgagtcgggcacaggatgcaaaccgatcattcttcccttttggaaatccttttaggatgatatcacctaaaagccctaaaatttcttcacagctgttgttaattctacatgcttttgaagcaactttggaagagaggctgaaaaagcttattcccaagagcaaggatgagatcctcagcttgtcttggatgactttggctatgcagtcactttgtgagagccataatgacattaaaaccatcataacagagcttgagcttcctgtacatgattgggatgagaaatggatagacgtgtacttggacattagtgtgaagttgctagatatatgcattgcatttagctctgaattatcacgcctgaaccagggtcatcttttacttcagtgtgcattgcacaatttaggttcttcctcttcagagcagtatgttcgggcatgttcttcacttgatggttggaaacagcatattggttctggaaaccctaggattgagaaatgtggcagcattttggatgatcttctgcggtcacttgatcttccaaaggttaaaaagtccgctaaaggaaaggttttgatgcaagctatgtatggagtaaaggtgcagacagtatttgtatgcagtgtgtttgctgcggctttttcgggctctacaaagaatatgtcagatttgaatgtggctgatgtatattcttgggctccaacctttaaaagtttgcaagatcttgtaaatgaggaaattagagtaagattttcaagtgggagatttactatattgaatgagttggaagtagttgattcctctgtgaaggaattatatcctattatccagggcattgcagataccattgagacagaatcacttgcgaagattgttggggaattaagcagagcaacagagaagctttcacaaggactagatcttcttacaaaggaagtcgatagctttttccaagtggtcttgaccggtcgtgataccttgctatctagtctgaggtcaggtgcaactttcattgacagcattcaggcgggtaacagagatgcacaaatagtcaattgaatgtgttgcagcctaactgtggtagatactgatggatctaggtattgggtttcatgttttatggttgatggttttcaatcatgtttggcttattgtattcaagttagaatgagtaataggttatatgattatattattatggttctgaaatgtatatttctgatgttctgtttctgtgtaatgttatatgataaaatatatataagaaagttgcttgtgctcacagaagtttgtaatttgcaaccctgtcattctttctattcatt

SEQ ID NO: 38095 - DNA, 248 bp, Glycine max
  Clone ID: PAT_MRT3847_1343C.1
cagcttaattttcgggggccccacctcactattttgcggtcgtccttttttttgactttttataacagagaccaatttccagacaaagaattcttttttttaacccattaaaaaacaaccatgaccatttatatcgccttagtacacccccatttttacaaccaacacaattggctatcccaaccttttaaaaaagccttctcttaacatcctaaggacattaattatacattaaattccacaatatt

SEQ ID NO: 38096 - DNA, 597 bp, Glycine max
  Clone ID: PAT_MRT3847_134400C.1
acgcacgcgtacgaatgcggctcgagtacggctgcgagaagacgacagaagggggatcggattgaggtttcaatttgtcaacagaaaaacctaatgtctcatcgagactctgattccaagcgtcgccactccaagttcgatcgagaagcaagtcccaagagatatagaagggatagtaacagagtaacctcagatggaggagatcggagaaacccaccacatcattctaggcgtgaacccttcgatgctgctcccaagaaatcaaattcaaatgatcatcatgagaatccgccccaacatttgtctcaaccaccaagatctcgctcttatcatcagtatatgcaaactatttttctgggctgatgtagcggattcttgttcagtcccatgccttgaagtggcacgatatataaccctcttaggcttgcctatgcttgttgtataacagcacgatgaacggggtagtactgggcaggttggtcgaagcagtggtcaaagggaagctggtggaaaagtctttactcagagtaaagagaataatgaaagtcaaagtacagagcaaaaagatgagaaatcacaggtgaaactggatgacaa

SEQ ID NO: 38097 - DNA, 292 bp, Glycine max
  unsure (1)..(292): unsure at all n locations
  Clone ID: PAT_MRT3847_134401C.1
gcttgtggcttttacagaaagctacagtccgatanttgatcacacctccaagtggctttcttaggcaggtgcttacatgcgttcgtctccattactgctcaatatcactgatcaattcatgtttttcgacgacagctaagagtctagatcattatcgcatgaccaatccagtaaaatactagtgaggtattacatacatacatcttgtggactagatattattgcctatattgatgctattcagccaatgaaaagcttgtgtgctaattaaacattatattatatatcctat

SEQ ID NO: 38098 - DNA, 409 bp, Glycine max
  Clone ID: PAT_MRT3847_134402C.1
aaaaatatattttgatttgtttttttttttttttattaaacaaaagtcaaatttcaattaaaaaaaaatcaaattgaaggggtaaaaaaaagcgcgcaagcaaaggaaaccgaaaaaaaccacaagggggtataaaaaaccccaattgcctcaaacatttatgggtaaaaggggctgggggaaaccgggaagaaaaggtaaagaaaaaacaaaacattatcacgggagaatttgtacaacacattgggacccaaaaaaaaaagggaagcaaccccaccactgggccgataaaaaaaagttgcgtgaaaaattgcccgcccagcaaataaaagagatatctaaactggcagggcatatgagaacccgttgtccaaaacaccataaggaaagggggaaccaaaaccaacaa

SEQ ID NO: 38099 - DNA, 540 bp, Glycine max
  Clone ID: PAT_MRT3847_134403C.1
aacccccaaaaaagggaaaaaaagcctttataaacggcatttttttacaattaaaaaaaaaatggggggggaactatcccgaaaacaagcaaaacccttaaaaaaaaaaaaaaagggggcatttttcatgggggggaaaaagaggaaaaaaattaggggggggtaatttcccccaccctggaaaaaaaaggggttcccccggtaaacgggggaggggggggcaaaaaaaaagggaaaaacaagggtgggccccttaaaaaaaaaaagggggggcatttattccaaaattaaaatcatatttaaggggggccccacccgaaagaaaaaaaaaaaaaggctttttttttagctaattggaaaggaagtttaagcataaaaaatttcctcaggggggggaaaaagaaaaaaaaggggggggttttcctttccaactccacacggtcaaaaaagggggtgggtcccccccaaagccttaaaagcaaaaggagccgcctttgggccggaataaaaatggcccgaaaagggggacccattctgggg

SEQ ID NO: 38100 - DNA, 282 bp, Glycine max
  Clone ID: PAT_MRT3847_134404C.1
ggggcgactaaaaatcccattgaaatttatgtgaaaaattactttacaaaacagctaccactttttggagatactccttcgggtaattggtcccatttaaataaaagacagatttttttttttctttggactaagcactttccattgttaacctgaaaaaaatggtgcaacaaatttttggtcaaaattcctgttttaaaatttctagaccccttcccatgaatcactttaaaatatgaatcctgtgggtcggggaaactaccccttttgactccctctttt

SEQ ID NO: 38101 - DNA, 338 bp, Glycine max
  Clone ID: PAT_MRT3847_134405C.1
tgcacgcgcatcgcacagcctaggtaagcggctcgagcgcctcgagctcgttcaacgatggaagctgctggtgttcgggatgaggacgatgacgtggaggtcgagtctaacggaactaattcgtgtccaaggaactccgctgcacctacgccttgaaatggaagcacaggctaacctacatcgatgtcggtgatgaacaagaattgacggatgtcctgtgaggtattgctgccaatcatgaatacgatagcactctgtccgcggattcgtacacaaccatgtatgctgaatggctttttgggctgatgtgctgtgttgggctcctgatgtatggatta

SEQ ID NO: 38102 - DNA, 328 bp, Glycine max
  Clone ID: PAT_MRT3847_134406C.1
cgcatactactacaacatccagtccacgtacctcggcttcattggcggcgtctacgacgcggactggaacgcttccttcgacttctcctaacatgacctttttatcgtacttgaccaagctttagctctcaagcgcaaataatatccttcccaaggccttctacaacccaatctccccaagctggaccaactaatcgacttctacgatcacaagctgtaaccgaaccagcttcgctacttggatgaaatcctacgcctccagggactcaccggtgacattcactgaatctcaaccgattctacggatgaattctattttgacaggtat

SEQ ID NO: 38103 - DNA, 775 bp, Glycine max
  Clone ID: PAT_MRT3847_134407C.1
gtcgaccccctccctcacaaattccgttgatttatttttcccggtaaagttcaaaaaccctaaccccgattcactctctccgactcttacattcggattcgtaaccgaaaatcggatggagagaagtgttgattacagttcagaggaggaatgcacggaggattatcggcgtggaggataccacgcggttcgagtcggcgacgctttcaacaatggccgttacatcgtgcagtccaaactcggttggggccatttttccaccgtctggctcgcttgggacactctcaattcgcattatgtagcccttaaaattcagaagagtgcacagcactatactgaagccgcgatggatgaaataaagattctcaaacaaatagctgagggggacccggatgataagaaatgtgttgtgaagcttttggatcattttaagcattcggggcctaatggccagcatgtgtgtatggtttttgaattcctgggtgataatcttctcacccttatcaaatatagtggctatcgtgggcttcctctccccatggttaaagaaatctgttttcatattttggtgggcttggattacttgcatcgcgagctttctgtcattcacactgatttgaagccagagaatgtgttgcttctgtcactgataaatccatctaaagatcctaggaaatcaggtgctccactcatccttcctaacaccaaggataaggctgtgtccaataatgggactaaccaagacaataaaattttgaatggagatccgatgaag

SEQ ID NO: 38104 - DNA, 350 bp, Glycine max
  unsure (1)..(350): unsure at all n locations
  Clone ID: PAT_MRT3847_134408C.1
gcaccttttcttttcactctcagtctcttatccaatatgacggaagaacggaacgtgcgtaagacacgtgtgggggacnttgtccttgacttccttattccttacattgaccaccccaaagacccggaaccccttttccaagttttttaacccttgttccaacttgaattggttaacccgaaggaccttaacattgggcttttgtataacaacaacccgggttggcttccaccgccgtttccccaacttgaggtcgttaaacctaaaggcaaacccccaacccgaattgttaacttgattccccgagattggggccggacccttatttccttggttaaaaaaaattttta

SEQ ID NO: 38105 - DNA, 400 bp, Glycine max
  Clone ID: PAT_MRT3847_134409C.1
gggccagtgtggaaaatgctttagcactgaacgttcatccaccagtgatgatagctccccatctagccatttcacaaatgcttctacttctgaaatgtctgcatatgtggctgattctacctctttgagtagtaactgatgaactccctttgtctttgaacttctgattgtatctgttccgtaagcctcacatagacactgatatgacaacttgacaagactattttttttttatccgtaagaatacaagagagggttagaagattacagcaactcatatactctgttcaactaactgagttagatccccttcacacatgacaacactataataccatgtataaaattaaaacaaatgtaacataaaacacaaatactttatcagaagagaaaattgatg

SEQ ID NO: 38106 - DNA, 244 bp, Glycine max
  Clone ID: PAT_MRT3847_13440C.1
agatttggagggtgtcactcacaaggtgtattttgatattcaaatccatggcaaagtagcaggtcgcataaacatgggcctttttgggaacacagtaccaaaaactgcaaaaaactttagggcgctttgaacaggagagaaaggagtgggaagaacagggaaggctttgcattataaagggagcacattccataagattatgccgagctttatggtccaggggggagaaatcacacgaggagat

SEQ ID NO: 38107 - DNA, 258 bp, Glycine max
  Clone ID: PAT_MRT3847_134410C.1
cgagcaatagcaggaactagcagtcagttgtattcttacgtaatttgctgcttattccctacccttaacgctatcataggtcacttcgatctatctggcataggcgataaaagaagcatgtgatgccgaaatcaagcttactagccgaaccccatgaaagttaccgtggagttcatatcacatgtcattagggcaatgagaggctccaacaacgtaagaaggggcttatctaaccaatacgatggtgcatgcttggcg

SEQ ID NO: 38108 - DNA, 397 bp, Glycine max
  Clone ID: PAT_MRT3847_134411C.1
ggctcgtgcatatagagtgatcgtgatggcaccaaaggcagagtagtagccagcggagttgttgcccgcggtggtgaagtagtcgacggagggtgacaaggctccggcggagttgtagccaaaggccggattgtagcttccgaaggatggaagcgccggcggagtatggtagtagttgttgagatacacgaagatcgtggtgacatacaagatctacatcttcaaggttctgaagcaggtccaccctgacattggtatctcatgcaaggccatgggaatcatgaacagcttcatcaacgacatcttcgatatgcttgcccaggtatcttctagacttgcccggtacaacaagaagcccaccatcacttcaagggaaattcagaccgcggtcaggctt

SEQ ID NO: 38109 - DNA, 686 bp, Glycine max
  Clone ID: PAT_MRT3847_134412C.1
ccacgcgtccggcaaaaggtcgcggtgaaatcaagcaggcttcccacaccgcaggatggtcggcggcaaccatcccaagtcttcccatcacaagaaacctcccccctccgcctcccaccgcaaatcccgctgggaacccaactcctcctcctccgccaaatccccagccgatcccaagtcatccaccgccccttcccccaaacccaaccccaactccaaccctaaccctagccccaaacacctccccttccccttccccttcccggaccccgcccctgcccctctgggtactccccctcctcccgcctatggcttccacatgctcgaacgccgcaccatcgtcctcgccgacggcagtgtccgctcctacttcgccctcccttccgattaccaagacttcgcccctcgccctctcgacctccctccccgcttccccccgcccctcagccccggtcgcttccgcctccccgactactcacacgccgccgccgccgccgccgccaagcgaaagtacggcgacgataacggcggtcccagggatgacctcgcgaggcagagggagcagcttctccgtaacgccaatggcctttccagggagcaattctccgcgggccccagtgagttgaggccctcgaagcactccaggctcgatgggtcgaattctactaggcactcgcaggtggatc

SEQ ID NO: 38110 - DNA, 311 bp, Glycine max
  Clone ID: PAT_MRT3847_134413C.1
tggattaacaaagtatgtggccgtgatggtttggttgtttactaccaagtgacaaagttccttacgactcacaaacaaagcaaaatgaaagtttaaaaaaatgcacttaaatatacctccttccaaggagggaacaaaaatgagaggctctgcatccaaaatcctttacggactggtgaggaaagtcctgcttatccaactgaaaaagcttcatgaagcacctctactagggccgaattgtagcccctaaaggtgcataattgaaaattcagcatatgccccataatgaggctcaaaatgctccacttgca

SEQ ID NO: 38111 - DNA, 723 bp, Glycine max
  Clone ID: PAT_MRT3847_134414C.1
aggcgggagcagcctcgtataaagcggccaccatcgcctgtagtgctttgtgttccacgtgcacctcgtccacccccaccatcccctgtgagtgactccaggaaacacaggggttttcccactgttagatctggtagttccagccctaggcactggggaatgcgaggctggtatcatgatgggagtaattttgaggaagcatgtttaagaatggatggtgctgaagttgtgtggccttggagaagtaataatcttgcggtgcgacctttgattcagcctttacctgctgccttgctgcaggaccgcctgattgcattgtcacagatagcacgtgaccaggaacacccagatgtcaccttccccttgcaacctccagacttacaaagctgttctgcacagagtgcatctttaactttgatgcatggcattctacatgatgagattgactctttctgtaaacaggttgctgcagaaaatatggccaggaggccttacattaattgggctgtcaagagagttacacgatttctgcaggttctgtggcccagatcccgtacaaacatatttggttccaatgcaactggtatgtcccttccaacaagtgatgttgaccttgtggttggtctccctccagtgagaaacctgtaacctattaaagaagctggaatactggaaggtcgtaatggaattaaagaaacgtgtcttcagcatgcagctaggtat

SEQ ID NO: 38112 - DNA, 484 bp, Glycine max
  Clone ID: PAT_MRT3847_134415C.1
cgcccacgcgtccgttttgatttttctacgtcagtcagtggccctgatcattgggttgacatggaattgatctattgtttgaccttggacgggatgaatgcatggattccttgtggagatgagatgatggagcatgcagcaatggaatatgaggctggaaatgacatcaatgattttcaattgtgttatggagttttcttggagcaacaatatagagagactaattatctggcacaagggccatgtgatgcagtattctgaaattaattaactgtagttatatatatatatatatatatatatatatataaggaaacagaagagaacatggattactttgtaattaattttgtgaaggtttccttaactatgttattgccacaccttttagttttatcttgtctttacttaatctccctttactttcatgtaattgcctagctgaaaattaatcagaatggattttccttggttcctctatcat

SEQ ID NO: 38113 - DNA, 776 bp, Glycine max
  Clone ID: PAT_MRT3847_134416C.1
ttctttacggctgcgagaagacgcagaaggggagaattagggtgagaacaaaattgcgaagaaccctaattgattgattgattgattgtcattcccatggcgtcccgaagaggtggagtctcactcccagacagaccaagcaacaactcaagctccgtcctcgcgaagatctcgcgctcctccatcgtcacccgcggcaaggaagccgccggcgacgccgcattcgtcgccaagaagctcctccgcagcaccggcaaggccgcgtggatcgccggcaccaccttcctcgtcctcgtcgtccctctcatcgtcgagatggaccgcgagcagcagctcaacgacctcgagctccagcaggccagcctcctcggcacccccgcccccaaatgaaaatttgaggttttctctctgatctgattatccctgtttggacactctgctatatgaacttctgcttttagggtttccggttgcaataattttttttaccgtttctagattttgattataaaaaccttactgtgaggaggagttttgtgtattcttacgattaatatatgtcattagttgataaaacgcgggttgttgagtgtaatttacctgctacttggtagaatgattctatttcagcatgcgttatgctagtgctgcgttattctattttgtgatgaacgtgtcaatgggattcgtatactatctagaatgatattgagctacaattaagatcgtattccaaaaaaaaaaaaaaaaaaactcgagacagttctctctctctc

SEQ ID NO: 38114 - DNA, 664 bp, Glycine max
  Clone ID: PAT_MRT3847_134417C.1
gaatcactgaattcacgtgtaaattaatcttataatcaattactacaatgcaacaaaaagaaaagcagcaaagcttgtaaaagccatcatgaaggaggatccaatacccttgaaggaaaggaaagatgaagttgctgaagaaggtacaagtccagtgaagccaatatcatatgcaatgcttccatcagccttaaacaatccaaagtttctctcagatgttgagccaggcttcaaattctcattaaacaaggcaaagacataagctttcaccactttttttggcctataaggggtccctttcttcttgagcaaccgcttgcgcaaattaccattatatgtccttgcattttttattgttgctccagcttcattatcatccccatgagaagcccaaccagtctcagaaacaataacatccatcttgtcaaacccaaccttctccaaggcagcataagctgcatcaacctgagcctcaaacatgttactataatgcagcttagtctttgcatcataaatcccgggattttttaggaagagggcatagttaagatcaatatgttgtggatcattcttataggcaaggaagggatatgcattaatgaagaaaggagtgccaatttgtgagaagaattgtaagagaggtttcatataaggaggacatctt

SEQ ID NO: 38115 - DNA, 181 bp, Glycine max
  Clone ID: PAT_MRT3847_134418C.1
gtccgtgctctgcacacattttcttagctctttactacaatacatctagaccacactctctgattgtacgaagatgggggctggcggccgctctgatgttcatgccgcaaacaggaagtcataggctgactcttcgaagcagactccagttgtaaaaccgtaacttaggcggacccagatt

SEQ ID NO: 38116 - DNA, 254 bp, Glycine max
  unsure (1)..(254): unsure at all n locations
  Clone ID: PAT_MRT3847_134419C.1
atagtctttaataatcaagatagtttattattctttgtncttttctggttgtttccagccttaattccattgtttcaagcacagttttgagtattaggacaggacaatgtgtatgtgaaatacactacaatattgtcatttgatttgcatctaaagtgagattgtttccttcttgtggactttgctgtattggaaagaggctgcttgctaagaatcaagctttataaacaattgtgattaggcagaagctattc

SEQ ID NO: 38117 - DNA, 2364 bp, Glycine max
  Clone ID: PAT_MRT3847_13441C.1
caatagaaaaaaaaggggtattctcatatacttcatatatttatatatctatatctatttggcggcatggccgagtggtaaggcgggggactgcaaatcctttttccccagttcaaatccgggtgtcgcctaagcaataagacatttgaaatgaaatattgtattacgttttttatagaaaacttttttccaatagaagcaagctagggaaaaggagtcttgagacttgcgtttgattataaattctaagcatcagtaggtttattctaaaaaatgctgtatgtaaatattttcgtctcggattcaagtagtgaaaaggaatccataaatttagaaatgatagttctttcactacacaactattgtagtgtccgtctactgactgggtctcgaattagattggataaggataagttggatagggaattccatttttagttagagaacgggcggaagaaaaaccttgtatacagactgatggaaagtctattagtgcttccacatttcattaatattagttagattagttagattgaatagtttttaatttagctaattcgctttcttaatcttaaaagtatatatatatataattatataatataaatataatttcttatatatataatttaaaatattttacaaaatttttttattctaaaatcgaatagaaaaaagaaaatctttcttttcactaacctctagtaaaaaaaatgaataggcaagctatcttccgattattttagtttttttagagaacgaatcgggagacattacgaaattttttcaaatagaaataagaaagagtataagtatgcaaatgaatctgtcttgattcttttttttatacttaatgaaattacttaatgaattaatgaaatgggggggtaaaacagaaatcttattattcctacctgttagtaacattcatttacttaaaacttccgaggatgtttccggatgtgttgtttatgcttaatattttcctattttactaaaaatcatataaaaaaaactttttagatgttctaatagaaaggattcttgtttttcgtcaatggtgttagccctgaatcctttttttgactctctaacagtaattccgctattattatagtctttttagtgaataatacaaaagaaaataatagaagaaaaatttttgaataataattaaaaaattccttcatatttttagagataggagacaaaatttacatggatatagtaagtcttgcttgggctgctttaatggtagttttttcattttctctttccctcgtagtatggggaagaagtggactatagggatactcaaaattgagttaagggatcaaagtacccattttgttttctacttgggtttttcaatttcttaactttaactatttgaattaaagtatttcatttatactaattaattgagttcaaatataaacaaatataaaatagatctgcatttcagggttctattatattctagtagtgtaatgtattctatgtatatgtatattatagaaattgaaaatactctttcaatcaaacaaagatttgaattatatctatattcgtattttgagaaaatcaagagaatccaatagaataggaaattgcttcctattccaaccgaattcttcttaaaatttctctttcgatgaactgacgcttaaccaggttttatatatatcgaaaatgggggaccgcgtaatccccattcctgcccccctttttctttttttaatatgataccgggattgtaaaaagaatccgaagaataagagttgttttttgattatttcagattcattggaatcaatacaaatcaaatagatgaaactaaaaaaaaattggacgcaattctcagtcagatagtagaaatcaaatatatttgatttctactatctggattacggtgattgtagtccgatcttttttttttagactaagaccaaaaattgaaaacctttttcattttttttaatcattgattacattgataaaaatgaagaagtcagatttcagtgaaattagtcactttgacttaccgtttttacgtaaattataagtaaaaaagcagtaggaactagaataaacagtgcagtagcaataaatgcaagaatatttacttccataatctttattatgttttatttctcttaaatttccaataaaaaattcgggatttaatcccatagagatgataaatctttcatcgataattaattcaacaatggtataaattggatttcgatgatatcaaattggatcaatatcacgaataacaatatcttagttatcaaatcgactcatcgtccccttctgtcgtcttctcgcagccgtacggacgcgtgggtccggctcgag

SEQ ID NO: 38118 - DNA, 259 bp, Glycine max
  Clone ID: PAT_MRT3847_134420C.1
gtttcttcgaggcttaagaaacctcgcagaagtcaaagagaactcactctcagacactttggttcacagtaacctttcacttctattttgaatctgtctagttccttctcccatattatagtgccctcttatgcgaagttacttacgtttcaagcctagattactgctcagacttgtgttactgctttgtgaagttgtaagaaaaatggaggctgatggaccagttatagcgaataagctacgggatgtgctgaggctc

SEQ ID NO: 38119 - DNA, 401 bp, Glycine max
  Clone ID: PAT_MRT3847_134421C.1
ctgttgcaaagaatgctattctcatgaatatgccaaatgctgttctttcaatgtggagatattctgctggatatctcgtctttgaagttgctaagatgacttcttcttacattaaaagtacagcttcttttttcattgcatttgcaaattcggttgatgacaccatcaattttgaggctgttccccacaagctggtgcagtttggagagattcaggaaaaagttgtattggaattttcacaagaggaatgtcttacagcttggtcaactgaggtgcgtcctgcaacaactctgtgggctcatggttgtccatatatgtatgctatagggcgtgataattcacagactacagtaccagctgattttgatattggcgtgacgttgacaaccatgaacaatatg

SEQ ID NO: 38120 - DNA, 288 bp, Glycine max
  Clone ID: PAT_MRT3847_134422C.1
ggtacaccgaatcgaaggaaccaaccgtcattgagataattatttctgacacaattgtgtgtctattcatgcttcggatggcaatgttgtggcatttctatcacataatcaatgagtatagaactcgatgcttactcaatgctgtgcgtatggatgcacttcaatgcatgggctgtatgagcagattaccttactatccgagtgtgacaatcatgttacaggtgatgcacctatcaaatcgagccattcagactgcttgcatcgtcaagaatcatggaatcatcatga

SEQ ID NO: 38121 - DNA, 484 bp, Glycine max
  Clone ID: PAT_MRT3847_134423C.1
aaaaaaagaacaaaaaaaatgttattaaaagaagaaaaaaacaaacaaagacaagaaacacggggccgggctccctcggttatccaggggtggcggatgggggggccctgggtgagggccgggttcaggaccccggcctggcgggttaatggctctcctgggggcaccccaatggccgtgcttgggccgcgctgacacggcgaaaccccggggacccccctgcctgccccccttgtagcccacttgccttgcggccccgggggcccaacggaagagcccgcgaaaaggccccctcggaagcgcttggccaacaggggggcagcctggaaggcccgggggaccgcccctgaaaccgcgcataaagcggggggcacgcgagggtaacccgcagcacgcccctccgccttgtccccccctcatcgcccgctctttccgatttggggcgtcccgttccccccctttccccggacttccccgagggggg

SEQ ID NO: 38122 - DNA, 450 bp, Glycine max
  Clone ID: PAT_MRT3847_134424C.1
gcacgaggatactggagctatgaaccattggaagaaaaaaatgattagggtcatgtcatgaacattgttctagagaaggtaattagtggcatctatggatggattgagattatttgataggagattgaatattggggcatttgttccaaagtggaatgattatatgttagacagttggtgtatgaacctttttctaatttatgatttcaccaaacttgtatggcatttggtaggatcattccatggtaattcaatctagaaggatactgccattcaaatcatggttggttatgtcgaagttgttaggatttttttttcttttcaaaatttaaaaataaattctttgagaaacttgagatagaagattagattcatctgatcttagactttatcttttttgttttctcttgtaaacaagcatccattttcatctatgactgtttattgttg

SEQ ID NO: 38123 - DNA, 608 bp, Glycine max
  unsure (1)..(608): unsure at all n locations
  Clone ID: PAT_MRT3847_134425C.1
tgtaaaatgtaaccatacaataaatttataaattatcacatactatcattctcgatgataaaaaaataataataataataatactatcatcatcctaaccggtcaaaaacaaaattaataacaaatattaattaattaattaattaattaattaactaactaactaaaagcttgagtggctcccttgggttcttccgttactattacttccctaaagagagcaagggagaagttccagttagttaattaattatttaattaattaattaatatttgttattaattttgtttttgaccggttaggatgatgatagtattattattattattatttttttatcatcgagaatgatagtatgtgataatttataagtttnnnaaanaaaaannaaaaaaaaaaaaaaaaaaaaaaaaaggngnnaaaaaaaggggggggctnggctaacgggcatttaattccggacagttactttggggccgaaacctgttggggggcggggcgcccttataaggttggcgataagaggtagatatattcatgcccgtgcatattgctttcccgtttttttttttgggggcctattacacacaacgtataaaccggaagc

SEQ ID NO: 38124 - DNA, 418 bp, Glycine max
  Clone ID: PAT_MRT3847_134426C.1
cccacgcgtccgcccacgcgtccgcccacgcgtccgcccacgcgtccgcggacgcgtgggaaaaaaaaaaaaaaaaaaaaaaaaaaaaaaaaaaaaaagggcggcagaaaaaaaagaacaaaagataacaaacacaagaaatgcaggggcggtcgctctaaaaaaagagacacttaaatacaattgaatggacgtcgtatttacaacgatgggactgcaaaaaccaagtcgttacccaactgaataaaatggcaggacatggcaaaacccgggagttaccaaaataaataagagggcagcacaaatcgcttttgccaacaggtgtaaaacctaaaaggcgaatgggaatcgccctgtaaaagagtagaaaacccggaaagggaaatggaaacccccatggagaggggtaaaaaggcca

SEQ ID NO: 38125 - DNA, 761 bp, Glycine max
  unsure (1)..(761): unsure at all n locations
  Clone ID: PAT_MRT3847_134427C.1
ccacgcgtccgtgctatttcatttattgttttcgtttgtggatttattggttcttattcgtttcttttggggggattttggtattgcttttattggtggtctcactttgaaaggaaacttccacgcttcctggcttgaatagaatgtaatttagaaaatattttttgttttcgggcgttttttgtttgagcttttttttatggaaaattttgctcaatttagtgaattgggtgtctctttaagtatgttgtgtgtgctaagagatggctttgtcgtacttggaatttgtttattctatgacatgagtttctaagttcaaacggttctctcttcagggcctgtttcaattctctgccttggtagagattgagggaacttgatgtcatcattttttttataggaataaataaaagagtaatgaaggaaagaatagaaaaccaagtggggtgaaacgtaaaggttctttgcgtggttaaatgccttaagtgaactgagaaagttgggtgcatcttttgtgattgactatcatttgacttggctaggactatggcatttctcgcaacgcacaacactttggacttgtattaaaattttcatttttttatcactgtataatatggcaataagttttttatactattttctcattcaccctttataaactgcaaacaaggtaaggatcaaggatccttaaaaattggtgtattgacttgcactttgtttccaggctcaatgcttcangaaagggctttttttttttt

SEQ ID NO: 38126 - DNA, 1721 bp, Glycine max
  Clone ID: PAT_MRT3847_134428C.1
gtctctctctcactcgcgccctcccactccttccaaaacctagcctgctgcaaatccaccatctccgccaaccccctccacgcccttctctccctcggcccctaccgccctcgtgactccttcaatgtcgccgccctctgccgtgccgcaatagcttggttccgcaacaacctatggctcgtcgaaaatgagcatccgtagaactgatgcaatggatgtattggatgcttgcagtctggtaaaaatcgaagaccagggagagatgacattgatttgattgggggaagacgaaaaccaaatcaccgaagcagtcctccagttttcgttagacacactatctcctgttttctttgaatctaacacacagccgatcccacactctcgcgttcatgataatgaaatgaaaaagacgaattgtcttgtaatatgtatgaatgagctaagtggaatgtaaagacgtgcctccttacaaacgaaaccaaagcatgaagatgaattgctactggtggcatgccctgataatgagtggttgtgtgttgggcttgtgcgtgggcataggaggttgtgtatgtgtggtggagaacgagaatggaagaatcatcattgatattagtcacaggtaccatcctgatatgcctgcctgggaatccaaggatagccttgggcagtttttgtggcttacaagaagcatggccaatggttctctggctaacttctcccaattcaagctccccgctcacagcggcacccatgtcgatgctcccggacatgttttcgatcactatttccattctggctttgatgtcgactctctcgatttactactccttaatggccctgcactattagttgatgttccaagagatacaaacatcagtgctggtgttatgaagtcattgaatattccgaggggcgtacgtcgtgtgctcttccgaacattaaatacttacaggcggcttatgtatcagaaggaatttgacacaagctatgtgggattcacagaagatggagcaaattggctagtggagaacactgacattaagcttgtgggaatagattatctatctgttgctgcttacgaccacttgattccagctcaccttgtttttctgaaaggcagggaaatcattctcgtggaaggcctgaagcttgatgatgtggcagcaggaatatatacggtccattgcttacctcttaggttggctggtgctgagggatcacccataagatgcattctcatcaaataataagtcaacagctagcagtccaaatgccgacacgacatgcagcagtggtttatgcttggaaatgggtcttaattacgagcataaggttgagtttcaatgtagttttcttaaatacgaataagttggaaaaataaatataaagtggtgtcccgtgtccatttggagcaaggtatcataaatgcttagcaaagtgcataaacgctcctacaaatcatttcagaaataaagcagtatggatattggatgatatataaagtactatgtaatatgcagtgaaggtataacaaatgtcaaatagcaattattcttgcgtacttttaaatacactatatggatggatgtttggaattattattttttaagaaggatgtttggaattgtttaaataacagtaatatgtaaagtttcttttgaaaaaaaaaattttttataaatttcttatactatattttttattttgggggggggcttttt

SEQ ID NO: 38127 - DNA, 320 bp, Glycine max
  Clone ID: PAT_MRT3847_134429C.1
gcaatgtaaactttgggatctataaacatgttaaagcaaggagggatccgattcagaagcagtccctttcttatatctaacgtgcacacttatgcacatactcaatgatacagatataaacacagacaaccataactacggagaaccaccaacaggcccatgaattgcattcaataaaggttgaaaagctcagactacaaagctcatgtttggtccgaaatcacctttaacttgcactcacagggcaacatcagagggcatctagcaacacatattggtggatattctactactagactggcatttacacactgtctgac

SEQ ID NO: 38128 - DNA, 528 bp, Glycine max
  Clone ID: PAT_MRT3847_13442C.1
gggaaacaaaagcagaaaaacacctttggacttttttttttttcctggcacacccttcgcacaaaaacaaaaacaaaacttatttggccctacctttagcattttttatatgacataaataatcctttaaaaaatctaccttggcttaaccatcaaatattggacaagtacagtaaaaaaaaaggggctgccgaaagccccaaatgtaattggaagggaaaatagctaactaactactttggttcccccacaatgggggggtaaactaggggtcactctcggtttggtttggcctggttcgggggaaaaacggggccatttataatatcaatcatcacacattggttttactggatgggttagggtttaaaaccctgtttttccattggggaatttttatcatcacacatttgaactttggggcaccgcaaaaacaattacctgagcccactgccttaaccttgttttaaccggttgagggttatcaccggtggtaaaaatggcggaatggggactgcccggggggca

SEQ ID NO: 38129 - DNA, 464 bp, Glycine max
  Clone ID: PAT_MRT3847_134430C.1
ctagcaaacatagatccccctcgaacgagccatcaaatcctcattagatcaatcactgcaaaatacaacacgacgtaaaaattaaataaatgtcaggccacgataatacctcattaaaaaaagcccagtgtgaataggacgtgctgaggggaagcatagagatctgtgatgcacataaaagcccccacaagataacactgcaactgagaatctgcgctggccaaagggacagcgataggacataatctgatgtctccatgaatgaccggcatatccatcatacataggcttgagatgccccagagattacgcccatttaagctggagctaggccatgttgtccagtcattggcagaatagactgacctgaaagaccagatacagcaggctgactcaaggacagttggggctgataagccaacaactccgaaggagaatacccttggttcatacctgcaatggga

SEQ ID NO: 38130 - DNA, 358 bp, Glycine max
  Clone ID: PAT_MRT3847_134431C.1
caaggaactagatgaaaaaacaaagacacaattaactaactgtttaaaaggcaaggaaacaagaagacccctctttcatgcaacgggaactgtaaccctcatcaaaacgaagaatcaatctataaggccccactgacaacgcctgtaccctttccatacccacagcccaactttcacattgtgaccttgcatcccccatcagccaccggcagcatggatcgtgtcaaggaccatgagacccctgctaacaggggaaaaagcctttatagagcaccttgcctatccacttgcaccgcctacatcacgagcgtgcatatgaccactatggcctccaaaaatgcgctgccggtgaccaata

SEQ ID NO: 38131 - DNA, 241 bp, Glycine max
  Clone ID: PAT_MRT3847_134432C.1
ctgagattgctggtgtggtggtttccgttgaacccaagccaattatgggtgcttggactgcgtgctcgtgctcacacaaactacagcacgaagtccatgagcgaagatggtggctatgcagtgatcagagcagcacattgacaagttggggtaggagcgcaaagactcacattgctgcttatggagaacgcaaccaacgtgctgcgacaggccgccacgagaccgctgacatcaacacctt

SEQ ID NO: 38132 - DNA, 1258 bp, Glycine max
  Clone ID: PAT_MRT3847_134433C.1
gagcgagcggtcccggcacgagtcgggtcttcagaactcgaacccgccacaaccccagaagaagaagaaatcatgacaaagctcaaaaaccctcaacacagtgtaatcgaagaagcgcttatctctctcagaaaactaacgagaataagagaagaaacaaggcttcaactttgcactcctcggttactctccgcgttacgttccctcgttttgtcgaagcacgtgaacgttcaggtgaacgctcttgcatcggtggtgaacctatcgttggagaaaagtaataaggtgaggatcgtgcggtcggggatggttccgccgttgatcgaggttttgaagtttggatcctctgaggcgcaggagcacggtgcgggcgcgctgtttagtttggcaatggatgatgataacaaaaccgcgattggggttttgggtggtttggctccgttgcttcacatgctccgatccgagagcgagcggactcggcatgactcggcattggcgctttaccatttgtctttggtccagagtaaccgatccaagatggttaaactcggttcggttccggttctattgaatatggttaagtcgggtcacatgacgggtcgggttttgttgattttggggaacttgggttccgggtcggacgggagggccacgatgcttgatgcgggcatggtggagtgtttggtggggttgctcagtggggccgagtcaaggagcgggtcgactcgagagagttgcgtgtcggtgatgtacgcgctgagtcacggcgggttgaggtttaaggcagtggcgaaggtggctggggtgatggaggtgatgcaaaaggtggagaaggtggggagtgagagagctaggaataaggtgaggaagatattggagattatgagggccaaggaggtggaggaggaggatgtggattgggaggagttgctcgactcgggattgccttgccggactcggagtagactcggtggtgggttggatgagtcaactcctaactcggcccagttttgagtacagttgaattttttgttaaaatgtaaatgtttggttttttaagattaggttgttattaaggttcttttggttcacatgcttcttttggatttttcttttaaaaaaaaaaattccattgtttttatcatttttgaagttggatgaagaattgataaatgggagtatttttttttaatttgatttatatgtattatcagtgtaaattgttttacttaattataattttgattttcttagtttt

SEQ ID NO: 38133 - DNA, 2257 bp, Glycine max
  Clone ID: PAT_MRT3847_134434C.1
ggaggtgtgaaggacaacgtaacaataaagacaaaagggacccttcacgcattgtcgacaacgtagtcatgaacaagtcgctgaaaccagaagaacaagggtccaaacattgaaactcattcccattgaagctgaacaaccaaccccattttggttctgattttttcagtgctccaagtggcaagttttggaattttctgggggcttcgtctggattattcttcaatttgaaaacccaccaagggatgagcgtttcctcgttgcaatgactacttctggtgctgacctggttttgaagggtcgacttctgtaaattcttcacccctgcagttcttctccatgatgtcactttcacctagcttaggttctcccaacaatctcttgttggcaagttttggaattttctgggggcttcgtctggattattcttcaatttgaaaacccaccaagggataagcaagcgtttcctcgttgcaacttgcaacttgcaatgcctacttctgttgctgacctggttttgaaggatcgtcttctgtaaattcttcacccctgcagttcttctccatgatgtcactttcacctagcttaggttctcccaacaatctcttgtttagggaaatgaaatccgaggaaaggggtttgtacttgatccatttgttgctcacttgtgcaaaccatgttgccgcgggggtccctgaaaatgcaaacaccacacttgagcaaatttccatgcttgcttcccctgatggggacactatgcagcgaatcgcaacatattttatggagtcgcttgctgatcggattcttaaaacatggcctgggatccacagagccctcaactcaaccagaatgactttgatatccgacgaaattctggttcagaagcttttctttgagcttttccctttcttgaaggtagcatttgttctcacaaatcaggccatcattgaagcaatggaaggggagaaagtgattcacataattgatctcaatgctgctgaagctgctcagtggattgctctccttcgagtattaagtgcgcatcccgaaggccctcctcatttgagaatcaccggggttcatcagaaaaaggagattctggatgaggtggctcatagactaactgaagaagcagaaaagttggatataccgttccaattcaaccctgtggcaagcaaattagaaaatcttgattttgacaaacttcgggtgaaaactggggaggcactagcaataagttccattctccaattgcatacccttttggcctgggatgatgaagccatgcagagaaagtctcctcttctgttaaaaagctcaaatggaattcacctgcaaagagttctgccaatgggccaaagcacattgggtgatttgcttgagaaagatatggttaatgggtacactccaagtcctgactcaacctcatcatctccatcatctttaactacttccaattcaatgaaaagggagcgctttcttaatgccttgtggggattatcaccaaaggtcatggttgtgacagaacaagactgtaatcacaatggtccaactctgatggataggcttcttgaagctctatactcttatgcagcattgtttgattgtttggaatccactgtctcaagaacatcattggagagattaagggtggagaagatgctttttggggaggaaataaagaacatcattgcatgtgagggatctgaacgaaaggaaagacatgaaaagctggaaaagtggttccagagatttgatctagctgggtttggcaacgtgcctttgagctactttggtatggtgcaagcaaggaggttcctgcagagctatggttgtgaaggatacagaatgagggatgaaaatggttgtgtgttaatttgctgggaggatcggccaatgtattcaatatcagcttggagatctaggaagtaagagaattagagggatatattgatgttttttcttttcttttctttctttctttttatttgtatgagtgttttattcttatggtaatgactgttcttcaagatagttttttagagatactctttattcattgcctggtaaaactccatcaagtaagaaatttgggaagacaaaaaaagggtagaaggacggaagaagtagaagtcttaatcggggttctgtttatggtttcattttttgcagctgatcattttattttttatgaattatgagctcctgtaccctaacttgtacctagtatattacataatataatgtgtttttgttt

SEQ ID NO: 38134 - DNA, 275 bp, Glycine max
  Clone ID: PAT_MRT3847_134435C.1
cttgttgtgtgggtaaaacaacacataaattgatacacccttcaccggcgaccccggaaacataagaccacaaaaaacaaggccggcaccaccggggaggcaactgcatgtgatggggcgagagaaacctaacggctttttatacaattcgacatattctccttcaggggggtttgaaacataaacccggcggggcttgcggttaaatagggagaggccttccaaaggattttttttttttttccaacgctccgcgtttgtgctacttggatttg

SEQ ID NO: 38135 - DNA, 191 bp, Glycine max
  Clone ID: PAT_MRT3847_134436C.1
ataaaagggctcaatgacagaggcgcaaattgcagagggggacaacggcaaaagaacgaatttagtacaagctggccaacattggcacccagaggatacggtagaggaggagcaggacagacccaacatggttgacgccagactgagacagagaggacatccgcagagcaaagaggtgcagggtcagatgg

SEQ ID NO: 38136 - DNA, 290 bp, Glycine max
  Clone ID: PAT_MRT3847_134437C.1
gtcactcagtttctgagaagcggtttctacccaatatcctcccccaacaaaccaccttttctacttttttttttagaaaaaaaaacagattaatgcgattttcaaggcgggggggcaagaaaagagggcgcgaaaagccagaagtctccctgttttctccacaggggtcttaaccccaccattaatataaccaacgccggtctttttgttatgaagaacaaaaaaattcagcccgagactaaaaaacaacttgccagctaaaaccaaaaaaggcggcggggggggtaaaa

SEQ ID NO: 38137 - DNA, 336 bp, Glycine max
  Clone ID: PAT_MRT3847_134438C.1
cgccagggtttcctccatctgaacgaacatgccctcctccacgttctagaaggagattgacaacaaccacactgttgtgcgacgcgatggcccactgcatcgaccttctcagtaacgctggcgatgacatgcatcaatcctttcgcaacttggaccactctgaactagacaagtcgagcaattacgcctatgatctcaacgtcaggatcgcaggtactctcgctcacgaaaagacatgtttggatgagttcgagaacatcaacaccgaggctggcagcgacaaggtcagggttcgcaacacttctttggatctcacatgatcccattggtcatagt

SEQ ID NO: 38138 - DNA, 475 bp, Glycine max
  Clone ID: PAT_MRT3847_134439C.1
aacttcttatagcccacttacaaaaacgtgtatcttgataaacaaggcgacatctggattttattgcacaaatgcaatatacttatatttccttccccttcacattattaaaaagtctgaaaatacaacgagtcccgaccaggatcagaggaaatgaaatgaatgttgaatttcttctaccccacgactacagatttgtatgaccaacctacctttgcctcctattaagtgtgagcaaaacgattttatataaaataggttcaaattccaagagggttaatcccccatttcatataccaacctccgatgcataccaacactcaacgtttatatataatgcctccttcgaagatactatatcccacagctatataaacactgctccaaaatagatcccacaccctcatgtacccttatatcaatccacagctgctagtctcctttcagcacattaaattcaaagggtaccgactct

SEQ ID NO: 38139 - DNA, 672 bp, Glycine max
  Clone ID: PAT_MRT3847_13443C.1
atcatgtcttttgaattctagcttgcaaaatgtgtggagattgggctgccggaaattgtattgttaatagtattttcacagtacattcctcatgtgatgaaagcagaaaagcctatctttgatagatttgcagttatattctcagtgacaattgtgtggatttatgctcatcttcttactgtgggtggagcatataaaaatgtaccacagaccactcagagtacttgcagaactgatcgtgctggaattataagtggtgcaccttggattagaatcccatatcctttccaatggggagctcctacatttgatgctggggaagcttttgctacaatggccgcttcatttgttgcactagtagagtcaacaggtgcttttattgctgtttcaaggtatgcaagtgcaactccattgccaccttcaggtcttagccgtggtgtcggttggcagggggtaggtattctgttatctgggatctttgggacagggaatggatcttcagtttctgtagagaatgctggactcttggctttaacgcgagttggtagccgaagggttgttcaaatatcagcaggattcatgatctttttctccatacttggaaaatttggagctgtgtttgcttcaatcccagcaccaatagttgcagctttatattgtcttttctttgcc

SEQ ID NO: 38140 - DNA, 240 bp, Glycine max
  Clone ID: PAT_MRT3847_134440C.1
tttctacatacgtcaatgggcgacctggtgagagagtgcatatttggaaagccaaacacggagactcatgacactgatcaactctcgttgatggggactggctctctccattctgaaaacagggtaacgaggaattgctagaaaagtcaaccagaatgtgcttgtagactattgtgaatgaactaatatctactgacacattctgcaagcgaatctgggctcccgcatccaagggaaggc

SEQ ID NO: 38141 - DNA, 562 bp, Glycine max
  Clone ID: PAT_MRT3847_134441C.1
ggctcgaggggttggtgaagctgccaagatgttaggtgagatgatccagataggcttagttcctgatgctgtttgttacaatgaaattattaaaggtctctgcgatgttggtcttttggatcgagcacgatctctccaacttgagatttctgagcatcaagggtttcataatgtttgcacacataccattatcatctgtgacctgtgtaagagaggaatggctgagaaggcacaggaaatatttaataagatggagaagcttggatgttttccttccatagtgaccttcaatgctcttatggatggactgtgcaaggctggtaaacttgaggaggcacaccttttattgtacaagatggagattgggagaagtccttcgttattctttcggctttctcagggttctgatcaggttttagatagtgttgctctccacaaaaaggtggagcaaatgtgtgaggctggacaactttggatgcataccagcttttcattcaacttgcttgtagtggggttatgcctgacatttggacgtacaatgttctaataaatggcttttgca

SEQ ID NO: 38142 - DNA, 756 bp, Glycine max
  Clone ID: PAT_MRT3847_134442C.1
atccacgcagcagtactttttcagtttaagcttaaaggttgaccctaaagggtttgcacgcgtggtggagaacatgccacaggtggttagtctccaccaacatgtgattatgaagccggttgagtttctccttggaaggacgatactggcacaggacgtggcaagtatggtggtcaagtgtcctcagttggtggcactgagagttgagctcatgaagaacagctattacttcttcaagagtgagatggggaggcccttgcaagagcttgtggaattccctgagtattttacttatagtttggagtccaggatcaaacccagataccagaggctgaagagtaaagggataaggtgttccttgaattggatgctgaattgtagtgaccagaggtttgaagagaggttgcagggtcattacattgaaactgagagtgtaggccccagattctgtatgggagggaaattggggctaccagggaatgccctggtgtcagatgaggaagaggagagtgatgatgaactattatacagacgaactgtttctctttagctccacaattttatttttttgtttttgctacagttggtaaaactatcgcaaagtaatactgtcatcaattggagaactaagttttatctaaaaaaaaaaaaaaaaaagaactcgagactagttctaaacctcgctgaccttctctgtgtggcctctcaatgaaccaacgaaacgggacggtgctcaagctacttttgttgctacaa

SEQ ID NO: 38143 - DNA, 1026 bp, Glycine max
  Clone ID: PAT_MRT3847_134443C.1
ccacgcgtccggcgcgcgtccggctgcgagaagacgacagaagggatcgcatttcatagcactcaccctcattaccaacacgaaagcatagccaaaaccttttttcgaagtctctgattttcctaatggctccggcaaaggcagagaagaagccggcggagaagaagccagcggcggagaaggcaccggcggagaagaagccgaaggcggagaagaagatctcgaaggaaggagggagcgagaagaagaagaagcgcacgaagaagagcgtggagacctacaagatctacatcttcaaggtcctcaagcaggttcaccccgacattggtatttccagcaaggccatgggcatcatgaacagcttcatcaacgacatcttcgagaagctcgcccaggaagcgtcgcgtttggctcgctacaacaagaagcccaccatcacctcgagggagatccagaccgccgtgcgtctcgtgctccctggtgaattggccaaacacgccgtttctgaagggaccaaggcggttaccaagtttaccagctcttgaattagggtttgttaggcggttgtgttgcagatctagggttttctgtggatttcttttcttaaaaattagtttgtagatgtaatgatctgaacagttgttaatggaaggtttcgtttgaataattataattgcatgactgtggattactttttcgtcctttttgtttatggtttgggcggtgattagggttagggttgttggattgactcttaagatgtataatagataagaggagtgtggggttgtgtcaatttgatcatatcgttccctaatttccgctctgtttgccgcaatttgaagaacaacagttcacactattctttgttttttggctattgttttctgattttcgaaatgaacgccgttttgaaggatgtggttttcgttgtttcggaagatcggtgagggcttgaatgtattttggctgcttaatggacgtgctgcaataattatcgcagcctatttttagaaattgattctc

SEQ ID NO: 38144 - DNA, 265 bp, Glycine max
  unsure (1)..(265): unsure at all n locations
  Clone ID: PAT_MRT3847_134444C.1
attaatgtgtgtttgtcacgaganccatagtgctgncanattatagtaactctcnttgtctatgcngaagaagaagaagttctgnagaagcatgtgtggaggtgctatcatctcagacttcantggtgtgaancgtggccgnaanctcgcngcgcagganctgtggtncgagcttgancctttctctgacctcctgggttgganaccannagcancngtaccaannaaccaccccttncagannaanaatggtgtctcagtgaga

SEQ ID NO: 38145 - DNA, 876 bp, Glycine max
  Clone ID: PAT_MRT3847_134445C.1
cttggttacgctgtgccgggccctccggctgactccccctttttgttttccttcttccagcactgcgttgcgtttggaaactctgattacttagagatctcaaattttgatttcattgatttggttgtgggaagatgcaccctcctttaacattgcacaaacacccaatgtgtgctgaacttagtccgttccttcatcctcgtcttgaagaactatgcaaaaacagaactgtttatgcctgtactgcaacatcaccccaaatttctcgcctgcaacgcgatgcgatagctccgcagcggtgcgccttcgttctggggagcgaacagttcaggggcctggtgcgagcgctggggaaggtattgccggctggctggggtcaatagaagagtcttttaaaatgttgaaaatacgaaattgttttgcaaattacaatccacaattttgtgcaagggctcgatatgatatgtatcttgcagccttaaaagagggttattgcagataatattgtttgaagtatatctgatgctctggcctgcaagctttgaagcggaaggctaactttgaagagagcaaaaagttgaaggaacagttgcgagctttgaggaaagaaaatgctacaagcagtggtcaatagaagaatcttttgaaatgttgaaaatacaaaattgttttgcaaattacaatccgtaattttgtacaatggctggatacgatatgtatcttgcagcctcaaaatagtggtgttattacacataatattgtttggagtatatctgatgctcttgccttcagtgctctatctttatgatgctcatttactgatttgatgaatcactatgtatgctgctcacttacatgttattgcctctggtcctt

SEQ ID NO: 38146 - DNA, 310 bp, Glycine max
  Clone ID: PAT_MRT3847_134446C.1
ccccctcggctcgaggaatgacaaaactgatttttttgctacaacacaaccgcataaggccttggttgatttcaaacggtgatgtaaaaaactgactgacgatcatgcgttattctatgaactacatgctggaatgtctgaggagagagactacaaaacatgcggacttatatatgataacccaactgttcaggaggctttcaaatcatgaccactaatgaagagacttgatgctcatgcaccagaacagccatatttttggaatcaacaaattgaggctcccttaggaagagcaacataccatgaacga

SEQ ID NO: 38147 - DNA, 655 bp, Glycine max
  Clone ID: PAT_MRT3847_134447C.1
ccacgcccgtccggcagcttcccaggcacactcaatggtgccaggaaaggtggatattcaaagttgtttgactttgacaagcacaggtccaagtagaaaaaggaagtttcctctggatgaggtactgagacctgcaagcatgtgtaatgaagttctgaactcagagggaaatgaaaaaacagctgatactgttttggatactagatccaattttaaagatgtacccacaggattaggtttacaagatgttgcaaagggacactggagtaaaactgaaaccgaaagaagccatatcattggcaagaagaaatacaaaaagattcaagttgtagataattgcttgattcctgagcaaccacaaggacatcaaagagaaaatgaagacactgtggatactacagacaaggtatatgcatctaaaactaattcttctagattagctccctgtgcattcacagggaaagggatggataattttcctatccgccccctaagaatagaaaatgaattcaatttgtccaaagaaaaggggaaaatgctgcaaactgacagggagctggattctttatcctggcacaaaaataacatgcttgtacaagattcctgtgcatattcaggggaaaaagccaggtctaatatgcctgtaacaattcca

SEQ ID NO: 38148 - DNA, 201 bp, Glycine max
  unsure (1)..(201): unsure at all n locations
  Clone ID: PAT_MRT3847_134448C.1
cggctcgcnggagnnnacgacagagtatgcttctcntntactgcccaattcangcnggngaacncnctgcacnaggaggaagaagagagngaagnacnaattggaagnatgattctgccgaggcaagacgcgaggnagatgaaatgtctganagtgccncagcangcgcngaangtaaggctatgacanggccncagatca

SEQ ID NO: 38149 - DNA, 453 bp, Glycine max
  Clone ID: PAT_MRT3847_134449C.1
gtgaaaataaagctccaatgacatgtttggtgtttgcaaagtatcaatcagaacaatagacaaaaattggaataaaaaggaactatctaccctggtgtatgattgactagcaataagttgtaatttaaccattcataggcctaatttgcacaaacttctatacaggaatttataggagaagaaatagagaggtaaaatggatcaaattctctaataggttaaaatcaagttcttcatcttttggaaaagatggaatgtgaaaggttataaataagttacggtgcacaagttgactttatattaggtgacaagtttaattcattttacctcaaaattttcttttcctataagtgtttgttgaaaagtttatccaaagtgggccttatactgtgccttctgagttgattacctgtgcaaatgcattcttgtggtgcttgtgttggtattgagtta

SEQ ID NO: 38150 - DNA, 386 bp, Glycine max
  Clone ID: PAT_MRT3847_13444C.1
gagctctctctcactgacagagtgcaaggaaagggaaataagagagagagagaaacagaaaacttcagaagaagagcatcaattgctagctccaatatattaccacaccactgcaaaattttctgaagcagagatcattgtccattatcacagaaatgggtgaagtaagagttctctcttacacaaaaaattcttgtctatatttattcttaatcaatctgtctctttccttttttcgacaacttttgctttgaaaactaactacaccacgggactaggatcgtgttttttaaacttttatgatcttttgtatataatgtctgttttatgatgtatatggggggatcaatatcaagtaatgcatgccacacacacacacacacaca

SEQ ID NO: 38151 - DNA, 290 bp, Glycine max
  Clone ID: PAT_MRT3847_134450C.1
aaccggtctggccccgggttaaaatgaaaacccatgttttgacacataacaaaaaatggaacttgattcaaataccaccgtacatgatatcactttggggtttgtaagggctggatgagctgtacttaaactccctacagggttttcaaaagaaaaggaaaatgaataatatttagccaaagggggagtcggagtaatagtatatgggtgacatttggccgccaaaagtattatttattatgttaagccgccaaaggaaagggtcaagttacttaaagttggatgggttg

SEQ ID NO: 38152 - DNA, 169 bp, Glycine max
  Clone ID: PAT_MRT3847_134451C.1
tatagttattgctatgacaactcctggttttactggagcttatctggccaacctgctgatctaagctgctatatttgctggtcgttgtgcaaagacgccattttcttccaaagatattgctgattccattgataggattgtggctggaatggatggatccgtattgaca

SEQ ID NO: 38153 - DNA, 557 bp, Glycine max
  Clone ID: PAT_MRT3847_134452C.1
ttcctttccaaggaagggtttcccgatcatcacagttatgagtaccatccgcttgggggggggggggggggggagaacacaagaaaaagtggggagggagcgtatacgtcgatagagagcagacgaacgaataatagaccctgaatataaaaacatatataggaaaacccggataggagcccaatatttagcagggaggaatttagaagagacgattattacattacattgcttaaactagaaaaagagtgaaacattgaaatcaggatagcccaacaaaaagctaggaatgcttggggcacgtaacccatgggtatagcattttggggaagcatataagaaaactttggcagatatcacgggttttgtggcgtaggggtatgccgattaaaggcaaattgtggctgcgggcgcaacacaagttaggttgatgttgtggcgagagttgttggcaaagtaaaccagcataaagtataaccccaaggaaatagtaaagccagaggaggaggccgctgagccagccgagtaaaaccccgagcacgcggtagcggtagccg

SEQ ID NO: 38154 - DNA, 206 bp, Glycine max
  unsure (1)..(206): unsure at all n locations
  Clone ID: PAT_MRT3847_134453C.1
ggccgtttcattgaggtaggcttatgcgttatgacaccttcctcaagcacgtgctaaggcactatgtaatggttcctactatccgtcttattaccatcaccaccttttcagttcggtgtgtacttcaattcacagttangacctatgcttaggaattctcgtcattacagtttgtatgacgccggacatacaacacaccgtcttca

SEQ ID NO: 38155 - DNA, 1230 bp, Glycine max
  Clone ID: PAT_MRT3847_134454C.1
ttacgttaccggaattttaagacgtttacaaccccttctccgaggcagtttgtttctttgacagctgatataagtggtgaagtgatatgtgctggcacttcagattcctttgaggtttttgtttggtcaatgaaaacggggcgcttgatggatgtgcttagtggtcatgaagctcctgttcatggactggtgttttctcctacaaatactgtcttggcttcatcatcatatgacaaaactgttcggctgtggaatgtctttgatggaaaaggagcagttgaaacgtttcctcacacacacgatgttcttacagttgtttaccgtccagatggaaggcagttagcttgcagcacattagatgggcaaattcatttttgggacccaatagatggtttgctaatgtacaccatagaaggttctagagatatagccggtgggcgtcttatgacagaccgtagatcagctgctaactcaacttcagggaagttctttacaaccttgtgttattcagctgatggaagctatatattagctgggggaagtagcagatacatctgcatgtatgatgttgcagatcaggttttgcttcgacgtttccagataactcacaatctctcattagatggagtgcttgacattttaaactcaaagaatatgacagaagctggcccactagatttgattgatgatgacagcagtgacattgaagaaggtgttgacaaacaaacacgagggaagctaggattagacttgccaggatctatgcctaaccgtggaaggcctattattcagacgaaaagcctgagaattgcatctacagggcgtagttttgttgcagcaacaactgagggagttttggtttattctgttgatgaatcattcatatttgatccaactgacctagacataaatgttacaccagaggctgttgaagaggctctccgggaaaatcaaccaagtaaagccttgatccttagccttcgcctgaatgaggattctttcgttaaaaaatgtatatttgcggttagtccagcagatattccagccgttgccacatcaatcccctacaaatatatccagcgattagttgaggcacttgcagatcttttagaaaactgcccacatttggaatttatacttagatggtctcaggagctctgcaaagcccatgggaattctattcagcagaactctagaaatctgttaccatcattaaaatctttgcagaaa

SEQ ID NO: 38156 - DNA, 453 bp, Glycine max
  Clone ID: PAT_MRT3847_134455C.1
agatgacaatagcaaccactacaatatatgtaaagaataaccaatgacagaatcacattgaaaacatttaataatataattgaaccaactcaatttttttttttgagagggaaccaactcaatttattatatgcaaaatttagaatgtagcaacaagttaataacagcatattttaagggacatattttttagtttaatagacctactacagagttaattaatcagaaatcactttaacataatttttaaggtaattatttatcaagttaatactagtaataactattatacatggagatttatagttgaattaatgatagtaattgacggtttgtaattcgaaaatttcaaattaaaagagtcatgcaagactaacgcattgatcaataatgcctttataatggtggatactataagaatgggaaacttaccaaatggtgaaatgtccatgg

SEQ ID NO: 38157 - DNA, 1818 bp, Glycine max
  unsure (1)..(1818): unsure at all n locations
  Clone ID: PAT_MRT3847_134456C.1
catggatgaggagcataggaacagcaaagggctggagtgaagagggggaaaatttattaccaaaagattttttatataaaatcagttggggggagaaaactagcaagagttcaagagccaaggagaaatatgtgactgctaggagatgatggcaacattggttctttaggatgggaaccaaagttcagagtctgccaggtttttattccatgagtgatcttaatgaggaatccagtagttgcggttggcccctatattatggagataaaacactggcaaatgggcagtactatcataattatctgtcgagtggtgctgcagatgcatgttcaacacatgataaggataatgtgaagcagacgatgcttgagcatgaggccatatttaagaatcaggtctttgaacttcaccgcttatacagaatacaaagggatttgatggatgaagttaaaatgaaagatttatacagaaaccatatatctgttgagaaatcattttccacaggtcccttggcatctcagttaacatctgaagatggtaaaaaatggcatgttcctggatttccaatagttggaagttctacttgtgctagaccatctatttcaggcgttgagggcattcattctcctttgagttctaataaaggaatcagtaagcaagctggtctgttcccatcgccaaatgggagtagtagctcgaaagatgttgagatactgggtttcagaccctcaaaggtgaggagaaaaatgtttgaccttcacctccctgctgatgagtacattgatactgaagaaaatgaaaagcctggtgacgaaaagattagtggcaccacaaattttctttctgataggagctataaacacgaaaagggaggtgatatggacctttttagtggcaatggtggcaagactggtggccaggaagacatttcaagacctaagcaatctttaagaagcagaaatagtttggcagacttaaatgaacctgttcatgtggaagaaacacatgatgttgcttacgttcctcctcagaaccataattcctatcaaggggcaactgaatgttctgatctatctgccaaacagaagttgagattctttggtctgtccaaggaagatttactgaactcacatcatggaactgacagttgggctcgtaataatggatatttggataatgacaggaatggaaaaatgtggatttcttcaatagagtcagggcaagctaaaagcaatccaaaaaccattcctcaactcctcaaacaagaccaatcacttttatcttcccaaacaatgcaagatgaactcagtaaatctcatgagcctacatctgattatctaactaatggaagcaagactgatttgttgagggaaaagacacctagtggtttagatatcagtgaaagaaatcatgaatcctctgctaataagctttcagagtctgttgcatcatcacataggcatggtctctttgcaattgctccttcctcagatttagctagatcttggtctcactcatcttgggacatggcaagtagtaccctaaaccagaagtttatatctgtacagacacctccatctccatgtctaaatgcatctggttccttgagtaggagttcccagtcacatcagagtaatgggatgttgggagatagttggcctctaaatatcaattcaaagcttaatcccggttttcgatgtgaggcatctgggaaaaatggattttaccctgngactttatctgggtccaaggagctgtcagtgaacatctcttcaattagctatcttaaccatgaatgtgattgcaagaaattttctg

SEQ ID NO: 38158 - DNA, 401 bp, Glycine max
  Clone ID: PAT_MRT3847_134457C.1
caaatttataaaataatgataataagaaaataaaaaatgcaattaaatctataaaaaaaagagagaataaatgatccaatagaaagagataaaataaaataaatctagaaaattgaaaaaaaataatgtatgaataatataattttaaatataatttgcattttgggtataatataatttgcatttttttagatataattttggatataatataatttgcatttttctcaaaaaaagattattgcttggttaaattcaacctatacagaagacctaacatctaccgggaatgggagtaaggtccaaaccaaataggaaaataactttgttataaaaaagttagtatacaatgttgacacctgtttattgctgtatagttttaaatatctatagataatttg

SEQ ID NO: 38159 - DNA, 403 bp, Glycine max
  Clone ID: PAT_MRT3847_134458C.1
ataaaattctttcaaaacaaaaatgaccctggggcacctttatattagagacatacacttttatggcgaatatacagcctgcacataaggaggcaatgacaccctgtacacactttacgtacaaaccaactggttgcatacaccccccaaaccttatgtcggcattatatggggagggaacacttgttgaataaaagccaggaagcgactctagttcaaagactggtccaccccctgacatcatgctgatgcatacctaccaaattcgaaatcccgaaaaactttcttaggcatgtacgactcgcgcaatacttaaatcttaccggggttgagatcagcatatgaagcctgattggacatttgatctaactctattccatgaatgggctgtgccgtaccgggg

SEQ ID NO: 38160 - DNA, 822 bp, Glycine max
  Clone ID: PAT_MRT3847_134459C.1
cttgctgcctgcgctcatttctgtgtcctatcaattggtccaacctgccggtaacctgctggaagcatgactgatccccacctctgtcggtggcagcctatccgcccagccatccaccaccacccacatctgcacttattctaccccccacaggtcccatcccttccatttcaccacccttcgccgttttccctgttggaacccctgccttcgaccatgcccgctcacaacagtcacgagaccaccatggactgccttgaagaggcactgtcccacctcacccagaacatttccaccatgaccgccaagtctctggagatggccgctaagcttgatgtcatccttgactggttatctgctctccaaccaactccatcttctcccaaatcactcgctccaccggacgcacccatgccgaatctgccccccatggtcggaatcaattccggcaccacctactcttgcgtcaaggtgtggcagcaccaccatgtcgaaatcatcgccactgatcagcgtaatagaagctcggcatcttactttgctttcaccgaacgtttgatcggtgacgccgccaagtactacgtcaccatcaaccccatcaacaccatcttcaatgctaagcgtttgtgtggaaggagattttccgctgcctccattcggagtgataggcagttatggctatataaggttttccctggtcctcctgacaaacctatgattgtggtcaattacaagggtgaggacaagaaattcgctgctgaggaaatgtcttccatggttctcatgtgattcagcttcctttcattgatgttattggcgatc

SEQ ID NO: 38161 - DNA, 144 bp, Glycine max
  Clone ID: PAT_MRT3847_13445C.1
ccggaccggaggggccggctcgacccacccgtcgcgttctagaagaccccagctgcgggacgacatcagtgttggagcatcaaacgagacccgtacggtgcgccagaaatgtttccgtcttcgaaaaaagggggcttttgtgat

SEQ ID NO: 38162 - DNA, 330 bp, Glycine max
  Clone ID: PAT_MRT3847_134460C.1
aggacgcgtggggaaacaacagggcaaagggtgttactggctgttcaagcgaccataactctctctctttcttagagcatccattgccagaagataaaatggcccacgaaactttcctatgaacatcggaatcaaagaacgaggggcaccctggcatgctttgtgaacatatgtcccatgctaacctagaggcaggctcgcagcatgaccctagaacccagggagcatgagaaacctgagccaagaccaacaaggcgatggacttcggtgaaacaacaatcaaggcctgcgtgaactatgagcaagatgtgcgtgcaacaggacggaaca

SEQ ID NO: 38163 - DNA, 516 bp, Glycine max
  unsure (1)..(516): unsure at all n locations
  Clone ID: PAT_MRT3847_134461C.1
tttccgctcactcgtccgcggacgcgtgggttttgggggtgctcggttcactgtattccgcggtggccgctcggccggggtgctttcgcacggcggaggggcgcgtggcgggcgcggcggacattgaaaagacgcacaatctcgcttctgcagcacatcaattggcggacaacgacgcaatgcgagcggagagcatgtaccatttggctcgttgttaccataagaagcaggactatcaccacgcatttcagttctattaccaggccacaactctttcgcatccgaaatttgtcctcccctattttggacttggccaaatttacatttatcgtgaagaatatgaaaatgcgattgtcgcctttgaaaaagtgctcaaaatggtgcccaatgacattgacactntggccgtgctcggttcactgtacacaaatgtgccgcataaagacccgaaaattgttgtggaaagaagagaaaaggcacgcgaatatctgaccaaactcgtggacagccaaacgg

SEQ ID NO: 38164 - DNA, 414 bp, Glycine max
  Clone ID: PAT_MRT3847_134462C.1
tacggctgcgagaagacgacagaagggtacggctgcgagaagacgacagaaggggacacgctgctaaactacgacagtattgcatagcctcgccagaagacaacagaacggtcttgttggctctatacgtctgattgggccttctccgagctatacctaccttcagccatcgctgattgcgggctctctaaagaatgcaaccttactgacgctggcggcccatattatatctcgtctgtcgtagcaccttttggcagtttactagcagccccttcacaacatgaaggatgccatatccctgtggtgccctctctcaatgagctcgacaaacataccgcttcagtcatctggcgcacatatgaaaagcgctgtatcgacgaacgtcatcctctgagcctcaagctgaatgcattt

SEQ ID NO: 38165 - DNA, 785 bp, Glycine max
  Clone ID: PAT_MRT3847_134463C.1
ctcagttaccaatttgtgcctaatggtactcagtgtgtgtgtgaaggaatgctaaaattaccaaatgccagaggatgttgcttgtgttggtgaagtgggcttgtttccaatatatatgggagcgactgatagattgcttaatgcggataatgaggaggtttactttaagggaatgcccatttacaaaggaaaggttcttaggagacatggagatataatcaaaagaactgctggaggtcgtttcattggacaagggcgggctgatgacacgatgaatcttggcggaataaagacaagttctgtagaaattgagcatgtctgtgatagagccaacaaaggcattttggagacagctgcaatcagtgtttctcctgcaaatggaggcccggaacaactagttatatttgcagttttaaagaaaggatacaattccaatgcagaaactctaaaaaggaaattcagtaaagccattcaaagcaaccttaatcctttgtttaaggtgagccttgttaaaattgtgcccgattttccccgaacagcttccaacaaattactaaggagagttttgagagatcaaatgaagcgtgagctatcaattcagagcagactttagtaactataaattcagtccattccctatatctagaatacatttatactgggtgaggtctttgcctctttggcgtgtaatcaaatggtgaacatttgatattagtgggaaatgcttcactttatgaagtcgtaacattgtttattatcatttatgattgattatgacttttgct

SEQ ID NO: 38166 - DNA, 317 bp, Glycine max
  unsure (1)..(317): unsure at all n locations
  Clone ID: PAT_MRT3847_134464C.1
tctccacaaaaccaatggtcactctcgttcgttaccactcacttccctagagtaccgcatgcgtcttttcacaccgccttcatccgttcgggcataaatgactccaggaagcgtacgttcttaccatcgtcacatcactatattcttcccttaaagacaaataataaaaatgggttgggctttcctggctcttacggcttcangaatcacctcaattgatgtccgagcaaangattcacccctgtgtcctctctcacaatacggttccggatttgctttttttcatcacatgtcttncacacccttctatcaaatca

SEQ ID NO: 38167 - DNA, 226 bp, Glycine max
  Clone ID: PAT_MRT3847_134465C.1
cacacgcctcggcagactcgtgacctcacgcttaacccaaatgctgcgaacgaaagcccatattcctactcgcacattctactctggcgtctccatctcatacaatattatatactcacattcattcaaaatttcaaattcacctttatcatttctaactcaccttccttttcctcttacagcttcctgcagaaagttgactttcttgcccgatagatgccatttt

SEQ ID NO: 38168 - DNA, 179 bp, Glycine max
  Clone ID: PAT_MRT3847_134466C.1
ctttatagaaatgatgagttttgtcagtgggttacaagactggaacatcagctaactgcattgtcgtggtttacaattggtggcaagacatttgattattctgcatggaaaaaattggactgcataccaaaaaaaggatccggagtaggatttggtagttttcgctttgctgcacaaaa

SEQ ID NO: 38169 - DNA, 1503 bp, Glycine max
  unsure (1)..(1503): unsure at all n locations
  Clone ID: PAT_MRT3847_134467C.1
atttcttgagggtcgtttgttctcgatccgcttccacgatggaagcgggcgttggtcgggaggtatattgatgaccactgttcatgtcgccgcgccgcagggcgcagaattccttgctccaaaccagatcgttccgctgctgatcggtgcgaccgtcgacgaggtcgagcgcgagctcgtgctccagacgctcgcccgctgtgacggcaatcgcacacgcgccgcgcgcgtgctcggcctgtcggtacgcacgctgcgcaacaagatcaggctctatgccgcctccggcatcgtcgtgccggcctatcaggactaaccagcgcgtggctgcgcggaggtcgatcagtccgtcggcggcgcgcggcgcgacgatgtgctgcgaaacagccggcgcagctaaaaaaatgaggatacgaaatacaaataaaaaataaaaaaaaaaaacttacatttggggagtggtttagcccaagaagaagtggaagggtggtggcacttgggttggtagcggcgaagaacgtcgttaatggaagaagagaaagaagcagtgatggtaacaccgggagaagtgttgggtagaaccagcgatgtcaaagctggaagaggagcatacgcggcgcttcacaacaacaccgtatacgcctccctaaccggcttccgccacaccgtacctcccgcccccgactcttccgacctgagaccgactgttgaagtaactggtcacaaggcccatggacctgttccacagcctggatctgtagtcattgctcgggtcaccaaagtgatggctcggtccgcttcagctgatattatgtgtgttggaccaaagtctgttcgagaaaaatttactggcatcattaggcagcaagatgttagagcgactgagattgataaagtagacatgcacttgtcttttcatcctggtgacattgttagagcccttgtgctttctcttggagatgcacgggcgtactttctgtctactgcaaagaatgaacttggtgttgtttctgcagaaagcattgctggtgcaactatggttccagtaagttggacagagatgcagtgcccgttaactggtcaaattgagcaaagaaaggttgcaaaggctgcaagctgactagaatacttcatcgagctggaatctgttctgttttgtagaaatagactaacatgcgttgttgttagggtgagaaattatagccagtttgtattttacattgcaagttggcctacttataaagtatcacaaacctgggatttcaattcactcgtgctatgagcaggattttatttactttttattgtattttttcaatttaaggctattgattactgtcattttaagacatggttcaattttcaactttgaatggaaaaaaatacataaaaaaaaaaaaaaaaaaaaaaaaaaaaaaaaaaaaaaaaaaaaaannnnnnnnnnnnnnnnnnnnnnnnnnnnnnnnnnnnnnnnnnnnnnnnnnnnnnnnnnnnnnnnnnnnn

SEQ ID NO: 38170 - DNA, 491 bp, Glycine max
  Clone ID: PAT_MRT3847_134468C.1
ggaattctccccgaggctctcttctttccagtttgtgacactcactaagccacttccattcttctaaagtctttattccactctcctacttagcctgttaatattaccattgcttaagactgttgaaacttcatcttcatacattcaaatggcatcatcttggaccccaaggcaaaataaacaatttgaaagagccctggctaaatatgattttttaaaccccagatagatggcagaatgttgctaacgaggtgggaaaatcggttgaggaggttaaaaggcactatgagatcctcaaagaagatatcagacgcattgagcgtggtcaagtggcattcccctacagaacaaacaattctaacagtaattaaggcattgtgttgaacagcacaggtactgcaccacttttttcttgatatctgagtaaatactctgcttgcagatgttccaaaattatttttttttataatgaagattggcctgtatagtca

SEQ ID NO: 38171 - DNA, 221 bp, Glycine max
  Clone ID: PAT_MRT3847_134469C.1
ttcataaggaagcgtggttttatcatatcataataggtgagtagcctgatatctgttgccggttggcttcaatgaaggggagaggttagagtttgaactttgtttatccaatgcacaatgcttacatctctggggtattatggaatacatgaaaatccaagacgagggcagtcttttttcgcatatttcttcaattaatagttctatttttatgcattggt

SEQ ID NO: 38172 - DNA, 302 bp, Glycine max
  Clone ID: PAT_MRT3847_13446C.1
ctgagaagggcctggctcaacacagagttaacccgatagcgcaatataaatctataacggattaaatattacctctctagcactttcaaattacatcaaatatgacacgaaaaagtagaggtacacattctggttgcgcctttgttatggatcagacacttcttttctgcacctaacagggaggattagtttagataacaccatcttctgagagaaatttttatctgcaagagaagaaggccctaccgtttgaagggactataagtatgtctcttcatgctcgggagaaactgactgaggca

SEQ ID NO: 38173 - DNA, 272 bp, Glycine max
  Clone ID: PAT_MRT3847_134470C.1
tggatattatagatgatgaatctgatgtgattagatatatgatttaaaactaagattgaccattaaaagttttactgattcaaatactactctaatataacggagatgatctacatttatgcagtagtattcttcggtttcttttcacatttcatttagtgtaattgcacaaggattaagtaaacaattaatgagtcaaccaggaccactgcacgtgtattaaggaaaatttggtcgaaattcaattttaaaagccactggtccccccgcta

SEQ ID NO: 38174 - DNA, 250 bp, Glycine max
  Clone ID: PAT_MRT3847_134471C.1
attttcagtatggaggagcaagtaattagtcgtgctcatcgtatgggtgcttctcgtcctatttatgtggaaacattagcaatgcgtggtacaattgaagagcaaatgctagactttttacaggatgctgataactttagaagatcaccaattaaggatgctaccgaatctgttgatgatagtgggggacgaggatatagatcattgcatgattttgctgagagtagttatctactgaaacttagatctg

SEQ ID NO: 38175 - DNA, 327 bp, Glycine max
  unsure (1)..(327): unsure at all n locations
  Clone ID: PAT_MRT3847_134472C.1
nnnagtngangacgcgtangtnngctcgagnanngaatagaaacaganattataaacaanatcaatttgggatggtgtgttatatgtgtatataaagaantgncangaagcancntcanaaaagtggnggttcccttatgagtncangattnacactagtatctgacnatgaatccnggnncattaaanatttgcnataaatcagtaaccatccgtgtccnaaagaaactgtcagagtctcttcnctctnnctctctntctcgtctangttntcaactttnaangctccgagtcactcgctattcccacnagtagnacccaaacaan

SEQ ID NO: 38176 - DNA, 317 bp, Glycine max
  Clone ID: PAT_MRT3847_134473C.1
agtgcgccctctctcccgtggacgcgtgggccaaacagcctacaggttttgacattctctcgggagttccccaagattatgaaatggctggtgatactcttatgccaggtgttgctgtgccacaggctactgccagatctggtgtgaatgcggaatcctctgcatgatctggaattgggatttcctttcgcttgttggcctgttcaatgcaatcaaggaaattaggcatgaccctcttggtgagtatgctctgcctatttgaaaatttccacacctcctttaattgtcggaatgatgcgtgaagtgtgtgtcattct

SEQ ID NO: 38177 - DNA, 341 bp, Glycine max
  Clone ID: PAT_MRT3847_134474C.1
ctacaaaaagagcctttctttatactgggggatggaacaacccggggagggggcattatttatcacagcattaattattccatattacaaaaaaacaaaagggcccactcttgatcaataagtggcaaagcccagagacacaaaccttccctaagcattttgcttaccttttaataaaaaaacaagctcaattcctaattttgcccccaacaatggaaatttttttgagaacaaatggtttctttgtataacacaaaggcctttacttcttagatctttcaatagaagaaatattatcccaaaaccttcttttttcaacataaaaaaaccccttaactcag

SEQ ID NO: 38178 - DNA, 525 bp, Glycine max
  Clone ID: PAT_MRT3847_134475C.1
agctcaactttcttgtcagggttcaaattagggctgttaagctttctcgcggtggttctagtgtgaagagtggcttcatagtttggtctgatgggaagcatactgtcacaagtccccttgttgtgacgatgcagcagcctctggattagtggattgaggttttgggtgtagaaattttgggtatttatccatcttggataatatcgtattttaaaaataaaaaaaagctctatgtgcttaatagagaatgtgtttgtgaaggtgttccatttgtaagaactggaggaaggatggtttgttagagagagcgtgatggtggtgctgtcaaaaggggggaaagttatcatcaaagacaaaggtatggtggaagtatatctttcatgttgtataattaagaatgtttgtagaaaatgttgtttttagaagaggataagaatattttggaaggttcctttcctttttgaatgatgctgtctgttgaatcctttgaaattttttaatatcttgatcagtcaaatatttggt

SEQ ID NO: 38179 - DNA, 377 bp, Glycine max
  Clone ID: PAT_MRT3847_134476C.1
aagcacggaacccctccagcggccgccccccccaaaacctctataggaagacaaagaccgcccaccaaagggcaaatcaaaaaatgatgggggccacacccccaagaacagccgagagaccagaaccaaatacaacaagaccaaaacgccaacaaaaaacacaacccacaaggacccggacaaacccaagaacaaacggcctagagaaaccccaaacagagagacgctagctaaacccacagaaccctcaaaccacaagcccatgagacggcgaaccacgcaaccaaacccatcaggaagcccaaaaaacaccacacggaaaaaaccaagagaccaaaacaaaccaaggacgacaccaaaagacaaaccccccaaac

SEQ ID NO: 38180 - DNA, 1040 bp, Glycine max
  unsure (1)..(1040): unsure at all n locations
  Clone ID: PAT_MRT3847_134477C.1
gtatgtaggtttttcacttgatctctcaaatgaatccacatttgtgtccttcccaattatttaattttccgagtgagttggaatcggagtggatgaggattgccgcggggtgtgcctcggcatctcgcatgtgcatccacatttgtgtccttcccaattatttaattttccgagtgagttggaatcggagtggatgtggattgggtggtgaaccggtgaaagatgcgacgacccggcgtccgagtatcggtgcccggtacggcctagttttgcatattggaactgggttctcttttctttatttctcttctgattccttcttgctcggcacgtgcgcgtcacgtggcgcggagtgagtgatcagtggtttttgagacacgagggtgctaacaacagggtcatcgtgcattcctcggatcgaatcgggaagatgggcgtgtgtggtggtttttcgtgtcggcggtgaattcggccggaaaatgcggcggcgcgccgccgagtatcggcgcccggttcggcggcggttctcccattggatctggttgcttctcggcgcgttctctctcgctggtttggttttgttctttgtgcagtacaatcatagcgaagatcgggtccatcacccccttctggagaaaaatgctatagttgaacattttgccaagagatataattttactgaggaaattttaagtgcaacatccttttcacggcagttagcagagcaaatggttctggccaaggcttatgtgattattgccaaagagcacaataatcttcaccttgcctgggagcttagctcaaagattagaaagttgtcagcttttgctttcaaaagctgccatgactggggagcctgtgaccatggaggaagctgagccaattattaaaagcttgtcttctctaattntcaaggcacaagatgttcattatgacattgcaaccactatagcaaccatgaaatcacatattcaagcccttgaagagcgtgcaaatacagcgacaattcaaagtacctgtgtttgctcaaatatcagctg

SEQ ID NO: 38181 - DNA, 140 bp, Glycine max
  Clone ID: PAT_MRT3847_134478C.1
catccagcggagacgacacgcgctgcaccctttgacgggtgaaaacattgtaaaaacctatctagtatatgatgtctctctccaatgtctcatgcgcgataaacacgtactagtacatagcatagctcaccaaaacccag

SEQ ID NO: 38182 - DNA, 467 bp, Glycine max
  unsure (1)..(467): unsure at all n locations
  Clone ID: PAT_MRT3847_134479C.1
tcttgtcaacaacacagatctcaaatgccttaaagttcaatctgagtaagtaacacccatggctgaaaccctaattttctccgtccccaccggagaaccttctttcttaatattcctaaatcgcacctttctctccatcaaacgacgcctcctcgctcgcattcttcgctaccaaaacgacgccgttgcacactccaggattttccgtgaagtggatgattcggccactgagaaaaagtgcgaattaaacgccggagattgtttgtcaaacgacggcgggaatggacgacacgccgttttcaatgcgctggatactatgcttaaggacagtttagagcgtcttaagatgatgagggaaaacttatgtctggtaaagactggtctaactataggatatgcatgtgaatccaagtatgctgaagatacagctactattaggcgtntgtgcttagatggtaagctgggag

SEQ ID NO: 38183 - DNA, 1931 bp, Glycine max
  Clone ID: PAT_MRT3847_13447C.1
taaaccgcaaaaacgaagtaacagtgtcactcttcactcttcactcttcactcattcactcactgtgttgtgagcggtcgggacgccagccgggtgttcggcgccatctcgagccgcatcggcaaaaacaaaaacaaagtaagagttcactcaatctcactgtgttgtgagttgtgtgtgagcaccaaccaacaatggtgtctctgactccgttatgtttctttattaccttgttgatcgctggtgcagacgcagcggcggagccccaaacggtgcgttttgacaccggggggttgagcagagacacctttcccaaaggattcttattcggaacggccacgtctgcgtaccaagtggagggtatggcccacaaagacggtcgcggcccaagcatttgggacgtcttcatcaaaaaacccgggattgtcgcaaataatggcacgggagaagtttctgttgatcagtaccatcgctacaaagaagatatagatctcatggccagcctgaattttgatgcctaccggttctcaatctcgtggtccagaatttttccaaatggaactggccaagtaaattggaaaggtgtagcatactacaataggttgatcaattacttgctagagaaaggtattactccatatgcaaatctctaccattatgatcttcctttagcacttgaggagaggtacaacggattattgagtcgccaagttgtgaaagattttgcagattatgcagaattttgtttcaagacttttggagatagagttaagaattggatgacgtttaacgaacctcgtgtggtggctgctcttggctatgataatggtttctttgcccctggaagatgctcaaaagaatatgggaattgtactgctggcaactcaggcactgagccttacattgttgcccacaatttgatattgtcgcatgcagcagctgttcaaagataccgagcgaagtaccaagaaaagcaaaagggaaggattgggatcctcttggattttgtttggtatgagcctcttacaagatcaaaggctgacaattttgcagctcaaagagccagagactttcatattggatggttcattcatccccttgtttatggagagtatccaaaaaccattcaaaatattgttgggaatagactccccaaattcactagtgaagaagttaaaatcgtgaagggttcgattgattttgttggaatcaaccagtatactacgttcttcatttatgatcctcatcaatcaaaacctaaagtcccaggctatcaaatggactggaatgcaggatttgcttatgcaaagaatggagtgcctattggtcctagagctaattcttattggctttacaacgtaccatggggcatgtacaaatcattgatgtacataaaggaacgttatggaaacccaactgtgttcttatccgaaaatggcatggatgatccgggtaatgtgactcttcccaagggtttgcatgacaccacaaggataaactattacaaaggctatttgactcaactaaagaaagcagttgatgatggagcaaatgtggttgggtactttgcatggtcattgctggataactttgaatggaggttgggttacacatcaaggtttggcattgtctatgttgatttcaaaaccctcaagagataccccaagatgtcggcatactggttcaagcaactcattaccaaaaagaagtattaatagctgggctgaacatctattttctaagcttctagttgcttcagagaatcatgttttaatggttttggttgagtttaacgtgcttctgtaactgtaattatgtgacttgcttaatgcaagtcttagaataaaatgatctttcatggcaataacttgttttctcttatagcaaactattgttcaatgttttgcttattaatatagtttttctttaaa

SEQ ID NO: 38184 - DNA, 257 bp, Glycine max
  Clone ID: PAT_MRT3847_134480C.1
gtttcggtttcagtttcttgagcagtatggggaagtaagcatgttggatttaaaaggtgctgatgctaccaaagttgttcttgttattggaataatgactctccattcttttggggacggatctggtgttggggtctcatttgctgggtcaaagggtttcactcaaggcctgttcgtaactttggctattgcggtacacaacattcctgagggcttagctgtgagcatggtgcttgcatcaaggggcgtctctccac

SEQ ID NO: 38185 - DNA, 335 bp, Glycine max
  Clone ID: PAT_MRT3847_134481C.1
cgtttctttcggcggacgcttcggggaatcgcaaggagccattcttgacaatcatgtcaatgtgttacaagactagtatcagcacagttctgattaagctcgcctatcgagaaggaaagcatctctctcgttttgaatggctccacaatgctgacattcctaccctctcacacattgtagagttcccttcgatccataagataatgaacgctccttgtgtaaatgataataattgatctactgttgtgcatatattagatgtcattacaaagagcaggctatgcttttccaaacatgactcttagatgatgataactttgtgttgactgacacac

SEQ ID NO: 38186 - DNA, 339 bp, Glycine max
  Clone ID: PAT_MRT3847_134482C.1
cgtccgaacagacgtcagaagacgacacaatggttatacgggttgatctgtgcgtgttgtcattgatgacatatatgtttggagagccgggaaagtcagtacaatgtgaatggtcctttggggtgagtttcaacatgaatggtattattctctcatacatgataatactaaacgtatatttagtactcggttgccctataggatgcaagcttatgtacaccttcatgctacgtcatagtgcttcgatcatgtcacctaatttcaattcacacgcagtcgttttaaacggtcttgtatggtaaaaccctgacgttaaccatattaatctccttgcaccac

SEQ ID NO: 38187 - DNA, 356 bp, Glycine max
  Clone ID: PAT_MRT3847_134483C.1
tttttaatttttttttttttttttttttatttttttttttttttttgggtgggagccccaaaaaatgagctacgcaactaaaaggaatcaaactttttttttaatccccggataaaaaatgacttataaaagtaaaagaaacaggggcgcggcgttagtccagaactgtacttgacttatcctcagattcgaaatgaacggggccatttttctttaagaaaacattgggcattatgaaaatgttttgcactaaaaacaacaaccgaagtggggtgaaaatgagaaccacaattgaggggttgggagaatacacatctccactcccctccatactatgcaagaagttttgattttgg

SEQ ID NO: 38188 - DNA, 463 bp, Glycine max
  Clone ID: PAT_MRT3847_134484C.1
catgcagtgaaacccgaaggagaagaagtcccacatcggaggatctttcttgttggcctacgagggatttgtggtgctgctgaacaagaaagcttttgcttttgcctctcctgctctagccacgaccaccatgttccctctggtgttggattcagctgtgagcgcggtggttgttcttctgatcgactttgagggaaacgcacatccaaagtttgatgtcatcatcaacgcccaagattataacctgattcgccccgatcacactgatttcttgcaagacgatgatgatgatgacactgttgtcgtcacgctcgttcccagagacatcaagacgcagcttcttccagactgaaatttatttatgttggtatgtatataaatttttgggtgtaatacttcaatcattatactgctttgcaaattatggagataatttatgattattaatatattaaagaaaaat

SEQ ID NO: 38189 - DNA, 125 bp, Glycine max
  unsure (1)..(125): unsure at all n locations
  Clone ID: PAT_MRT3847_134485C.1
ctcntcttcaacaacccgncntntgnnctgtggcaantnntcttgaaaggagggaacaacaatggtgangtctataaactttctcctngttntggtctggagctagncttgntgcccttatgnga

SEQ ID NO: 38190 - DNA, 603 bp, Glycine max
  Clone ID: PAT_MRT3847_134486C.1
gaggaatggttcctcaagcattaacaagcatgagggcctggggaaccggagcatttaagaggaggaggagtaaacccaaaacatcctgtctcagagaggcagtttcgtggttgagagcctgcagaagagattagaataggaaattgaatcttaccaaaaacattgcattcaggtgcgagagaaatccaagcagagtctcaaaactcgcttgcctaaactcttccgtgcctcaaaagactatgcccaggcctgtgctgaggcttgtgagaagctgaagttaatcgcacagttgcctaggtggtgcggcatttaacaagaagctcacgaggtggtgaggcatgaaacatgaagctttttttgttgacttttgtgaagtttgtgttttgaacctatgtagtctgctgttgtcctcacacaagaaggcataacatattttagcttggcatgcagatttatcaatcttgtgtgaattttttgccgtagcttttaaagttctaaccatccttgatgatgtagcatattgcttaagtgtgtattatgtgtcttaaggtagttgcgtaatgaagtagtgatttatttcgctccgcaaaaaaaaaaaataaa

SEQ ID NO: 38191 - DNA, 335 bp, Glycine max
  Clone ID: PAT_MRT3847_134487C.1
acgcgtacggatgatcatgtcatatcagagcacttttgaccgtcatggatatcaatggactagttgagcagaacgttcaatctagaagccctgtatctactatttcaggccagatggcatctcttgaagtggactccattgagaagcttgcaatggaactgtggtaacagcctgagaaatctggttctaaagtttcaacagttctgcatagatcagtaaagctccgtcacatgatttaaacgcttcatgcatcggtttcgatgtagaacaagttgtatgaggaagagcagttccttcagttcacgcagacccattcgtcacaaacacttgcagct

SEQ ID NO: 38192 - DNA, 332 bp, Glycine max
  Clone ID: PAT_MRT3847_134488C.1
ggtgtttttttattatagaaagctccattgcgtgtaattaattagacatattaaaaattgcagcccgtctgtaacaaaaaaccaagaattttacctgttcaatgagaaaatcccctttctttccattacaataggtggaacgttaaaactcttcatatccacgttggcaaatatacctcagaatatcaagagcaataacaccttgcccccaaaaaaatccccgctcccttatgaagaacttagatcccgggaagaacaaatgaatcacctaacctagttgatggcctatgaacgggaaccccgagccggtgggagcccaagtccaaggttac

SEQ ID NO: 38193 - DNA, 359 bp, Glycine max
  unsure (1)..(359): unsure at all n locations
  Clone ID: PAT_MRT3847_134489C.1
ccccaaaaaaacccaccttccaggggagggagtatatttaaaggcaacatatctccacccaattntatcagaaggggttctttcttctattaacatatatttcacataaacacacgctaataaaaccttaaaaccctaatcttacaaaagagccctcaaaatttattcagaaaatacctaaatcattcccaactaccaaaaaaaaacatacattcctacataattcatcaaatgcaaacatcactacacctgtaacattattaattcatactttaccccaatacagcggtgaaattccagatttcttcttcttctttaaacctccattcgccaacttccatcactttcctaatattact

SEQ ID NO: 38194 - DNA, 441 bp, Glycine max
  Clone ID: PAT_MRT3847_13448C.1
tcgagttcgagctcgactagctaggtgttgccttgaaaggaaaactcgagatttttggggcaaaaacttggcaaatttcccactttaggtttcttttagaaactattttccaaagtatggttgtttctaaacaatttccataggggtgctgttttttacgtaccagccatgcatggcgccagtgctgatggcgccttcgacagggacgagctacgtggcatgtcgccactgcgactggcgacaaaggactgcatatcgcagctcctattgacgcgtccaaaggtgcatggaagcgctagtttgaccagcgacttcagcacctgcacttgggtttgcagagttgcaggcataggctgcagcacctgcagctgctcaggtcgtagctggaaggcgccactcgagcagcttcagtgggatttaaaaacccaagtgcagagggac

SEQ ID NO: 38195 - DNA, 980 bp, Glycine max
  Clone ID: PAT_MRT3847_134490C.1
ccacgcgtccggaatttttttgtgactttggagtttacctttcgaacccccatgacactatagtgcttagctatcctgtgttttttgcaaataataggttagcagaatgctaccctgttagcagcatacctagagctggataattgttaaatcaaggagctatgactatgaggcatagacatcacatgggcacaccatagtccaatgtacaaggctcaattctacatagatcatatgctaaaattattatataactacatatttaagagcctaaacatgaaaacacatacacttgtatgaaaatatgcctacaatatgtgcaaaatgcgttcaaaagaaagaatggctcttagtgtcagtcaatcaagctttgccatcaagagggaaagagccttggactttcgtttaggctgcacttgtcattcatgcaattcccatccaaatatcaatcaaagaagtgattaattttttcttttcaaactataatattaaaattaaattcctgaaagtactgttcaaactttaaagttttcaacctgttttattgatttgcaccctacgtttgacaaacccaacttctctcttgaagtctaggtgcttcatttcatatttcaaaagtacctgtcaatatgaatttataatcatttcctagtttataaacaattgtgaacatattttcaattgtatggcacaataaatatattttcctctgttaagtgtgtttgtatcaacttataatcaaaattttgctgggagacttttgaacaagggaagtttccccaaataattaagcgaaatctgacctgctacaattattgttctgtttaattaggtacatttggagctcttgtactgtccatttggcatggagaatagctttacaaacccatttgctcccaactactcaatgacatctttggaaaaggttcttaaaaatgcgaatggagtagagtctaatggaaatgaaaacgcagttaccc

SEQ ID NO: 38196 - DNA, 129 bp, Glycine max
  Clone ID: PAT_MRT3847_134491C.1
gcacgcgaacagtaagctaggaagcggcccttttacaggggggccaaacccggtctatcatcaagaaaagtcgccaggtcttctgccagataatccttcaccgaagctggagctaccaatgcctactga

SEQ ID NO: 38197 - DNA, 477 bp, Glycine max
  unsure (1)..(477): unsure at all n locations
  Clone ID: PAT_MRT3847_134492C.1
ctgccccccttccttagcctggattcttttaaaccggccgcccttntttttttttttttttttttttttttcccccaaccaaccaatttcttattccattttcttaaaaaaaaaaattcctccatttggtttggggggggaaggaaaattaaaccctttaattaaaccccttttttttccaaaaaatcccaatttttttcccatttttatcctaacctgaaacccttcccccaattaaccttattaattgaggcggccttaattcaaaatgggccaccacctccaccttattctaaatgggcctaagttcctggattttaccccagtagaaaattccaggggaaaaatgattattttttttttttaaaaaaaaacctattgacctttaggtgttccagaaatgaatgcctttccaacatctacttggaatttctatagttctatttctcccccctcaagttatcctactaccatctt

SEQ ID NO: 38198 - DNA, 451 bp, Glycine max
  Clone ID: PAT_MRT3847_134493C.1
tggcaagctggtgaacttggagaagctttacttgagcaacaataatttctctggtgaaataccacctgaaattggatctctgaagcagttatcttctttgcatctagaagagaattctttaactggatcaatacctgcagaactgggtcattgtgcaatgctggtggacttgaatcttgcttggaattctctatctggaaatatcccccagtcagtttcacttatgagctcattgaactctcttaacatatctgggaacaaactttcaggttctattccagaaaatttagaagcaataaagttaagctcagtggatttttctgaaaaccagctttctggaagaatcccatctggtctttttattgttggaggagagaaagcttttcttggaaacaaggggctgtgtgttgagggaaacctaaaaccttccatgaattctgatttgaagatt

SEQ ID NO: 38199 - DNA, 279 bp, Glycine max
  Clone ID: PAT_MRT3847_134496C.1
cccacgcgtccgatgcagttgtgcagctccgaccaacattacaacatcttaattctggtggttcaaaacggaagaacgctgcctccactggagcaaatgctactgtcaaaattgagggctcaaatgaagagaagtctgttgctacatcaaagaagcagaataagcagacaggaccttctattattgagcaaaagagtgatggtgatgagtgctgggttcctctaaagtaccatagctgcaagagtgatatatcctctagatatttgcagcaaatggtga

SEQ ID NO: 38200 - DNA, 209 bp, Glycine max
  Clone ID: PAT_MRT3847_134497C.1
tttgtccgtttacacatccgttagcggactggtgtggacggagaccataaagaaacgctatacccatgagttcttggacatatgcattgaaccgcttaagatccccgtttaatggacgaagaatatcttcacaaaaaacctgatcactaagtcttgcctcttgccttaatatttcctaaccccagggagaatttccaaccggcttttca

SEQ ID NO: 38201 - DNA, 142 bp, Glycine max
  Clone ID: PAT_MRT3847_134498C.1
cacactatgaaaacccatgatctcatctgtgcatcgaggcctcaccctctagttgcagatatattagacttatgaatcaacaagcattatcacggcaccttacggacgatattggagacaggctctcaaaaccagccccgtc

SEQ ID NO: 38202 - DNA, 298 bp, Glycine max
  Clone ID: PAT_MRT3847_134499C.1
tgctttttttcgtcaaaaagcttccggaagccgcaagtttggtcctaaagagcagaaggcttggaacattactatgttccaccccctttactgacactgactaaaacgaggacttagaatcctattagtgccgagcaaatatatccacaggcacatgaacacatccattgagttacgccgagtccacttcaaacccaccgccggtagactcagcactttgatttggcttccataccaggaaatacttcttcggctatatcttaccacgagacatcgataacctacatcgctcctacac

SEQ ID NO: 38203 - DNA, 163 bp, Glycine max
  unsure (1)..(163): unsure at all n locations
  Clone ID: PAT_MRT3847_13449C.1
ttgataaaatagaggagcaaaaancagaaggggaagcacacaaggaccacccaacgccaccgcncaannagngggnnacaanancngccacccacccaaangaggcgcncanngaaagccnncaacaagcaccnnacncnccncccncnncaacaacgcaccg

SEQ ID NO: 38204 - DNA, 190 bp, Glycine max
  Clone ID: PAT_MRT3847_1344C.1
aaattaataaccggtaggagtcttgattaatcggcacacaactgacaacaattaaattaacgcccggtagaaagaaaaaagggtacaagaaacagagcagggtcatgggcactccgttgaacctcacatccaacatcttcttcttcatcttcaccttgaccattttctttgttgcctacaccttccccag

SEQ ID NO: 38205 - DNA, 1542 bp, Glycine max
  Clone ID: PAT_MRT3847_134500C.1
ctgaaaagcacaagaccttttctgccccttctcacgtgctgcgtatcctctaatctttggtttttttttttttttcatatccgaattaaccactttatcaagtacggctgcgagaagacgacagaaggggaaccaactgagttagattttggtgttatcctttgatataaactaagctctttcatttttccaatattaaaacttccagcttcttccttcctctgtgactcaaactgcatcaaccaagttagtgggattttctataaattgttgtcaatttgtcatgtcatgtatatgagaaactcatgaaaactctggtggtgacttattagttctctcggcaagtaaggatttcaaacaaactaaagttgaagagagtataaatgactttggaaactcttcaatccaatgagttctccaacttcattatctatgacactatctctgcaactccatttagcagccatggctccccagaggctagtttcttggaaagttttgtgaactatcaggagcagcatgaccaccctacatttgataattgcgcaatgaggacccgaaagcgtgaagccagcgaaccagaaagcattggccggaggcagaattcggtggcagtgcaagggaggaagaagaggagaaggaagccaagggtttgcaaaaacacggaagaggctgagacacaaaggatcacacacattacagtggaaagaaaccgccggaagcagatgaatgagcatcttgctgtccttcgttcactcatgccggagtcctacgtccaaaggggtgaccaggcctctatagtgggtggtgccatagagtttgtaaaagagctggagcacctcttgcaatcacttgaagctagaaagctgcaacttttgcaccaagaagtggcacaaaccaatgaaaatacggccatttccaaactcatgcaacctccttttgcacattgtttttcgtatccacagtacacatggtcccagactcctaacaaatacacatccaagaccaaagctgccatagctgatatcgaggttactttaatcgagacccatgcaaatcttcgaattctcaccaggagaagcagccacgggcagctaacaaagttagtagctggttttcaaacgctgtgcctcaccgtcctacatcttaatgtcaccaccatagaccctttggtgttctattccttcagtgctaaggttgaagaaggattccaacttggttcagtagatggtattgcaacggcagtccatcatttgcttgcaagaattgaagaagaggcttccctttgctgttgatcaggttcatctggggacacgagattttagtgaaatgaccaaatcaaccatctacaccaacctcaacagagagagaggggggaaagaatatttgctaatggctttagttttttatttttgtttgtttgatgtccaactgatgtgttaatgctaaactttagttgcagtagatgatggtgttttttaaaagttgcttcaagcaagtacaactaaaaatcaaatgaaaaagaatgttgatacagtttgg

SEQ ID NO: 38206 - DNA, 481 bp, Glycine max
  Clone ID: PAT_MRT3847_134501C.1
acgagcagccaccacctccaaccaataagtcccaaatcctaactcccaaatcagacatccccacccccaaatttgaaatcctaaccaccatcaccaccagacctgaaccaaacaacagatcaattgcgaaaacgaaacactcacggtaatctcagcgagaaacgcgtcgagatcatcggcgcttattctagaagcagcttcggccaccgtcaccttcggcttcttcgatttcttctgcttcgcctccttcacctcctgaaaggcgctggcttcatgctcggcatcgccgtcgtcttcgtcgtcggaatgccatttcgatctgcttagagcggcggctgaagctgtttcagcctcggcaccgttttcagagttcagaccctcgaaaaccccactggaagagagacgaagcaaggggcaagagcggagggcgcgcgcgggatggttcagatcgcgaggaggaggaagaagggacggccgtcga

SEQ ID NO: 38207 - DNA, 639 bp, Glycine max
  Clone ID: PAT_MRT3847_134502C.1
gccaatgaaaatacggccatttccaaaactcatgcaccccccttttgcacaatttttttcgtatcctcagtacacatggtcgcagactcctaacaaatacacatccaagaccaaagctgccatagctgatatcgaggttactttaatcgagacccatgcaaatcttcggattctcactaggagaaacagccccgggcagctaacaaagttagtagctggttttcaaacactgtgcctcaccgtcctacatcttaatgtcaccactatagaccctttggtattctattccatcagtgctaaggttgaagaaggattccaactttgttcagtagatggtattgcaacggcaattcatcatttgcttgctagaatcgaagaagaggcttccctttgctcttgatgaggtccgtacgggggcacgagattttcagaaggggaccaaatcatccctctacctaccttaatagtgagagagagagagagagaacgaatatttgctaatggctttagcttttgttttgcttgtttcatgtccaactgatgtgttaatgctaaactatagttggcagtagatggtgtctttttaggtgacttaaagtacaactaaaaatcaaatgaaaaagaatgttgatacagttt

SEQ ID NO: 38208 - DNA, 291 bp, Glycine max
  Clone ID: PAT_MRT3847_134503C.1
atgaagatatccgtcatgacccactctacttcagagcaaacgaggaatgaacgcaccgctactctgaggttccatgattgcgacaactgtgtaggagaggccgcaggaggtgagattgagggttctgatgaagttgtcgaggccgacgatgttgaactcgccgtcgccgtcgatgagttgcgtggcgcagcaatcgtttgttggccatggctcgtgaagctgaagtggaagttgagatcagagaagtttggatctttgattcactttgcttcgagtggagttgttctttga

SEQ ID NO: 38209 - DNA, 499 bp, Glycine max
  unsure (1)..(499): unsure at all n locations
  Clone ID: PAT_MRT3847_134504C.1
ggtgtagatatatttttttttttttttttttttttattgtnnanagtgngaaggggnnaaaaactttttgatgggaaccccacccccactaccccccggggaaaaaacaatttggggaaaaaaaattttggccgggaaaaaatatcgccctttaattatggggattggccattttcccccccctaagaaaccacccgaatttttaaattttctttttttttcccccctttttcctttaagttttcctttttttttttttccaacaacctataaacccccctggggggggtttttggggggtggtttccttcaaggttttaccttccctggggctgcagcccccggggcacaaattaaaaagggagccccccctctttgggcgccggctttgggccctaaacatttttttcaccttttttgaaaacctttcttttgttcccccccgcccccccttctcaaaaaccccccccccctcttgtttggcgtttttcccccgggg

SEQ ID NO: 38210 - DNA, 432 bp, Glycine max
  Clone ID: PAT_MRT3847_134505C.1
ggccgcccttttttttttttttttaataaaagaaacccttttttttttttaaaacccatatttgccctaaaacccccgggggggggaaccaattatttgcccggggggggcccccccccttttctaccaggaaaatagcaaatggccgggataacccccccccccgagatggaataaaatagcctttaaaaaccccaaaccgaaggtagtttactgtgacccgcctccccgcaaaaaataccggaataaatctgaatggtcaaactccgacactggccgggggccccaagcccacccagaagcccccccgggaaacacaaaccccttggaaacggccaccctatcatgggaggccatgcccttgtagcggttaaaaaaaacacccttttcgagagggcccggggtgacatccttctttggagggggaggcct

SEQ ID NO: 38211 - DNA, 344 bp, Glycine max
  Clone ID: PAT_MRT3847_134506C.1
gcgagggaaaatcgaactttaaaaagtctaaaacccgcgctctcttctatttttgaaatggaataccaccaattggaactcttcaacgacgacgggtgtgggttcaaacacaacccccttctcttttacaccccacctcctcctccctccaagcccaaccaataggcggcggaaaaattccatatatatcttaacaaacaaaccctactcaatctcaaatccaactatcataaagacattcttcaatgggaatcattctcaaacaccttgcgctcaatgcaacaactacacaccacttcacaacaacatccccaaccaaacctaagcctatctcttccttccac

SEQ ID NO: 38212 - DNA, 685 bp, Glycine max
  Clone ID: PAT_MRT3847_134507C.1
acggctgcgagaagacgacagaaggggacttcacaactcaaactgcttcattgcataattgcagataagatcaacccttctaccttcagaatcatgggtgtgaaactgcattatatacatccttgccccacaaatacatgacctatatgataaagaagtagaaggaagacttgaattttctacgaaagtgatctcagattcgcgggaagatggcatcacttcatgctaatgtgacatcagttgtttacaacagtggcaaccgtgtttctcaatcgaaatttgcaagctcttccttcttgtctgggttcgatgttgttggtcgtgcttcaagtgcttggaagaaggaacttgtcccatcttccatttccttggtgcctagagccaccctaacatttgatcccccaactaccaattcagacataaccaagcaaaagaagcacactcttgaccctgcttctccagattttcttcctcttccttcatttgaacagtgctttccaaagagcaccaaagaacacaggggaagtcactcatgaagaaactggtcatgtgcttcaagttcccttttcgtcgagttcacctgtctggggaagcaggacactttgatacctatgacacttagcggtcccaaaatgtaaaccccaggacaggactcccaaaattgcgcggagggtgggttgatagg

SEQ ID NO: 38213 - DNA, 428 bp, Glycine max
  Clone ID: PAT_MRT3847_134508C.1
ccacgcgtccgatttgtttttggtacctctttttttaaatatgcttgtcgtatcatctcatgtgaagcttttcatgagtcctataactattgacataaaaaattgtgataacatctacatgcatgcccaactattaaatgttgcgagtataatctcctctatgattgaccaacacccttgtttaaagagcttcggtaattatatataatgaagtggatactttatgctgctatatttatgattctatcgagttcaactgactatataccaatatttttgaggtataaatgcactttaaccatcttaattattactaaaaaaatgacatctaagacagattgattagaatatttttcatcaaatcattttttaaaaaatatatattttaaaacgattcttagaaaaattatttcaaaaaatttaatttt

SEQ ID NO: 38214 - DNA, 413 bp, Glycine max
  Clone ID: PAT_MRT3847_134509C.1
acgcggacgcgtgggtcagaattctctaaaagagatctttttctgctctttgaagaaagaaggggctttgcttgattttagagatgtctctgctctcagatctcatcaaccttaacctctccgataccaccgaaaaaggtatcccaaaagtccatatgatccgtggatcccgaattgaccctaagaaccaaacaaggacttttccaagaccaagtagccacccttcatagcttccccagtggaactattaagggtccaacacaagtcaagctcctggtgaatacagtgaagcgaatttatacccacaagccattttcaaggatccattcccaaggggtaacaatatcctggatatctgagaagcctacactcctgattgaaaacctattcccacttacaagaggcccgcttct

SEQ ID NO: 38215 - DNA, 241 bp, Glycine max
  unsure (1)..(241): unsure at all n locations
  Clone ID: PAT_MRT3847_13450C.1
tgccgcgtcgtagctcggatcgcttcggctggctcccccgctatgatcatttaatgagccaagacctggnctttcccctactcctttggatggaagggggggaaaaggttctaactttgggccaccgccacttcccctcaaccggaaatccaaccgtttcgcctcctgcgttcgctgatcttgacggtgctcccgatttcgctgctgcctcggacaacgtttttacgcaacctgaaattca

SEQ ID NO: 38216 - DNA, 2318 bp, Glycine max
  Clone ID: PAT_MRT3847_134510C.1
cttcattgcattattgcagataagatcaaccctactcccttcagattcgggccaagatggcatcacttcatgctaatgtgacatcagttgtttgcaagagtggcaaccatgcttctcaatcgaaattcacaagctcttcattcttgcctgggtttgatgttgttggtcgtgcttcaaatgcttggaagaaagaacttgtcccatcttccatttccttggtgcctagagccacactaacatttgatcccccaactaccaactcagacaaaaccaaacaaaggaagcacactgttgaccctgcttctccagattttcttgcccttccttcatttgaacagtgctttccaaagagcaccaaagaacacagagaagtcactcatgaagaaactggtcatgtgctcaaagttccctttcgtcgagttcacctgtctggagaagaaggacactttgatacctatgacactagcggtccccaaaatgtaaacccaaggactggactcccacagttgcgcaaagagtgggttgataggagggagaaactgggttatccaagatttactcagatgtactatgctaagcaaggaatcatcacggaagagatgctttactgtgccactcgtgagaaccttgacccagagtttgtgaggtcagaagttgctcgtggacgtgctatcattccttccaacaagaaacacttggagttagagcccatgatagttggaagaaactttttggtaaaagtaaatgccaacattggaaattctgcagttgcaagttctatagaagaggaagtttacaaggttcaatgggcaactatgtggggagcagatactgcaatggacctctcaactggtcgccatatccatgaaactcgagagtggatcctacgcaactctgctgtaccagttgggactgtgcctatttatcaagcacttgaaaaagttaatgggatcgctgaggatcttaactgggaggttttcagggacaccctgattgaacaagctgagcagggtgtagattacttcaccatccatgcaggagttcttctgagatatgttccattaacggcaaggcgcatgacaggaatagtatccaggggagggtctattcatgcaaagtggtgcttagcttaccacaaagagaattttgcttatgagcactgggatgagatacttgacatctgcaaccagtatgatgtggctctatccattggtgatgggctaagacctggatccatctatgatgcaaatgacacagcacaatttgctgagctcttgacacaaggagaactgacccgtagagcatgggaaaaggatgttcaggtgatgaatgaaggacctggacacatcccaatgcacaagattcctgaaaacatgcagaaacagttagaatggtgtagtgaagcgcctttttacactcttggtcctttaacaactgatattgcccccggctatgatcacatcacctctgcaattggtgctgccaatattggggcacttggtactgctcttctctgttatgtgactccaaaggaacatcttgggttgccaaaccgggatgacgtgaaggctggagttatagcctacaagatagcggctcatgctgctgatttagccaaaggtcatccatatgctcaagcctgggatgatgcattaagcaaggcaagatttgagttccgatggatggaccagtttgctttgtcattggatccgatgacagccatgtccttccatgacgaaaccctgccagcagatggtgcaaaagtggctcatttctgctcaatgtgtggccctaaattctgctctatgaagataacggaggatgtgaggaagtatgctgaggaacatggctatggaactgatgaagctttgcagcatgggatggatgctatgagtgctgaatttcaagctgccaagaaaactatcagcggggagcaacatggtgaagctggcggagagatttacttgccagaagaatacgttagttccaagaggacttaaatggagcaaatcagttggaagaacttggagctagcttcccaactggcttatcagggtgtggagaagcattattaagccttaggaataggagagtaagtactgtttgtgaatgtctttggtttaagaactccgtcttatgtcaacttgtattctgttatacagttctcagcaataaactgctctggcaatctagtttcatgtacaatactatctttatcttttgggctattttattaacaccatagatgggtttttttaccattcaaaaaaaaaaaaaaaaaaaaaaaaaaaaaaaaaaaaaaaaaaaaaaaggaaaaa

SEQ ID NO: 38217 - DNA, 750 bp, Glycine max
  unsure (1)..(750): unsure at all n locations
  Clone ID: PAT_MRT3847_134511C.1
gttaggttcacatcccatttctaggaagctctctagtttgaagatcatgacgagaagttaattgactaactactttgtgaatattcgggccaagatggcatcacttcatgctaatgtgacatcagttgtttgcaagagtggcaaccatgcttctcaatcgaaattcacaagctcttcattcttgcctgggtttgatgttgttggtcgtgcttcaaatgcttggaagaaagaacttgtcccatcttccatttccttggtgcctagagccacactaacatttgatcccccaactaccaactcagacaaaaccaaacaaaggaagcacactgttgaccctgcttctccagattttcttgcccttccttcatttgaacagtgctttccaaagagcaccaaagaacacagagaagtcactcatgaagaaactggtcatgtgctcaaagttccctttcgtcgagttcacctgtctggagaagaaggacactttgatacctatgacactagcggtccccaaaatgtaaacccaaggactggactcccacagttgcgcaaagagtgggttgataggagggagaaactgggttatccaagatttactcagatgtactatgctaagcaaggaatcatcacggaagagatgctttactgtgccactcgtgagaaccttgacccagagtttgtgaggtcagaagttgctcgtggacgtgctatcattccttncaacaagaaacacttggagttagagcccat

SEQ ID NO: 38218 - DNA, 650 bp, Glycine max
  Clone ID: PAT_MRT3847_134512C.1
ggacgcgtgggtaatttagtatacattatttttctgtcactgagtataacttggatctttatcctctaaatttcacccattgcttttgaggggttaaatccttttttctttttaacaattccataaatatgatgaaaaaccaccatcactggttttgaagtgaaatttgttaggttcacatcccatttctaggaagctctctagtttgaagatcatgacgagaagttaattgactaactactttgtgaatgtgaaaattcataaatgaagttatcttttttaacaaaaatctattgatatctgtgtatagggatagatatgttcattatactgcatgcatgttgtaatttaacttaaattttgtctttcaaaacttgaaatgctgtagattcgggccaagatggcatcacttcatgctaatgtgacatcagttgtttgcaagagtggcaaccatgcttctcaatcgaaattcacaagctcttcattcttgcctgggtttgatgttgttggtcgtgcttcaaatgcttggaagaaagaacttgtcccatcttccatttccttggtgcctagagccacactaacatttgatcccccaactaccaactcagacaaaaccaaacaaaggaagcacactgttgaccctgcttctc

SEQ ID NO: 38219 - DNA, 266 bp, Glycine max
  Clone ID: PAT_MRT3847_134513C.1
gggggtcttccctcggctctggttttcaactctctaattctgccgggtttaaccctccctttaactttccaccgccaacaccagcgcccctgccaccgcctcaggttcaacctcaccctcagccttagcaggaacaacaccatatagcagaacaacagggatggtccatcacagcgtcgtcgtgttcaatctgtctttgttgaccgtgggggttgatctagctgctaatctttgtgtgcgagctttatttcccatttgtagtaggt

SEQ ID NO: 38220 - DNA, 473 bp, Glycine max
  Clone ID: PAT_MRT3847_134514C.1
gactacggtaaaataaataaatttgtcatatcaatatcaattttcatacatttccatatataaataaataaatttgtcatggattgcaatatgcaactttgttgactagagttacacaactaaaagtagagaccacgaaatcgggtgtgcaatatggcagcacacctcaagaggacgaattctaggcaacaagaacacaaatgaagcattaaaatagattggaaccatttgttccaaaacgctaaaagaaggccgaaatttccatttcatcacagaatcactaatctgacagtctagtcaagccaccaatcactacagcactgtcagttgcagaaatacattcatcctccacgtatggtattgttttccttagggtcaggtttattggaatacgtccatttcctgtattgacgctggtctggtctatacaaatgggagcgtagtgagaaccagcttacttaagaagcacaaac

SEQ ID NO: 38221 - DNA, 691 bp, Glycine max
  Clone ID: PAT_MRT3847_134515C.1
ggctcgagatgatgtggctctttttattggtgatgggctaagacctggatccatctatgatgcaaatgacacagcacaatttgctgagctcttgacacaaggagaactgacccgtagagcatgggaaaaggatgttcaggtgataccaatcaaactttctttattgcatgatactaataattttatggctaaatgtaatgatttagtctttaacaatgtttgcatgtctatttattgtattacttttagttgctaattcttcagcatgaacaattaagattttccaaggataattctggtcacatattattaaaattacttactttgataggaataggctaataaataatgataataataataatccatcacatgggaaaggtgtattgaaaagatgctgttgaatttaccgatgaagttcctagttgggccaccttgtacaactaaatataatgcactatgtttctataaagattttgatatatggagatcctatctaatttcgtatgatattaaactatcatcatctgatgcgatattacctgatatatctctggagacgatgggggcttattgtatactgagttactttacaagtgatgaatgaaggacctggacacatcccaatgcacaagattcctgaaaacatgcagaaacagttagaatggtgtagtgaagcgcctttttacac

SEQ ID NO: 38222 - DNA, 285 bp, Glycine max
  Clone ID: PAT_MRT3847_134516C.1
atttcgaaataaattcacaaataatgtagggtggatcctaattgctttcttatcctatcctattgactcaccaaacaacagatgaaaaattttaagcaggatctgatagcatatcttatcatatatcaggttctcctgaccatcaaggaagcccatggaggtaatacaaaaccattttgatgtctctacctggcatcttaagcttttaggatagctgactctttacatgatatcaaagtgtctataaccgagtgattgaatgccctactcattctttcaaataaa

SEQ ID NO: 38223 - DNA, 1120 bp, Glycine max
  Clone ID: PAT_MRT3847_134517C.1
gacttcacaactcaaactgcttcattgcataattgcagataagatcaacccttctaccttcagatcggatgataaaacctttacaatctgatattggaggatgtttgttggtgttagaatcatgggtgtgaaactgcattatatacatccttgccccacaaatacatgacctatatgataaagaagtagaaggaagacttgaattttctacgaaagtgatctcagattcgcgggaagatggcatcacttcatgctaatgtgacatcagttgtttacaacagtggcaaccgtgtttctcaatcgaaatttgcaagctcttccttcttgtctgggttcgatgttgttggtcgtgcttcaagtgcttggaagaaggaacttgtcccatcttccatttccttggtgcctagagccaccctaacatttgatcccccaactaccaattcagacataaccaagcaaaagaagcacactcttgaccctgcttctccagattttcttcctcttccttcatttgaacagtgctttccaaagagcaccaaagaacacagggaagtcactcatgaagaaactggtcatgtgctcaaagttccctttcgtcgagttcacctgtctggggaagcaggacactttgatacctatgacactagcggtccccaaaatgtaaacccaaggacaggactcccaaaattgcgcggagggtgggttgataggagggagaaactgggttatccaagattcactcagatgtactacgctaagcaaggaatcatcactgaggagatgctttactgtgccactcgtgagaaccttgacccagagtttgtgaggtcagaagttgctcgtggacgtgctatcatcccttcgaacaagaaacacttggagttagagcccatgatagttggaagaaactttttggtaaaagtaaatgccaacattgggaattctgccgttgctagctctatagaagaggaagtttacaaggttcaatgggcaactatgtggggagcagatactgccatggatctctcgactggtcgccacatccatgaaactcgagagtggatcctacgcaactctgctgtaccaattgggactgtgcctatttatcaagcacttgaaa

SEQ ID NO: 38224 - DNA, 381 bp, Glycine max
  Clone ID: PAT_MRT3847_134518C.1
cccacgcgtgcgccacgcgttcgctccaaagagaagaagaaacttaatcgatcatcacttcacttaactaatacatcatgggagacgagacccaaaacaagtatgagagctctgaggttgagggccagaatcggggagattttgactttctcggttagaaaaaggaggaaaaaaacaagcctcttcctcaggaggaggtcatcgccaccgagtttaaaaaagtcactgtttcagaccaaggagagaacaagcacagccttttaaaaaagcttaaccgatctgacagaagctttagcttttcatttaaggaggaaggagaagatggggagaaaaggatgaaaaataggaggggccctaaggggctgaaagaaaaaatccagg

SEQ ID NO: 38225 - DNA, 203 bp, Glycine max
  Clone ID: PAT_MRT3847_134519C.1
agagcaagagacctccaagggcctgttttcttgttaactgactttatggcaaagcttagcattggacatataaaactgcattgcataacatacatggtacaccccatatatcaatgcaccattgtctgatcacttccgctgataataacatggctgaaatgctatcacttggctgtgcttgccgtatacatggtgagaacata

SEQ ID NO: 38226 - DNA, 241 bp, Glycine max
  Clone ID: PAT_MRT3847_13451C.1
gctgatgattgtacctgtgagatatgcaccaacactaatggtttctgcaatctttgcatgtacgtgagcggcaacaagttggggggtgggttaatacttgcctcttgattggatgtgatttgtgttctcattggactcacacatattgtgccgttggtgagcaacttatttgcatgggcccttcttcaaagagtggagcatgacttagtgaaatggtttttcatgtgtctagcatgcaata

SEQ ID NO: 38227 - DNA, 328 bp, Glycine max
  Clone ID: PAT_MRT3847_134520C.1
agagctcctgttctcgtaatataacactaagactttttcctattaacatgaattttttctgggtattcgagacacaaatttcgtctattgttttgagatcaacgaaagacctatggttcgacacataccaaattgtctattgttttatacacacatgcgaactggaccttacacgccacttctgtctccctcaatcagcaaggattatttgaccttactgctaacccaataaccatcttcttttgttgaaactgcttatattacaataccgcattctgctctgtgagtagcacctatcgtactgcttttaccattgttaaccccatct

SEQ ID NO: 38228 - DNA, 115 bp, Glycine max
  unsure (1)..(115): unsure at all n locations
  Clone ID: PAT_MRT3847_134521C.1
acgaggtgatggagaagaaatgctcacaggcaagaaatgtgggcacaccataaataatgagaacanagatgtgagggaaatctttagtctcatgaagtttccccagctccttgct

SEQ ID NO: 38229 - DNA, 138 bp, Glycine max
  Clone ID: PAT_MRT3847_134522C.1
gagtgatcagtcatggcgaaagccgtaatccgagaagaaacgcgactcaaattggcgggggatccgctcaacccatccccaattccatcccaggggggtcttttaatcggaaaggtcaagctccctttgggcccggcc

SEQ ID NO: 38230 - DNA, 610 bp, Glycine max
  unsure (1)..(610): unsure at all n locations
  Clone ID: PAT_MRT3847_134523C.1
ccacgcgtccggaactataaagttattgattggatagtatttttattgatattataaaaaacatcacttgggtagcattaggaaaacaaattaaaataagatgaagcataacttatgcataatggtattaagactacataggttaaacatctcaatttttattccactaaaaaagggggaatagaacattattattccattatgtttgtgcgccaaatgctacctttgattggagtcatgtttatttcacttaattaggtttcacaatatatgttttgtgtataaatataatattttagttttaatttatgagtttcttaatagaaatttggtttgattgttcccatttattgtttaataggtccaatatgaatttccaatttggttggcactgtngaaatgttttcttaattttgtttgctgatttttctttaataattattttataacttttttgggtcttcaatttcattatttgacattccttgatcaattggtatttctataaataaaatcagtgataaaattaaactgtttatattaatactaatattatattaatattaatatgaatatgggaaattattattattattattaataattatta

SEQ ID NO: 38231 - DNA, 217 bp, Glycine max
  unsure (1)..(217): unsure at all n locations
  Clone ID: PAT_MRT3847_134524C.1
attaattcccggtcgacaatctcacagtccgccctcgcgctttttnttttttttttttttnnaaaacaacacacacgtcaaagattacttccactattaaaagaggtgtgttaatcctcaaataggcagagctttctcacacagtgtcatgcttcatttttccttttgttaataaaacactctcactcaactttatttttcatattttccttatttt

SEQ ID NO: 38232 - DNA, 238 bp, Glycine max
  Clone ID: PAT_MRT3847_134525C.1
gctacgcgcgacaatctccagcgcattcccctgcctaaatttccaactgtgccccttccacaacaccatcatttcaaacctcatctcgagctccatccgcgccacactcgattaccccctcaactacacacacagctactgagccaacctcatcccgccctacataaatcacataagatacctcaactccgacctcagactcgtcaacaacatcaccaagctcacaacaacctcatta

SEQ ID NO: 38233 - DNA, 1277 bp, Glycine max
  unsure (1)..(1277): unsure at all n locations
  Clone ID: PAT_MRT3847_134526C.1
cccacgcgtacgcccacgcgtccgcccacgcgtccgcgcgtattagcataatcgctgacgcagatgcaaacatcgaaggagaacgcgatgttttgttcctctttggttcttcttccccttcccaatcttcaactttagggttcctttaatctcgttattcctcttcactcccaaactccgttcactccaacaacactccgatttagaaatggatggaccggctggtcgaggtggtgctggactggacatgtttctaccaaattataaattgggaaaaacactcgggattggatcttttggcaaggtgaaaattgcagaacatgtgttgactggccataaggttgcgatcaagatccttaaccgacgcaagataaagaacatggaaatggaagaaaaagtgagaagagaaatcaaaattttaagattattcatgcatcctcacattattcgactttatgaagtcatagaaactccaactgacatatatgttgtcatggagtatgtgaagtctggagagcttttcgattacatagtagagaagggtaggttgcaggaagatgaagctcgtaatttttttcagcagataatctctggggtggagtactgtcacaggaatatggtggttcatagagatttgaagcctgagaatttacttttggactccaaatgtaatgtcaagattgctgattttggcttgagcaacatcatgcgtgatggtcactttcttaaaacaagttgtggaagccctaactatgcagctcctgaggttatctctgggaaattgtatgctggacctgaagtggatgtctggagctgtggtgtaattttatatgcccttctttgtggcacccttccttttgatgatgaaaatattccaaatctcttcaagaaaataaagggtgggatttacactcttcccagtcatctatcacccggtgctagagatttgataccagggatgcttgtggttgaccctatgaggagaatgaccatacctgagatccgtcaacacccatggttccaagctcgacttccacgttatttagctgtgccaccaccagatacaatgcaacaggccaaaaagattgatgaggagatccttcaggaagtggagaaaaggatttgcacggaacaaatgggttgatctcttggggacaagatacaaaatgagggtactgtggcatactattntgtattggacaaccgatttcgtgtttccagcggctatcttggagctgagtttcaagagaccatggattgccgttttaatcaaatgc

SEQ ID NO: 38234 - DNA, 405 bp, Glycine max
  unsure (1)..(405): unsure at all n locations
  Clone ID: PAT_MRT3847_134527C.1
acgaggtactttggaaagggtagggaggatggaggccctggtttagaggaagtagaacatgtgaatactattttcacattgcttaagcatgtttatgccttttctgtttctgattatatcccgtgcttgaggattcttgatttagatggccataagagcaaggtgaagaaaggtatgaggacgatgaagaagtatcatgatccaatcattgaaaagagaatgaagcaatggaatgatggatcaaagaccgttgaagaggacttgctggatgttctcatctcactcaaagatgtcaacaataatcctacattgacattgaaggaaatcaaggccctaactattgtaatacattctttnctttcggtaactcaatcttccccttgcatgatcacttcatcaccaatc

SEQ ID NO: 38235 - DNA, 212 bp, Glycine max
  unsure (1)..(212): unsure at all n locations
  Clone ID: PAT_MRT3847_134528C.1
ttagaattgaattttccggcaccncacnacaccacgggaggctttttttttttgaaaaccctaaccacaaaatcactttcatcaaatacagaaactttctatcaacacaaactttacttccacctctactactacactcaatatttattccgtaactcttaccaatcccaataacaaactctagtttaacttattatctatatcgtctgccc

SEQ ID NO: 38236 - DNA, 1156 bp, Glycine max
  unsure (1)..(1156): unsure at all n locations
  Clone ID: PAT_MRT3847_134529C.1
aagaaagaacttgctctgctctctctttgctttgctgcttctccctataatctctctgcaaacttgttcagcaagaaaccactttagaatcagcataaagttgggttatttcaagcttctgattccaggacgacaacaacaacaacaacaacaaaaagaagtgattgatttgtgatggaagataaatatagtctaggcaggcagcatagtgggatatggaagtccttgagagatggagactttgatgaagaagaagtttgggacgttttcaagaacagaagtagtgattatggtacttctggggttagcaagttcaaagacaaagatcaatcctcttctgttcctgttcctgctaggcctagttcagccagaatgatcccaagatctagcaatagcagcagtgctagttcctccaatgaagatacggttcttcagcaatcagcacctgtcaacattcctgactggtcaaagatttataggactaaactccccaagaacagtgctaattcaaggtttgatggtgatggtgttgctaactatggtgggggtagtgatgaggatggagaggaaaatgatgagagtgattccaagtttcctccacatgagtttattgcccgaaggcttgaaaggagtcagatatcctcattttctgttttagaaggtgctgggagaaccctcaaaggtagggatcttagcaaagtgaggaatgctgtactctcaaaaactggtttcctcgaatcactataaagaggtctcttgagtagtgatgtagcaaaggcttgagtagtgatgtagctttatggtaaaacataatcaattaatttttcatggtgaaggtaaaaacaacaaaaagttgtttccacttttttatgggaccacctgattttatggggtagaattgatttttatgtgccatccaaacatgatagtagctcttttacatttgggatgtatagtagggtttgtagttagaggttatttaggaatggatgttgtgttcaaatgcttggggtataaaaaaattgtttaggagccatgttcattctccttctgttaaatcaaattgtttgtggcaatcaaaactgatttccttccccttctgttgaaaaaaaaaaaaaaaaaaataaatntnntnnnnnnnnnnnnnnnnnnnnnn

SEQ ID NO: 38237 - DNA, 431 bp, Glycine max
  Clone ID: PAT_MRT3847_13452C.1
cccgcgtccgcctaacactaaccctaaccctaacactaaccccaaccccaaccccaaccccaaccccaaccccaactaattcgaaattcgcttccgtggcttcttccatctcacaaggtcaattcatcttaacccaattcttcactttttctatgtagtctctgggtttttccattccttaatttcgtctagttacaaaatttgaattcggtgaacgttagggtttcatattttacaaagctcgcctattcgtttcaaattcaccgattcggttaaagattttcaacaaaatcaaaattttatgggaagcaatgatagtttcggcgacaggattttcaaaacccgttcccatctggcggacgtcacgaatcgtgcggcgaaaagggcggtttctttagtttctggcgatggcggggacttgcagttcacaa

SEQ ID NO: 38238 - DNA, 526 bp, Glycine max
  unsure (1)..(526): unsure at all n locations
  Clone ID: PAT_MRT3847_134530C.1
ccttcanaaagaagaacttgctctgctctctctttgctttgctgcttctccctataatctctctgcaaacttgttcagcaagaaaccactttagaatcagcataaagttgggttatttcaagcttctgattccaggacgacaacaacaacaacaacaacaaaaagtggttccttttatttttcctcaataaaataccaaatatcttactgtatcaaatataatcacctcctgtgatttaaacttttgggtctaaaattccccccttaatttccaaattcccttttttggctaatgcttaaaccagtgaaaattctagttcaataatttgagataattttcttcacatttgtgttatgtgactatgcaggaagtgattgatttgtgatggaagataaatatagtctaggcaggcagcatagtgggatatggaagtccttgagagatggagactttgatgaaaaaaaagtttgggacgttntcaagaacagaagtagtgattatggtacttctggggttagcaagttc

SEQ ID NO: 38239 - DNA, 334 bp, Glycine max
  Clone ID: PAT_MRT3847_134531C.1
agatgcatcatctgtctttaatgtgcatggtgtaaattactctcatgcgctcctgtctttttaacctgttgacgctactacaaacgttaatacatcaccttatttagacctggagctcttacagaaaattgctcctgttattaaggatcaccttgtgattctcaatgaagactcattacggaaaaactctgtgcttgtgtaccatttacttgatgaacttatcgattttggttatgttcaaacagcatctactgaatagatgttgtcctatgtttttgatgagccgctaccaatggatgctgcacgtctgttaactcctggacctgctgcaatt

SEQ ID NO: 38240 - DNA, 292 bp, Glycine max
  Clone ID: PAT_MRT3847_134532C.1
catttacagaatacatattcacacacagtctctctggtgtaggtgcgttttgagaccggagttgtcacttgataggtatactgacccattatacaccttcgcttctgaatcgaatgaacctaagatggtaaatgatgcattcgatcagactcgtatcgctcacatgcatagtaactgtgtggaggatggaatgcagaccagtgacgcatgaatgatagtgatctaagagccctatcatgcgtgatctacttcatattgctattggatacacgttgtgcaaactagtaagcgg

SEQ ID NO: 38241 - DNA, 924 bp, Glycine max
  Clone ID: PAT_MRT3847_134533C.1
cggaattcccgggtcgacccacgcgtccgcggacgcgtttgcgacccacgcgtccggaacaatgttttttgtttccaccaattgccaacccaaccaaaataaaaagttgtctttctcattggtcttctcttctccgcgttgttgttgtttttttaagggtttttgtgaactgattcagcttttggaacttcactgggaaatttgattgttctgtcagtaaaacggtgccgttgaggttggagatggaggaaccgctacaagaagagcatgctcctcccaacaagcgcttcaaatcttcatccgcttcacaagatgagcaatggaatgcttcaaacggtgcatcatcttccagttctccctcccagtacaatatacttgatgagcctagccctctgggcttacgtctgaggaagagcccttcgcttttagatttgatacaaatgaagctttctcaagggaatgtgattattgcaaatacacaagatgaaaattttataagctctggattgaaaaaggagagtcggggtgctgctgcatcaggttctgtggagaagcttaaggcttcaaatttcccagcttcacttttaagaattggttcatgggaggtatatccaagattactactacatgccactagtattttggggaaaaaaaaatttcagtgagttttacttagcttaaggttctctttatggcagtataaatcaaaacatgagggtgacttagtggcaaaatgttacttcgctaaacagaagcttgtttgggaagttattgaaggtgaactaaagagcaaaatggaaatccaatggccagatatcatgggacttaaggcaaattgtgctgatactgagcctagctcggtggctggggggggggattgatagtggtgttggggcttggtgtggggggtggggtggtgggggg

SEQ ID NO: 38242 - DNA, 802 bp, Glycine max
  Clone ID: PAT_MRT3847_134534C.1
gatctggcaaaatacacaagtttactcaaaataaattattgttcaaaatagaaagtcgcttctgaatcttcagtgaaatttacaacttgttgctataaaatgtataacaattatcattccataaaaacagtatattcagtacactactagaagagatgaaatattatctaaagacatggattgttttcaattcagtagaaagacaacttatataagttctcttggcaaggggaagcttcagaacagtacctttgaattccccagaatcattgtaatccttagcaccttgctcctcatgtggtaactggtttcttttgtcttcatctgattttagacattccaagtcatcttttccaggaaatgcccatggcaaggatgtggaatttgagtccagtgattgactcaaaggataatgaacatcgtattcgaccatgatgtcactaccagaagaaatatttggcaaggatcccgaaagctgcacaacttcctccaccgcagctatggttctgggaatgactatgggattggatattgctgttaacttttcagtgtcattcccataagaaacatgatcttctttatctacatgttcaggggagaatgatctctcgaatcgatcattgattacacttttgtcaaggtcactaaaaaggaaattttcgtcctctgaacttggtgatgatgatctccttgatgctttacttggagatgatagtgtgctagagacatttttgataacacaatttggctcaacttttttctcatttgaataatgtcctaggctcattttgacagtttgagg

SEQ ID NO: 38243 - DNA, 513 bp, Glycine max
  Clone ID: PAT_MRT3847_134535C.1
gcaatatagcctcttagacatagaaaaatattaatatttgctttttattttgtttgtttgttggcttgcttgcttgtttagctcttaaacacatttgtttgttggtcttgaactcttgattgatgctcctgagttattatgagttgaatcatggattgaccataaggaatattcgctattttagtttaagaagtatgtgttaggaaatggtgaacataacaggaggctgtcttttaccagaaagttttttagcagtagtcaaaacattagaatagaatatagtagaagcaactcttttcttttcaataactctcaagcacatgagtgtcaataactttgtctatcatgaatttgtgggaagtaaaagagaactactctttttgttttatatttttttgttgggatattcctatattttactgacattataaatgtaatcagaattccccatggaaatttattgagaaagctataggaaaatttaagggagaatcatcactagaggatgtatta

SEQ ID NO: 38244 - DNA, 1119 bp, Glycine max
  Clone ID: PAT_MRT3847_134536C.1
cacctccgatattcgggctcgagcttgcattgacccacttctaagagagagaaagagaaggagagagagagagagagaggtaaacatatatcaaatgatgatcatggcttgagggtcatcatcaccccatctgatcttctatttctgaggaagtatttctcatcctttgttcctaggttggttttcatggtagctctatatatgttagcttattaagagaacaagtctgagataaaaaggagcttccacttactctaccaattaccaccgtcgccgttcagaagtagcctccaccgaccaccgcaggcgccacaaccatcctactttgatccgcttccctcatacctaacaaattattccactcttcttctattacgcctttggattctgttgcgggatgaaacaactcaacaagccaagcatatcccttgcagtaaatattccagcaacataagaaacctgaagcagtataagtaactggtgagaaagcaatttgatcaattagaagaagaactttagcaggttgaagagctttattctataattaatttgatggctcgacaagtgtgtgatgacaaattatcaactggattctgctactctgatgtatcatcgggaaatccaacgatgttggtgaaccagatccaaggctttgtgtcagacccggagatgtacaacctcaccacgggcatggaaatgatagggtttccaaagagtgacaccaacgctgtcatgtggagaagtttcatccccgaaccgggtccttcttcttccaaaaccatcaacgattcttccaccactttctaccaccacgactacaacaacaagaatgcagatttcacaccagcagggaatatttctgaaacaagtgccgagaatctaatcgtgggaaatcacgattcagccccgtggcaagacaacaacaacaacagatttgacgattcttctctaaggtgtgtgtttccttgtgaaaccaacgaaaggcctagccaaggtctttcactctctcttagttcaaccaacccttccactatcgggttgcaatcttttgagctaagacaaacaggccatcatcctgattttgtttcgtcgagttccagagaagggttctttggaaaa

SEQ ID NO: 38245 - DNA, 245 bp, Glycine max
  Clone ID: PAT_MRT3847_134537C.1
gacacgcgtcttgtgatcactcattgcgtctggtacgctagactaaatgcacgcctttacagggggcgctgatgttgggtgcactagccagcttcttctttcacctttcactctgcatatctgttctcctagaaggccatagttacctccgctcacagtgatcatgaggccttcctatgggagctttaagctgccgattcattcactgtcaccagtgattcgtctcgcgaagtttttggcaggag

SEQ ID NO: 38246 - DNA, 399 bp, Glycine max
  Clone ID: PAT_MRT3847_134538C.1
cccaatggaaaaggatgaagcccaagcaaaacttaaactattaattgtgtgaagccactattaagcccataaatttttttatatatttatttggcccactgtttaaagtatgttatttatcttttgtcaatcctataatttggttttgtttcaataaaaaaaaacttttggctttataaaattggtgagactttcttagttcttgtgaccaatctcaactataagaaatctgggcgtctccctgactatttttcaccgaagtgcgtctaccatgactatttcctttactgaagtgacgtatccaaactcatacctgtatcaacatctgctcctatcaggtcatatcatctgtatagagttgactcttgatcaggttctatcctatcttatattttcttg

SEQ ID NO: 38247 - DNA, 534 bp, Glycine max
  Clone ID: PAT_MRT3847_134539C.1
ggaagatccatgctcccgctcccataatactgatttgaaagattggcactacgccatatcgctgtgtgatatacatgatttctagcctagtgggtaatgctgctgcccttgtgttccttatgtctctaatgacacacgcattgccagctagtgctggaagcaccatgtgtgttgaatatcacagaggaatgatagaattctatcatgactgacatctgcgctttcacgcatagcccatagacgtatgagcctatacacagctaatggtatcataatgagcccacgttgactggggcaacactaaataacttacttctcgagatgtgtcggattctaaggcctgacagggcttttatcttccgagactatctctaacactgtaaccaccatagcaaagaagaacccagcttgttatgacacgccacactgatagaccatgtagatggtcctatgcagcgtcatgagatacgggatggcctacgcgttggatgagttggacccaagcaccccgattcctaacgcgaggatcgcaac

SEQ ID NO: 38248 - DNA, 1667 bp, Glycine max
  Clone ID: PAT_MRT3847_13453C.1
aaaatcaaagctttcatcggaggtcttgatttatgtgtgggccgatatgataccccaaaccattccatctttaggactttgcagacaacacacaaagatgactatcataatcctaactttgaggggccagttactggttgtccaagacaaccatggcatgatttgcattcccaagttgatggtccagcagcatatgacattctcaccaattttgaggagcgttggttaagggcattaaaaatgcatagatttcaaaagatgaaaagttcacatgatgattcattactgaaaattgatagaatccctgacattgttggcattgatgaagttccttgccagaatgaaaataaccgggagacttggcatgcccaggtcttccgttcaattgattctaattctgtgaaaggatttccaaaggaaccacaagatgctataagaaggaacttggtttgtggaaagaatgtactgatagacatgagcatacattcagcgtatgtcaaggcaattcgagcagcccaaaagtttatctatattgagaaccaatactttcttggctcgtcatataattgggattcttacaaagaccttggtgcaaacaacttaattccaatggaaattgcattaaaaatagccaataaaatcaaacaacatgagagattttctgtgtatattgtcattcctatgtggcctgaaggtgtacctacaagtacagctactcagaggattctcttttggcagttcaaaacaatgcaaatgatgtatgaaacaatttacaaggccctacaggaggctgggcttgacaataagtatgaaccacaggactacttgaatttcttttgccttggcaatcgtgagatacctgacaatgaaaatgttttaaatgatgtaaaaactactggagaaaacaagcctcaggcactcactaaaaagaaccggagattcatgatttatgttcattcaaaaggaatgatagtggatgatgaatatgtgttactggggtctgcaaacataaaccagcgatccatggaaggcaccagagatacagagatagcaatgggggcatatcagcctaatcatacttgggcaaagaagcaatctaaacctcacggacaggtgcatggttatagaatgtcactatggagcgaacatataggagccgtggaagaatgttttgaggaaccagagagccttgaatgtgtaagacggataaggtcattgagtgagtttaactggagacaatatgcagcagaagaggtaactgaaatgaaaagtcatctattaaaatatccgcttgaagttgattcaaagggcaaagtgaagcctctttttggctgtgaggcattcccagacgttggtgggaacataagtggcactttcacactactcaaagaaaatctcaccatctgatcatttacgtgagttctctaactcagtgaatactatagcagattttagtagcttatttacaatatttagattcttttggaaaagaaaagaaaaggagtataaagatttgaacttgtaacctgctttgaagtactagtttactcaatgtcttatttaagatttaaggtagtcttaaataccagctttactattttttagtcgaataaatccatttttccttttaaaaaaaaagcaaaaaaaagggcggccaatctagagga

SEQ ID NO: 38249 - DNA, 116 bp, Glycine max
  Clone ID: PAT_MRT3847_134540C.1
ccggaaccctgccaacctttcttgtaaggacttggggatagacttggtgatcgaaggaaccggagtgtttggatacagagaaagtgcactgaaacacattaatgcaggggctcaga

SEQ ID NO: 38250 - DNA, 2526 bp, Glycine max
  Clone ID: PAT_MRT3847_134541C.1
ctgcgaggacctgaccggaattcctgtttcgtctcttggttgccgggcccgagcggaagggtacaattccgtgtgttgtgatcttgcaagacttcaattcatataaaccaaagatatactatcttcataagcaaaggactcaaagtaatagttttctttaaaaaaaattgaagtgtgggggggatctacatcgctatgggatcttcactttcgtgactctcatcagcctgggcaagaaatcgttaggcattaactctgtggtctgtttttgtacttcaatcttgatttctacatttatttatattgtgtgcttttgatcttggagcaagacttcaattcatatacaccaaagacacatactatcttcataagcaaaggactcaaagtaatagttttctacaaaaaaattgaagtttggggggggatctacatctctatgggattatcactttccttactctcatcagcctgggaagaaatcgttagacattcactatttggtctgtctttgaacttcacttttggttccaaagatggggctatgattttgagatcaggtagcttcaagataagagaatcagaaactacttcaaagggtgcctctaccaccaacttttcaagcaaattgacggattgcaggcccgaacacatggtcctcgaaccaaacctttcgtgcattaaagatatggagatcatggaatcaaagagcagtgaacaacaattgcagcaccagcctgtccctgttctctctctgcctaaagaagtggttttctcttcgccaagaccggttagtgagcttgatgctgcggctactaagcttcaaaaagtctacaagagttaccgcactagaagaaaccttgcagattgtgctgttgtggtggaagaactctggtggaaggcattagactttgcttctcttaaacggagctctgtttcattctttgatgtggagaaacacgaaaccgccgtgtcacggtggacaagagcaaagacaagagcagctaaggttggaaaaggtttgtctaaggatgataaggctcaaaaattagccttgcaacattggctcgaagctattgacccacgtcatcgctatgggcacaatttgcacatgtattacgatatttggtttgaaaaccaaagcacccatcaacattctagctttctagctggggctgctacaacagctgtaggaagattaatggctcaacaaggtgtacttgacgctattgcgctatatagtggtcactatcaccatacagaagagaactttaaagaattgaaaagggtaagctagtatacaaacaagatggtaggtttgtggatactaatggaaattccaaatggatatttgttcttagcacaacaaggtccttgtatgtggggcgaaagcagaagggtgcatttcaacactctagctttctttctggggctgccacaacagctgcaggaagattagtggctcagcaaggtgtacttgaggctatttggccatatagcggtcactatcaccccacagaagagaacttcaaagaattcataagctttcttgacgagcacaaggtggacctttctaatgtcaagaaatgtgccgtagatgacgatgctccttcaattgttgggtccaattcatttattgacattaatgaatcacaacaaattaatgagggtcccactgtctcttcttccaataatgtcaacaacaatggcatcaccattaatgcaacatttaacaaagagattgaaaagaaggtggtggccacagtttttgacgtgcccaagaggctaacatgcaagtggtctactggggcaggtcccaggatcgggtgtgtgcgtgactaccctggacaccttcaaataagggccttggagcatgttaacctatctccaaggcctgcttctgcacgcccatatagttatggcccaattccttctccaaggcccagcccaaaagttagaatgtctccaaggcttgcttacatgggcttgcccagcccacgcccctcaattcctgccacaagttaagtgcctgtttgtgtggatgtttctaagggggtttttatcatcccgtggcaccaactccaaagaccaaagttcgttatttctgcgttttattcattggaaagagtgaaaattggtgacaagttggaaacaaacatagcctaacagcaaaatcatggttgggaattatatatggctaggctcacacatgtatacacttgtccccataatgacaaaaaatgtgttagttatgatgaaaattgaggtgacaccaagagagacttttaattctatctctctaattttttatttaatttttttattcttgggttaaccgaggcattttattaaccctatttgtctttggttcttttttttttttggaaagatcactcagttaattcttcattgtaagtagagtacaaaatttctaattaaacattagatattttttatctgtaataaaaattcagctattaagaacaatctggtgttgtacttctaaaaaaaaaaaactcgcctcggggc

SEQ ID NO: 38251 - DNA, 421 bp, Glycine max
  unsure (1)..(421): unsure at all n locations
  Clone ID: PAT_MRT3847_134542C.1
aagacacnagagcagagagcagnaacgngcgcagngacacngnggacgaccnctnagcgcncagaggngagaagcaggcgngaggaaggganaaggcanannagagnagagacgaaggagcancggnangaagaganncaaagaacanaggagnancacaccgcagacacncagcccanncnngancagtcagganaagaaggagagancaaagaancaanaagngncnagccnaanaggagacgaaggnagagnagangnanaanaagcgaganagncnncgcacacggaaagaaggggaaaaaagangaggaagaanaaagnaaaggnaggcaagnngaaaaagacaagcagncagaaaggaganagagggagaagggagnagnannaaannnnnaggggagnganaagagaacgnaga

SEQ ID NO: 38252 - DNA, 428 bp, Glycine max
  Clone ID: PAT_MRT3847_134543C.1
tatgcaggttgtatgttggagatggtaaagaaataaatcttgagaaatgcccaagatccatcctacaacgccagtgcattaaatatcttggaccaaaagaaagggaagagtatgaagtaattgttgaaaaagggaagctggtgtacaaacaagatgggaggcttgtggatactgacggaaagtccaaatggatatttgttcttagcaccacaaggtccttgtatgtggggcgcaagcagaaaggtgcatttcaacactctagctttctagctggggctgctacaacagctgcaggaagattagtggctcaacaaggtgtacttgaggctatttggccatatagtggtcactatcaccctacagaagagaactttaaagaattcataagcttttctgacgagcacaatgtggatctttctaatgtcaag

SEQ ID NO: 38253 - DNA, 496 bp, Glycine max
  Clone ID: PAT_MRT3847_134544C.1
ggtgtatcagaagagagggtccttacccgagtttagctcaatcgtgctgtgcgtatcagcctctacttctacgatccaaatcgtcgactcggttttaagttttatttgaattagagagaagaagtgatttggattgttttctaataatctatggggactgaaaatcctggtcgtccaaccttccctccttcaagacctgcttcatcgccttttgccgctgcacagacagtgtcacctttttcgtcaaccggtcccgtggctggatcagagcctccttcttttcgccctagtccttctgctcctccaccgcaaggcgccatgcggttttcgtcggctggacctgctgcagttagacccggagcacccagttttagacctgcaccaccagggaggttcaatgatccatcagtacctcctccagtgggaccttccaatgccccaccggctgctggacctttccagcagtttccgccaccgccttttcccccaacaatgc

SEQ ID NO: 38254 - DNA, 390 bp, Glycine max
  Clone ID: PAT_MRT3847_134545C.1
gtcctgcacaattattaaaagtcaatttatgtccttgtatggattttgtgtctaatgtttgcttgatttttagtgtaactgctcaagatcttgttgacataatcaaggcacaacttcaaaggtacaatcttttctatgtacagaaatcttttactatcctgtacaattacagtttatgccttttctctaatgtggctaaaatatgttgagtttctacagtttgtgacaaatttcagttagatgtttatcatttcaactggctaaatgcagtatgcttaatgcgggtgattattttttattctattctacagccttttaagatttttgaaggttaatattgagatattgtcttggattgagtatttgatatgatttatttattggaatatg

SEQ ID NO: 38255 - DNA, 1202 bp, Glycine max
  Clone ID: PAT_MRT3847_134546C.1
ccacgcgtccgggtgctctctgcttcgtctgggtgtatcagaagagagggtccttacccgagtttagctcaatcgtgcggtgcggatcagcctctacttctacgatccaaatcgtcgactcggtgagtcatcctctctcgatttgaatttccaacttcttctatgtcccctcccctatttttctcgatctgtcacatcacaaatccacttaaatccaaatcacctattaggcctcctactgttcttctcagaaccctaacacttccgtctctgtatccttctcctataatctttcttcatctaagtttagcaatgttcaattctcattcatcttactacttgtgctattttcaatgcgtccgaggctagttgaccgtgccaaagtgaaccaaagtgcttcccttttttacaattattgatgatttgaactgtgttgtgtttggtttctttttatgtatgtattgaacactgcgtgcatcgaattgctttcttctggcggacttggtgatggaacaaggttttaagttttgtttgaattagagcgaagaattgatttggtttgttctataataatctatggggaccgaaaatcctggtcgtccaaccttccctccttcaagacctgcttcatcgccttttgccgctgcacagacagtgtcacctttttcgtcaagcggtcccgtggctggatcagagcctccttcttttcggcctagtcctccagctcctccgccgcaaggcgccatgcggttttcgtcggctggacctgctgcagttagacccggagcacccagttttagacctgcaccaccagggaggttcaatgatccatcagtacctcctccagtgggaccttccaatgccccaccggctgctggacctttccagcagtttccgccaccgccttttcccccaacaatgcagccacgtggtcctccgcagccaatgttaccgccatcaattcaatctccacctagtcaagcactgccttttcccacgtctcttccggctcaaccacagatgccttctgttccaatgggctctcccccgccgccgccacaaagtgctgctcctgcacatttaggttcaaattttcctcctccgccacctacaattcagccatcttttcctgggtacccgagtaagcatgccagtcctgaaatgcaagctccacctatgcactcctgcgtccctgctaatca

SEQ ID NO: 38256 - DNA, 1055 bp, Glycine max
  Clone ID: PAT_MRT3847_134547C.1
ctcgagccgctcgagccgattcggctcgagtgttctccttctcagaaatcaagagcctcactggggatctcaaggatcaaattgggccaaacatgttcaagggtgtgctaccgaacaatcacctgattgcagttaaagacctgaatgcatccatagaagaaaggaagttccggagtgctgttatgaagttgggcaacatccaccacaagaaccttgtgaagctggaaggttattgttgcgagtttaaccatagatttttggtgtatgaatatgtcaaaatcggttcactgcataaatacataaatgattgtaccctttgcaagaggctaacttggagaaagagaattgaaatatgctcaagtgtggcaaaggccatttgttatttgcacactggatgtagggagttcgtgagccatggaaatttaaaatgtgagaatgtcatgttggatgaaaattcagtggccaaggtgtgtgaatatgggtttgcaatagcggatggtgaggccacatatcgtggcttttcagctgagaaggatgtgggggattttggaaagttagcgttaacgttgttcacagggtgtctagttcatgagcaactttatgagtgggcttatacagaatggatggaaggtagggcagttaatgttgttgataaaagacttgatggtgttgtcaattcagaggaactggagcgtgcgttaagaatctcattctggtgccttcaaatggatgaacgtagaagaccttctatggaggaggtagtgagagtactagatggtacattgaacgttgatccaccaccgccgccatttgtcttgcacaggccgttacaggaagatgatccacaagaaaatggttcagattaagggtttcagtagtgtttatttatgccagctgaatttttaggaacttttttcatttatttcactttttcagtctccttcatattcaacttgtatagtagaataggactaacatcttagtaaaaagttagccatgcgctatattttttgcccctcaactaaacctatatgacgatgtgagccagtgactgt

SEQ ID NO: 38257 - DNA, 418 bp, Glycine max
  Clone ID: PAT_MRT3847_134548C.1
cacgctggctcgtccttggccgtcctttttttttttttttttttgagctctattactcacactcaccatcactggatacctcgaactacattcataaaatgaaagggataaacacaaccccagcatgacagtactttatgtggtcctagcaaagttgggccttgggataccgtgtcaacaccgttcatgaaaaaactatcaaaatcgtaggagccacacaaacccatctgcaaaaccctatgggggtcacgttttccctactataagcccgggaatcgggctttcactacccccatctgaacctaactcatgtctgatggttatacactgactaagtccttaaaaactgaacggtttgccttttggactggtgcggacaaattggctactaagactgcgaagatcaagtcctaaagcg

SEQ ID NO: 38258 - DNA, 730 bp, Glycine max
  unsure (1)..(730): unsure at all n locations
  Clone ID: PAT_MRT3847_134549C.1
ccacgcgtccgcggacgcgtgggctcgagctgagagtgaaatcctcaaggaggcatttagctcttttaggatcaaaactctcgcattcaatctcatagagtgttacaaaatcaaaactggtttcatccacctccaatttcaaacccttccaatcctttttcagtttcaaattccttttgcaccctcttcaaaaccctagactccattgaccccaactttgccggctccgccaagcatttgtgtcctcctccacgctccaccataatttcccattcccaaaatttctcattctccctttcctctctgaatccttgatcactctcacgcgctcctatattcactcctccatcgtcgctttctcaaacaaccagaacaccatcttcatcacatgggaacctttgtcgagggaataaaggaagaggctgtactctctcctgcgcatgctctgtcccttatagctgcctgagaagattatggatgagaaatctctgatcaagaagtatcagaaggaaatttctgagttaaagcagtcaattatacgaggtatcagatatcaacctttgccacaaaattaggagtttggaacattgctttccttggttctggaaatttgctggtgaagtatattgttttctgttttggcagcaatttatatngcctcaggtgaatataaancttccagcggttggttacctcgtaccggctcatacaatttttgcaataagcttga

SEQ ID NO: 38259 - DNA, 401 bp, Glycine max
  unsure (1)..(401): unsure at all n locations
  Clone ID: PAT_MRT3847_13454C.1
gtatggaaaatgatggaaagcttgcaactttaacgttgcagatatggaaaatttggtattgatttgattccccgaattatttacattctggtcttcttgagtttctttgcaacaaaaccaattttctgaggaaaaaccaacatgttgggagtttgtttactttgctttgcatttatgggagcttgtgttttggcattcttgtaggaatggatgaaaaactgagaaataaaccatgtgtcatgtctaaatatacattctaattttcattttgtgtcccttcattcttctcagtctcattttggcttctatatggcacactctactcttcttgtgattgtggaggagtgtagggtttttggtaccctctgcttcacttgacanatgttgagaatgcatgcatg

SEQ ID NO: 38260 - DNA, 193 bp, Glycine max
  Clone ID: PAT_MRT3847_134550C.1
accacgcgtgctccaactcctacgaacactcttcctcatcatacatatcatacataccgcgacagttatatctataaagcagggtagggtccacacttacagatatgtcatcctctattaatactatcatctcccagacatcacactgtatatatacacttagcctattatacacctaattttgacgcatttt

SEQ ID NO: 38261 - DNA, 655 bp, Glycine max
  Clone ID: PAT_MRT3847_134551C.1
ccacgcgtccgggcgctgctgtgagagaaacagcactcgcgattatcccaatagtctctttgattcctcaatggactctgttacgaccgagaaggatgtctcctcctcaccaatccgcgaagagcttatgcttcacacctcaagcgtttcgacttaaaccagcttcctgacgggaccgatattgctgaaccagctcttgttatcgagacggctccctctgattctgactgctacttctttctggctgcactgcacggccagaaagatctattagaaaggggggcttggggttggggctctccagaggatctattgtggactcaaccgaaacgggagcctgaccccacatttctgtctgagcactgatgcacttgccagacgcattctgcaacagactcaaaacatgagacattggtgagattgataccgaatgagggaggaatatcacttctagcggccatgaggatcttgaccagaggtgctgagcggactgtggatgatgcctgatcgaacatctctttgagaactgatgatgcattctaggattgatggtggcttattagaagatggcaacaaggataacatcagtgttgtttgctaggaatagtacaatgggggttggtgttaaatgagtaacctttattataatttggag

SEQ ID NO: 38262 - DNA, 237 bp, Glycine max
  Clone ID: PAT_MRT3847_134552C.1
gattacatgaattcgtagataacatgattttgaaacatttttaatgtttagtggttgaacctcacctaagaccaaatagcgaactaccacctgctcttagtaaaatgcatttattctaaaatgcaattgataaaaacatatttggtgtctttgctcttgagccatattctgattagaaaacaaaacacctaaacaggtaacaagaaacaattttgaaaccaaccagaaaacttaggt

SEQ ID NO: 38263 - DNA, 385 bp, Glycine max
  Clone ID: PAT_MRT3847_134553C.1
tctggaaaatcaaaacggaaatgcgccaaaggaacttgctaaattcgacaaatcatactcaggacatcacagatacaaaaagggcgcatcccaacttacaagtaacatactgaggaggtttagacccatcttcactgtacaatacccagaaaatgaaaagtaatggctatcagaagccaatccaactatacatccggataagtactgagtcatataaaaagaccaatatcattccgatcaaactgctcatcatggacgatgatcatgccactttttatttccctggctgcccggaaaccaatgtccataagaacccctctggcttgaccattcaagtctaggatatctaccatgattcatgctggactctgggcaattactacct

SEQ ID NO: 38264 - DNA, 313 bp, Glycine max
  unsure (1)..(313): unsure at all n locations
  Clone ID: PAT_MRT3847_134554C.1
nagtcgatngnacgcgtacgtaagctcggaattcggctcgagannncatgtttngcnaaatntngantgggtatnnataaactgttgnngctggntttnnnanganccttggagttgnatatgagaagagntancggtattggggcttngatattaggtcatgtactaagtacatntngatgaactntntcaggctaagtaattgttaataaaccatttntcccattagactncactnttgcagcacgtgtccaataagnctgantanatctctaacnngtgantgaacannaanagcccgtnngattnaagn

SEQ ID NO: 38265 - DNA, 314 bp, Glycine max
  Clone ID: PAT_MRT3847_134555C.1
ggctcgagtgtaaatatgactgtgcatttgttttctttatcatgtgtccattcctgagcataaatcacgggaatggaattagtttattatacatgaacttgaaatgcatatgatttgaatttgcatgaaatattagggctagtggaatatttttacctttcttttggtgaggaaaaacaccctcattcatgtgtgtgtgtgctcgagtgagacacagagattcagaaacatggtggtgttcacctaccttgaatgcagggcaatccaggtattacagaaatggtcagcgtgggacaatacttctggacaaagac

SEQ ID NO: 38266 - DNA, 424 bp, Glycine max
  Clone ID: PAT_MRT3847_134556C.1
agcctacccagggaaggaccataccactgctgactgcagatggttcctatatagtgaggcccgctgaacatggtgtacaggaacatgggctctaccgaacgtccatttcccaactttactatcccatggtggttcaccagcccttgtccccatatgggggcccttatcgaactgctaataaacacctcctgggactattgtataaacataatgaacaattccactgcttaccatgactgatcaccattaacctagaccttccgagtgattgaacatctttcctcagaacagctgctcatggacactactacaagggatgaccctgactccacctgggaagacactaacccccatccgtgtgtgaagccgaaacccatagattggggctaagaccatagcttgcataaactgatgctttgctatg

SEQ ID NO: 38267 - DNA, 172 bp, Glycine max
  Clone ID: PAT_MRT3847_134557C.1
cgaagaggaggatataggagtcattgagatagtaacaggaggtctaagagtgacagctccaatcatgaggaatccacagcaagaacaaaatgaagatgattaggtagagcatactcattgtatgtagactcacaatgattgtcaatgtcatatcaaatggagcagacacgga

SEQ ID NO: 38268 - DNA, 250 bp, Glycine max
  Clone ID: PAT_MRT3847_134558C.1
accctctgattgtcagctcactacgtgatatccctccttgggagcctatcactgcgaatacagcagagccaataacggatgctccttggctctattgtattttcttatttacctgatgctgatgttagaactagcggctactagctaaagaccactacaagagatcccactaatgtggttcactaaattgcgtgggcaaaaacatggtaaaataaaatgttagaatgcctattatattgcctagaaaact

SEQ ID NO: 38269 - DNA, 368 bp, Glycine max
  unsure (1)..(368): unsure at all n locations
  Clone ID: PAT_MRT3847_134559C.1
gaacaggaggggggagcgcgccgaagaggcnagcananggngagagaagcaagggccgnnangcaaggcggggngcagcnggggcaaaagcacccgaaanncnaggcaaggcnggncagaccccncaggagacagcaccncccacggccagaaccggngagaccccaggggcgggaaccaacattttttttttngacgccnacacacngnccgngnnngaganggcacggagggganncgcagagcacagaagaaaccaagaccgggccaaaccaggcgcnangggcaaacaanacgcccaaggaccagagaagggncnnggaggggcnggngagccagcnaacccaggaggaccnnncggcaaccca

SEQ ID NO: 38270 - DNA, 359 bp, Glycine max
  Clone ID: PAT_MRT3847_13455C.1
gtgtcgcccttttttttttttttttttttttttttttttttttccacttccaaaatgtgataatttataggtgggatgatacctgtttttgaataaccaacatgatatctggaattaatgtatacttttaataaatcatctcaaaggaaaaagatggggcaagactcggactacaaaaatacatagaccttcaaaatactgttttaaagaaaggggcaaaaaacactcaacatttaatttgctcttggggttgcccattcaactctaaggatgagattgtcatagccataaccattgagcttgccgatggctctttgtgcatcttccctgttgacaaagttaacaaagccaaacccttt

SEQ ID NO: 38271 - DNA, 2240 bp, Glycine max
  Clone ID: PAT_MRT3847_134560C.1
ttccggggtcgaaccacgcgtctcgctgcgagaagacgacagaagggggagttcccttcctagaatagcagagtatagtagcagtagcagcagcagcagcttgtcgcgtgcgtgcctctccggcgaggccgtaacaatccacaaacaacaagcttttaaatttctccttcgtttcgcttccaatggcatcaaataaccactcaccatctctcgagatattagttcgaggaccagaagatttctcgctctggaccggacctcccttcgcgaacgatcaaccaagcatcaagctcgagaaagtgaaatgcatcaacgcgaagttcagcgacgacggatccaagctcatggtgacaaaatcgaactcgctgattagcgtctacgattgcagaatcgccgaagagattagggcttttgaagtccccaatgtcgtcgccgcagcctttttcacccaatggaacttacttgcagaccttccagaagccttcggcgccgcaggagaagaacgtcacgctgtggagcatcgagaccggtgctgctgttcaccagcagtcacagaagaacatgaccaaagccaattggcctgcaattcagtttagttctgatgaagctactgcgtgtcggttggcaactaatgaggtacaattttttgatactggggatttttcgaaaggagttgtctgtcggttaagagttcccggagttgctgctgctgagctttctagtttaccaggatctcatgtagctgcgcttgcgccagaatccaagggggttcctgctagtgtacagatatttgcttgtggaaatgcgtctcaaagtcaacctgttgctcgacgtagttttttccgatgttcaaccacccaacttaaatggaatcatggctcaactgggcttctagtggtggtgcagtcagatgttgacaaaactaatcagagttactatggagaatcaaagttatgctatctgaccacggatgggatgcatgaaggacttgtgcctcttcggaaagatgggcccattcatgatgctcagtggtcatattctggcttggaatttgctgttgtatatggatttatgcctgctaaagcaactctgttcgacaagaagtgcaatcctctactagagcttggaactggtccttacaacactattcgctggaacccaaaagggaaatttttgtgtttggctggctttggtaacttgcctggtgatatggtattctgggattacattgataagaaacaacttggagccactaaggctgaatggtctgtgactagtgaatggtctccggatgggtgctatttcatgacagctacaacagctccaaggcttcaagttgacaatgggatcaagatttttcactacaatgggtcattgtacttcaagaagatgtttgacaaattgtaccaggttgattggaaaccagagtcacctggtaagtttggtgatattgccgaattaattaagtctctaaatttggtacaacttgaagataaaaaaccatcaggtcaaggaccaccaaagtctacccagacttctacaaaggcctcttctgccaaccccacaacacaaaaacctgctgcatatcgtccaccacatgctaagaatgcatctgctattcaggcagagttgtttggagagactactgcagaaacactgagcaagaatgcattacgaaacaagaaaaagagggaaaaacagaaggagaaaaaggctgcttctgatgccagttcttcatgatggaatcaatgttcttcctgactcgttctaaattgcttttctactactgcactcgcgcacctgaaaatttgaggctttcagattttggtttactggcaactttgggcagttttggtttgctcagattttgacgtgattgaagtcatgttgtaggtttgtgctttcttgagttttcagctgggatataaaaggtgggagaagataaatctctttatcctcatgataaaagaagtatttattgtaagagaagtgaaattatacgttggtcacaaacattattttgtttccggttgggatataaaaggtgagagtagaagataaatgcccctttctcctcccgataaaatatgtattttttgcaagagaaatggaattataagtagggtgcttcacacgcgtgtacgtacatgcacacacgggcataagagtatatggacaagaagtgtagtttctaatacatactgaccaagttcaaaaagaaacaagaaccaaacttaaat

SEQ ID NO: 38272 - DNA, 641 bp, Glycine max
  Clone ID: PAT_MRT3847_134561C.1
gctgaattaattaagtctctaaatttggtacaacttgaagataagaaaccatcaggtcaaggaccaccaaagtcaacccagacttctacaaaagcctcctctaccaaccccccaacacaaaaacctgctgcatatcgtcctccacatgctaagaatgcatctgctattcaggcagagttgtttggagagactcctgcagaaccactgagcaagaatgcattacgaaacaagaaaaagagggaaaaacagaaggagaaaaaggcttctgatgccagttcttcgtgatggaatcaatgttcttcctaatgcattctaaattgcttttcgactactgcactcgtgcacctgaaaatttgaggcttcaggttttgctttactaggttttaattgtattatgtccctggcaaccaactttgggaagttttgatttgctcagattttgaggttgcttgaagtcgtgttgtaggtttatgctttcagctgggatataaaaggtgggagaagataaatctctttctcatgataaaagaagtattcattgtaagagaagtgaaattatacgtaggtcacaaacattcttttgtttccggttgggatataaaaggtgagagtagaagataaatctcttttctcctcctgat

SEQ ID NO: 38273 - DNA, 301 bp, Glycine max
  Clone ID: PAT_MRT3847_134562C.1
cttccaccgctgcgagaagacgacagataggtacggctccgagaagacgacagaagggaggcacaattcacttcattaatgaatgagcatgatcatatttgtgatgtacacgtaatatacaagtgcatcttgagtaggagggctactcttataatattcaaagatatatctaatttttgtcacatgtagcccagaggttagtattttgtgcctgatcctgttctcaagaattctagtatttcagtctaaggacgtttaatcgccatgggcttgaagacacactttatgactatgttatgag

SEQ ID NO: 38274 - DNA, 180 bp, Glycine max
  Clone ID: PAT_MRT3847_134563C.1
cccacgcgtccgtacggctgcgagaagacgacagaggggggagaacctttgatgtttagggaaaaggagagaaaaatgaatggtgaaaatttgatttctgaaagacttctgttgaaatctgtgtccatgtaaacattactcttctggttgatatttagtaacaagtgtctctttctgtcc

SEQ ID NO: 38275 - DNA, 1293 bp, Glycine max
  Clone ID: PAT_MRT3847_134564C.1
cttttccgtgatttctctcactattatcatcaactatcaaattatatttgcagtggagaaggaaagaatatctatctctcattctctcgtgcctcaacgcttttttaactcctttcgcttttccattccaacctctttcacacttcagatctgtttcttcatcggttgttcaagtaaatggcctttgtcaccactgctgaagtgtgtgatgcgaacccacagttaattttgagtggggagcttcgtgcccttcagccagtttttcagatttatggccgtcgacaggttttctctggacctatagttaccttgaaggtgtttgaagacaatgttttggttcgtgagttccttgaagagaaaggcaatggaagagttctagttgttgatggaggcgcgagtttacgctgcgctatattgggtggcaaccctgtggtacaagctcaaaacaatggatgggcaggtattattgtgaatggatgtataagagatgtggatgagatcaatggttgtgatattggagtgagagcccttgcttcccatcccatgaaagccaataagaaaggcatgggagagaagcaggtccccataaatattgctgggacaaggatcagtgatggggaatggctctatgcagacactgatggaattctgatctctcgaacagagctgtctgtttgatttcaattcatgaatacttcatgtaaggactatatttatgggcagcacacgacctagtatagtgcagttcggtacttgtgttcttgacccggttccttgcttccacaaaattataaccgataaaatccccttgataatgaaagtatgttggaatgtttgtccatttcataccaacattatctgtgttgtagcttgttttaatggttgtctgttactaagtttggagagatataagtcaaaagtgcaaagtatacacatatccatattttgaccaaatgatcttattgtagtttgctgtaagatgtttcggtctagagaccggaagcaggaaagatctatcttgtgctttaaatttggttggaaacgtctctccttgtctttttttttttttccttccaaatagcagcagcagcataaggatattaactgatgtagacactaaaactcatgtatttctctcctttgtattttttagatttatctgtatcgattattattagccgaccccacctagtgggataaggcgttgttgttgttgttgtatctgtatcgattattatactaaaattctactgcatcggtttgtttgcttacgtaaaagtaccctcctttaat

SEQ ID NO: 38276 - DNA, 575 bp, Glycine max
  Clone ID: PAT_MRT3847_134565C.1
ggctcgagcccatgaaagccaataaaaaaggtatgggagagaagcatgttcctgtaaatattgctgggacaaggatcagtgatggggattggctctatgcagacactgatggaattctgatctctcgaacagagctgtctgtttgatttcaattcatgcaaggactatatttatgggcagcacaggatctagtgtagtgctttcggtacttgtgttcttgacccggttcctcgcttccacaaaattataaccgatagaatccccctcatacgtacggtaggttggagtgtttgtccatttcataccaacattatctctgttttgaattactgtcacgaaagcttgtttttcccccatatattaagttaatggttgtctgttattaagtttggagagatataagtcataagtgcaaagtatacacatccatattttgaccagatgatcttattgtagttgcataagatgttgcggtctagagaccggaagcaggaaagatctgtatcttgtgctaaaaatttggtaggaaacgtctcttcttgtcaaagcaaggaacatagactacgacaatatac

SEQ ID NO: 38277 - DNA, 141 bp, Glycine max
  Clone ID: PAT_MRT3847_134566C.1
tctcgagccgaatcggctcgagacggctgcgagacaccgatgacgagagaccgattgactcatccatacctcacttactgctagctactcacttcttccaagtcgaaccaagcatgtctctctagacattcgtaaggtcag

SEQ ID NO: 38278 - DNA, 580 bp, Glycine max
  Clone ID: PAT_MRT3847_134567C.1
tcgcgatctactagatcgcgagcgccgccctttttttttttttaattttttattgttttttgtgatgtttaattttatattttttgtttttattttttcttatttttaatttctatcattttatactcaagataacttttcttattagactccgggcccaaaaattatgagaagacagggtgttccctcttaaaaaggatctccacaaactagccccaataaaaaaaaacaaggggcttttctagaatgtttaaaaacaaaaaattttaaaccacctcttgaaaaaacgaacctaaaagccttctttgggatttttatttaaaaatatgaggggggctgacagtacccccaaatagttgtggggccaaagatccaacatgtggcatatgtgttccaaagggataacaaacttaaccgagacaaaaagacccctacccttatctaaaaaaaaatttatctgagctatcttactcgcctgtgggggggggtcccccacagagttggtttacccattaacagtgtgattactaaaaaatgcttccgcaacaaaaaaaaagggcttaaaatcagggcgatccac

SEQ ID NO: 38279 - DNA, 338 bp, Glycine max
  Clone ID: PAT_MRT3847_134568C.1
tgcgcccacgcgtcctccaaaacctaaaagaagattaacgctttaatccccaaaatcgaaatgaaggaaaccgtaagctcttaaatccctctaaccgatggcaaaactaatagggatagataaatcgccaaagattataacaagaataatactaataaacccaagctcatcaatgtcacttcaaaacatctagactagggatccaaaaagggagtatcacaatgaaaaggagaagattggaaaatgaacgtgtttcctatgaatctcatcataactattattaatggctaagatcccgatatgcttttttttcatgaagcattgttggccatcaacaa

SEQ ID NO: 38280 - DNA, 462 bp, Glycine max
  Clone ID: PAT_MRT3847_134569C.1
atctgccgatccaggggcgaggccgaagcaagctttatggctggcgttcaatacttcgtgtcgcgccataaaggccggtggaaggttgcgctcaattttgagtactccggcccctacgccactgaggaagaggcgaccgcgtcgccgtcgacgccgcggcagggcacgtcgctcaggttctcgttcaaagggaaaccaccaatttagaatcgagtggacatatggccacgacccatacccccaccagccagctaatcgctgaccacatgagatcggcgccgacctttcccgccacgcccgccccgcaacaccaaagcgcgtggcatcagcagggcggaatctcacaccgaacacttaacaggagctgaaccgcgcttctgaggccggccctgtcgagcgctgccgtgccaggttctgcagcgggcgtgcccttggtctgcgtggggaacaaggcgttcgtcg

SEQ ID NO: 38281 - DNA, 592 bp, Glycine max
  unsure (1)..(592): unsure at all n locations
  Clone ID: PAT_MRT3847_13456C.1
aaacgacagcgttctgagtcttgccttcttcgttaccctctgcacatgccttctgtgtggtaattcctacgatgaccatctttccctaccgagtcaactctatgactatgactcagtgagttgcactgataccgacccaaaccttaactacatgccggtgatcgggatcctgacccacccagcggacagtgcctctggccggctcaacaacgccaccggggtttctcacatcgccacctcctacattaaatacgtggagtccggtggtgctagagtcattccccttatctacaatgagtcacctgataaccttaacaagaagctccatttagtcaatggagtgctcgtctctggtgggtgggctgcttctggtacatattaggatactcttggaagcattattaagaaagtctcagagtactacgatgctggagaccatctcctagtgatcgccttgcacttaggtggctacctcatgatgaagatcgtatcgagcatactgatatgcttgaaccatgtactgcgacgagtttgccaagtactctatattgtggaggatagcgatgctgngggtagtctattgcanagattc

SEQ ID NO: 38282 - DNA, 328 bp, Glycine max
  Clone ID: PAT_MRT3847_134570C.1
ccttgggagttttttttgggaaaaaattagagggaaaacatgccaactgggggtccacgagggggggggggataaatctgggattataaacaagggatagggcaggccgcgcaagggagtccatttaaaggaatgaaactggagccattaaaaggaaccaatcttttgttatgcggccgttcccaccaggtcagagccactagttggcgaggatcctattgatttgtccaaaaaaatcccctctttaatctcatcggaaggtgccaggtggtttaccggcctccccccctcctgacaaacccggacgcgtgggttggcccgggaattc

SEQ ID NO: 38283 - DNA, 210 bp, Glycine max
  Clone ID: PAT_MRT3847_134571C.1
cgaccacgtacaaccacccgttctcccattcgtacgaattcaacaacattgggggcgcaaggcagctatacaaactggacaatactgtccatcaaaacacaggcaaatactgtctccatgcataccttttattcgcataacaaatagccacaggtctcaaggacccggataatccgatactaataccagaagctttcaagatctatagga

SEQ ID NO: 38284 - DNA, 1337 bp, Glycine max
  Clone ID: PAT_MRT3847_134572C.1
gctcgagcctgttggttctttttctctccgtaccttgctcctctgttttttcccaactaattccaagccaaaaccgttcggatttttcttgaccatgttgaacaacaattgtagtagcagtttattgttcagaggacccggtttagccttttcccactccattgccaccacttgcaacaagaggaacacatgctggaaggctccacaagcagctgtaagaaatgatttttgcctcccaatgagcagctccgcggtaaaaaataggacatcaattggggacataaggagtctgcgactgataaccgcggttaaaactccatacctacccaacggcaaatttgatcttgaagcatatgataacttggtgaatatgcagatcgcgaatggcgttgaaggcattcttgttgctggcacaactggtgaaggccaactaatgacctgggatgaacaaataatgctcattgcacacacagttaacagttttggcaacaaagttaaggttgtcggtaatgctggaagcaattgcacatcagaagcaatcaaggccactgagagaggttttgctgttggaatgaatgctgcacttcacataaacccttactatggaaaaacctcattggatggtttggttgctcactacaatagtgttctttccattggtccaatcatcatatacaacataccaacaaggactaatcaagatattcctcctagtgtggtccaaaatttggctcaaaaatcctaacttggttggtttaaaggagtgtgtggaaatgagaggatcaaacactacacagatcaaggaattgttgtgtggacaggaattgacaaaacaagccatgatgctagatgggattttggtgctgttggagttcaatccgttgccagcaacttgattcccggtttaatgagagaactcatgtttgagggcaagaatgctacactgaattcaaaggtgattcctctgtttgattggctctctcaggaacctgttcctattgctttgaacactgctcttgctcaacttggtgtcatcaaaccggttttcaggctaccccttttgcccttgcttgtggagaaaaggatagagtttgtcatgttggtgaaggaaattggtagagagcattttgttggagacaaagatgtgcaagttcttgatgatgatgactttatcacagttggtagatattaatctagattttatcttcttcaagtcttatttcaagttacactttctgttgttggcttttgttttcattttaaggcttgttaaagttcaaataccagatcatgggccatagccagttcaagtaaaagtaaagcaggatttgaattct

SEQ ID NO: 38285 - DNA, 1128 bp, Glycine max
  Clone ID: PAT_MRT3847_134573C.1
gattgacaaaactcaatttcaaagaaatgtcatttttctcgggactaataaattagtcctacagttttaaggactaaaatgattgtttaaactcaaacataaaaatgaattgcaaagcatttctacacctaagcaaaaattggctacaagccgacagctgcaaagcaaaataccgaacatttcaccaagaaggagtcatcccaaaacctaaatcactttctatgttgaataacttacactaatctcatagtcatggagaattcacaaaattgaacaaatttacatcagcaatgccatatgaatcgattcactcccccataaaatcacctccaagctgatgtaaattactaaaaacaaagtcttactataattcagactttgccttcatcaccatgcatcccaatattagttcagataccctatttgtatcacatggatcttagtccacatctaaatcacaacactggaattgatctcttgtttcttttcttggatgctgacctgcttccctcatctcttgatgcaatcttctcacctccatcatttccttcagacttcttgcgctctttactctgtttagttcttttctttctttcacccccatctggtatatgctctttgtttctggaagatttttttcttttcaaaggtgattcttcaacttcttcgctgaccaagatctcagttggagtttgttccttgcatggtagcgaatccactcctttaacatcaaagttagagtcaaaaagcacgtgcataatatgttgcttcaggaaaacagcagaaagaagctgtcttgtctttgtatcccaaaggcgtaaataactgtccagtccacaagaagctattacaggtagctcagggtgcctgactatggatctgatgcttccagagcattttccagaaaaacatcctagcatttttcctgtgcgtatatcaacagaagccatgtcaccagacccattccctacatagattgacttgccttactatgtcctcaggcaatgctttaattggagtctcacggaaatgaaatgagagacaggcctcctctgagccgacatgccataaaggcgaacctgaaggctgttggagccatcaacaaatattcgatggacatgtttcata

SEQ ID NO: 38286 - DNA, 367 bp, Glycine max
  Clone ID: PAT_MRT3847_134574C.1
tatgaaccaaaccattcttgatccaccttcttaattaaacttactgcggccctctttatatatcttaaaacattccactgatgccatatcctacaaaaaccatatcaaacttcaacacccttctacactactcccttaatttaaccactacttttcacacatattaagtatatcgctactttttccaccttctctttacataacactcattacaaattacctccttcgcataaaacaaagcatcacaactctaactttgctttcatttaaaaacataaaagccctttttccttgtcttctacaccaagacaacatttttaatacatcactgtgtcatctcacttttctccctcacaacttcatctat

SEQ ID NO: 38287 - DNA, 723 bp, Glycine max
  Clone ID: PAT_MRT3847_134575C.1
cccacgcgtccgcccacgcgtccgcccacgcgtccgatggaaaagacgaacaagtgagagtgtgagtttcagttctaaaccattgtcgtcgtcgtcgttatcgccgatgcattttccgatgaaaattcagccaattgattcccaggttccgtccgaagggactcggcttgagctagccaagccggttgtgaagtcacgactgaagcggctcctcgagcgccaattctctggcgttctcagaaattcggcgccggaaaagattgccggaggcgatgaaccgcttaacggctccaatgatttcgagccgagctcggcgtgtttggcgaaaatggtgcagagtttcatcgaggagagtcacgagaagcactccgcttcacaccaccgcaaccgatgtaactgcttcaacaggaactacgacgacagctcggacgaagactcgaactcgttcggcgactccaatttctcctccggcgaggcctgcgaaactctcaagggtttggtagcgtgcgcgagcgtgcgcgataggagtttgcttgcggacactgcgaagatagttgagaagaataagatctgcaagcgcaaagacagtttctgcagaaaaattgtcacagacggattgttagccctcggatacgatgcttccatttgcaaatctcgctgggaaaaatctccttcatatcccgctgggggatatgaatacatagatgtgatgatgggggaaag

SEQ ID NO: 38288 - DNA, 350 bp, Glycine max
  Clone ID: PAT_MRT3847_134576C.1
ggaacaagtacatagaggaaccaaagcggcggttacaggagaccaagcagaggttgggtcgagtgagaccgaaaacggttcaaatgtcatctcggcaggtgataaagcctcaccagtcggtcatgaacctgcacttctagaccatgaagatgcttctggacgaagtggcgatacttccgtcggaaatgctaatgaacacgatcacgaggttctcgacgcacctgatgaagctcatcaagaacgggactgtgcgcagcaacaccgtcaatctccacgacgacgagctcaagctccacaaggacgtcctcgaccacctcatcgacatcatcaccgaccacatcgacgtcaac

SEQ ID NO: 38289 - DNA, 1920 bp, Glycine max
  Clone ID: PAT_MRT3847_134577C.1
gatcttctctttatcctctcatctcctctcgccgtctcctgcacgaaacccataacctcacgcaaccaaacacgcccttagctccaacccattcccctcgtcatcggaaaattcaaccgccacgccgtgaaatatggaggctccggcggtggttggcgatcttgttgggatccaattgacgttgtcgtgccgctacttgtttgggaactctacgcgtatctgttttctgactttcttcgtcttcaaattattaaaaacaatttcgcgaatcattccatgcgacaccgcagaacctcagaggtttaattgatctttacatagttctgtcatatgggttataatttcaatgaggaaagtttagattcaagaatccgcaatggaaaagacgaacaagtgagagtgtgagattctgttctgagtcatctttgtgttgtaatcgcggaactctttccgatgaaaattcagccaattgactccgaggttctggccgaagggactcggcttgagctcaccaagccggttgtgaagtcgcggctgaagcggctcctcgagcgccagttctccggtgttcttagaaattcggcgccggaaaagattgccggagacgatgaaacgcttaacggctccaatgattttgagccgagctcggcgtgtttagcgaaaatggtgcagagtttcatcgaggagagccacgagaagcactccgcttcacaccaccgcaaccgatgtaactgcttcaacaggaactacgacgacagctctgacgaagactcgaactcgttcggcgtacaagacgactccaatttctcctccggcgaggcgtgcgaaactctcaaagtaaacgatagttcaagcaggttgtgtaattcaaagcgttctatagagagaacaattctgaaacggtttttttccgctttcgacagggtttggtagcgtgtgccagtgtgcgcgaaaggaatttgcttgcggataccgcgaagatcgttgagaagaataagatctgcaagcgcaaagacaatttctgcagaaagatcctcacggacgaattgttaacccttggatacgatgcctcaatttgcaaatctcgctgggaaaaatctccctcatatcccgctggggaatatgaatacatagatgtgatgatggggaaagaacgaattctaattgacattgacttcaggtcagaattcgagattgctcgatccacgaaggcgtacaagacgattcttcagaaccttccctacatattcgttggcacgtgcgagcggttgcagagcatcgtggcgctcgtgtcggaggcagcgaagcagagtctgaagaagaagggaatgcacgtgcctccatggaggagaaccgaatacgtgaaagcgaagtggctctccccttacacgcgcactcctaattcggacgatatcaaagaggagaagaagaaggaagaagaacaacaacagctttttaaggacaatttaaacactgcggagtcagagagttccggcgaagataacacggcggttgtcgaatggaagccaccggagctgaaacctaagggttcgctttccggcgtgaaggttgtgactggtttggcagtggtttttcatgatgacaataacccataaaattttgaatttttttcggcttttttttattttctaaaatgaggattaaaatctatatgactatataactgtaacagttctgtgacttctatccccttctgttttttttcttacatatggggtggattttactgatatcaataaaataaagctgaaatacagtagtgatacattaaggtgaatttttctaaaaattgttgtagtttatttctatttctgatgagataggagacaagttgtttgattctgtttgtattgacttgaattctttccttcaaggagaaaaaaaaaagttagttgatgg

SEQ ID NO: 38290 - DNA, 416 bp, Glycine max
  Clone ID: PAT_MRT3847_134578C.1
gttactcgtgcggggcaacgacctttagtggcgcaagtgggctagctgtgttggagtgcttgccatgcaagaactgagcaggagggcaaaaatgataagccgtatgctgcggggtggcgagagggagctgcgtgaaaggtcacagctggtgtcggctggcctgtcagggacggaaatggggcagagcgatgggtggagacgttagaatgccaatcctgaaaggctttccggtcacagttatgtggcacctcatagaggctgaaaggctatttagatgtagacatgaacaaatactgcgccgggctaaggacccaacattgattcaacgatctagcaaaagagtaccacttccgagggtgaatggggacgaggacaaaatctgggattgggaaaaggtaaagccttacgtgcagggg

SEQ ID NO: 38291 - DNA, 251 bp, Glycine max
  Clone ID: PAT_MRT3847_134579C.1
ctcgagccgagtcggctcgagatggcttctctagcaaccttggctgctgttcaaccagctacgatcaatggccttgctggacgttccctctctggaactaaactctctttcaagccctctcgccacagtgtcaaatccgagaacttcaggagtggtgccgtggtagcaaagtatggtgaccagagtgtgtactttgatttggatgatctgggcgacactacagggctgtgggacttgtctagctcagatgc

SEQ ID NO: 38292 - DNA, 387 bp, Glycine max
  Clone ID: PAT_MRT3847_13457C.1
tcgtacggctgcgagaagacgacagaagggggagggagttttaagcctgtctatgctgatcaaaacgcacaacgcgtagcaccataagatttccatttcccgcccaacatggtagacaacacatagtgccggttaaaggaccccgtcgaagacgagctccccttcaaaggcaagctgataccggacttcgtaactatggaaaccataaagcagttatgcgtggtattctgcctctacgacgtctacgtctaacaaaccctacccctacaggacctgtccctgccattacgctgcctcgaggaggcggacctcttcctgtcctacgtgcagtacaacatggagtccctaattctacggatcgtccactccatcctgactggtcacgga

SEQ ID NO: 38293 - DNA, 187 bp, Glycine max
  Clone ID: PAT_MRT3847_134580C.1
tgagcctcctccagcaccgatgatcgatgctgactgatctcacacagtggcccttctacagggctttgagtgctgagcccattgccccaatgctcttcctttacatcagagagctcagtgagattgggtacaagagccagagtgatgtagaggatggtgctgatgtgtgtgggggagatgagattct

SEQ ID NO: 38294 - DNA, 450 bp, Glycine max
  Clone ID: PAT_MRT3847_134581C.1
cccacgctttcggtttgtccttttgaaagtaccagacttcacccgatccgatactgaggagatagtagctggccaagccgcgtatcccccatacattcatagagcattggggatcatagctgcatacaacatgaaccccacgcaggtgccgcaatatataccccaatcctgtcaaactttatgagaccgtataagaggtactgacccactcttacaagggaaactaatgcctcattctgactgactctgcacttgacggatatggcactgcactcgatcaacgatctatcctatgccgcatcatgcatgtctgcgagccatgggtccaggggcttaccgcttgagtaacctttgaagccgattttgcgcaacgtatcaccgtacacagagttcttgccacaaaacacagatgctgggtactgcatgaggtcgaagatcatgccgtaataa

SEQ ID NO: 38295 - DNA, 266 bp, Glycine max
  Clone ID: PAT_MRT3847_134582C.1
agtaccaaaaccccaatcattaatcgggtaacattacatgggcacaacaatagaataaatatttagcctcaacaactctttcatgcataatgttcatgaatcatggaagggtataccacatttgttaaatttcaaaaaactgctctaggataactcagtagaactagaaccttacctaggcttctctaaaacggcaatcaaacagagatattctagactataaacttctaatcaagtcaaatcaaacattatgttgagtacaagac

SEQ ID NO: 38296 - DNA, 666 bp, Glycine max
  Clone ID: PAT_MRT3847_134583C.1
ttttcaagattctatattgtttatataatatttatatattattattaatgataggaataaaaaaaaataacattgcacaaataaatgagtctttaaataacattaatgttgagatggtatagaaaattctatttaataatgaatgtaacgaataaataaaagaaaaataatcaatcttcaatcaggagaagaaagtatcgaggatccccaccattcaatcccttttttgtttcattattagaacattaatggaaatatatttggaaaatggaaaatcttttttccaaaaaaaaaaaaaaataaattattctttaaatgacagatacttcattggtgttattgagaacattgggggttaatgatattgttggatttgatatttatggggaatggatatccattcttcgtcatcatcaaaaaaactcaaaccattaattatttcatttgatatttttatcgaattgttgtcgccgccactctcaatgccattgcttccacgaattttaggagatccaggaactgataaaggttttgatattttgaacttgtattgttcgaagctaccgatttcagcatctacaaacgaatcagcgtacaccttatgtaacgccaaccttctcgctcggacgtattccatgcccatcaacttccaatccaacgaatctg

SEQ ID NO: 38297 - DNA, 425 bp, Glycine max
  Clone ID: PAT_MRT3847_134584C.1
gttccaactcttcaagcgctatgattggaaggttctacggaaactcctattctcatcagcaacttcaacctataaatggaagccctttgggttcgtggcgaatccccaccgccgccacaactgctcatgcgcaaagtaaccctattttcaaccgtgaatgctcgttgcatcctttgcctttgttttcaggtgaggaaatggtgaacgcgaggatggggttctccggttcgcagaaccggtttggtaattatgaccccaagtccagcgtaaacgaccatctgagtttggatcttcatctgtaacatcatatttacacacatatactcgtatatatatgatttgagaattttcatcctgtgttattgtactcggatccttattatcatgtaattctaagataaagttatgatgatgattctcatatc

SEQ ID NO: 38298 - DNA, 469 bp, Glycine max
  Clone ID: PAT_MRT3847_134585C.1
gtcgtaatatacctcatgctgaactgccttccaagattcagatgtatttctttcttgtattctttgcccaaattgtcctacaatataaagcaaattcatgcccaattaatcactaatggcctgaaatctcccaccttctgggccaagttaattgagcattattgtggctcaccagatcaacacattgccagtaatgcacatttggtgttccagtactttgacaagccagatttgtttctcttcaatactttgataagatgtgtgcaacccaatgattgtattcttattttccaaaatgagttttctaggggactcatgtattttgacgagtacacttacaattttgttcttggagcctgtgctcgctctccttcagcttcaacgttatgggttggtagacaactacatgctcggattgtaaaacatgggtttgagtcaaatattttggttccgactaccaaaatatact

SEQ ID NO: 38299 - DNA, 151 bp, Glycine max
  unsure (1)..(151): unsure at all n locations
  Clone ID: PAT_MRT3847_134586C.1
attngggtactanatactancaaagaatacaaactncnaagcttacgatatgtattttcaataggtagttacgaagctataatcttattntcaatatatttttttaatccaaactaaaagcttncgcatatgtatntcgtagaaaattttc

SEQ ID NO: 38300 - DNA, 272 bp, Glycine max
  Clone ID: PAT_MRT3847_134587C.1
ctcgagccgcgacgtctccggccccgtgcgccgactgcgcgccgtccgagggccccgtggagcacatcaacggcagcaacggcgtcgacaagacgcacgtcggcattgccaactcggtcgcctccaagggcgtcgagacgcaggccgaggcgccgccgacgcgctttgccatgccgttcatgaaccgcgactcgaacagcaacgtcgcaaacttcaagatcatcgagtccactctccgcgagggcgagcagttcgccaacgccttcttcgac

SEQ ID NO: 38301 - DNA, 269 bp, Glycine max
  Clone ID: PAT_MRT3847_134588C.1
tgtttttttaagcaaatagaagttaacatttttcatattgtctcaaacacgttacacgtacgtacacaaggatggaagaaatatgttgtgctaataattttggcaagaattacttcaccaaggcaaagccatatttcttaacggtggcactgcagtttggtttcgcaggagggtacatcttcaccgtagccagtttcaacagtggaatgtgtcgttttgtgttcattgtctatcgcaatgccttcgctgcattggccctcgctcctttt

SEQ ID NO: 38302 - DNA, 490 bp, Glycine max
  Clone ID: PAT_MRT3847_134589C.1
ggctcgagaatcgaataggtactaactatttcgtgctgtgagtgagtgtgaggattgttgaatcgaatcgcgaaactcttacttacacccctctctgtttttctattcacaagggttttgaaagatggcggttgaaaatcccgaggatggattgaagaagctggaatacttgtcgctggtgtcgaaggtgtgcaccgagttggagtcccacaccggcaccggcgacaaggttcttgcggagttcatcactgagttgggtcgatcatcggagaatgttgaggaattcgacgagaaattgaaagagaatggcgcggagatgccggattactttgtgcgaacgctcctcaccatcatccacgccattctccctccgaagccgatggattcgaagaaggagaaagacagtgtcaacggcaagaccaccaagttcaaggctctggccatcgcggacgacagggacccggccaaggagcttcaaaaggagttagaa

SEQ ID NO: 38303 - DNA, 265 bp, Glycine max
  unsure (1)..(265): unsure at all n locations
  Clone ID: PAT_MRT3847_13458C.1
cgaaagattttatccaatnganattttaaaaatgactgggataaacttaaganttcaattattgaaattgaataagtagacaatttaattggattggtcgaatggnatcanaaaaatggagtactaactcccatttcttatttattattgantnaaccgatcnacttgctttgtnatcgaacatttcttgttgattncaaaaatttnccggaaaanatttgaatctantnttatatgcgaatcaatcctactacttctggtcctg

SEQ ID NO: 38304 - DNA, 268 bp, Glycine max
  Clone ID: PAT_MRT3847_134590C.1
tttttcttgtacaaactggatatggacattaggggggggattaaacaaaacaacaaactctttatacaaacatattgaaaattttacatagtactctaattacaggattaaagcgagtagcctcctttttgatctaacataaacctgacaagtgctttaaagaccaattacctattcagatattatattttaataaaaaactctacaaaagacggtacatgctaaaacattctttgactggattttgcctcaaaaaccatttttgaat

SEQ ID NO: 38305 - DNA, 277 bp, Glycine max
  unsure (1)..(277): unsure at all n locations
  Clone ID: PAT_MRT3847_134591C.1
gcagctaccttctttgcaagangatgggnctccaagtnatttctatgggaggttctctgacaganatagaagtagccgaagangttctaacttctangggaggttttanttctagggaaggttccgcctctaaggnccggagaggtttaaatcctcanggggctgggaagtggaaagactccgggngatgaacttnggtgatccaatccantaagnncaggtggnagaaattttaaaactggcaaanctggtctcgagcagcagtaaaagcatggcg

SEQ ID NO: 38306 - DNA, 221 bp, Glycine max
  unsure (1)..(221): unsure at all n locations
  Clone ID: PAT_MRT3847_134592C.1
attaattgcttctaacagntactganacaaatggcaantagacaagtnagangtaaccagtgtggancanattaatggttcagcagnatcgtgtcgtggtgacagtgtgcatgcagtccagattcganctcataagngntgatnatagcnnantcttcanagttgagncgctcganntgatcatatctgtctgtatacatanaccgngttangactgatgg

SEQ ID NO: 38307 - DNA, 277 bp, Glycine max
  Clone ID: PAT_MRT3847_134593C.1
cccccgtccgtaggctcggatttcggttgcggaggatttggaaatggtgggtattcctttattcccgctttttttggttcaccaggttcttgccaatttttttgaaatggcggattctttggatggacctggaattggggtttcttttccttggtccgttggttaaattcataaaaggaattaggcatggccctcttgttgagtatgctctggctatttgaaaatttccacacctcttttaattgtccgaatgatgtgtgaagtgtgtgttattttt

SEQ ID NO: 38308 - DNA, 480 bp, Glycine max
  Clone ID: PAT_MRT3847_134594C.1
agacgattgtcaactcaaggttggctttcatttttccaaatggatcaattattcacaatgatactggcgtttacttccaaacttcaactccggtgcccattcgagtaccaaacagctgtgattttgcaagcctaaaaacctgaatacacaatacccttcagctatccgacaaacaatttttggatgaaattcactaccggaagccattcaccaatacaggtaaccaaatttgctttcagtgtatgaaattgataaatgatgatgatgtcaacacaatgttaatgtgtaatgatcaattttcttgtgttggtcttattgagttattatgcaccgttggaagaacaccagatggaataataaacttacttcaacgcattatgccccgtactcatgacgcgatcctgtattacaacgggaaatggaacatgccaccgcagaacaaatttcttggatgcgcgttcacaggaaaaaatcctaaga

SEQ ID NO: 38309 - DNA, 307 bp, Glycine max
  Clone ID: PAT_MRT3847_134595C.1
agtggaattgagactcgtattatataaaaagtggcttgggttgttgtcactcatattaccaccaagggtcctttatggtgaaaggagacattaaattaaaatgtcaacaaaccttgttctgaagtgcgaaccaacgtgatattaagatgctaaatgcatacctaatggctgatgaaccttacgtaattttagacatttccctcagattaaatttcactagttgtggccaacatacctttgcaattaaggaacattctgagacgctagtgataacgagggagcaacttgtccccctatatgcaccgtt

SEQ ID NO: 38310 - DNA, 110 bp, Glycine max
  unsure (1)..(110): unsure at all n locations
  Clone ID: PAT_MRT3847_134596C.1
tctttctaggtctctacactttcnttctagttcgtaataatggangtgtcgtcggagcaattccggcgaangcgtgnacgctggaaaanctcagagttctctgaagaaga

SEQ ID NO: 38311 - DNA, 496 bp, Glycine max
  Clone ID: PAT_MRT3847_134597C.1
tcgcctgaacgtgtgctgtcggactgtatatacgacgatccggataccagtgctgacaaacccaacgctcttatcttcatgtggcggaaacattctgtactcatagatcaaacatcggtgcctgacaaccgataatgccttgcaaaaggcatgagggtttactgcatgccacctgattacacgtatgtttgaaggataaacaggaacattggctccaaaagggatacaggctttttctggatgcgattgaaaaaaaagcagaaatttgtgaactgacattgacagcaagagggcatgggtaaaaccaccaaagcagttaggcagctatggaaacaatggtgcaaactggcagagtgggtacacatacagctctagatgcgcatcactaggcaggatatacagctcaggctgaaaggctcacaggcacacgaagaggtcacagttgtcggccagtcatacgcgggcctaatgcgcaggactctgtaccacaactgtg

SEQ ID NO: 38312 - DNA, 545 bp, Glycine max
  Clone ID: PAT_MRT3847_134598C.1
gtcgtctcttggggtaaacgtatatcgattttctatttcatggacaaggattctaccaagagggatatatggggacataaatccaaatgggataatgttctacaacaagattatagacaatctgctgcttagaggtgaagtaacaatgtcaatgtccacttggttctctataatgctactttgtcttgaccatagtcacatatataattcgctcaacttagtggagaaccgtgaattaatttgcgtgtaccaattcacggttcatttacgaaccggtgccgaaattagtggttgaattcgtgaatatggagaagggaaagattgtgagtgcatagggatggaaatgagtcgagcagcttgtcaagggtctatggctcggtctatttaaggctgggcttaacttgtttactataaaagttaagttcaagctttttaagaagcttttttaaataaaaagacaaaagtcaaaccataaaaaaagcttgttaaatttgacaagccagcttgtttaagtcataataataataataataactattatctat

SEQ ID NO: 38313 - DNA, 973 bp, Glycine max
  Clone ID: PAT_MRT3847_134599C.1
ggaattcggcacgaggatagaaagagctgagatctagaaatggaaaccaattacactttgaagctagcttcctacaaagttctcacaattgttgcattcatccttctagccatctctaacatcatttcagcttgtgacaattctaccatccccacaaattccacccaaaccaagaatgattacgctgccaccaactaccgaaacaaaaccattattccatccaaatccaattacactcaaaccttcaaaaactacattaaaacctcttgcaatttcaccacatatccatcaatatgctacaaaactctatccccctatgctacaaaaattgaagcagatcctctcaagctatgcaatgtgtctctctccctagctttaaaggcagccaagagtgcatcctccgccatatcaaagattctgaaaaaacaatttgacagaaattgcagaacaagtggtgcaagattgttttggcaatgtgaaggattccattggtgaactcaaagattcccttgatgccatgggggatttgggtggtgttgatagaaagtttcagattagcaacgtacagacatgggtgagtgcctctattaccaatgatcaaacttgctcagatgggtttgatgagatgaacgtggattccactttgacggacaaaatgagaaagattgttttggatgtggcaaggaagactagcaatgctttgtatttcatcaacaacaatgcatactaattaataataagaggcttatctttccttttttattttgtttaaaaagggttttcttttggctttggtatgtaattggcttaattatgatgtgttgattgtatttaaaatggtttgagatcaagttgctttaaaatttatgtgcacaatgtatggtcattttcctctctgaacccagcacttaagcctgtgacaggtcctatgtggtgcgaagaaaggaataccggaagtggcaagtgtaaaatt

SEQ ID NO: 38314 - DNA, 228 bp, Glycine max
  Clone ID: PAT_MRT3847_13459C.1
tatactcaattcaatataaatggattaaattgggtcataaatatacccgaaatgtgaacatccttaatcacatatgtctgaaatgactgggatggaaatagtgttgtcaaatgaggtgaaacccacccctccgataagggtaaatatacaaatgcaccaaccaacatagggcttgcatgcaggctcttcaatctccattgaaaaagatgccttcaacgttaaagcggt

SEQ ID NO: 38315 - DNA, 361 bp, Glycine max
  Clone ID: PAT_MRT3847_1345C.1
gctctgcattaattgcatggaacggtttatcgggtccgcccaaccagggggcaatatccggctttattgctcacactgtacctgtcgtccaacatgtaggtcttggagctgataactagtcatggctgcttgggactttagctgaccaacaatctggtgactattcttcgctgatgtgggcaaaccaacaggaattggcaaccctccctggaaagctttccattgcattttggtaccatgcctgttgctgttaatgaagactatatgttggcattgataagatgggaggatacgccttcaaataacaccgccaatggttgtggcttgacatggttactgcctctagacaatgactataact

SEQ ID NO: 38316 - DNA, 1797 bp, Glycine max
  Clone ID: PAT_MRT3847_134600C.1
agttcccgctctcggttggtagcagcagcagtgaaggtatgtagcattttccatggcttcccactcctcatgcctcactcccagctgtctcaccccgccccgctggtcgcagccccactgcacgggctccgccggttttcgtctcgcggtgctggccctggtcaccaccacatcaacgaacatcaccccaactggaatgtggtagttccagcagcagtgaactgaagggcccaaaccggttttcgtttagcattcatctctgataatgagcagttcaagggagagctccccggattggttgcgttcttttcaggtgccatctcattcgcggttgacgctgtcctctgattctgggtcttcacgtgatggtggatcttggaatgaagataaaactgatgttgaaggggcttctccaaagtcacccagatttctgaaggtcacaaagagcaacggaaagacaccagaagctgcaagtcctaaagtagaagaacaaacaccatccaaaagaaagaaagtagacaagaaaaagcccaaagaaggaaataaagaggaaaaggagacagcaaatgaatcaaacatcgacaagcatatagaccataaacatgaaatatcaggtgaaggagagtgtgtggatggacttgttcttggtaaatctccatccaaaaagggttcaaaagagaagtcttcacaaaaacaaatagatatagaagatcatacaccagttaaagggaaggaaataaaggccagtgcaaagggaaaaggtattggtgatttgaaagttgaagaggaagaaccttgtgaaaagcctgctgaaccaaatttgcaggtttcctccgcaaggttgcctttgatgctttctgagaaagttcaacgtacaaaggcactcattgagtgtcaaggtgactccattgatctgagtggtgatatgggagctgttggacggattataatttcagattcaccatctggggatcaggaaatgtgtttagacttgaaaggaacaatatacaaaacatctatagttccttgccggacgttttgcgttgttagctttgggcagtcagaggcaaaggttgaggccatcatgaatgacttcatacagctgaagccacattctaatgtgtatgaagctgaaactatggttgaagggacactggatggtttcttctttgattcggatgaggagtctggcaagatccagaagtcaactaaccaaactgatcaaaatgagaatgctgaggaacaagctaatggcaaatccaaagggaaggctgacaaaacatcaggtgctggaaagaaaagaggtagaagtacaggaggaaaaccacaagcaaaaatagcaaagaaaaaaactccaggttccaaaaaggcaaagaccaagaaatgagtcaaagaagctctcggtaatttcttgtatatgccatgaaccaatataactcaatccttggtttaaaagtagagacgctgaattactttgcccatgacaaagatggtgatagtagaatagctgctgttagaattcttctcaaaccacacacagaagaattgaaagcttgtgatctgacgaatgagttctcacaaattccttactatgtttatcattttcaggcctgtttcagtattactcactgtagtttcttttccagtgaatattattttttattttttttcttttaattgatctgcattacccggctactatcatctagaagggtcactttgttcattaaatttctgcagaacatgtactatggaatatgtgagagaatgaatttgaggattcttatattcctgttt

SEQ ID NO: 38317 - DNA, 296 bp, Glycine max
  Clone ID: PAT_MRT3847_134601C.1
tccaagcaactacagtgcagacatactgtgtctacaacgctcccaccatgttactgatcataaccaacctgaaaatgccgctcctgaccgtttcgctcgtccctacatactcctactgcttattcgcctggatacattagggcataccatccatcacaatgatccagaccttagtttaagcgttcaacttttaacttccactcacgatggtgattttgttcaaggaaaaacactcccaatggtaaagttaatgtaacatgtgctgctgttggcttgacatcaagttacactccaac

SEQ ID NO: 38318 - DNA, 814 bp, Glycine max
  unsure (1)..(814): unsure at all n locations
  Clone ID: PAT_MRT3847_134602C.1
cggtccggnaattcccggngtcgacccacgcgtccggggagtttaggaaagcaaaacaaatcaggactcgggttgcgtcagaaagaaagttcccgctctcggttggtagcagcagcagtgaagggaccaaagcggttttcgtttagcatttttatccctgataatgagcagttcaagggagagctccccagattggttgcgttcttttcaggcgccatctcattcgctgttgacactgtcctctgattctgggtcttcacgtggtggtggatcttggaatgaggataaaactgatgatgaagggttttctccaaagtcatccagatttctgaaggttaccaagagcacgagaaagacaccagaagctgcgagtcctaaagtagaagaacaaacaccatccaaaagaaagaaattagacaagaaaaaggccaaaggaaacaaagaggaaaaggaggcagtgaatgaatcaaacattgacaagcatatagaccataaagaatctattcattcaatctggacactatcatcagattctgagtcattccacgatcatagcccaaaaagagatcatattgatcaggtggaaacctctcagcatgaaatatcagatgaaggagagtgtggggatggacttgtttttggtaatgatggaaagtttccatccaaaaagggttcaaaagagaagtcttcacaaaaacaaatacatgtagaaggtcatacaccagttaaagggaaggaaataaaggccagtgcaaagggaaaaggtagtggtgatttgaaagttgaagaggaagaaacttgtgataagcctgct

SEQ ID NO: 38319 - DNA, 246 bp, Glycine max
  Clone ID: PAT_MRT3847_134603C.1
atcgcaacaaggaagtataaatattccagcatacgtatgttgaaattcagcggaacgggactttttgggaggagccggggggactttcttaaaggtcataactcgaaagcaaatgtatgtgggcgacttccttccaacaatagccacttacgtgggggataaattaaactaaatgcattattatcactcttaaaaaagatggatgcatgcgcaaaggattttttaaaatgggacagtcattgggtc

SEQ ID NO: 38320 - DNA, 627 bp, Glycine max
  Clone ID: PAT_MRT3847_134604C.1
ccacgcgttcgcccacgcgttcgcccacgcgttcgaaaaaaaaaaaattttattaaatataaaaaaaaatatataaaaatatttatataattttaaaaggaaaaaagaaaaaaaaggagggggaagagggggggggggtttcccggatccaagctggccgacccgggcaggcaaacaagggggcccttaatgggggcccataaaacggtggcagggaccaccgcttaaaaacttccctgggggaaaaacctgggaatcccccggttgaacccccttgaagcccatacccttttcgccccttggggggggggccaaaaggccggaacaggtcggccttacggccattggctaagcctgagggcctaagggggggcacctggcggccgcccattaaacgggattggggggggggttggggcagggggaccgaaaatttggccaccaccttaccttcctctccttccgtttggtggccacactttgagggccacgccgggggggttccctcgggggggcccaaaaaggggggccaccctggggtggcccccagggggcgctttacggggcattggggcccaaaaaggcgggataaggctggggggcggtttgggggcccttggaccccaa

SEQ ID NO: 38321 - DNA, 575 bp, Glycine max
  Clone ID: PAT_MRT3847_134605C.1
gttcttttgaagatgagattaagaaacttcatgctgaagcgtctgatgtaaaaaatgaagccaatggctgtaaaaatattaaaagaaaggcagagatcaagcttgaggagcttgacaagaatatgaattctatcaagaggcaatgtgtagatgcagataaaagtttaacttctaagaagctagtgttggagcaggaagaaatggatttgtacactgctaaaaatagtgcaacacctttatcctctgttgatgagctcattgaagaaatttcagagatccagaaaaaaataaaagacgagaaagtcttgttggaaggccttcggcaaaaggagtgtgaagcagcaggaaaagcagatgatcttaaagtcaaatttgacaaactgtgtgaatcagcgaatggtgaatttgcttcctatgagaaagctgagagtgaacttgtagaaattgaaaaagaaatggattcagcaaaaaaggcaaaggatcattatgagggtatcatgaaaaacaaggtcctacttgatattgaggaggcagaggaacactatctggagcttacaaagatgcgcaaggaaagt

SEQ ID NO: 38322 - DNA, 240 bp, Glycine max
  Clone ID: PAT_MRT3847_134606C.1
aagtggtcgggtgaacacttataagatccagaggtctttctctttcaacaaaaccctggcatggctctcaaaagtgtgaaataatgctactcccaaatggattggaaattgctcgggtgttactggcgcgtccaaccaaagtgggctggcattcgaacggggcaaacatgtggtacacaaatactcacacccctaggccggttatgctgcccaaagggatattttcaaaaaaggcctggg

SEQ ID NO: 38323 - DNA, 405 bp, Glycine max
  Clone ID: PAT_MRT3847_134607C.1
tttttcgcatgcgggatttcatggcaacactgagggagccttgttgggggtatggtttcaggcatcgataccggctatttacgcagagaatcaccagggaaggtcacgaggacttaccagaggactggctccagaagtttagcccctgggaagacatgaggcacgacattttgtaccccatcagattcttgggtcatgttgagggtaacccagatggaagccgaagatgggttggaggagaggttgcgcatgcactggcttatgcagtgccccatcccaggtaccaaaccaagaacaccatcagggttggactatcggaggctaaagcgagcgctgcagatttaactaaagatctacatcatgatggccaacacagatgctgattcagtgcttcactcacaagct

SEQ ID NO: 38324 - DNA, 317 bp, Glycine max
  unsure (1)..(317): unsure at all n locations
  Clone ID: PAT_MRT3847_134608C.1
agtcgcacgcacgcgnacgnaagctcggaanncggcncgagccnagntcanancacaagcngccacnaaangaanaccangcagncannngcanaacaccganananccnnncaanngaccancacnacncaacncgngnacangancagancannncacnngnanccannnnagnncccgcacacagncancaacnnncacannacnccaagnaaagnannnggnancncncnccnccgnnnnnaggnncgnncncnnannangcnancacnncnnnnnnngcnagcnnnnnnngaggggnnncgcnnncagcggg

SEQ ID NO: 38325 - DNA, 196 bp, Glycine max
  Clone ID: PAT_MRT3847_134609C.1
cagctcaggaaggcaccccttcttttggtctttcaagctttcataatgagctgcgtagctcacgttcacacgattctagcttcgaactgagagctagtcaagacttgcttcccctcccgtaagagtctatgcagaggctttggattttgattaactgaagatgctccccgtcgaagtgaagaggcgactgactcat

SEQ ID NO: 38326 - DNA, 290 bp, Glycine max
  unsure (1)..(290): unsure at all n locations
  Clone ID: PAT_MRT3847_13460C.1
gcggcggcgaaaacggcgtcgttcccgaaanagttntngnncttactcnccaanagcttcggnagattggggtttnggggcggaaggccagttagcttcacgattngggcaggaagtacngaangggatacnatccgattccgccattgtgaaatggatgacaaagtcgctnttcanatgnttancatggtnaatgggatgcgntcttggnctgntcanatgttcatgatnttctnantctanagaatcgntgttttcnccatcaatgaattggtgtcaggaaaggggtt

SEQ ID NO: 38327 - DNA, 272 bp, Glycine max
  Clone ID: PAT_MRT3847_134610C.1
gtgttggcaagaaagaagtttgatgcagaaaccatgcttttgtcgacgcacttcttgtactatgtgaagcgcaacgatggcggatggattgcacttgcagcatccatcagttgttgagaagatatcgcgcacagacttattcgatgggtagggttgggactactcgcttaagaaactattacgcagctgcttgttacttggatggaagctagcaatgttcaggtttgttgtcagtcatagcacatacgccggatgagaaaggagtgggagga

SEQ ID NO: 38328 - DNA, 366 bp, Glycine max
  Clone ID: PAT_MRT3847_134611C.1
tacacaagaaactcactagttttgaggtttcactcgcagaatgacgaatatacaaatcacacattcccaaccttacaagctgaaaacatatggaaaaacaaataaaagaatccaggctaattaacatagttggattttgtagaaaagtagaaacctagctaaaccttttctgaggctctacaccacacaacccttaattaacctcaggtatactctgaagcacgggcctccaaggcctatgatgaacatcatgatctctagcgtgtatcaagcgagccagaacttgctccgcagaagcgtgtccttcacctaattgcttattattaatctctttctctgatcccaacaacttctccagctccttct

SEQ ID NO: 38329 - DNA, 286 bp, Glycine max
  Clone ID: PAT_MRT3847_134612C.1
gtgaaaattaaaatgacgtaaagcatgataacttctcagttacagtacttggcacacataaatatttcagctcttccacacagctaatgaaatataaaggcatgaaaaaaggtacatcgactggactagctgaatcacttcttgaggcttccgtttaactgttggcaaataaaagagtcggctgacttgagggtaatcaactgtcctggtatttctaggactgaagggtttcctgggacatgagactttcattacgaaatatgggacagtcccagggacccaggat

SEQ ID NO: 38330 - DNA, 277 bp, Glycine max
  unsure (1)..(277): unsure at all n locations
  Clone ID: PAT_MRT3847_134613C.1
anagggattcatcttcggtcattttatttngtatactaaaaganngntaataannngcataatcatatnaactattnaatagnaaaaatggcccgntcattatcaaaggccaatcttcggtagnagagaaggttccnttggaacacttatttctntttccgtataccgggtctcnttcntcatttcnaaaaatttanngaatttcgacttgcaatganagacaagtgtgggggatanatataantgacaaaangatatggcacatnatcctnganga

SEQ ID NO: 38331 - DNA, 408 bp, Glycine max
  Clone ID: PAT_MRT3847_134614C.1
tgttcccggatggcctggaacgagtgaccagggtccgggtccacgaaatgggcccggtccctgaagaagaaccgcttcgagtctgggtcggacacggacagcggattggactccgacccggtcacgccatcgatggccgggtttagtctcttcatccagcccagcatgtggtcgaaggagcgattttccattaccaaaacgacgacggttttgatggggttgttgggaatggcgtggtggcatcttgggaagtagagaacgaaaagggttaagatgagggacgaaaataagataggggaatgatggcttctttgggtggccattgtttttggttttggttaagggagttgagagaaagatgagggtgaggtttttagttttgggatgtgggtttcgtggacgcgtggg

SEQ ID NO: 38332 - DNA, 506 bp, Glycine max
  Clone ID: PAT_MRT3847_134615C.1
cacagtaaagctttctgttaatcacgtcgggcttctgcagtacatatgaaccagctgtcagctgtcactttattcagaggaacctgaatctgcttgtgccagccaaacagctttacgaacaaggtaagcccaatcaaatcacaaacgaaaccaaagctggcagcacgtaggaaacgctttgctggtaacagaagggagttcaataacagcctacaaaattctgaaacgtaacaagcaactccgatatacaaattcgactgacatatcggggactcttgaccaaatgcgacaccattatttgtttgatcagatcagcacttgcacagtgatttacggatagacaaaattcaaagttgaccgcaaacataacttgatactgcaggcagtacatgcatttcacttccgaccaagagtggggaattgggattggtctttgatttctggagctggtggagctgcagagcgatggccctcaccatatccacccctgaaaccgccacgatccc

SEQ ID NO: 38333 - DNA, 401 bp, Glycine max
  Clone ID: PAT_MRT3847_134616C.1
cttcaaattactccaccaggtttttgtgcaagtgcaatcaaaagccttgtgagttttcaagctcagcaacaacaacaacatgctcatcaccagcatcagattgaagttccagctgcttggtgctttgagtttccaaagacgacaacaacaacagatacgcacatggtgatgaacaatatttgccaagcctctggagataacttcaccacaaaacaagatcgaccatcgtctcaattcacaagctccttcttgtctagcagtggtgcagattgccgttcttcttctgaaaaatattgtaaaattgcttcttattccgaagaaaaacatagtagcattcagcctgatagtattcaatattacgacctctattctcaagaagaagataaattactcggggatga

SEQ ID NO: 38334 - DNA, 372 bp, Glycine max
  Clone ID: PAT_MRT3847_134617C.1
aaaaccaaccaacctttttgggggggattttggaaccaaccaaattttaatttcccaaaaaattttccggaaaaaaattttttttttggggaaacttttgggaaacccttatcacagggggggagttttggggggtgccaaaaataaaaaaaaaattttggatttcccgggttttccccaccccgggggaaaatttggcctggacccaaggggggggggggggaaacaaattttttttacccaagagggtcagcgggggggtaaaaaagaacactggatatgggggggggggggataaagggggattggatgcctttccccagattttttgaaaaccaactggttgaaaaaagcccattggaattccctttt

SEQ ID NO: 38335 - DNA, 709 bp, Glycine max
  Clone ID: PAT_MRT3847_134618C.1
cccacgcgtccgcttcgatcttgcggatatgtttccttctttcaaacctatgcatgtcataaccgggttgaaagccaaattggataagatgcataacaaggttgacaagatcttagataagatcataaaggagaatcaagcaaataaaggcatgggagaagaaaagaacgaaaatcttgttgaatccacatgtattattcaaacaagtatgctaatggatcaatgtcatttttctgtccttgttataatgtgaaatatatatgaaactacattcaacattaattatgcaggacatatttgcagctggaaccgatacttcagcaaaagtaatagagtgggcaatgtcagaaatgatgagaaatccaggaggaagggagaaggcacaagctgagatcagacaaacgttctgaggaaaagaagcaatcagtgagagcaacatgggagaacttaactacctgaaggattaataagagagaccttaaggttacacccaccagctcctttgttgcttccaagagaatgcagagaagcatgcaggatctatggatacgatatacccatcaagactaaagtcatagtgaacgcatgggcaattggaagagatcctgagcactagcatgatgcagagagttttataccagaaaggtttcatggtgcatctattgatttcaaaggaacagactttgagtacattccttttggggcagga

SEQ ID NO: 38336 - DNA, 428 bp, Glycine max
  Clone ID: PAT_MRT3847_134619C.1
gggcaaatgtgaagacacttaatattaatagaaaatttatttcagtgatacagattacatagtgccacccatcatttcactttttcaaccattgttactatggataaacctcgattagagacttaaaacctagaactggagttatcttgtagctattgaaacctgcagacaaaaacaatttagcccagtctttctcatttctctctttcccagtgactaacaccatcatctcaatatcatagaagagctttgtttgatctaattcactgtctcctttctcgtttcctatcaccacgtctatgataatcacctttcctttatctttgtttgcgattgcctccttacatttttcaggatttttaagcattcctcatcgttccagttatgcattatagtcttcaacataatggaatcagcgtaatggattg

SEQ ID NO: 38337 - DNA, 105 bp, Glycine max
  Clone ID: PAT_MRT3847_13461C.1
gacacaggcttcacataacatatcatcattcaccgaacatgatggcgctgcttctgataattcccatcctgactgggcaccctctggctacggttacacccgtat

SEQ ID NO: 38338 - DNA, 353 bp, Glycine max
  Clone ID: PAT_MRT3847_134620C.1
gagatctataacaaaataccttgagagagaggtctagaaccaatcagacgctggtcatagctcattgatatatacatacacagaaccctatcggatgaagggggagcttcccaagctgcgctggtgataattcattctttaagctcagctcaaagagaccaggtttgagatgttcgtggacagacaaatctgtgtgcagagcgcattgagcgatgaatcctgttggtcgaggagctagtactgcatggtgataggaagacgcattagccacactgcattccgaaatccaaataccaaggcttcgtcatattctgacgcaggggttgctcttcaacatgatgatgatgattagt

SEQ ID NO: 38339 - DNA, 544 bp, Glycine max
  Clone ID: PAT_MRT3847_134621C.1
ttacggttgcgagaagacgacagaaggggtcgtcggaggcggatgaattggagagggttccggcggggacgtactgcgtttggagaccgaattcgccgcaggcttcaccaggaaagtgcaagaagagcaattcgacaggatcgtcgtcgtcgaagaagtggaagcttctggatttgctttaccggagcaacagcgaggggaaggagtcgttcgtgtttctgacgccggcgccggcgccggagaagaaaagggcaaaccagcggtggagcattgaagtcgccgaaaaatcgaaggggaaaggtttctccggcaagaagaaggcgccggtgtcggtgcacgaggctttgtatcttaggaacagagaattgagaatggttgataagaaaaagtcgtttttgccctataagcctggcttggttgggttctgcaccagtcgtttgggcaaggcatttccttcattctgaggactttgctaaatgaatttcctttcaaattttccctatagttttttttaaaaaaaaaaaaaaaaaaaaaaaaccccaaa

SEQ ID NO: 38340 - DNA, 994 bp, Glycine max
  Clone ID: PAT_MRT3847_134622C.1
tctcgagccgaatcggctcgagaagaaagataaagcattccatagcctcccataaaaatgaagaatactatcttctctgctctctttctactttgtgccttcaccacctcatacctaccttcaaccaccgcggtggtcgataccgacggtgatattcttcagaatcctggcacatactttatcttgtccgtttttcgacccggcggcggagtagaattcgccgccactggaaacgaaacttgccctctcactgtcgtgcagactctcttcgggaggggctttccagcaatattatcgtcccggttacgaatccctttcatcggcgaaggacaactcttcagcatcctgttccgtattgtgccatggtgcgccaccactccttctaagtggaccattgtggagggtttaccagaatcacccgcggttaaactcactgggtacgacaacacagtgcctggtgagtttaaaattgagaaagctaaccctttccataacgactatacccttttgttctgtccagctggcgaagaaagcaaatgtgggcatattgggattcatttcgatgatgatggaaacaggcgtttggtggtgtctgaggagaatatattaagggttcagtttcagaaatttggatcatcagcaccggatgaggcatcactggcccttaaaaaacatcatgtgctctctgtcagtgagtgagtgagagacaagtgtaagactaaatgaatggtttggttgtaataaataaatttttaattgccagactaaatagaacaaacaaaccttattcctttttatgccagattatgtatgggttgcatctcttacatagagttcttagtttctttttcttcttctgttctgtttgttttctttgctgtttgttgctttccttttctagctgatgtatccagagaaagctcattccttccattgcaaataatttaatttctgagcaatgctatataaatatttttatatattaaaaaaaaaa

SEQ ID NO: 38341 - DNA, 336 bp, Glycine max
  Clone ID: PAT_MRT3847_134623C.1
cgtcggctgctaataattctcgtgctgctcctacccaaggaggtatcatttacctttttttttatcattaccttatacaagacctacaacagagatggctggttgggctccagaagcaacacagatggagggtctctcgtatgaggcgaatgccatgtgaattgattgtcactgctgggcatgaatttgttaacgcacatgaccaaggttcttactgctatgccaccacgttattggaacacaatgctctggcaggcatttatgcttatggtttggacaggccttctgaaatacatcataagagcattggtcctttctgcacaggacatgtatgga

SEQ ID NO: 38342 - DNA, 578 bp, Glycine max
  Clone ID: PAT_MRT3847_134624C.1
acaacaaaattgtcctttcaacaaatatattttcgttcttggatgttaaaaggacaactatctattttcatttagcttatagtcaaaccttgccgtacaacttaaaatggacaaagaatctgaaatttgaaaccaagacaagcaagagccacaccaattaaagctcctgaacttcggctattctccacagattggaaatcaaaaacccgtcccatatattcctcctatctaatgcacttctctgggatttctgagcttaattttacatggtatgttccttcaaacacctacacttctaaccaggcaccaggaggttgccttctgaacgtcatagatgactaaatccttagtgtcaggtaaaacaagcctgcagacgaagttggcatcgtcttgaatccaattacagaacctcatgagcctttccataatacctgtttatgaatggagacttaacattagatacatcaggtgcatctggactttgcacagggtagaacttataaaatctcatattctcaaatgcagctctagcttcctcactcatttcttgaatggcttttcttcgagcttcccttgcc

SEQ ID NO: 38343 - DNA, 406 bp, Glycine max
  Clone ID: PAT_MRT3847_134625C.1
caggacaataacaaacatttggtgttaataggagcagccccaacgggatttgaacgatgccctctgactggggagcaatctagcattgagcagaacaaagggcttgtagcaatgatgtcgtccccgtatgcaatccggtatatcggcaagggccatcctttgagccttaagagcaagtcatttgcatgaataaggctgtgggatgcaatctctaccgagtggtctgtagcggaggatctaccacaaggacctgctgttgagatcggtgagaacacagatgcctaggatggctggtttacacttgagagagcttctgaggatgaatgcaataactatcaggttgtgtgctgaccacagcaagctgacgatgacacaagcggggctgtagggagtagatgcgatcatg

SEQ ID NO: 38344 - DNA, 251 bp, Glycine max
  Clone ID: PAT_MRT3847_134626C.1
ggtgggtgcaatccaaggattgatgattcctatagtccgacattttccgcgcaagctgaaataattgacgatgaagctgtccccattctcgatgggcttacgctctacgggcccaagtgggacatcgtaaaacgctgggctgggcgaattaaaaaaagtatcatgctatgcgatccattcattatcacatgagaggagagagggaagaagagaagattttcatcagttgagttgagagaaggaaagggaaa

SEQ ID NO: 38345 - DNA, 896 bp, Glycine max
  Clone ID: PAT_MRT3847_134627C.1
ggtccggattccccgtcgaccccgcgtccgttcaacttgttgaagaaataattgcttatttttatttatttcctgagaaaactttttattttttttaagaaaatgagattattttcctacaaaaagcaattcccagatttgcacttctggttcaaaagtttttgttctatacaatgaattgacctcttttagctcttctttttgaattttgaattgaattatttgatcaattgctttgattattttattttgggctacattgcattgaactatgaaaatgtgaaacatgatagcaaaggagatttgattttttttatctgctactggaccattattcacgacttttcagggatgcctagattttttgtcataatggcatcctgtgatttactttcatgatgtaacccaccttgcttaggcaacttagtttttagtttatatcgttacttttcctaatgtccctccaatcacatgtttcatcgtatgggtatgtgaacagatgggtgaacgacgggacaaagctatcaaagaactgagagatcaattagctgcaaagcaacaaagagaagttggatatggagataggcaaaatcagaatttctgggacacttctggattcaaaatcgtggtctctatgtccatgttgatcttggtggtattttcaaggcgatgaaaccattcctttatccaaaacaattcttgtatatagaagtatacctatataccttcaaattctaggagtctagacaagttgtagaagccattttgtgctgtagaaatgcagttgtatttgtagataaactagatttagcttgtgcaatatgtactcgtagcatcaggatcggaaggcatttttgcggtgatctataaaattacattgcagtagttgcggttat

SEQ ID NO: 38346 - DNA, 518 bp, Glycine max
  unsure (1)..(518): unsure at all n locations
  Clone ID: PAT_MRT3847_134628C.1
tnggcgngcaaatacatttgctattcgacttttcgcagttatagggcaatggccactctaaacaaacaaaatccatgtctgacagaaatgcttgccagacaagttttcaacaagagtaaaagtccttcaagaaagatatgttagcaacaatggctaccatggcaaaattgttagacatactcggacccctcactgcgtttgcctaatatatacttctttacacagcccaaattccttggactaaccagacaaattgttgaatagcattgaaacatcaactcacagagtgcctcacttcgccaagcatcttaactcattgccaaacatttgtgagagagcacaaaataccaaaacagcgagagaatggtcatttggaccagctcaaataatgctttggtgtcttcaatggaagcatatcgatgcattacgtggagataagaggagaccataccaaaaaaaatttcagccgtgagctacacgagttgaagcatggttgcttttgggctttcccccagcag

SEQ ID NO: 38347 - DNA, 478 bp, Glycine max
  Clone ID: PAT_MRT3847_134629C.1
taaacattgcaattggtctgacagatgtgagaaagcctcaacccgatgatattaacaagctgttccaattgattgctgaggaagagctccgaagaagacagccacgccaataccgagatatgacagaggagtctcaaaaggatcttttgttcaagatttttgatgttgataagcaaagatacatttatgcccacgttgcagctttcgaaaaaagtgaaactgaaaagatgcagaatgctcaacaaggccaaagttcctacagtgtaggcattatttctgagttgcgatctcgtggagctatcgacgaggaggagctgaacaaaatctccggcaacaacaacaacaataacaataacaatagcagtagcacgaccgttggcagtgacgccgaaggagccagcatggccattgctgatcaatatgatggaagaatcaaggaattttcacgtgctgctatccagttgattgaagaaaatga

SEQ ID NO: 38348 - DNA, 1235 bp, Glycine max
  Clone ID: PAT_MRT3847_13462C.1
ccacgcgtccgagttattccaattccactcattcttcttatccatatgcattactatttttccttgcaacaatgacaagtatccgatcctttcaaagtgctatatcaaaacctttgctatggaaactcacaggctttgggtcaagcatagtagggtttagctgttatgccctcagcccctctttcctatgcttggtcaaagaatggagcccgaagaagatcgtggcgtacagcgtggtaagctcacttttatcaatctccatgctcttcgttaaaaaatggagcttgggacgacacgggaagagtttgttgctgaaaggacatgtggtttttgtggtattagcgcttaccaatctgtggtctttctgggaagaccgttgccaacaagggaaagtggaaaacaggttccggaaaattatgaacctcgcttcaattggagcatttgccttgatggccttgagtttgtcgcggcaacttcaaattggattcgatgctggcgtctccaacttcttggttggatgcttcttggtgacgttgatgaagatgaaccttaagttagctccacttgcggcattgttctgttatttgcttgtcaacaaccgttccatttctgattccctgcttaaattgcgtgcacgtgccgccacacaatatgaaggggagccaagtttgcaagatattgaatctggggattcgaatggagcagttatcagccacagatctcgtgagattcttgatcgaaatttaaagtttttgtggaatgaaattcgtagtgaagtctggaaattttttcttcgaatgttcaaagatgataaggatggggaaagattaccagaccttcaaggccatgagacaaattctgatgtctctgaacgtgatacaaatgaggtagacattcaagaaacttctaatgtccttgcctgtggtacagacgagctaagttctcaagaccctgatcaaacaaattctggtgttctggaacatgagaaagacgtggtacctttgcaacatggtgaagcagaaaggtttagttctagtgagaatgatattcagaatacagagaaatcgattaagaagatgctctgacatctggaaagaagttgttgaagaagttgtcaaaagataaactgaagttgtcaaaagataaacttagttaaatgatgttatatattcataagagacttttagaatttataatgatattttttataaataaaatttgttttgattaaccat

SEQ ID NO: 38349 - DNA, 180 bp, Glycine max
  unsure (1)..(180): unsure at all n locations
  Clone ID: PAT_MRT3847_134630C.1
cctctacagccgccgctgnttattctttttttttttactttttgggggattagaaaccccctcattctaaataaatgggcggtgttcccacaaaacatacttttcaaaaaaacattatttcactccttgcttaactatttaattccacaatccccaggcctagatcccctttttttattc

SEQ ID NO: 38350 - DNA, 636 bp, Glycine max
  Clone ID: PAT_MRT3847_134631C.1
ggattctgcaacactttcgtttcgtcactctgttgttttcccatccacagtactctctacaatacaaactctccactttcagttctacaatataagattgttcatcaatggaatgtaatgatcagcgtgtaagtgtaaacttgaagagaaaatcaccagaaaatggagaacgtgtactcttcaacaccttttctcttgatgaccttaatgaagatctctttgaaaggatactttcatggcttccaacttccacattctttcgcctgaattctgtgtgcaaaagatggaaatcagtagctgcttctgccagtttcaagcttgcctgctctcacattccctcaagggatccttggtttttaatggttgctcccaaccttaaccaatctgttatccttgactctgctgaaagcacttggaagaggctaaatcacccccctcttctgcaagaagaatctaaccaagattgcgtgccagttgcggcatccgggggtttgatttgctaccgtaaatcatcaggaaacttcattgtaaccaaccccgtgacaggttcttgtagaaaactccctccactgcaatttgcctcacaaaaccaaccactcaatgccattgtgatgagcacaagttccaaagaccaac

SEQ ID NO: 38351 - DNA, 259 bp, Glycine max
  Clone ID: PAT_MRT3847_134632C.1
cggctcgggcatttactctgaagaatatatctgaaggtgcttgatctgcaaaccaggtacccgtctcttctacttgtctaaatccaagaccgtgtaattgcattgtgatttttccaggtcttaaaaaagcagtgtcattttttgttgaagtacatttaccggttgccagtatttatataaattcccaagcccaaacctaagttcagaaacctgtatagaaccaaactgaaagcagcagtgcccaaatacaaaacttctg

SEQ ID NO: 38352 - DNA, 592 bp, Glycine max
  unsure (1)..(592): unsure at all n locations
  Clone ID: PAT_MRT3847_134633C.1
acggctgcgagagacgacagaaggggacctccaaagttaagttagggtttttgggggtgaagttgcgcttccggcacttccacttccacttcttcatcaccatgagcaggtcaggccaaccaccggatttgaagaagtacatggacaagaagcttcagattaaactgaatggaaatcgcatgattgttggcactctccgtggctttgaccagtttatgaatttagttgttgacaacactgtggaagtgaatggcaatgagaaaaatgacatagggatggtggtaatcagaggaaatagtgtggtcactgttgaggcgcttgaacccgtgaacagggcctgattactatttcttgtaaacatttataagtagattttctggtttctgtgtttgaacaacgtagctattgagagtaacatgtaattgtgaatcttaagagtgtcatgttggctgctaatttggggttctttttcaggctaaattgtcaaggcgggatgccttctattgttttagtgtgttgcctgtgtgacttgactcaattgaatatatcccttttagctgatttaaaaaaaanaaaaaaaaaaaannnnngg

SEQ ID NO: 38353 - DNA, 521 bp, Glycine max
  Clone ID: PAT_MRT3847_134634C.1
aaaaaaaaaaaaaaaaaaaaaaaaaaaaaaaaaaaaaaaaaaaaaaaaaaaaaaaaaaaaaaaaaaaaaaaaagggggagacacagactaaagatttttttcgggccggggccttgtcagcggaccgttcctttgggggggtgccagttttttcctatgtttgggtgcccgggggggcttttttgttttcctgggccttaagttgtttccctgtgtgaaccttgtgggcgcgttctctttccccctcaaaatctgtggccgcctgcttttcctctttagcctgggggccctcttttgtgtgctctccctcctttgtccctttgggctcagtggcccttttcggggggggtacctggtggggccccctcctttattgggtgggccccctcccccggtgtggcggtgggggttttttgcccccggggggtttttttttttcccttgttgccggggggggggtggttttcctttcggcctggccgtggttttttttttttcgcggaccacgcggatttgctttt

SEQ ID NO: 38354 - DNA, 480 bp, Glycine max
  Clone ID: PAT_MRT3847_134635C.1
tcactgtatgacgtcctccttctttggggggggggggggggggggggggggggggagataatactggtgctaagtaaaatggtcttgtacaaaaaagccacacacgagcccactgagaggcgatcgcgggttgatcggacccatattagtaaccataaacgtagttccgcagggcacaggacgcgttattatatgaaattacgggtgtggggggccaccgcttcctactacaatggggataaacgaagtcgccagtaggaaagcgttaaagacagagtgtttttctgtggcgtaggaaatcgcaacgtaacaaaggcgtgggtagcagcggtttaaggcgtggtaggttagcggagcgtcggtgcgtggacaaaatgggtagcaggcaagatggtagcgctaggttgcgatgggagtagcgggcacaaaaatctcacgcagtatgtggttcgctaggtaatcgagttttaaaaaaggagg

SEQ ID NO: 38355 - DNA, 232 bp, Glycine max
  Clone ID: PAT_MRT3847_134636C.1
agcaccgccagcacgctcgagctcgatcggtcggcaaatttgggtcgcctgtatgggatgatactaatagaggcatgaatatgtcaagccttacttagcgggctataatgggcgcgtgccttgaaaatcataacatcaccagcactgatggtattgacaaaactcgtgcaactttgaaacttagaaagttagcagattgtgattttctcaagagaaactttaagcagatgtc

SEQ ID NO: 38356 - DNA, 1497 bp, Glycine max
  unsure (1)..(1497): unsure at all n locations
  Clone ID: PAT_MRT3847_134637C.1
cgattggagtaccttttacctttctggttgaaaaccggccttcaacctaacctcaaaaaagggattcgggattgcaagctaacatccaatctgaaaatgcacaagttgaaaatgaaagtgctattactgtagaaaattcatattttggacagataatatcaaactcactcattttactttgttatgagaatgaattgagcctacactctntaaattttgtgattgagggtagcagtaagtacatacgaaaggtgaaccttgtacaacgatgctgctggactacaactttcaagaaagatgagaaagagtgtgttttggttcttctgtatcaaagtggagacattgaattaaggtccttgccagctttggaagtgttgggagaaagctctttaatgtcgatcctcagatggaacttggaaaccaacatggtgaagacgatatgttcttcatcaaatggaaaaattattctggtcaacgggaatgaaactgcttgcatatcactgttgaactgtgaaaatgagttctggactccagagtcttttccttgtcttcatgatgaagttcttgcagctgcagtagatgctacagcaagtctatctccaaagcaaaatgaaagaaagggagcatcttctatctttgttaatatagctaagaactttaaagcggggaatgcggatcagaatgcaaatcaatcagttcatactaatagactggaaaatttaaaacaattattctccagtcctcctttcttaaagtcttcctcgagcacagtagataagcaagatccttttgcgattgacatagatgacattcaaattgatgaacctgtagtcttctcatctcctcagaaaatcgatattgacaagagagataaagggaaaggaacagacagacagaaattacttgaagaagcaagctcagacttgaaaccaaaagctagaacagctgaggaaattaaggctaaatacagaaagacgggcacaggggatgcctcggcagcagctgcacttgcaagggataaacttgtagagcggcaagaaaagctccagatactcaacgaacgtactgaagagttgcaaaatggggcacaagactttgcatccatggcaactgagctcgccaaaagaatggaaaatcgtaaatggtggcagttatgattggttgcatgatttcttattttcatcgacacgcttatgcatctcctttcgaagttgatcgaagttctggaatggagaactggcctcgcagtttgcaaaggtagctctgattccatgcttacttactgtttgtaaacatatttgatgcaacgtagtgcatgttattattattattattttattttgagaaatgatagttgtacaacaatttgcacaacaaaatatacaactaagagagaaaaagagataaaaggacaaaaaaaatgaatttaaattgtaataaatgacaaaattgaggagagagatacacaaaatatgatgttgtataaattgttgtaca

SEQ ID NO: 38357 - DNA, 311 bp, Glycine max
  Clone ID: PAT_MRT3847_134638C.1
agaaaacaaggaaaaactttgcgtcaaaaggaaaatccatggtttcttccttcaatttcaaaattctactattgtgccaagtgtccggggaccccactatgaaagcactattgtgctggcagttgtcggaaccaaatatgcaaaattattaactgtcgagcggcgaaacacgatgattttaaactacttaaaagggtacatcactgtcaaaaatgtttgtgaaaaacttactgaaactgaaacttgttcctaatcccttttgccatccgggcacacaaggaaccttgcaaaacttactggccctgcaaaat

SEQ ID NO: 38358 - DNA, 303 bp, Glycine max
  unsure (1)..(303): unsure at all n locations
  Clone ID: PAT_MRT3847_134639C.1
gtcgcacgcacgcgtacgtaagctcggaattcggctcgagctgnatctgatgncaactnaccataggnnatttnccanggntcgncantctnngnngcagnnncngntcggtgccaacatctctggnggncatgtcaaccctgctgtgacttttggattggctcttngtggcnacatcaccancctcactggcntcatctangggantgcacagcttnttngcnccatcgtggcatgnttacttcncaacnangtcacangaggcttgacaacnncaatccacagtgtggctncaggggttgg

SEQ ID NO: 38359 - DNA, 293 bp, Glycine max
  Clone ID: PAT_MRT3847_13463C.1
agaagtggatatacatagatgctcgaaggaaatcttgggtgctcttactgagaatttcgatgacgccgcttccgctggagatcaggtaactcagagtctaggatcagctatggcgcagcttgatcgaagcttcaagcgattcaagaaaaccgtgtatcactcgagtggcctattgcccagctcaaacggtagcatgaccgcaattccgtcgcttgcggtagcaactccttttgcaactcaacagcttattgatctgatgaattttttgaatttatagaaattagttagatgac

SEQ ID NO: 38360 - DNA, 454 bp, Glycine max
  unsure (1)..(454): unsure at all n locations
  Clone ID: PAT_MRT3847_134640C.1
atcgaactgtccaaggtcctgtcacttactgtgttttgaggccgaccttggggtacaccgctggtgggtgatagcaaccaccgttggcagcgtatgctggtaggtaaagctgtatacgggtagcctgggggtcttaaggacgggtagggggaaaaggccagtggagaacgttggggtgcacagagtattgcggtggtacgggcttaaggggatggctaattaactttgtaggcaactgcgccaaaccgtgcatacaaggtagcggagtcagggtcagaggcccggccacgctacgccgtagtggggacgtaacacaggcttggcacaacgacgcccgtattggtatgtaacngtatgattaggcgcgtatttgttatgcgcagcaccggcagtgtaagggtatgacacacaagggcaggtaagatgtcaaacatagtaagcgcgtagggcaagg

SEQ ID NO: 38361 - DNA, 520 bp, Glycine max
  unsure (1)..(520): unsure at all n locations
  Clone ID: PAT_MRT3847_134641C.1
ataataagcaatattattgttcaagtatgtaggtacctctgtatattctacattatggaggaaattgaagtctggtgttacaagaaatatgtacctgtgtatattatacatttttttttgtatgaaacaaatttttaaattacattcttagatacagaatcatggacacctagagctcaatgatgtaaaatctacaactggttcatccttataactgccttgtggaagtcattgtcaatgtttttaaccaacatttacaaattgactattttcttctatgcaaatacctttgtgaaaatgttagagttagacatggtaaaccataccaacttctagcaaagaagtatgagctacgttcaagaaaccatcaagggtctctgcaatttttgcttagaaaagcataaacaacattaatggcaaatttctttagaatggggggtgaatntctttgcctctgcataggaatggtccaagtatataggtaacccccagacctcctttggcttttaaaaatctgcat

SEQ ID NO: 38362 - DNA, 824 bp, Glycine max
  Clone ID: PAT_MRT3847_134642C.1
gatccaccacaggtgagaaagagcatcaaggaagggacagaaagggttggatgataatgattcatgatctctctggctcaccagttgctgcagcctccatggtgacaccgtttgtcccatcccctggctcggatcgcgtgtcccgatcgaaccccggtgcctggctcattctccgccccaacggggcctcagagagtagctggaagccatggggtcgtctcgaggcgtggcgagaaagaggtcccgttgatggcttgggctacaaggttgagcttttctctgacaatggaccagccaatagaatacccattgccgaaggcacaatgagtgtcaaaaagggtggccagttctgcattgattacaaggtcataaaggatgctggattgggttcaaggttgccaggggaagaaggctttgtgatgggttcaactgtggatggtgaaggcaaagttagcaagcctgttgtgcaagttggggcacagcatgtcacgtgcatggctgatgctgctctcttcattgcgctctctgctgctattgatcttagcatggatgcttgcagacttttctcacataaacttagaaaagagctttgccatcatgaacaggattccttttcatagcttgcatccaatgaaaaattggggacatggttatcttccaacccgtcacatggtagcatatgttcctagctgctctaaagtgtataagtgagttgttttggtttgagcagtccactacttcatccctccttctgattttgtctcacacatatatcttgaacattctttttgccttcatctgtgagtgcttgaagttgaagcttt

SEQ ID NO: 38363 - DNA, 445 bp, Glycine max
  Clone ID: PAT_MRT3847_134643C.1
gcctgctccctagctcggattcggctcgagacggctgcgagaagacgacagaagggggaattaagactagatatgctatttactatttagggggtattttgaagagttaatttatagcttatttgaacttatgcttatgtataagcatttgtgtaagtgtttgggagggctcatgaaatagtttatgatctgtccataataagctaggctccctaggatagcttacgtacaacttatcaaaacaatttaaacttgttttctcttggattgtataaacaacttatacataagtgcttatatggtaaacatttactcaataagtgcttaattatgctatttacccaaagatgtccttaccctaatatgccataagcaattcttctccatttacctaactaggcaacatccaaccaagagattatccctaatatgtgtaattttgaag

SEQ ID NO: 38364 - DNA, 259 bp, Glycine max
  unsure (1)..(259): unsure at all n locations
  Clone ID: PAT_MRT3847_134644C.1
tgaagggcaccagaacagggagttgcgggaattggggggggggcttgtccagtntttcatgaggtccttcagaacgcgncccacgctaccccatattgcaaaacaaaagccgccacttcagcgtcactgaaccggaaccgatctgcagaactaggatatactcacagtatgctcgtgtgatgaaacggagcctgccaccagcccctaagccgaggatccaggccccagtttcttggtgcgcgagaagccacacaaaccc

SEQ ID NO: 38365 - DNA, 425 bp, Glycine max
  Clone ID: PAT_MRT3847_134645C.1
tctttccacccttacgtcacagtcagaatgcactgctaaagaagcttacaagtgaagccaggttaatgcacgcaacttttatttttgcattagaatataagctttcaatattgtacggttacagagtcaatttttgtttattcgtatatgtgtttgtgattgaccatactaaatgtttaactttgttcccttattcttgtgtatcaccatcagggacgtgccatttttgcaagtgggagcccatttcctcccgttgagtatgaggggaaagtgtttgtgcctggccaggtctataatataagccctgagattttaactaaacattaaaacaatcccctcagcaataaggtctaatttggacattttgcttgtttgttcaccaggccaataatgcataccccttctgtcgtcttctcgcagccgta

SEQ ID NO: 38366 - DNA, 465 bp, Glycine max
  Clone ID: PAT_MRT3847_134646C.1
atgaaactgttgaatctgctgaggtgagtcatccttatgtttgtcttctccatgcttctgtaattatcaaagactaaaattggaaaataatctgctacttgctagatgatttttgttggtacttgagtgggatcacaatttattttgttgggcatcttttcttctttgccattatctggtatgaagtaggttgtgtggtgaaaattttagagggccaagtagattgaactccatacttttaaatgcttttatatataggaaagcgtatttaaaaaccataggaaagagcatttttctgcatgccaattaaaacctttcctcttttacttccttaactagtgccctattgataacataaatggaagaaaagagaaatatgtgttaataacttctatggatagagaacgagttctctttagaaggtaatttctggaaatgtaaaggaattgaaataataaagtaatg

SEQ ID NO: 38367 - DNA, 431 bp, Glycine max
  Clone ID: PAT_MRT3847_134647C.1
aattcggcgggagttctcaaaagctggttgcatctatcaccactgaagattgcttgaagggaacaacactctttcactttcttttccaaccacttttttttctcgtaagggggaggagctagagattcaattcgcgcttcatcaatggaaagatatcaactatcccttcacatgaatgatggcaataaagaacagagttatgcaaacaactcgtcgatgcaaagaagagtaataagtaaaaccaaaaccatacttgaagaaactataatgaggctgttgcattgtgattcttctcctagctgcatgaaggtggcagatctaggttgctctgcgggaccaaatacacttcttgtgatatcaaatattattgacatggtttataaagcaagcacccacttgaatcatgaaccacccacactccaattttatct

SEQ ID NO: 38368 - DNA, 507 bp, Glycine max
  Clone ID: PAT_MRT3847_134648C.1
ttcggggcttacttattttcttttgctttgatacatctctattggtctctctctcattcccttaatattgaaccaatgaagcaacaaattggtttgcttttctttgttctccttctttcctctttcttagcttctgcccgtctccttgaaccactgaaaggtccaagacaagctcatgggatcagaggagtgctatatgaaggatgaagaatgcattagcagaaggatgatggtggaggctcacttggattacatctacacccaacaccataaaccttgaattaattgaacttacaccttgattcaaacttcaaaggcagagtattaagtatgaatccctatatataaaaccaataaatccatgttctgtttttccgggggttctagttgtgcctgtcactaaatatgaacaagggaattatcaactatatcaggctaaggatagatgttgatataatcacataaggttttcgagatatatgtgaactatgatttaagtatatttac

SEQ ID NO: 38369 - DNA, 259 bp, Glycine max
  Clone ID: PAT_MRT3847_134649C.1
ctgatatccgatgctcagattgtatttttggtttccttcaatgaaaggtaaacttcattcatcgaccgaaggaacagcctaaaactgcgatcggggtactagatactatcgttgaaaaatgcaagagattctgacaatggtggatcaccaaaggctctaagatatattggaagcatcggagctgatgctcagttgactgttgctttgtggtggcatatttttgtaccctgctgacaaataaatgtccatatggataact

SEQ ID NO: 38370 - DNA, 648 bp, Glycine max
  unsure (1)..(648): unsure at all n locations
  Clone ID: PAT_MRT3847_13464C.1
actaggaaaacataaagattgaattttatattatgaaaaccaatagaatcacaatggaagtatatccattgctcaaaatccttacagcatgtatcaaatatatttcaaggaccacaaacaggacagccaaatttccctgggaaaaaacaatgaagttgaaacttgaaagatcaacaaaagcaaattaaatattaatcccaggaatggctagctaaacttgttgatcatcatcaagttgagcgagcacaagcacactttacaatcacatctcgcatgcggctttgcattctcagctgttcatagaaccttctgatgaaatcctcagcctgatcatcaacatggccatttccatttccaccctcttgttcttcattttcttcatcctcagatgagtagttggagatcctcacggagaagggtgatgatgatgagaggagggggctcttcctctccccaggggcaaaatcagatgcattaatattatcaaacctaaggttgaaagtgtattcaggtgtcatattattaggcaccaaaaccacaggcctattattaggctcttcaacaacctctggngtgttcatgcaagggaaagttgaaatgatgctttctctttggcacatggaaaaaaacagggatttggactgttgc

SEQ ID NO: 38371 - DNA, 717 bp, Glycine max
  Clone ID: PAT_MRT3847_134650C.1
ccgggaaaccctcttgtctctctctttcatttatttattcctttcagaaaactactttaggggatgcttacttattttcttttgctttgatacatctctattggtctctctctcattcccttaatattgaaccaatgaagcaacaaattggtttgcttttctttgttctccttctttcctctttcttagcttctgcccgtctccttgaaccactgaaaggtccaagacaaggtgagaaggaagtggagatcaatgaaaacgcttttcctcaatcatctcatgagctaaaagatgatatggaagaactcatgggatcagaggagtgctatatgaaggatgaagaatgcattagcagaaggatgatggtggaggctcacttggattacatctacacccaacaccataaaccttgaattaattgaacttacaccttgattcaaacttcaaaggcagagtattaagtatgaatccctatatataaaaccaataaatccatgttctgtttttccgggggttctagttgtgcctgtcactaaatatgaacaagggaattatcaactatatcaggctaaggatagatgttgatataatcacataaggttttcgagatatatgtgaactatgatttaagtatatttacaaatcacaatcgtgtaaactatctatataattcctacgtaattgtgagtaaatacaatcatcatggacatttcgccc

SEQ ID NO: 38372 - DNA, 526 bp, Glycine max
  Clone ID: PAT_MRT3847_134651C.1
gatcccacacccgttactctgttttgggcgggattaattcttaacctatcaatttcttcggatgcaagataaaactttcgctacgctagcacattttgaaaaccatcacagaattagctaggcggggacaaaaaacatccattgagctgtttaatgagaaactcaggcttcatatatttgaaagggtgtgccccttgataatcaaccgacagaaggtcaaacctaattagacgggagttcacccaagcaaacaaaaggtttcctgaaatgatgtggccgcaccagtggtggatctccccttatgaaaggaatctttgccgtgtctaaaccctgtgtaattcatacaacctataactccccggatttcttgagaacatctctgaattgcaaagcatcaaacatcaatgctctgattagctggagccatgaatgacgggttcaattgggggaaaagaattctacgtggtaatgacaacgctaatctgacggtggaaagggcagattcaccactggtgttaccttctta

SEQ ID NO: 38373 - DNA, 1057 bp, Glycine max
  Clone ID: PAT_MRT3847_134652C.1
atacatctctattggtctctctctattcccttaatattgaaccatgaagcaacaaattggtttgcttttctttgttctccttctttcctctttcttagcttctgcccgtctccttgaaccactgaaaggtccaagacaaggtaactacatgacatggtattatattattatgtatattttttttttacaaatttgtctttgttcacctgaggttggaacaacttgatcatataggtgagaaggaagtggagatcaatgaaaacgcttttcctcaatcatctcatgagctaaaagatgatatggaagaagtaagaatgcatataatgtttagcccttctctatttgcatgttacttagtcacttccacacagtttataactaataccctgacctgattggcttctttatggcctgtgaaatattttctgtttatattttgtatttccacttttaattataaaaatgtcttgtttccttctaatttgttttcatttccattttcaatagtttctatacaatttttttaaaaaaacaaaccaaaaataaaatcagaaaacatttttccaaactaaatggttcatagtgtatttgcactctctctctctctctctctctctctctctcatttgatgccattttatacagctcatgggatcagaggagtgctatatgaaggatgaagaatgcattagcagaaggatgatggtggaggctcacttggattacatctacacccaacaccataaaccttgaattaattgaacttacaccttgattcaaacttcaaaggcagagtattaagtatgaatccctatatataaaaccaataaatccatgttctgtttttccgggggttctagttgtgcctgtcactaaatatgaacaagggaattatcaactatatcaggctaaggatagatgttgatataatcacataaggttttcgagatatatgtgaactatgatttaagtatatttacaaatcacaatcgtgtaaactatctatataattcctacgtaattgtgagtaaatacaatcatcatggacatttcgccc

SEQ ID NO: 38374 - DNA, 176 bp, Glycine max
  Clone ID: PAT_MRT3847_134653C.1
ctcgacgtttttttttgacgcacatgcctatggggaccagaactgccgtcagttgtgtgggcggcttgagacggctgcgagataagattctaaagaaatatgggcaataggcgttgggattgtcgaaacgaatattctgttcgacttaaaggtggatagaaaacagactttttaag

SEQ ID NO: 38375 - DNA, 1787 bp, Glycine max
  Clone ID: PAT_MRT3847_134654C.1
cactttctcgtctttgcttttctcgggctaacaaaagacgacgccgtttttaccacaagcaccaaccacaacgacttttcttggtctctacttcgcatttccgttctttgcttttctcgggctacgaaaaacgacgtcgttttcccaattttccccggcgaccgggaaatggtggagccggtggagcttcgcggcgaggagcagctctcgttgctgtcagattccagcaatggtgaccggtcgtggcggttgaacttcgacgggtttcagctatcttcggagcacacggagaagcaagtgaaaccccctcgcggactccatgactgttatggggttcttggtcaagaagataatattgcggagtactatcagcagcaggtagaagtgcttgagggctttactgaaatggatgctttagcagagcgtgggtttttattcctggaatgtcaaaggaagagcgagacaagttagcaagaagtgagacatttgccatcagagtgtcaaatgcagcaaacatggttctttttgttgccaaagtttatgcatcaatcaggagtggttccctggccatcattgcatccacgttagactcacttcttgacctcctttctggattcatcctctggttcactgcattttccatgcaaacaccaaacccatatcagtaccctataggaaagaaacggatgcaaccattgggaattcttgtttttgcctctgttatggcgacacttggactgcagataatcttggagtctacccgcacattaatatcttctgaaaatgcattcaacttgaccaaggaacaagagcgctgggttgtgggcattatgctttcagtgactttggtgaaattcctgctgatgatttattgtcgttcttttaccaatgagattattaaagcctatgcccaggatcacttttttgatgtgatcactaatatcattggccttattgctgcacttttggcaaattatgttgatgattggatggaccctgtcggtgctatcattctggctttgtacaccattcgcacatggtcaatgacagtgttggaaaatgttaattccctggttggaagatcagcagcaccagaatatcttcagaaacttacatacctatgctggaaccaccacaaggctgtgaggcacattgatacagttcgggcatacacatttggatctcactactttgttgaggttgatattgtcctgccatcggatatgcccttgcaagaggctcatgatattggggaatcgttgcaagaaaagcttgagcttttgcccgagattgagcgtgcttttgttcatcttgattatgagtacagtcacaaacctgagcatgctcaagcacactcttagcagcaatcaggaaagcactgccttcttgtttatttcagttgccctttcatctcccgtcagttgtaaatttgaaccatttctggttgttcagaatctgaacttaagtgcaagtcactgagaagttgctagctatcaatctcaactttctggcagccctgataatattccaaatgtatatcacgataggcttatcaggcaagaccctttcagattccatttaggggaaatagaatttgctaccttcttttccattcccccttttttgtacagtgcactctttttaccttaattcaggatttaaggtgtgtgtgtgctggtgtttgttaatttctaacatgtgcaagtatataatataatacaatggagtggatttcttattaaaaagtagaaactgcataacaaaaaaaaaaaaaaaaaactcgagac

SEQ ID NO: 38376 - DNA, 277 bp, Glycine max
  Clone ID: PAT_MRT3847_134655C.1
gggaaagattcacaaactcgctaacggtgattaccagaacgcctccgataaggctaataatacccgcataggcatcatcgattacaagatatgcccttctctaatgcttcgcgtggcatggtactatggtggaactcacaacaagagctatgctaccgtcggtccttatctaaccataaagcactcctccgaactacctcactgcactgacaccggtgctgatatcgatgagctgctatcagagcctctcccagcctagatggatattgcgagctac

SEQ ID NO: 38377 - DNA, 290 bp, Glycine max
  unsure (1)..(290): unsure at all n locations
  Clone ID: PAT_MRT3847_134656C.1
antcgnnnttagnntctctgcngcngatcttggntnnctgnttnnnntcnactnttnagtganannntgtccagcnattgtntctangtgggtcgtntggtanntgcgtgcccttnccngcnagttgtgtngnnnggngttgtgnntgttgngtntgntntntgnngttngtnntgaggtgtcttngtgatgtnnnntngtgttgttgntatgtnnctgttggntgnggggcntngnggtnngtantngntttttngtgtggtgttganggngtngtgtgtgttntgntn

SEQ ID NO: 38378 - DNA, 371 bp, Glycine max
  Clone ID: PAT_MRT3847_134657C.1
ggtcaatgctaatccagcacccaacactcttcttgtgcttgaccaatggaggctgacggaccagagaacacaggctctgcttaatttatggtgattttgtctgggctctacgttttgtataacaatttgaattggacctggaaaaatcttcgtgggtgagatttgatgctgtttattctttgctgtaaaaattggtaatgagtgaattatctgagattctgattatttttggtcaaatctacattctatactgggaattacgatgcttgaatacatgttatttaaatcaccctatttttgtttgaaagaaagctggtggacaatgttgtgggtccaaaaaaaaagggctggcgttttaaatgatccaacct

SEQ ID NO: 38379 - DNA, 788 bp, Glycine max
  unsure (1)..(788): unsure at all n locations
  Clone ID: PAT_MRT3847_134658C.1
cacaaacctcgttcccttcgctggtgggacagcgaaaccagtttaacaacatgaatatgctagggaacatgtctaatgtgacttccttgctgaatcagtctttcccgaatggaattccaaattcagggcttggtggccctgggagcagccagcgcagtggagggattgatgctggggcagaggcggatccgctatctggtgttggcaatggaatgaattttggcaatcagttgcaatcaaatttgatgaaccctggttcatctggtcaaggtcagggtccacaattttcaaatgcttctggtagccagatgttgcaagatcagcagcattcgcagcaacttcctcagaatttccaacaacatagtcagccgtcaatgcaacagttctctggtcctctgaacgctcaacagcaacagcagcagcagcagcattttcagtccattcgaggtgggatgggtggtgttgggcaggtgaagttggagccacaggtaaacatcgatcagtttgggcagcagcagcagttgccgtcgaggaatcttgctcaggtgaagttggaaccgcagcaacttcaaacattgagaaatatggcaccggtgaaaatggagccccagcataatgatcagcatttttgcaccagcaacaacacagcagcagcagcagcaacaacaaccacaacagcnacaactgctccacatgtcaagggcaatcctctcaggctgctgctgctcaaatgaatcatcttttgcagcagcagagacttttgcaatataacaacatcagcagcagca

SEQ ID NO: 38380 - DNA, 207 bp, Glycine max
  Clone ID: PAT_MRT3847_134659C.1
gtctttagagcatcagtgaataataatagtccaagatctccaattctctatcattcattttttacgcacacaaagttgggtacgtgtgttgtattatcagaagcaattctttccttacaagaaagacgctgaaaattatgttttagggtgttgcttgtaaggaaactcgtattcagttatccttttatatatatatattttttaatc

SEQ ID NO: 38381 - DNA, 779 bp, Glycine max
  unsure (1)..(779): unsure at all n locations
  Clone ID: PAT_MRT3847_13465C.1
atggnngtggttgaggatcactttcttcatgatcaggaagggtttggtgtcaaagaggaagctgattatggacatgaatttgatgatgaagaaagggaaattgctcagaaaatctatgagcaatttcatgtcatctcatcaccaccaccatcatcatcattcaaagagtttggcacgtggctatggcatgcaggaatatgattggctcatgcagcaacagcccaagtcctgtttttttccatgtgccaaagaagaagcaccatttcaacttcccttgcatgaataccacagaggttgttgaagagcctaggcccgtggttttggtgcctaatatgacacctgaatacactttcaaccataggtttgataatgcatctgattttgctcctggggagaggatctcacccttcactgtgaggatctccaactactcatctgaggatgaagaaaatgaacaagagggtggaaatggaaatgcccaagttgatgatcaggctgaggctttcatcagaaggttctatgaacagctgagaatgcaaagccgaatgcagttgctggagtaccaagagatgtgattgtaaagaaaaagcaggactttgtgtgcatttgctcctcaaattgatgatgatcaacaagtttagctagccattcctgggaatatttaatttgcttttggtgatctttcaactttcattatttttcccatggaaaataatttggctgtattggttgtggtccttgaactatatttgatacatgcctgaaagtttttgagcatt

SEQ ID NO: 38382 - DNA, 799 bp, Glycine max
  Clone ID: PAT_MRT3847_134660C.1
aattcggctcgagggatttccagcctccaggctgattcgaattggtgggagatggaaaattccgattcggcgcagtgcgttcgagttgccgtcaacattcggcctctgatcacatcggagcttatgctcggatgcacagattgcatctcccttgttcccggtgaaccacaggtgcaaattgggtcgcatgctttcacttatgactatgtttatagctcgggatctccatcgtctacaatatatgatgattgtgtagctccactcgtagatgcacttttccatggctataatgcaactgttcttgcttatggacagactggatctgggaagacatacaccatgggcaccaattacacgggagaggacaatgccggtggaattatacccaaggtgatggagacaatattcaagagggttcagactatgaaggaatcctcagcattttggagtaagtaccaattaactaaaatcaaaatcttttgtttaatcggggcattgtgtcacaagttttgttatgttcctcacttataatgaaaccctagtctattctcaccaatcggaagtcgcgtgttaccgcaacccgaaacagcacactgcagtcttgtctaatggtaatggcgagttttagaaacgctgcaatcaacatcgttgaaaggggaaggaaggaaggcaaggaaggagagtggatcgattcctcaacagcaccagacatttataaaagctcattcccttccccgaaatcgctcatactcttccaatcttttttttttttttacctttctctctcgctcaataatac

SEQ ID NO: 38383 - DNA, 690 bp, Glycine max
  unsure (1)..(690): unsure at all n locations
  Clone ID: PAT_MRT3847_134661C.1
acgctacatgatggcgaagaggtactacnacgcgatgctcctcgagggcgtggatcccacgcgccatacctttaatattctgctttggggtatgtttttgtcgttgagattagacactgctgttaggttttacgaggatatgaagagtaggggtattttgcctgatgttgtgacttataacactttgattaatgggtattttcggtttaagaaagtggatgaggctgagaagttgtttgtggagatgaaagggagggatattgttcctaatgtgattagtttcaccaccatgttgaaggggtatgttgcggctgggcggattgatgatgctttgaaggtttttgaggagatgaagggctgtggggttaagccgaatgtggtgactttctccacactgttgccggggctgtgtgacgctgagaagatggcagaggcaagggatgtgttgggggagatggtggagaggtacattgcaccaaaggataatgctttgtttatgaagatgatgagttgccagtgtaaggctggggacttggatgcggctgcagatgtgctgaaggcgatggtcaggctgagcattccgactgaggctgggcattatggtgtgttgattgagagtttttgcaaggcaaatgtgtatgacaaggcggagaagttgttggacaagttgattgagaaggagattgtgtt

SEQ ID NO: 38384 - DNA, 688 bp, Glycine max
  Clone ID: PAT_MRT3847_134662C.1
ggtccggaattccccggtcgtcccggggtcgggaaaaatctgggttggtatgctgcggtaggctgctagcatcatagcaatagcacgccattttcatctgcttgatcggatctgccaccgaacgaaccctaaacactcttccctctctctctcttcatttctcgttcgattaacatggcatctcatttactcaatcactcctccaagatgagaaatgcttccaagttgctgcaccacgagcgcgctcttttggttcgttggttttccggcgatgctcattcatccctcaaccggaaccgcgatgtgtggaaaactcaattccacgagtcttcagcaagaagcagtgtctttgaaccagcctcctgctttaataaacattcatttggcatgcagaagagaaacatcttcatggctaccattaaaaggggttccattatcgggtctgagttcaatggagagatttcacgaagtttgcaggtactgtcgaggagatgctatgcgtcagcctcagatctccccccacaccaggaaattggaatgccttctctctcacctacaatgacagagggtaacattgcaagatggttgaagaaagaaggtgatagaatctctcctgttgaagtgctctgtgaagttgaaactgataaagccactgttgaaatggatgtatggagggaagggttttctg

SEQ ID NO: 38385 - DNA, 410 bp, Glycine max
  Clone ID: PAT_MRT3847_134663C.1
tctagcgctcgaggctctctgctgacatacactgccaaagaagaacaataccgactattccgttcgactgtacacctgtgctgaagcgttgcacacatcacagttattctaagagtgacgggctctcgaactcatatcccatctgtactacggcggacaggttgtgcgactgtcaccaactgtgccctgcacggctgccgctgtggttaccctggtgaacgttgtcgctctttccactagctggcccaaactgagactggctctggtcgacgcctcatgcacagtcacatggatgagcttccagcacttcgcagactccgagagaagcacgtaaccgtcgccgataccatccgaatgggatagctgaacgtatagctagctcaggatatgcctgtgagccattcattgca

SEQ ID NO: 38386 - DNA, 1898 bp, Glycine max
  Clone ID: PAT_MRT3847_134664C.1
tacgacctcgcggtttcggtccggaattcccggctcgacccacgcgtccggctgagtttggctgctagcatcatagcaatagcatgccattttcatctgcttgatcggatctgccacccaacgaaccctaatcattcttccctccttctctttcgattaacatggcatctcatttactcaatcactcgtccaagatgagaaatgcttccaagttgctgcaccacgaacgcgctcttttggttcgttggttttccggcgatgctcaatcctctctcaaccgaaaccgcgatgtgtggaaaactcaattccacgagtcttcaacaacaagaagtgtctttgaaccggcctccagctttaataaacgttcatttggtatgcagaagagaaacatctccatggctaccattaaaagaggttccattatcgggtctgagttcaatggagagatttcacgaagtttgcaggtactgtcaaggagatgctatgcgtcagcctcagatctccccccacaccaggaaattggaatgccttctctctcacctacaatgacagagggtaacattgcaagatggttgaagaaagaaggtgatagaatctctcctggtgaagtgctctgtgaagttgaaactgataaagccactgttgaaatggaatgtatggaggaaggttttctggccaagataatccgtggggatggggcaaaagaaattaaagttggtgaggtaattgccgtaactgttgaagatgaaggggatattgcaaaattcaaagattaccaaccttcagcatctgaaccaagtgaaccccctgccaaagaaacatctgccccacctccaccaaagaaagaagaggtggtagaggagcctgcccgagaacctgagccaaaggtttctaaacccagtgcaccaccttcatctggagatcgcacatttgctagtccccttgctcgaaaattggctgaagagaaaaatgtacctctctctagcattaaaggaacaggacctgaagggctcattgtcaaggccgacattgatgattacttggcttctggtgctaaagaagtttcggcatcctccaaggccaaggttgcagcagatgcagcattggattataccgacattcctgtctctcagatacggaaggtcacagcttcacggttattattatcaaaacaaactatccctcattactatttaacagtagatacatgcgttgataaactcatgagcttgcggacccaactcaattcattgcaagaagcctctggtggctctcgcatatcagttaatgaccttgtaatcaaggctgctgctttggctctccgtaaagttcctcaatgtaacagttcatgggcaaatgattatattcgccagtatcataatgtgaatattaatgttgctgtgcagacagataatgggctctttgttccagttgtcagggatgcagacaagaaaggcctctctaaaataggggaagaggtcaaacaattggcaaagaaagccaaagaaaacagtttgaaaccccaagaatatgagggaggtacatttacagtgactaacctgggagggccatttggtgtcaaacaattctgtgcaatcatcaatcctcctcaggcaggcattcttgccgttggatctgctgagaggagggtcgttccgggttcgggtgctgaagaattcaagtttgcttccttcatgtctgtgaccctcagctgtgatcatcgtgttatagatggtgcaattggtgccgaatggttaaaagcattcaaaggctatattgaaaatccagagaccatgttgttgtaagaataaatagaaggctcccatgacgtactaaattcctttcaagtcattctaggcaggggatgagattttgttcacctgggtatttctgtttgg

SEQ ID NO: 38387 - DNA, 2664 bp, Glycine max
  Clone ID: PAT_MRT3847_134665C.1
agaaaagaaaaatctgggttggtatgctgcggtaggctgctagcatcatagcaatagcacgccattttcatctgcttgatcggatctgccaccgaacgaaccctaaacactcttccctctctctctcttcatttctcgttcgattaacatggcatctcatttactcaatcactcctccaagatgagaaatgcttccaagttgctgcaccacgagcgcgctcttttggttcgttggttttccggcgatgctcattcatccctcaaccggaaccgcgatgtgtggaaaactcaattccacgagtcttcagcaagaagcagtgtctttgaaccagcctcctgctttaataactcaattgcaatgcagaagagaaacatctcaatttgagggctatgagtaaaccattatcgggtctgaggatacaatggagagagaaaaattacgaagaagttcacaggtgctgtcaaggagatgctatgcgtcagcctcagatctccccccacgccaggaaattggaatgcattctctctcactttcaatgacataggttgctactacttccatcttatgcgattaatactttgtgccttctctttcccttcaaatctcttccgattaacttgagatctcatttactagatgattgaagaaagaaggggataacatctaacctgctgaagtgctctgtggattttaaggtgataaagcctccgttcaaatcgaatgcatcgatgaagggtaaccgccatagatagaccgctcaaatgcaggaaaagtcattaaagtgggttaggtatttactatacctgttgttgatgagggagatattgcaaagtccaaagataatcatcctccaggatcccattaaaggggggtccattatcgagaaatatctcaatggacagatttcacgaaatttgcaggtactggggaagcagatgctgtgcctgcaccctaggtatctacaccccgtgcaccaccctcatctggagatcgcacatttgctagtcctcttgctagaaaattgggcgaagagaaaaatgtacctctctctagcattaaaggaacaggacctgaagggctcattgtgaaggccgacattgatgattacttggcttctggtgctaaagaagtttcagcatcctccaaggccaaggttgcaacagatgcagcattggattatactgacattcctgtctctcagatacggaaggtcacagcttcacggctactattatcaaaacaaactattcctcattactatttaacagtagatacatgtgttgacaaactcacgagtttgcggacccaactcaattcattgcaagaagcctctggtggctcccgcatatcagttaatgaccttgtaatcaaggctgctgctttggctctccgtaaagttcctcaatgtaacagttcatgggcaaatgattatattcgccagtataataatgtgaatattaatgttgctgtgcagactgataacgggctctttgttccagtcatcagggatgcagacaagaaaggcctctctacaataggggaagaggtcaaacaattggcaaagaaagccaaagaaaacagcttgaaaccccaagattatgagggaggtacatttacagtgtctaacctgggagggccatttggtgtcagacaattctgtgcaatcatcaatcctcctcaggctggcattcttgccgttggatcttctgagaggagggtcgttccgggttcaggtgctgaagagttcaagtttgcttccttcatgtctgtgaccctcagctgtgatcatcgtgttatagatggtgcaattggtgccgaatggttaaaagcattcaaaggctatattgaaaatccagagaccatgttgttgtaagaataaattgaaggctcccatgacgtactaaattcctttcaagacgttgtaggcaggggatgagattttgttcaccttggtatttctatatggcccatttgggttttgttattgtatccctgaccaatttttgattgaagtatttaatcactgaaaataaattttgcagatttgtaattcttttaataagagagggtagattaggcatttaatttaaacccaaatgttttgctctcaattgaattctgccccgtaatacagacagatcagtatgtaacattttctttgttaaatgctgcaactcagctgtgatcatcgtgttatagatggtgcaattggtgccgaatggttaaaagcattcaaaggctatattgaaaatccagagaccatgttgttgtaagaataaatagaaggctcccatgacgtactaaattcctttcaagtcattctaggcaggggatgagattttgttcacctgggtatttctgtttggcccatttgggttttgttgattgtatccctgaacaatttttgatggaagtatttaatcgctgaaaataaattttgcagatttgtaatttttttaataagagagggtagatggggcatttaatttaaacccaaaatattgttctctcacaatagaatgctgccccgtgatacagacagatgagtatgcaacattttttttgttagatgctgcaaatatttgaaagaacgtgtatttaataaactaacatgttgacatcctcaaaaaaaaaaaagtctagactagcttgatttgatagtt

SEQ ID NO: 38388 - DNA, 224 bp, Glycine max
  Clone ID: PAT_MRT3847_134666C.1
aaagaaacttcgaactgtggtaattcaggaccttcccttatttgacactgtgaaggggtagacttacaatgcacacgcaattgctgacgctgctctctaaaggggcatgcatctgctaagttgagactgaagcactatcactgcagcctttgatgaaacatccacattagaggacagcgatgatcgctacaaaggctctgctggaggaaagcccgacaccttca

SEQ ID NO: 38389 - DNA, 412 bp, Glycine max
  Clone ID: PAT_MRT3847_134667C.1
ggctcgctcaatgatctctttcccagctgttaccactgtcaaccgtgccggtgccggcatggttgttccattcactggcctcaagcccatggctggctctcccaccataaataccaacaatgacattaccttcattgctagccgcggtggaagagtgcaatgcttgcatgtgtgtccaccagctgacaagaataatttagagactctttcctacctgccagaccttgattatcgcacaatcatctaagagagaagaataccttcttacgacgggatggcttcgctgctaggaattcggattaagcacggttttgtgatccgtgagcacaccacgttaccaggattctacaatggactgctcggtaccatgtggatactgcctatcgatagctgctctcatgcttctaacgtg

SEQ ID NO: 38390 - DNA, 302 bp, Glycine max
  Clone ID: PAT_MRT3847_134668C.1
tcggttttatgaacaatataaaccctattgggggtagaaaaaccttgcaggtctaatcactaaagctgcggagacagaggtagataacgcgacgttgcaagacacaacatgagggagtttcttgcggcgtgcgatcgcgcgattatgccgatgctaacagagtgagatttcagggttacatactgaccaagaataataatcatactggggttggtgttggagagggtgaagaatttagctaacaactctttagaaaatttgttaatgtgggagtgtatggtgatggtcccaaaactagcgag

SEQ ID NO: 38391 - DNA, 320 bp, Glycine max
  Clone ID: PAT_MRT3847_134669C.1
tctgtgaatctagaactcgcgaaacagcgtttgctcgttcaagaaggacctcatgaagatgcttcttaagcacgtggacaaactcctcgacgtggccgacctcgaaaccattgatcagagcgaggaaactatagactacaacaacgctcgcttcggagaaaatccggtaacgtgtgcgacaagtgatacacgaccgagaagcgcgccgacggataacaacgatgccaagtattttgataacacaccatcacagtattgcccggtgttgattacaaaagctacagagagcgatattaggaccattgatacttaagaaggat

SEQ ID NO: 38392 - DNA, 1232 bp, Glycine max
  Clone ID: PAT_MRT3847_13466C.1
actaggaaaacataaagattgaattttatattatgaaaaccaatagaatcacaatggaagtatatccattgctcaaaatccttacagcatgtatcaaatatatttcaaggaccacaaacaggacagccaaatttccctgggaaaaaacaatgaagttgaaacttgaaagatcaacaaaagcaaattaaatattaatcccaggaatggctagctaaacttgttgatcatcatcaagttgaggagcacaagcacaaaagtcatttttttctttacaatcacatctcttgatactccagcaactgcatgcggctttgcattctcagctgttcatagaaccttctgatgaaatcctcagcctgatcatcaacatggccatttccatttccaccctcttgttcttcattttcttcatcctcagatgagtagttggagatcctcacggagaagggtgatgatgatgagaggagggggctcttcctctccccaggggcaaaatcagatgcattaatattatcaaacctaaggttgaaagtgtattcaggtgtcatattattaggcaccaaaaccacaggcctattattaggctcttcaacaacctctggggtgttcatgcaagggaagttgaaatgatgcttcctctttggcacatggaaaaaaacaggatttggactgttgctgcatgagaattcatattcctgcatgccataaccacgtgccaaactctttgaataatgatgatggtgatgagatgacatgaaattgctcatagattttctgagcaatttccctttcttcatcatcaaattcatgtccataatcagcttcctctttgacaccaagcccttcctgatcatgaagaaggtgatcctcaacacattccatagcttcttggctataactggagaatgtgcctccatttttcttaaaacttaacaaagcgaaaaacaagtatgagcagtacacattcatagcttcttggctataactggagaatgtgcctccatttttcttaaaacttaacaaagcaaaacaagtatgagcagtaataaaggttttaaatttaagtaacttgggataaaagggtactataatatgggagaaggaactagaaagattgaaaatagaagtgaaaggtttttgtgaaccaaagtgtgtgagagtgagttttctttggttctgcgaggtttcttaagcctcgctcgcagaaacaagaaacccggacggacgcgtgg

SEQ ID NO: 38393 - DNA, 765 bp, Glycine max
  Clone ID: PAT_MRT3847_134670C.1
gcgcaagcaaatctgattttggggctggacctaatagaattatagaaacaagaaatttcttcaaatttgtgctggctaggatctctaacttctcttcctttgattcctcttccttttcttttcctttgctatgttttgctgcgtttagatatgttattcattgcctctgtaattttgtcattcatagagtgattttaggattgttctcaaaattgtagaattcagaattggtaaattgcccttgtccagatctgaagtaagctacataatgattgattatgtagggataggagttgattgatgtgtgatcgtttgaatttctaatcctaatacatgtctcagttgatatcacccatggaataagcatgtttggttgagggatgaggtttaattaccaagaaattgcaacagaactaactttctgaatttgatcatcaattgaaaattgaaatctgcattgagaatgcaactggatgcataagggaagattagaataaataggatactaccaccattaaatagtgaatttttccctgttttctgaaattccccctattttgtgcgaattttctaactgcgaactaaaatttctagtttagttgcaatttgtccacactgttaatttctttagttcaaattgtgaacgtggtaattgagttacagtccacgtaggaatgatattacttttgcaattcgatacactagcctattacacaccactacagatccaagtatttatattttctatttaaggatcattaaccc

SEQ ID NO: 38394 - DNA, 351 bp, Glycine max
  Clone ID: PAT_MRT3847_134671C.1
ccatacatactttcccttccttaacctacacacacaaacttcatttatattaaaaatggaacacaaactcgggggaggggccaaaatcctaactctcaaacatgctggggggcctgtttttttattaataatatataccggggggggtgtccgaccgataaaaacattaaaaaccgccttttcttcgcaagctcctttaaaaaaataaatgggggtttttttgtccctttctaaggaaaaaacaaaaattttcttcaaaaaacactcaatgaaccctaaaaaaaaaagaatgcccctcactccccagggggggggcaccaaaaactccgcaagcccccctcttttatgaaa

SEQ ID NO: 38395 - DNA, 446 bp, Glycine max
  Clone ID: PAT_MRT3847_134672C.1
cggccgccctttttttttgcgtcccagatagcaacttattgtgcctcattcatcatggcggaggttgtgctctctccccacgttctgaacccgggttgtgaaggccaacacactgatcccttaggcctcccacctttgcaaagctcgactgtgcctaatactgaattccttcgagtgagaatgcaggtaattccctggctgatgaatgccatgttgtcacatgggcatgggccggtgattaaacatatacgagcgagctataaaagagtcttttgtagctggctaagaaggactcactttctaccatctggaaggacctaaaaagagatccaacctgaatcacaagattttggtatatcccagatgatcatggagacacaggtgagttagttgctcgcgctttcataagaaaagcacacccgcatggtgagctaaccctgctggtc

SEQ ID NO: 38396 - DNA, 385 bp, Glycine max
  unsure (1)..(385): unsure at all n locations
  Clone ID: PAT_MRT3847_134673C.1
nccacgcgnccgcngagaaggcancnagaacaaagggcggaanccgannnngaaaaccggagcgcgnaaaangaacggnaccccgcccncanaaanaaaancnacnacnaaacgcncnncncnnccgcaancaaaaagcaaaccaaacacaacacaaggagaagaaccagancncncnnncncaaancaccaagaanagnngaaaanggggcngncnnncacgaagcngnncagccggcncnnngcgaagaaggagangcgnanncnnanggngggncncgacgccgccggnaagaccaccanncncnacaaacncaagcnaggagagancgncacaaccanncccaccanngggnnnaangnngaaaccgnggaanacaagaac

SEQ ID NO: 38397 - DNA, 292 bp, Glycine max
  Clone ID: PAT_MRT3847_134674C.1
agaggccttttacgataccaaattcgatgagattaacaaggttctgtttagtagagaggaatggcagcatcaaggggagcagaggctgcaagagagcgtgattgtggaaatctcgaatgaacagattctggcactgagcaaacgtgccagatctagttcaaggaaaaccatttcttctgaagattaaccttttaacttgagaagccgcgaccccatctactacaacaagctggtgacgttctttgagatcactccagagaacaacgcccagcatcgtgactaggatatcttc

SEQ ID NO: 38398 - DNA, 187 bp, Glycine max
  Clone ID: PAT_MRT3847_134675C.1
ttttgattatctgcaaccgtatttttgagattagtgtattaacttaccgatggtttattggattatgttatcactgatgcatgctttgctgtctatgttaatcgtctctgttgtagaacttgcaaatgtcatatattatccataattactatacacatatactagtggattttatatgatattaaat

SEQ ID NO: 38399 - DNA, 390 bp, Glycine max
  Clone ID: PAT_MRT3847_134676C.1
ctgagtttccacactgcataccttaggtcttccgaattcgaagttaatttgcaagatggctaaggaaaaggctcagatcaacattgtggtggttggtcatgtggaccctgaggaggcaaccaccattaacgagctgaagaagcctggtggggagaaagaagctcccaggcatgccatatgagggcatgcacgtacgggctccgaagggaacccaaaaatttatgttaccaaattatcttgaaaccctaaggatccgtggcatcatccatgtggtaattaaacctaccttggctatgggtacgttcttttgaatgagaatctttggtaacaatacccttccgaagggttggttttccttaaaataaatggatggttcttatcttccaaaaa

SEQ ID NO: 38400 - DNA, 514 bp, Glycine max
  Clone ID: PAT_MRT3847_134677C.1
aacaaaaaggcaacgagcgaaacacaaaaaaaagtgcctttcaaaaaaacggcccccaaaaacaaaaccccccctaaaaccccccaaaaaggcaagcaagggccgaaaaaaattcaaaaacagaaataaaaaaccccccaggaccccccccccaaaaaaaaaaaaaaaaaggggaggggaaaaaaaaaaaaaacaggaatgggcaaaaaaatctgcaagcccaaaaacaaaaatcgaggatgtctaaaacaacagggacagcaaagcacatccgaaaactaagcccccaataatttttggaaaggaccacaacttttcacccccactatcatccccaaagggaaaaaaggggaaaaggctgggcccgggacccaaggaaggaaaaagggcaggaccaccccccttggcaggacctggacctgaaaaaaggctggggaaaagaaaaggggcctaagggcaaatgcggggggaggccttcctgggggaagaattcccggggggggtgaaaaggggg

SEQ ID NO: 38401 - DNA, 2421 bp, Glycine max
  Clone ID: PAT_MRT3847_134678C.1
tacggctgcgagagacgacagaaggggacttacaccactgacactgcacttcatcaatgcatgcccaccaaagcaaaaccactcacgcttcacttcaccagcgcatgcccaccaaagcaaaatcaattttttttttccaatgtctgaatcttttcaccctttataactaaaaaatccggaaaccctagatctcggctatagctggtgatcttaaattttttttcctctgctttcctttgaacattacattcccggaaaatgattttccggggaaagaagtgacggattttcagaggctggtgtgtaggtgggttccaaatgtgttgtggtgggcattgtgctaaacaatgattcttctctttggttatattctgagcaaagggaacaacattcactcgagactgctttgtccaagtggctcgagccaccccagaaatagagagtaagcctgagatcatggaaaaagttggtgtggctgtaaatagaacattttggaagaacaagggcatgtgagaaaaaacatactaatcaaattaaacagcgaagaagagtttcaaatttattgcttcgaatctccagcttcgtcagggaaggaaaacagcataacgtgtggtctcgggggaaccaaaaactgtgaaattctgaagccactaggccttttaaaaaccaaactaaggaagacggtttagacagagagtacttcaagctaagaaaatggaaagtggggttgtggctgtgaacaacaacatcaacaactatgaatccaaggcaacttccaccatcaccattaagggcattctcagccttctaatggaaagcattgatgatgagaattgtgatggtggtggaagcaagaagagagttatttctcttggtatgggtgacccaactctcaccacattgttccacacaccaaaggttgttgaagaggctgtcgctgatgctcttcaatctcgcaagtttcatggctatgctcccactgctggacttctccaggctagaattgcaattgctgaatatctatctcgtgaccttccttatcaattatcacgagatgatgtcttcatcacttgtggatgcacacaagccattgatgtttcggtggcgatgcttgctcgccctggtgcaaacatcttgcttccaaggccaggcttcccaatctatgaactttgtgctgcatttagaggggttgaagtgaggcattatgatctgcttccagagaaaggttgggaggttgatctagatgctgttgaagctcttgctgatcagaacacagtggcgttggcgatcataaaccctgggaatccttgtgggaatgtgtacagttaccaccatttggagaagattgctgaaactgcaaaacgggttggaacaattgtgatctctgatgaagtttatggtcaccttgcatttgggagcaagccttttgtaccgatgggagtttttggctctactgttcctgttctcactcttggctcactttctaagagatggatagttcctgggtggaggcttggttggtttgtgacaaatgatccatctggcacttttagagaaccaaaggtagtcgagcgtatcaaaaagtattttgatcttctaggaggtccagcaaccttcttgcaggctgctgtacctcagataattgcaaataccgaagaaattttcttcgagaaaaccattgataatttgaggcatacagcagatatatgttgtaaagagataaaggatattccatgcattttttgcccttacaaaccagaaggatccatggctatgatggtgaaattaaacctttcacttctggaagatattagtgatgatattgacttctgtttcaaacttgcaaaggaggaatctgtgatcattcttccaggaactgcagtaggcctaaaagattggcttcgtattattttcgctgctgatccatctgctcttggagagggtatgagaaggataaaatctttttgtgaaaggcatgcaagaaaattgtaaagctatagtgaattcacttataagtaaaattactaaataaatggccctttactactagtatactacacaagaattgaagattttatttcaatatagcatacagtctctttaggaatggaccaattaactggacattgcaacataattaagaggcaatcctctttatattgaagcattatctttattcaaatactaaacggttcatgttcagtctttttaatctataaaaaagtatatagatggatcatcaataagccttgagctgaaagtggtgcaagagcctgtataattgtcaattggagggttatgatataattaaatttaccgattttcactccataaaaaaaaaaaaaaaaaacaaaaaaaaacgcggccggtttaaaagatccaaacttacgtacgcctgcattccaagtcataactttttta

SEQ ID NO: 38402 - DNA, 449 bp, Glycine max
  Clone ID: PAT_MRT3847_134679C.1
cacgtgcctgcggggaagttccagacgtgggttctgtgcacctcgccttgcctcacggattgggtgaggcactaatattatgctacatggttaacatctgcatctgacggggaggatgagtcacctaatattcctgctctgtaggagatattgcatgtcctgctggatgtgattatatttttgaccgaagaagggcggtgctcatttctatcacacttataagagcgggaaatgaaaagttgtctagagcatttctaaacaacggaggagggatgtataatgacctacattctcgttcatgcactgctggaagaagccttgacataatttggtctcatgcagaaggttacaaagcgtgctttgttaatttgaatatgtgcatgctcaagagatgctcacgagggacattgcattgatacctagtggggtataggcgccttatcagatca

SEQ ID NO: 38403 - DNA, 671 bp, Glycine max
  unsure (1)..(671): unsure at all n locations
  Clone ID: PAT_MRT3847_13467C.1
cggctcgtccccaaaggggaccttagagagcaatcttctaccttctctctcctctctctctctctctctctctcttttgcttttattattctctttcaatggcttcatcctcttccagaacaaagtctagtggacccgttctacgctccctctcaccctccaccagattctgctcatacaccacttccaaaactcctttctcttctccttcatcggccttcgcttcctccacaagctctggcttttcgtcttcatccttcttcaaccagccacgtcagcatcacgctcacagccatcaccgtgcggcatcgcccacccgtgtcaatctatgcagccccgcccctctctcctctgccgtccggttctcaatcgatccacggtccatatctccgaaccggtccatctcgaaccagatcatcacgacgaagaacaaccgtccgatctctggccagaagaagacgtgtatgtgctcccctacgacgcaccctgtgtcctttcgatgcagcctccacaagaacataggaagcagcaaccacaacgccgattcgtacccttcgaaccggctcaacatgcgtagatccgctatgaagaactcgctggtgagaatcggnnagcgtgagggcgaagtggtgaaaacggccctgacagcactcatttcgtccagttcgcat

SEQ ID NO: 38404 - DNA, 237 bp, Glycine max
  Clone ID: PAT_MRT3847_134680C.1
gattttatacattcttaattgtgtgagtgtggacatactctgagcgtgagaaagataatgggaagaaagagagagagtgatgggaaggcgaagagtggagtttaagagatttggcaacatgatctactggcgagtgatcttcgcataacgaaagatcgggcttttgaagaaagcttatgagctgtgcgacctttgagatgccgaggatgctctcatgatcttctacaatagaggaaa

SEQ ID NO: 38405 - DNA, 477 bp, Glycine max
  Clone ID: PAT_MRT3847_134681C.1
accaaacatgaaatcatcatcttggtggtggaaacaaatgcgttatgcttttcaactacccattatacgagtcaatctcaatgggtgtggtaaagggaaaaattggtctactaaacactccgggggtttgtgcgccatctaaaactgcgagcgtggcttcttaaatatttatttactcaagagtatagggatttcgtgaggtgaataactttacatcacaagcccatgtcgggttacaatctataacttacatctccttgataaccataatgggggttaagggccaacacatttagcccttaatggactggttactataaacacagagccatcggtctcttgtgtaaatgacccaaaacatcaaagactgccttacaccaggtgataccaaaaccaatccaatgtaaatcaattggctgggtctctgcagaccactgcggagatcattgctgatggctggcaatgttttccccacaa

SEQ ID NO: 38406 - DNA, 586 bp, Glycine max
  Clone ID: PAT_MRT3847_134682C.1
ttttttttttttttttttttttttttttttttttttttttttttttttttttttttttttttttttgggctttatccaacaaacttttaattaataccagggaccggtttactttttttttccccccttacatatgcccaatggcaagcaatcccccgggtggggaggaataaattcccccccccattgtttttaaggccccaaattattttatttgtaatccccccctttggggttcccttttttttctagggccccgggtccgcccccttggcaaaaaagggacccccattttttttgaaggcctagacccaattaaaatgggtttttttttaactagcccaaagcatagggtaaatttataaaattgggggcccccagccccaaacccattttttccccccccaacattatacccaccctttttggttttttgctgcacccccccatatataggaccccccctttgggcacctttggcagaaaaagccaaccaaacttgctgggcccgggccacgaaaagtaccccttgggggggaagctgccccgggacccccccgggaaaggaaaaatcctttttgggaat

SEQ ID NO: 38407 - DNA, 271 bp, Glycine max
  Clone ID: PAT_MRT3847_134683C.1
aaacctctgacgcagtgcttgcagcatctctggtactatcttggcaggctaccgattggtctggatggattcaactcatgcagggcacttcgactgtcatggatgcaatggaatcttggaagcacgagtctcagtttgtggacttcatcgccgagagcagcacgtttcccactgctccctcttcccctggcgcagacaacaatcccagccagccaggcaaggaggacctcgaggcattccagcggaccctggagcagatccagaaggttga

SEQ ID NO: 38408 - DNA, 374 bp, Glycine max
  Clone ID: PAT_MRT3847_134684C.1
attctggtggtttttttttttctttctctaatcttttactgtttttgtgtctttttttctaaggcggaaaaaccgcttgttttgttctgctccacccaaaagggggccccaacattctgggaaaacctatggccccccccattaaatgcccccccccccacgggggataccccccctttttttaaacccaaccaaacaaaaaccccccaggacccaaaaaaaatgggtaatacgcccccccccaaattttgtttccaattccgggccaaggggggtttcaccggtatcccccccccccgggttgtcccccaccccaatttcgactttacccccccccggaggccaacaaaaaaccttttatggggccccccaaa

SEQ ID NO: 38409 - DNA, 398 bp, Glycine max
  Clone ID: PAT_MRT3847_134685C.1
ggagtgtttaaaatattcgtctttttatatacgtggtagatcgttcttttctctttatacctaaatagtataatttctaattttttttaacaaaagttatagctgaacaatttctatatttttaaccaaatactttttactctacttttctaacgagtatccttgagtactcgttatcaagcgacccttaactttaaagaagagattacagactaaattactaatcaacaaggcactaactaattagttgtattttagttaagatggcataaactttagcaagtcaaagttccgaacagaagcctctaagcttgatttataatgggggcattgacaaatgactaacccaccacaccagtatttaattatgacgttttatgacactaccagcatgcatg

SEQ ID NO: 38410 - DNA, 387 bp, Glycine max
  Clone ID: PAT_MRT3847_134686C.1
caggcatcaggcaacttagtggagaaagcttgtatgagtattgggaaagattcaagaaattatgtgcaagctgccctcaccaccagatttcagagcaacttcttcttcaatatttctatgaggggcttagtaacatggagaggaaaacttgatgccttggtcaacctagtaactcagcttgccatgaatcagaaatctacacctgttgcaagagtatgtggtctatgttcttctgcagatcaccatttagatctttgtccttctttgtagtaatctggagtcaatgagcaacctgaagcttatgctgtaaacatttataatagacctccacaacagcaaaaccaacaatagcaaaatacttatgacctttcaagcaacagatacaat

SEQ ID NO: 38411 - DNA, 780 bp, Glycine max
  unsure (1)..(780): unsure at all n locations
  Clone ID: PAT_MRT3847_134687C.1
gcctcctctcctccgctgcctccttcttctttcacatgacacttctctctctgcgtcaaacacacctaccttccccacgcgtccgggcgtctttaccttctagtcgcagcaacggtggttccaacggctttgatttgggttccggcgacatcctttgttcgtacgaggaggacaataccaaccacgattcttctgacggcactcacatcgatcccgccaaggtaacataaacttacccacggcggctttcatagttgacttcgtgtttttcactcttttaaggaaaattccggatttgggtctgagcaaatggctagggtctggggaaagttttcatttttggcaatatgttttgatcgtttggacgaattgtttttcgttgctctgtttatttctctgttgggtttttagaagcttcttgcattcactgctgcgaaggaaatttggtcgtgttttgttcttagtatgttagtgaaacgaaggtctcgtttttgttgagtagattgcagagccatttggctgggttctgcatggatgcatgagctggttaattaagagcacgaagaaaagaaaattttcaactggttgggtgtgaataaaatgaagatttctttttttctaatatagtttgggtttgggaacggnggattttcattttccatgttccttcatgtatgcctctgctggacttttcttcagttaaggatttttaggcatcgatgcgagattgatgagtactgtttggcagaaagaagaatgaaagaggaatttatgttcaag

SEQ ID NO: 38412 - DNA, 329 bp, Glycine max
  Clone ID: PAT_MRT3847_134688C.1
caaataaaaaactattgtgcttttttaagtgtgtgatgcaacggaccacctagtagacggggatgcataaacaacgatttcagggaatgagggtggtcccaatccccggaatgcaggtgtactaaaaactcaccaaacgaggtcgactgacaacatttaatcgaagggcatgattcaaactgtgaatgtggcgactgatacgtggatgacagctgacatataatatcttataaaataatagttgacgtaaatgcggtgccactgtggggtcgttccttaaggacatcaaactgatggcatcggtcgaactatatatacccaattcaaaa

SEQ ID NO: 38413 - DNA, 446 bp, Glycine max
  Clone ID: PAT_MRT3847_134689C.1
gctccactctccagccaaaagaaagtagttcagaacaagatgctaacaagactttgaagagacataatgcatccatgatgacctattctgattgtgaggaagaggatgccattccaatgagtaatgttgtcaataaacccccagagaagagacagagaacaccatcagcttataactgcttcatcaaagaagagattaaaaggctaaaggctgagaaccctgacatggcccacagggaagcttttagtacagcagcaaaaaactgggccaatttccccccaactcagtgcaaagaagatgaagagagctgtagcagccagacagatcaacatgtggatcttgactcccaagtggaccctaatgctgtggtcaatgaagaagaaggtcaagggttacgtggaagaaaggtcccaaagaaatccatattggaaaggacaccgtttgaa

SEQ ID NO: 38414 - DNA, 390 bp, Glycine max
  Clone ID: PAT_MRT3847_13468C.1
acggccacgcgaccgttgctaaaaaccctgttttttctctctcttgcaaaacagtgtgagttgaaccttccccaaggttcatagggcgggggatccttcacattcaggggggactgcgcggcaaccaggaacggcgccaagttctgggaggtggtttgcgcggagcacggcttacaacagttttcgagtaaaaaacatgcctctgctgtccccaccatctgagtgtgaatgcttactacagcttgggcaagtgcgaacgggacacgccgcgcgcggtactcatggacctcgaaccgggcaccatggacagcgtccggtccgggcgcttttgaaagctcactatgattggacgctggggggcgtcacccgcggtgtgatattgacccttgg

SEQ ID NO: 38415 - DNA, 322 bp, Glycine max
  Clone ID: PAT_MRT3847_134690C.1
attctatgatgaatatgcccggcgttgatgatctgttatgcgtgtgatgtcttgtggaccctcacaaagggatggcaggattcttgcccgtacacttggatgtaataaacatggttattgtgtcagcctccgacggaatatctcatcagttcgtaaacctatggccagcacaagggaatgttgcaaggcattgattcatatcatatataataattctgtaagatgggtgatgccagagcttgcgaatgatcataatcattcatcagtagtctctcctcgtgaagtcatctcaacaatggatgacaaggataacatgattcgg

SEQ ID NO: 38416 - DNA, 536 bp, Glycine max
  Clone ID: PAT_MRT3847_134691C.1
gcacgagggagagagagagagaactagtctcgagtttttttttttttttttttttacttttgagcattgtttatacagaatttgtatagaaactgggtgtgtctgggatgatcacacaaagcctttattttttttgtgcaaataggatcaatattgattacataggatcaatctaataatgagattaataacaagtaaatccctaattgctatctaataataaataagagaatattatgtgatctaacactctccctcaagctggagcatatatgtgatttggaccaagcttgttacaaatgtggtaaacctaccagaaaggaaaggtggctctagctgtgtggttttgctgaataaatgatggctcggcagcaggcagcagtcaacggaggcctgcagttatgatgggtactgttcacctgtgaaaagagcacgcattgaaagcgtgagatgcacctgcctgggggcatgtgtggtggctgacggcagcgcggttgtggggttttgggtcatcaaagacaggcaatgatggtcgc

SEQ ID NO: 38417 - DNA, 408 bp, Glycine max
  Clone ID: PAT_MRT3847_134692C.1
gcacgagaaaaaggataagatatcaaagcgtaaatcaaaaaggtattggacacttaatacttacttactatttgattaaaccttgggttaagatttatgaatttcagatttcagtcatctatccttgttgctttcatgtttgtgatgaacttaaaatagccattattaggtcaagaaggctggattgtgtttattgtgtaatattgttgcatgtgaatgcactatgaaagaggtagattatttctcatgtatatgaatgctgaagttactatatgcatttagctgttctcatttctcttgacatggatttgtgtgctttaacaatctgtagactcttttcctggtttcattgtgaattattttctttttcttgtcagtaagaatcatctcattatgtggatctcaaaa

SEQ ID NO: 38418 - DNA, 267 bp, Glycine max
  Clone ID: PAT_MRT3847_134693C.1
gtgagattcatgacatggatgctgtcctgtctatgacaagaatttttagcctataccagcttactggacgcacgcacctcttacatatatggaaatgtcaccctatactctttctattaacattatatattgatctacatgttcattacaacaagcatcactcactagatatgtgtttgttatatttatttcccactgaatactaaaccctgactgcaagtcttccttgaagacatacaccaagaccaacatgattattattctttg

SEQ ID NO: 38419 - DNA, 501 bp, Glycine max
  unsure (1)..(501): unsure at all n locations
  Clone ID: PAT_MRT3847_134694C.1
nntcggcttttcgagctgcgtatacgccatcacgtactgtgtttattcttacgcttgcatagcctcactggcgctggacttctgctgcagcggcaatggacctagctatggttgggttgctgacatgaataggacagcgtggctgctggatgctgaggttcatagtgagcggaaagttgacagtccaaagggccatagatatgaagtcttagaggggggtggacatgcattgactacctgtatcacttcttcataagataccaatgactctgacaacatacataacatcttgtgacatgacaatgtaccaaatctggtgaacatgattctagccggggaggattaggagacacatgtctctgaatcttgagtgcatccagtggttgctctatattatgcagaggaagagaaggaatgactacgaccgggcttggagaaggatactcactgagatattggggttcgggtacgaatcgtatgacagggtatactctgtaacat

SEQ ID NO: 38420 - DNA, 428 bp, Glycine max
  Clone ID: PAT_MRT3847_134695C.1
ccacgcgtccgaattcgagcggccgctttttttttttttctttttattttttttttttatgagcaaccacaagcgaactgtaaattcacaattcatagtaaatgaaagacacttttagatttttatttatttatttggtatcatcctaattggggccataacatttggtcccaagtatctcgaacaagatttagtcgcacttaaaacatttcactcctccttaagagtgtattatgtgggattgaacccagatccttttccacagattgtagtcacgcagagtcaaaccatacgtaatgttaattaaataaataaaatatcttcatctataagaaaagctcctaaattacaaaagatcaaaataacttcaaattacataaataactcctattaattagcatcaattcttttctccccttctttttttg

SEQ ID NO: 38421 - DNA, 164 bp, Glycine max
  Clone ID: PAT_MRT3847_134696C.1
cccacgcgttcgaccacgcgtacgtttttttcactttcttgggaaaatcacagcgacgcttaggaaaaacactaaactgtgaaaaaaccactgctatcaatggcaactttcaaggtcttttaagctttccagatcttagacagctgttgaaatccaaccgttta

SEQ ID NO: 38422 - DNA, 471 bp, Glycine max
  Clone ID: PAT_MRT3847_134697C.1
cccacgcgtccgtacggctgcgagaagacgacagaaggggtcctacaattttgtttaagagtctactttgtgatcatttagtatataccaatacatgtgtaaaaataatcatgtcattaaactttataagaatcaaaattgacttgtttgtatgatataaatatatttttcaatatttaatatgatattcataataatttatttaacacatattttgcaatagaaattctaaataagacataaatttatctgagttaaacttaattataagctttagcctgattctatatatatatatatagatcaacattaacatatacgcttaacatttaaaaagataaatataagattataataataataataataataataactatttgtttatattttttaaatagattgagttgttaggtctaaaagatttttttaaatgacctagagtttgacattgttaactaaataatacat

SEQ ID NO: 38423 - DNA, 388 bp, Glycine max
  Clone ID: PAT_MRT3847_134698C.1
ctcaaaccctgcatgcgcggcatcgactaggcatgatatcaccgcctcatgcagacatattaaaccttgtttgagggacacacaaggataacaacgcggacggtcccgaacatgcatcacctgcaaaatacaatctgatgagagcgactaccaagggctgagaaatgatcaagcctgtggtgccatcgtgcctttcagcctacttgctctactggcaaacatccctggctggtaccatgtcaaacaccaccacagaagcacatgccgcagaacttggatgaggagccattggacgagcagctccatctatgcctgatgatttgtaacattcgaggacctctgctgctctatcttttgaagactatccatctggagactcatgtgatat

SEQ ID NO: 38424 - DNA, 499 bp, Glycine max
  Clone ID: PAT_MRT3847_134699C.1
ccacgcgtccggcgaaattctcttccgcttcatgattaaggtttacccgctacagtgaaacatgggaaatccaacgcgaatctgtctgcgaatctttgcgctgctcctcttgattcccacctcttcgtttaccttctccgcgcttccgatgacgccgatgatgatgcgatcttctatgatcctttcgtcgaggatcttgaagaccgttgaggttgtggtctcatgaaagatgagtgcagcggcgctctggaagcatgccaagagcgagggacaggatgattatgggcttcttgtcaagagagaaagcatggcactatgctataccaacagaacttgatgaggccgcgagtctcaaggatgaaacaggcgatcttcagtttgaaactcggcttcgaacagggcttgagtggggaggcgcatatctaatatatcgccgaccacacgaggctggatggaaatccaaggaatcctgataatgaatctccatactctatcatga

SEQ ID NO: 38425 - DNA, 2000 bp, Glycine max
  unsure (1)..(2000): unsure at all n locations
  Clone ID: PAT_MRT3847_13469C.1
actaggcaaacataaagattgaattttatattatgaaaaccaataaaatcacaaaatggaagtatatccaatgctcaaaaactttacagcatgtatcaaatatagttcaaggaccacaaacaatacagccaaattaatttccatgggaaaaataatgataaggtaaatatcaacaaaagcaaattaaatattcccaggaatggctagctaaacttgttgatcatcatcaatttgaggagcaaatgcacacaaagtcctgctttttctttacaatcacatctcttggtactccagcaactgcattcggctttgcattctcagctgttcatagaaccttctgatgaaagcctcagcctgatcatcaacttgggcatttccatttccaccctcttgttcattttcttcatcctcagatgagtagttggagatcctcacagtgaagggtgagatcctctccccaggagcaaaatcagatgcattatcaaacctatggttgaaagtgtattcaggtgtcatattaggcaccaaaaccacgggcctaggctcttcaacaacctctgtggtattcatgcaaggggaagttgaaatggtgctttcttctttggcacatggaaaaaaacaggacttgngctgntgctgcatgagctcggaattcggctcgagtgacaaggcacaaccattcattccttcagaaccaaagtccaccacttcactctcttacatttttccattttttaaattctccatttcctttcttatttacaagttcctctcttctcttctcccttcacacacccattttccctttcactcacccctcattcaaatcatggatttcttgcaagcaccagaaaatcagatacttgtgggtgtggccgtggccgttgtagccattgggcttggtgctgtctatctctattcatctaagaagcgcaaaggttgcttggacccattgaactttaaggtgttcaaacttgttaagcgtgcacagctgagccataatgttgctaagttcacatttgcacttccaacacctacatctgttttgggtcttccaattgggcaacacataagttgcaggggtaaagatgctcaaggtgaagacgttatcaaaccatatacccctactacattggattccgatgttggacattttgaactagttattaagatgtacccacaaggaaggatgtcacaccatttccgtgagatgcgtgttggtgactacctttctgtgaaaggacccaagggacgtttcaagtaccaacctggcgaggttagggcatttgggatgcttgctggagggtctggaatcaccccaatgtttcaagttgcccagagctatattagaaaaccctaatgacaggaccaaagtacatcttatctatgccaatgttacgtatgaggacattcttttgaaggaagagctggacggtcttgcttctaactatccagatcgattcaaaatatactatgtgttaaatcagcctcctgaggtatgggatggtggtgaaggatttgtgtcaaaggagatgattcaaacccattgccctgctccagcacaagatattaagatattgagatgtggccccccacctatgaacaaggccatggctgcacaccttgaagcccttggatatgcttctgagatgcagttccagttctgattctcttcatcgggggtgcttaacattgcatgcatttcatggccttggccattgaaaaacatatagcaactttttgtttctttttttcctggctatgaatttgtgaaacattggactaacagtgcatttagtttcacaaggttcttcagagttgaggcctgaataattgcttcttgtacgaaatgagatgtataccttgaccatgtgctagagttgcaaactatgaattagacttgttagtattgactaaaaatgtcatcactttggcatagttttcaaacagatgcaaaggtcgtgagttataaacttataatcaatcttcaattttcagat

SEQ ID NO: 38426 - DNA, 223 bp, Glycine max
  Clone ID: PAT_MRT3847_1346C.1
tacggctgcgagaagacgacagaagggggtgggatacgaacgttgactaccacgcccgtacgtaccattggttcttccatttcggaagtttctggattaagcaagtggattttttatttgagctgatggatcacaataaaacctaatatttgtgttttgggtttgtggaaaatacccaggatttgaggtgctggagaagaagggataaagtgtatggacatgg

SEQ ID NO: 38427 - DNA, 592 bp, Glycine max
  Clone ID: PAT_MRT3847_134700C.1
gtttcgtcgcaatagcggcaacagcaaaatctagttgtacggcgttttggaatcggagggagaggagaatccattccaaacggcgccgtattccttaaaagggggaactctaacaccggaattttcctcacaaacacaataatcgattcgaacgttcttgaagttgaaagtcattaactatgggaatgatagtggaggttgaaaacgaaaacggagacctaaacgacgccgttcttgttccaccccctaacttctccatggtcgaggactgcattttccgatccggcctccccaacccttccaatttcccctttctccaaaccctaaaccttcgttccatcatatacctgtgccctgagccttatccggaagaaaatctggacttccttcgttcgcagaatattcgcctttttcaatttggaattgaggggaaaacggacatttctatgcctattctcaaggattctatcatggatgcactggaagttttaattggtactgaatcattacaatgatggttattttttcttctttcttttggggagagagtgtgtcttgagttgagtgtattctttattgctgctgcatcatc

SEQ ID NO: 38428 - DNA, 403 bp, Glycine max
  Clone ID: PAT_MRT3847_134701C.1
aggtactagttaggaattcccggctcgacccacgcgtcagtccggtggcaaaaaaagaacagaggggaacacacgcacgtctcttgcttccacttccagtccagcatgccgtcagatcatctcaaacatcgggtcaccagcacaatagcaaccaccagccacgtcaataggaccagcagaggctcacgactgctgatggccgcacgcggtcttaagtcactcgccagagccgttgtccgccctctctctctcagctccttatcatcttacagaggctcctcctcctcaagtgcatactgcgcgtcgagaatctccttcaggttcccaccctcgagggccctagacttgacgtgtccagcttcaagcttcatgatggtgtctctctgcatggatggtgtgagca

SEQ ID NO: 38429 - DNA, 596 bp, Glycine max
  unsure (1)..(596): unsure at all n locations
  Clone ID: PAT_MRT3847_134702C.1
ccacgccgtccgcaacaatgctaaccttcttcttgtaccttttccttttcttcttgttatgtgcacttcaacaactagcctcatcccaacccttcttcctcaatagaaggatcctccatgaaccctttgttcctttaaccagtactcttccaccttctgaggcaccaaagccacaacctcttcatgcttctccttcaagccaaaaacaaaaaccaaatccaaaatatccatcatctaccattcccacaacctctaccactgccacagcagtaccaacaccaacaacagctacaactacaacacaatcaccatttttcccattatacccttcttcccctccacctccttctccaatcacctttgcttccttccctgccaacatttcctctctcattctccctcactctcccaaacccaattcttcctccaacaaactcctccctgttgctctttccgccgtcgcgcttgcggtcctcgctataatatttccgcncgncgtctgtaccggccgtcgccgggaccatcccctcgccgccgaaggcaaacttatccgatccgacaccgacctncgcctgctccggnacaatggcgaaacc

SEQ ID NO: 38430 - DNA, 327 bp, Glycine max
  unsure (1)..(327): unsure at all n locations
  Clone ID: PAT_MRT3847_134703C.1
cttcattcttctactgtctattatctgcttactaatatatcccaaaatgncgctcatagaagctgtttattaatacacagggcgcacccttcataaaaatctaattagtgtaactgctgacaatatcagcaccttcttaaaaactgcaaaggttccagtagactcttattgtccaacctcgtttgctaaactcgctcagaagaaaaatctttgcgattttatagcaaattcggcatgccgtgatgcaccagttgctgttgcagcttccccaattgctgctactgctggtggtgctactacctcagcttcaacttcttaatagaaaaa

SEQ ID NO: 38431 - DNA, 350 bp, Glycine max
  Clone ID: PAT_MRT3847_134704C.1
ggtccggaatccccgtcgaccccgcgtccggcttccttgcgccttacaaaactaatataattgaaatatataatatattttataaaataacacggtctatctggctacgataatctcaatcgttattcacattttaaaattttttaaacaatgaaatacatatttaattttattgagactattgttgttaggtatgctattagtatattatttacaaaagattaaaccatgaagtaaaaatctaaaactatcaacatattgaaatgtattcatgataaatatgttgaagaacaattacaagactaatttggagtatcagtttgacaatgtcacatgataaatgatttaat

SEQ ID NO: 38432 - DNA, 397 bp, Glycine max
  Clone ID: PAT_MRT3847_134705C.1
aatggaagaaggcatacccccaaatcgaaccgaagggggggaaaacccgaattcaaagcactccaaccatacacaaaaccgcaacaacaaaaagaacgcgaaaaaaaaaagactctctctctccactcgccgaacccaaaacccacgcaaaagataaaaacaaacgaccactcccctctagactccctaaaaccaaaagcggaccacaaccaaaaccaagggcgctattcaggaaagctccataagacttcaaacgaccaaaagcccgggacaccatagacgccccctccaaacatgaatgtactctcaaacagcaaggggcacagacccagccaatttgcggcacttgagagcatagaacatccccgaggcaacgccagctctcacggcgcccaag

SEQ ID NO: 38433 - DNA, 355 bp, Glycine max
  Clone ID: PAT_MRT3847_134706C.1
tgcttgtagagggaaagatatagaccggattcctctcccaccgcctgtatctggcgcagcagattaaaacatccgccaaaacttcccgtcaatatagttctcgtcccagtgcaccatctagcagacatgatgttagcacgaaccctcctgcaacttctgcttctgataatcaggtttgtcccatttgcctcaccgatcctaaggatatggccttcggttgcgggcatcaggtaaggaatccaggctgttcatttgttttttttttcctcagtacttacatgagatgattgaatgcctattagtattggttattatatgagccatttttattaacatgcagacatgctgtgattgc

SEQ ID NO: 38434 - DNA, 331 bp, Glycine max
  Clone ID: PAT_MRT3847_134707C.1
gtcgtcccactcatacgcccacgcgtacgtgtctatgtcgtttaggagtatcatccttgaaaggaatgcatttgatgtgaggtttgtatatagcgggacatgcacgtcacagtcacacagtgattctattgcccatgatagtttggtggtgcttgatggattgaatcatatttgttgggctaacatgccccctgagctttttagggatgtgctcatgagaattgacgcctcttatgatttctggcctgtccagaaacatgtcttctcctgcgccggagtttgccgcaatttcagataaatcatgattgaaattttcaaagtcccttaacta

SEQ ID NO: 38435 - DNA, 420 bp, Glycine max
  Clone ID: PAT_MRT3847_134708C.1
tctctcagatgtgaaaaataccttaattacttctgtagataaccaaccactcctccgtcgttttacttatcatgacataacactgttcattcgggttcctttatatgaaagaagggaccctgaacaccatccttatctccatttctccttgacaactatctatcacaaagtatctatactttttcccccaccaaatccatcttcctccacttctcaatcctatacatgcccctctactactacttatactccaattctactcttactcatgtcataatttataccctctattacaattacctaccttcacaatattggtcatttatctcactattatgctattaaaccaaacttccaaattttgttttgatgtctgaatccctatatattggaactgctgcatttaaattttgttaatca

SEQ ID NO: 38436 - DNA, 338 bp, Glycine max
  Clone ID: PAT_MRT3847_134709C.1
cacagaccgagaaatcccaatcctatggcacaagacgggtatctcgatgaacagttggcgcagctactatccaattttgtgcaccagagggaatcactgtcgaatcaagaagaagtagagctgcgtactaaaaatgaaactcttgtattagaggttacaatagatcttttttaaagacaacgcagcaccatgaacgagacgcaaatagcttataatgtcggataaataatcaccctgattggataacttagatgagaggatatcaatcatcaaaggcttcagtaacacaggtgcagacgctcttgagtgatgcaaacataatgtggatgccagctata

SEQ ID NO: 38437 - DNA, 1233 bp, Glycine max
  Clone ID: PAT_MRT3847_13470C.1
ttcccgggtcgacccacgcgtccgcggacgcgagaagagacagagggggactcgctaggtttgccaaaccaactccccaaaggggaccttagagagcaatcttcttccttctctctctctctctctctctctctctttcaatggcttcctcgtcttccagaactaagtccagtgggcccgttctacgctccctctcaccctccagtagattctgctcatacaccacatccaaaacccctttctcttctccttcatccgcattcgcttcctccacaagctctggcttctcctcttcatccttcttcaaccagccacgtcagcatcactctcaaagccatcacagacgtgccgcatcgcccacacgtgtcaatctatacagccccgcccctctctcctctgccgtccggttctcaatcgacccccggtccatatctccgaaccggtccatctcgaaccagatcatcacgacgaagaacaaccgtccgatctctggccagaagaagacgtgtatgtgctcccctacgacgcaccctgggtcctttcgatgcagcctccacaagaacataggaagcagcaaccacaacgccgattcgtacccttcgaaccggctcaacatgcgtagatccgctatgaagaactcgctggtgagaatcggaggcgtggagggcgagtgggtgaaacgggccctgacagcactcattcgtcccagttcgcatcaacagaggaggagagcggggttcgagcccaggcccagtcgtctctctgtcatgtcaaaggcccaggatctatgatttttaaagaaaagaaaatgtttttttctatttacagcttgcaggttgttcttgattttactggtttatattccataccacccctggcgcccttatctgccgccagagttggattccggcgaagcggctgggaggcagtggcgagtcctctccggcgagttttgatttcgtcgtctggagcagaatggtgaaattcgcatagatctttgacaatggacctacacaaaattgcattttgtacataaattttgctatggaagcagagtttggacccctttttttttaaacataaaaaaaaaaaaaaaaaaaaaaaaaaaaaaaaaaaaaaaaaaaaaaggaggggcaagaatcggcgttgccgagtgtgcgtaacctgtttctggtgtggctgtttaccgaggccggcatgacggccaacgaggactgcaaagagtctgataag

SEQ ID NO: 38438 - DNA, 459 bp, Glycine max
  Clone ID: PAT_MRT3847_134710C.1
gaccctccgtcagacggatcatgcctatgaggcctgtgacagaattgggctcgagcggctcgagcttggatctgatttcgtcctcggggagaagagaccccaagagtgttgagcagcccatcgtgcttaaagaagggttcatgatcaagatggcccaaggacggaagcgctttgggatgaagaattttaagaagagatggtttcgcttgaccaaccatgaatttacctaccacaaaagcaaaggggaccagcctctctacagcattcccatcgagaacatcctggcagtggagaagctggaggaggagtctttcaaaatgaaaaacatgttccaggtcatccagccagagcgtgcgctgtacatccaggccaacaactgcgtggaggccaaggactggatcgacattctcaccaaagtgagccagtgcaaccagaagcgcctcaccgtctaccacccgt

SEQ ID NO: 38439 - DNA, 240 bp, Glycine max
  Clone ID: PAT_MRT3847_134711C.1
gaatgacaagtcaatactcaatacttgggccaaaagattaatggaaggaaaaactcaatacatagattggggccaacaatccaaaaacatactaacagggtcttgctgatgtgcagctatttaaaccaggtttttgttaaaattcttcgccctcagattcctttgaattgtcaggatcattgtcaattgcctcattggcaaagggttcctttacattttcgttagggggttttcctatca

SEQ ID NO: 38440 - DNA, 653 bp, Glycine max
  Clone ID: PAT_MRT3847_134712C.1
caatgggcacatgcacaaagaacattgcatggattacaaccacctgacaccaagatgttcaccgagcgcccacatttcaacgaactcaaccaaatggctgaagaagctaaaaggagagctgaaattgcacggctgcgagagctgcatacactgaagggtcatgtagaatcagttttgaaattgaagggtattgatgtagacacaattcagcaagcatacacagtctgaatatgcttttatatatatttgcatactgatacaatccaatggtgctaactatattgaagaggaatagaagaaatataatgttgtttactcactccagttgagttcaatgtcctctcaccgttttgagcacttaaaaggggagtgctttgtaaggtcgatgttactatagctgtcactttttttctctacagttccataatgcaacaacggggagagccgttcatcttctatgcttctaaacgcatttttccttgtacttcactctcaatcccttcagagttcaaactttcaagttatgaatataagaaaaacacgttattttatggtttgtttaggaacagaaatattcaggggatgcgtactttgttgttaagaattcagttttgattaaaaggtagtatgcctatactattatgcatgtgggt

SEQ ID NO: 38441 - DNA, 361 bp, Glycine max
  Clone ID: PAT_MRT3847_134713C.1
cataaactaaaattaacttgtagactttaacttttgaagaagttaaatgaaataactcctataaaaaaaagtacataagttaattttagttaatgagaaatttaatttatttcattttcttataaatgctcatgaaaaaacttatgcaaatagtatataactataagagactaagatacacgagaagcctctttattttccaaatgtttacttctcctgcagaataatggtacatcgaagcatatgaagagtagcactacaagaaatagagaggaattcatatacgtactaacaaaatatagtaattagactatttttcattgatatagaaattgttggttggtcctttaaaaaaaaaaaa

SEQ ID NO: 38442 - DNA, 395 bp, Glycine max
  Clone ID: PAT_MRT3847_134714C.1
acattcaaataaatatattgggcacaaactttgaaattccactagactacaattcaatgaaggctgttcataataccatcctatgactataaacaacttaatgaagaatgctgattgtcacgggagcctatatacatcgtacatggggagcctaatgactgagctaaaggtgacaaatgataagtgttcatgtggacatggcgggaaaaaaacagacccactttgtttataacttatactttagactcattctattgacttgatgattcaagggaccaattacctgtccacaaaatcaaacgcttttttgcattgtccgcaatacataggcatgttgcagggatattgctgactgtactggaaagaattatgaaggcgcagacaactgtgcgtga

SEQ ID NO: 38443 - DNA, 464 bp, Glycine max
  Clone ID: PAT_MRT3847_134715C.1
acggctgcgagaagacgacagaagggttccatggttttcataacactggacaaacaaacaaaccaaattgttgaagattcggtgttaactagcgatatagccattggtatataaacgaggttaagtctcactttacaaaataaattttataagattgagttaaactctccttttcttgtttcaatgagtttacaagtgtcaagaaaatttgaagcacattgcaacctaccttggttcaatgagtttacaatcgtctaggaaactggaacttgggttcattgaatataaatttgaagcacattgcaacctacctcaaattggtaatcagaatctaaaagaaaatttgccatattttttgcaacagaaatctaaatgaatttgtcgttagatgaaagtctctgtctgtattataaattggagaaggagggagcatgagatccgtcaaaatgaaccataactctgga

SEQ ID NO: 38444 - DNA, 205 bp, Glycine max
  Clone ID: PAT_MRT3847_134716C.1
taatcttaagataaacagacgagaaacacatgggtaaatgtatgctccgatgactaggacccacctcgcaaaaaggcatactgaataaccgttgcgtgaatgagtaggaccttgaaataatatttgaagcaacgcgaaatcaatagacctacctaaactcctatcttacaggtgaattacggactgataactatcgttgacaaaa

SEQ ID NO: 38445 - DNA, 473 bp, Glycine max
  unsure (1)..(473): unsure at all n locations
  Clone ID: PAT_MRT3847_134717C.1
gtgggcatagggagtaaatggggatttcacaaactgtgcaaaatgggaaggaaaatctcactggacagcgacgccgtacgacgattcatgggttcctctccgtcaacacccaaagccaaacaaacaaacattaaccttaaccaaacaaaccctaagttttgatctgcctctcattctttgttcccttctcatccattcctaaataatctattagttttcatgcagggaaacactcctggcagcatggaagctgatggtaaacctcctgaggtgaaggaaaaattgccaatcaaaagatcaaaaggaagtttgggtagtttgaatatgatcacagggaaaaataatgaacatggtaaaacaccagggacatctgctaatggaattcattcgaagagtggtgagagtgcaagtgaaggcgaaggtactagtgaaggaagtgatgccaattctcaaaatgactctcaatngaaatc

SEQ ID NO: 38446 - DNA, 313 bp, Glycine max
  Clone ID: PAT_MRT3847_134718C.1
agataccgttacgatacgactacacaacgactagatagggaaacttctacaataggactacaaattaaaaaacactctctctagactatacaagcttacgtacgctatcatactacttaatattacagctatactcataccacagatcatttcaattaccaatcatttacaaaattatgactatgataactctctacaaacatactttaatctcttaatactacatcactctatgcctagttaatgcaacatcaaagatattactatcaattgatatttctaacattttcttagctttaactgcacatgctta

SEQ ID NO: 38447 - DNA, 369 bp, Glycine max
  Clone ID: PAT_MRT3847_134719C.1
cccacgcgtccgcgcccccacctgcacctgtgcctccaactgggttgcttatgaagcggtgcgaagttcatttggcgccttcttttgctctctaatctcgcgtttggagcttatctatttgctcgtgcaaaacagtgttgttaaattgccgctatggcggcgccatggcggtatggcataacaggtttttcaaaaaatgccaccaaatagcggtggcgttgcgggtttcatatgacagccgtcatagccttaacgaccgtggcagaacggcagaaatggtggaagactgctttttttgtttttttgaaattttcgcaatgggtcgtgttgggctgacccgacccaaccctaacccgatttttgcatgca

SEQ ID NO: 38448 - DNA, 639 bp, Glycine max
  Clone ID: PAT_MRT3847_13471C.1
aaatcaaacaacttttggtcatgcttcaattttccattacaacataatccaaccacatacatagttggtccatgtcgttcaattttattggtgtagttccaacacaattcattatataaatcaagcaacttcttgggcatgcttcatatttccccttttgcttctctgtttgtcattgaaactccttcaccccctcatatctccccaattcaccagtggcaagccaaggcaaaactcaaggagccagcacgttgggagaagtcagcctattttcctccagatcatgcttcgatgtagaatccccacccatcaattccgagaagccctccaccttcacaggcggggctctaaccatgctagtgttcggtgactgaattgaaggaatctgtaaggaacccatgtgtctgaactgagtgccagattgaggatggaaatttgacattgcagctatctgttgctgctgctgctgctgcctaaactgctgaatttgaggatgtctagaagtgaaggcattattaccatcaagtggtaagtcttggttttcaatcttgacttgaaccaatggtctttctttatctatatccatagcagggcgaggagtagctgctgctgcacgccttcgcaatcttcaaactgctg

SEQ ID NO: 38449 - DNA, 581 bp, Glycine max
  Clone ID: PAT_MRT3847_134720C.1
cggccgctcgagccggcctggccggaaccttctccacttactctcttatatttctctccatataaccatggctatgagattcctctgatccctgcttctcctctccaccttactcctaaccatctaggcagaatatgagacattgtcttcactctagacccaaatgcaacaaccatcgaacatgaaaatcttctaggccacatcacagtctactgtgacttacatgtccatgcctagaacccacactaccaatggaagcctgcccacagtccccaaatacaacacaaccacaaactttgactcggctgctatcttcgacaaccctttagctgtggaacccgagaatgactccgacgttgacgaagaaaccgatagcttgattaccaccacgacgcaaatgcatctgaatgttttgctgaccattcatcttcacattgacacaagggaatgacaacgtcagcaccatcacgatcactgggaggagccccctctcggataatgtgagggaggtggccattgttggtggaagtgtcatcttccaatttggcactgctaatatcgtgaccaggactcccagcttt

SEQ ID NO: 38450 - DNA, 776 bp, Glycine max
  Clone ID: PAT_MRT3847_134721C.1
attacaattggttattgaaatgactttttatttattaatttttagaagagcacattgaatggaaaaatatattttattcaattaactcatgaataacaaatttaagttcaaatatatagatactccttaaatataattaggagcattaagattatgaccctaatacaagtttctttccttatacattggtgtagtgttagattacttttaccatacacatttgttgatttgttttcccagatctaccattaccaaaagcttcctcgatcataatgattgtaatgtcagtcactcaacttgtggtaatggtaacaagaccaaacacacgcatcacggagattggaatattcgatacttgccttgccgtcttcatcactccaactttgccttttctttttcttttggctccactctttactttttttattactcccactataagcatcatcactctactctcaaataatgcttatcttacagtattttaataatttacatttttttaaaatataaatattaaattatcatatttttcaaagtaaatttattatcatataagaaataattgaattttttttctaaataatttgatataaatttttaaaatattctaacataagaggatattagcaaattccaatataaaatagcaacttgctcgctttaattttgattcccacattgattgacaaacttaaattaaaaatatttgtatgaggagagatgaaaaattatattattaataacttttttttttattttcatatgatttacat

SEQ ID NO: 38451 - DNA, 521 bp, Glycine max
  Clone ID: PAT_MRT3847_134722C.1
gttcgggaataaactctttatttggacaatgcttcctgctctttcaaaaccttctttcggaggacctccttgtagcccacaatgtcacccttccacttgttgatacctccgtgctcacagatccaaaatttcatcagctatctgattgatcaatctgaaatcgtggcttaacaacaccactcctccctcaaattcgttgatggcgtcagcgagagcatcaatagtttcaatgtccaaatgattggtgggctcatccagcagcaacagatgaggagtctgccatgctaaccacgcaaacaccactcgtgtcttctgtccatctgaaagcagtcgaatcagagtagtttgggcttttccagtgattccaaacttgccaatgatctgtcgcattctctcgtactcgacttcacctggatagcacttcatcatataatccagtggtgacaggtccatgtccaacaagtctgtcaagtgctgatggtagtatccaatcttcaagtgctgatgtcttctcaccattc

SEQ ID NO: 38452 - DNA, 815 bp, Glycine max
  Clone ID: PAT_MRT3847_134723C.1
cccttttttaattatcccttacagtattatttattactatagaggggaagaaattaatatttatcaagcaatctaaatggggttgagtaaggtttcatttcctgtattatgtgtgttgggactgaccaacattgtgagtcaagttgccaatgctcaagactcaccagcagattacgtcaatgcacacaacgctgcaagatcacaggtgggtgttcaaaacttggcttgggatgacacggttgctgcttttgcacagaactatgctaatcaacgaaaaggtgagtgtctactggtccactctcggggagcctaagtgggaaagatgcagtgtaattgtgggtctatgagaaatccaagcacagatgcaattacaatgtgggttgttgagaggtgtaactatgactacaattctaagtcctgtgttggtggtgagtgcctgcattacactcaggttgtttggagagactctgtgcgtcttggatgtgccaaagtctcatgtgataatggaggcactttcatcacttgcaactatgctcctcctggcaactatgttggccaaagaccctactaggttgttacatttgtagcagcgagatggctaccatttaagatgatgagttatataccatacatattaagaataaataatagcatcatgaatttatatagattcatgttatgatattttccatcgtattggaatacatgtgagctcataattaactcacacaaatcaataataatgttactcttcaacttgtcataaaaaaaaaaaaaaaaaaaaattgcttggtcaccctggaagttgggtttac

SEQ ID NO: 38453 - DNA, 798 bp, Glycine max
  Clone ID: PAT_MRT3847_134724C.1
cccacgcgtccgtctacatgcagctgctaattttggacagtacccttatggaggctatatcctaaaccgtccaactcaaagcagaagattgctcccagaaccaaaaaccaaagagtatgatgagatggtcaagaatcctcaagaggcttttttgagaacaattacaccaaagttccagacagttattgatcttacagtgatggagatattgtcaagccattcctctgatgagatctaccttggacagagggacactccaaattggacctctgatcagaatgcaaaagatgtatttgaaacatttacaaaaacacttgcagagattgagaaaaaaatctcagaaaggaacaacaaccaagagcttaaaaaccgaactgggccagccaaatttccctacactgtgcttcttcctaccagtgaaccagggttgacttttaggggaatccctaatagtgtctctatctaaaggagtgtgtgtggcggcttcctttagtattgtacttgcatcttccaataaaatatgcatgcttatgagcatgcatcgttgtgtctgtgtttgttttaagttatgttatatgtattgcttcagctttccattccactgtacgttaagccggaataaataagctcagtggcagatttcctgttatgaccgggaattctttttatttgagctttgagttttcttttgttcaaaacttattattattattattatttactttctcttctatgagagaacccccacgggcaagtgtggaattacaatggaggcctcctaccccacgaagaatggtt

SEQ ID NO: 38454 - DNA, 436 bp, Glycine max
  Clone ID: PAT_MRT3847_134725C.1
atataaatggattttttaaggttgacatacattatctattgtagttttttaacttttgtatttaggtttacttattttttttatacaatgataaggtttccttcaaattcatgaagtcatccatgcattagatgttttttcttaactttgaaaccacaaagggataattgaagaaatgaaatcttcttgaagtagattgattattaaaagagttacatttattatcaggctagattacatcacagggaagcttttctacgaaaggtaaaggaaacatatagcgaaatacttggaagcagctaaaacagtgaggaattgctgcttagattctgttcacacaaaagagatctctgtcttgcagcattttgttaaagatgcaaacctcgcttcattttgtcgcaataagcttcctgaccatactttatcccatgtgcgc

SEQ ID NO: 38455 - DNA, 330 bp, Glycine max
  Clone ID: PAT_MRT3847_134726C.1
tgccggaccggaactgcagggccggcccaccccacccgttccaggttggccagtgccactgaaagtcaattgtggcaccattattcgaacattttcgggaacaaccttgtggaaactgtttgtcttgaattagaggctctgaaagggaggagtgtgaggtgtgggaatgcattagtcaaaaggagtgatagggcctcatgggacaagtgttttaagcaaacagcatcagaacagagcctttatgatgcatgtcagtggacaaaataggaaccacatatgtgggaattgatcatgccaatagaggcatgcggtcctaataatgggtttgaa

SEQ ID NO: 38456 - DNA, 537 bp, Glycine max
  Clone ID: PAT_MRT3847_134727C.1
tttagagaatcatatggatactatgaactccggaactgctgggattgctaatgattactatggcttagatgcttcatcagctagtaatttgggtggaaaaaatggaaggtttgaatttccagtcaagacctgtcactatttcaacaaagggttttgtaagcatggaaatagctgtagatattatcacgaacaaggcgccccagatatgttctctcacatgtatggaaatgatatttttaatgatgatcaggtgatttcacctgggtcactagcacaattagagtcagaaattgttgaactcctgaaacttaaaaaaggaggttccatatcaattgcttcccttccaatggcatactatgacaggtacaaaaaagtgctgcaggcagacggctacctgactgagagccagagacatggtaagtctggctacagtttgacaaagcttcttgcacggttgataaatagtattcggctaattgacaggcctcatgggcagcattcagttgttctggcagaagatgctccaaagttcaatgg

SEQ ID NO: 38457 - DNA, 246 bp, Glycine max
  unsure (1)..(246): unsure at all n locations
  Clone ID: PAT_MRT3847_134728C.1
agggcattgttcaaataagcatttggcttagaaagaagtcaacaacatttttcatcctgctatatatgtacatgtttattgtattcattttatcttatatctattagaagctttgtttgtcctagcaatctggctttgacctttgccacaatttacctatatgacaaagtttttgtgtagcagtttaggttgagtgactccatgttcaataatctaatcgatcgaatacatgtttttagttcnnaa

SEQ ID NO: 38458 - DNA, 237 bp, Glycine max
  unsure (1)..(237): unsure at all n locations
  Clone ID: PAT_MRT3847_134729C.1
tcgcaggcacgcgtacgtaanctccnnatncgagctcgagggcacaacgcagtnngtnaccnccgncantannnannaangnncttacantngccnanagaacangcagnncgcagggnancnnnnctcntgtagtagnacnaagancncncacctnnacncatnagcccaggngancagngacaactgcnanncagagncaccactntaacgcccaagcacattgnatgttggtga

SEQ ID NO: 38459 - DNA, 2332 bp, Glycine max
  Clone ID: PAT_MRT3847_13472C.1
gtctttcgacacagacccaccgacttcagaccgtgccagcactactgcgttcggcggtggtagcagcggcggcaatggctatgctgggggaggacggtcgcggctatcgaactggcacggaagcttgacacgtgcggcgtgtggcgaacctggctcgggcgacgccacctacggcaacttcgcacccttcctattttccccttccgcttgggactgcttcagcaccttccccactcacatccctcaccaactgcggagtacgggccctctttcttgacagagtcacggcttgcctcacaacaaaactttttggtcttttcttatgtcattccaacttgccacgccccaaacccagctacctccgactacactacgacctcatctacttcagcctcgactcggcttctatgattgtatccaagccttcttcctcggcttgatccaggtatctggaatctgagcttctggaaacgtggtaaaatctatgcattgaaaagtacaagcataaaaagaactcggttgcggaggagtcgcgaccgttgtcaggtatggctgctgctatacactatggtactgatcatgttatgaggctcgaggtgtatagatgagaggtaaataaggtgattggagcaaatcctctgggactacaggatgcttctggtcttttcttatgttgtaaaatctggaaacattgtggtaactaacactttggattaatttcctgacaccgcccccaccaccactgagaattacagcaataatattagcaaccaaaagaatgtgatgatgtttagtactcctttgctgttttttcagatttcgtcgatcaggaaaaaagttatgatgtaatagatcggggaaattcctcatattgttagtatagagttttttgtcttggttgtgagtgtgtaatttagatttttttggaatgggatttttaaaagactatttcaaataaggtttttgtttctgaagagtgttttgaaaattttgatggacatagggtttgaaggtaccatggaaggttcagttgaggacttctctgaagtgttgagaaaacggataagtaaaattggatcaaatttgagagtgcttgctgatagttacaagaaacagtgctcggccattgagcttctgaagatgttgctgaaaacagtagggtttagtaattttacaccattagtggatgtggttaaagatggctcaaagaataatgtacaacagagtcagcaacaaattcatggaatgcagccacagctacagcaacaacagcagagttcccttcggctgcctcaacaacttcaaatgcagaggcaaatgcatccgcagatgcagcagatgattcattcccaaaatatggcttttcatcagcagcaacatcaacaacaacagcagcagtttgagagattgcgaaggcgtgcagcagcagctactcctcgccctgctatggatatagataaagaaagaccattggttcaagtcaagattgaaaaccaagacttaccacttgatggtaataatgccttcacttctagacatcctcaaattcagcagtttaggcagcagcagcagcagcaacagatagctgcaatgtcaaatttccatcctcaatctggcactcagttcagacacatgggttccttacagattccttcaattcagtcaccgaacactagcatggttagagccccgcctgtgaaggtggagggcttctcggaattgatgggtggggattctacatcgaagcatgatctggaggaaaataggctgacttctcccaacggtaaatagccttttctagtaatttggtaaacgagtgtgtgcatccccggaggtcctatggatttggtatggtgtcaaaaattgtcatggccttcattgtaatagaacttcttcagtttattttgtctaagagctctcacattagtacatcccaggaaatgtacaccatcaaacatcatggatcaaatatatatttaacgaaccaattgttctgtaacatgtaaaaaatgggtacataattcgagttttgccttggcttgctgctggtgaattggggagatatgagggggtgaaggagtttcaatgacaaacagagaagcaaaaggggaaatatgaagcatgcccaagaagttgcttgatttatataatgaattgtgttggaactacaccaataaaattgaacgacatggaccaactatgtatgtggttggattatgttgtaatggaaaattgaagcatgaccaaaagttgtttgatttataatattgtgtcggaactagaccaatgaaattgattgacatggatcgactctgtatgtcgtcagattatg

SEQ ID NO: 38460 - DNA, 948 bp, Glycine max
  Clone ID: PAT_MRT3847_134730C.1
gcctttaagccagcacgccaaaaagaacttctttgcaaaacacgactgaggaccttgcaacaccggcgtctccctccttcctctcctctctctgcctttacctttgattgtaggtttttcattatttggcggcgaaacagggttgaatatttttgttttagcgtctgagctttgaattacagagcaaagtgaagcgtgaacatggtgatgcatctaaacgggacaccgtgcgctctcggattccacatgcctgcggagtgggaaacccacgcgcagtgctggatgggttggcctgaacgtgccgataactggcgtgacggcgccgttcacgcccaacgcgtgtttgcgagggtagcgtcagcaatctcaagattcgagtctgtaacagtttgtgttagttctgcacagtgggagaacgcgcggagtcagctaccggagcatatcagggtcgttgagatgaacatgaacgattcttggttccgtgatattggacctacttttgttgtgagaagaagcaccacgccggaatctggtgatgcagtgagcaggattgcagggattgactggaattttaatagttggggaggcttagaagatggatgttactgtgattggacacttgatttgccagtggctcagaagattttgggaattgagaagattcctagattttcacattcgatggtgcttgaaggtggaagcattcatgtggatggagaaggaacttgtcttaccacagaagagtgcctcttgaacatgaacaggaaccctcactcgagtaagaaccaaatagaggatgaacttaagacatattttggaatcaggaaggatatatggttgcctcgtggattatatggagatgatgacacaaatggacatattgataacatgtgctgtactgtgaggcctggtgcggatatgctgcctaggattgatggtcaaactgat

SEQ ID NO: 38461 - DNA, 713 bp, Glycine max
  unsure (1)..(713): unsure at all n locations
  Clone ID: PAT_MRT3847_134731C.1
cggaattcccgcccgaccacgcggccggaggaccttgcacaccggcgtctccctccttcctctcctctctctgcctttacctttgattgtaggtttttcattatttggcggcggtgagttattacgcgcaacagtattgaaaagtcatgcatatgctatatgcatatctcaaatcgtgttttattttttcagaaacagggttgaatatttttggtgtagcgtctgagcnnngtannacagagcaaagtgaagcgtgaacatggtgatgcatctaaacgggacaccgtacgctctcggattccacatgcctgcggagtgggaaacccacgcgcagtgctggatgggttggcctgaacgtgccgataactggcgtgacggcgccgttcacgcccaacgcgtgtttgcgagggtagcgtcagcaatctcaagattcgagtctgtaacagtttgtgttagttctgcacagtgggagaacgcgcggagtcagctaccggagcatatcagggtcgttgagatgaacatgaacgattcttggttccgtgatattggacctacttttgttgtgagaagaagcaccacgccggaatctggtgatgcagtgagcaggattgcagggattgactggaattttaatagttggggaggcttagaagatggatgttactgtgattggagtcttgatttgcttgtggctagaagattttgggaatttg

SEQ ID NO: 38462 - DNA, 300 bp, Glycine max
  Clone ID: PAT_MRT3847_134732C.1
cgcatgcacgcgtacgtaagctcggaattcggctcgaggagacagagacagagacagagacagagacagagagaggaaaatgggaattgtttctgcatttgaagcatggggcaaaacaactgggaacaattccctcagctaattctggtagtgtcatttacaacttcggggttttcttcgttgtttttattcaaactttgtaataagacagagacaatttcagttttgtaaataaaacgttaaccttttaaaacttattcacatacatcctattattatgcctaaggttaaaaaaagata

SEQ ID NO: 38463 - DNA, 493 bp, Glycine max
  unsure (1)..(493): unsure at all n locations
  Clone ID: PAT_MRT3847_134733C.1
cgacgcattcaagctgatgtaaaaaaaaaataaagatcgattaccagaaaatctctacnntaaatctaataagtcaggtgtccagcgacgagattatttaacccgtaaaagcgagatatgtgtgccgcatagcttgcatagcgcgaaaaanttggggtgggttatcggagggcatgacatcanngcgatgtgtcttagacagcgatgntgtcttcggaaccttgtgaaatncttagtagcagaacaagaggaggtcnaatctcggaaagnttcgtcagaaaagtgncgagaaaanccgaagagattctcaggaattgcatcggaaagtgatacttcttttttcctcttctttctcacttatttaaaaaaaataatattttgtcaatactctcaaatctgatgccctataaaatacgattgattgattagttattaggaagagatttgctatgaattctagcctaccgtgtgtggatttttttcccttaatgat

SEQ ID NO: 38464 - DNA, 127 bp, Glycine max
  Clone ID: PAT_MRT3847_134734C.1
ttatgtcacagccgagagagcattttatgatactggaacacaatgacaggacgttacactctggttgtttaaagtacccgagcttacgccaaaatgcatatgagccatccgtggctcacaaaggtct

SEQ ID NO: 38465 - DNA, 537 bp, Glycine max
  Clone ID: PAT_MRT3847_134735C.1
aaaaacaaagggaaaccaaaaaaggccaaattgtttattttgacccaaaattttgatataggagtcccaccaccatggaaccatcccaacccaggggggggggagcaccaacttgggttaatactaaaaaataaaaatatacaacatcgtgaacaattttagggggcataaaaaaacaaacccagaaagaagggggttcttccaaagtcaaaaaggggggggggtaaagggtttgtcttccttggtactacaagaactcaaggccctggaaaggaccttacacttgaggggactggcaaaaaaaaaaaagccgggggcaagcatttttttgaccaaagcagggaccaagttggaaggggccttgtcccccccaccaccacccatttcctccttggaaaccgaaaaaaaccttactcctttttccactttaaatatcggcaaactcgggggcaacgagttggccaaaaagggcaccttccacacgctttttgaggccccaaaaaaggcctgaaaaagggccttgggccaggcccggtt

SEQ ID NO: 38466 - DNA, 369 bp, Glycine max
  unsure (1)..(369): unsure at all n locations
  Clone ID: PAT_MRT3847_134736C.1
gtttgccaaaataggtaatggaagaatggactggtccatggcgtggccttttaatgtgacagagcagcgtggaatgatactgcacccatgttagggcctcagaactaggcacatggttttcgtggtccttctttcctctcctcgccattgtgttgtgttgtcatatctgctgcccccctattcaaacctttacgtctcaactctgaacttgtgcattgcaccattattgctttccttacaccctcttacatcaaacttcaaccaatattatattggactgtggaactgatcagagtatagaccatatatgtctgggngatgaatgattttaaatgttaggaaatgtatttccttttcccttccatattn

SEQ ID NO: 38467 - DNA, 402 bp, Glycine max
  unsure (1)..(402): unsure at all n locations
  Clone ID: PAT_MRT3847_134737C.1
ataactgcttttcttttaccataaagatcctttattaaaaggccccaaaggcctttactccaatttctcccgcagccaattaggcgctaataggaaaacaaaagagggttctcctctcttgaaaccaaatgaaaaaggggggggcgaaaaatgatttttttttttacgtgnttccatcacgcgtggacaccaggcaatgggtcctgtntggttcccccccagctcgtgccgggagtgaaattcggaagtggnaggcatttcccgccctggctgagacctgcaaagaatgagcgaccaaggtgaaaaatcacacggaggcacgtgcgagacacacaccgggaggcgtctgccccggttcatcataagttcacaaaatgtggcgagattccccttattgctatt

SEQ ID NO: 38468 - DNA, 385 bp, Glycine max
  Clone ID: PAT_MRT3847_134738C.1
ggtcaccgttccagggcagctcgtgtgggagatcgtgaagaaaaacaactcctttttggtcaagcagttcggaagggggacccagagcgccggatctaccagagcgagcaacactctctacaacctgaattcgttcaagtactctggtttgggtgacaagaacactgttacggcacaccctgagggttaagatcaggctgggttgttcgctccaccagtgacgaagatgcaaaacacgcctgctgcattgctttccaagtctggtcttaagaaggagtccatgacgttggtctcggctgttgtaaatgacgcggccggccattcctacaggccctgtctgactaaggccgtccttgcacggccgtgtgctgctcactcatccttg

SEQ ID NO: 38469 - DNA, 1499 bp, Glycine max
  Clone ID: PAT_MRT3847_134739C.1
agaaggatcaaatcattaatatttgattaatcgaattaataacaagaaatgggataacagctgccaaaacttttagtcatggagaagcaaaatagtaacacaggtgtatagatcattagcactcaattttcacatattacaattgatatgagtaaccatcttaagcatcaggacttctatttgactataaaataaagacttatgatagaagaaaaaaactagtactacaaataatgtacaagactatcattattgtcactctacaaagatatattgctatcaggtatcatataaacatcttaagcaaactgcccaaatgacagcagtttactgaaatctaccactttgagccctcttgcaacacaaccataataattatctcagttggggttgtgatgattgtcacattgagtgaacattttcttgatggcctcttccttctcatcaatgaagttaaagaagttaacaacaacctgggaacaatgaatgcccgatggttctgtggatgaagaagcaacatctttttgtctttgtttgaagcgggcatattggcgaatcattagcagcagaaacagtgcaagtgcaacaagcaagacaataccgcatgagagatacagaccccaaaagctaatcaagtgaagctggtcaggcttggagttgcttgtcctatcttcagcacaacccattttacagaaccacttctcatgtatcttacggagatctccattctcagagagtttcaaaattgctgtagacatgtcataggcaagaggagactctctctgaaaagcaaatccccaactgcttctggcgaatggctgtccaataataccaaaatcagtttcatttgacagaaataactcaacatatggaagctcatcaatgatagctgccacccctccaccagatggccccttctgaagtgctgtagcatattcctcgggggagcctaggggaataagtcttgattttgatacataaagattatctgtcagatagttgtaagcaaatgatcctacttggtatccgataggccagttacttgcaatcaagctatcaattccagtgatgggcgatgaaagctgctccactgtaagaattgaagtccaggccgctgtatagctagccgtgatcaccatcaatagaaaaagccagactatcatcaccattttagaaagtgagcttacggtatcttcgagatttttcttaaacaatgatgagaggctgaacattaccattgtcaaaagttgcttcttaggaggaccacggaagtcattattgactcggtgctcaagaatccatataacaactccaaccaccaaaaatgatgcagcagtagcacaccacatatctgccgtaaatggttggaggaacacccaagcatttgatcttgctttgttgataggagctactatgacaaggctagaggatgcaaaaggctgagaaaaatccacaatcattgtacgatttgtcacaattgcaatgtctccaacaactgc

SEQ ID NO: 38470 - DNA, 408 bp, Glycine max
  Clone ID: PAT_MRT3847_13473C.1
cgcacgcgtccgcccacgcgtacgaccaggtttgaacaagcacagacacggagactaatatggtagcatactagaaataacagctttctacatatacatatatgagcgcaaaacaactatgttacatcagctgtagcagataacgaaagctcataaaaggcaaaatatgcaagaaccacaacggcaacatgcatacgtacactatggataaaagaactagtcgatagaggaagcatgcgcaggatccattaacccagctacgaaccgataccatcaaaactgctaacacatactaagatggaaaaggcacgaatccacttatgtaataaactacatcccacaaactcttgagcaccagggacaacattaaagctccaaagatagaaaggctctcctatgacactgtat

SEQ ID NO: 38471 - DNA, 736 bp, Glycine max
  Clone ID: PAT_MRT3847_134740C.1
aaaagaaataaagtgtaatttatttcaaatgagataatacacacatattttctcatctatgaaacattcaattattcaaagccaaagaaaatttttaatatgttttacaacaaatttaacttttaattacttatgaagggcctgcaatcccaaatttttttcaaatccactcattttataccctccaaaaggaacctcactccctaccgttaaataacattttatccaaacaattccttcaccaattgacctttacataatgtttgcaatatccaaattctttgtcacaattccttcttctaagccatacttggtgtttttaacacttttaatttcttcctccattgtcttaaatttcatcaaccctattacacggccaaatattttatctccatctataaacatttcctcctttacattacacaaaatttttatgttttatttattaacctttttttcccacttttttacctctcctcaaaaaggtaactccttttttttttcccttttcaataaaaaaaaaattttttttcaattttttttctttcaccttaaacccctttaagtattttttatcaaaatatctcccacaaccccaaattttccttttcccccaacttttttttaaataataattaattcttcttaacaaacacccaaaattttccccctaattttttcttttaacaatttccataaaaaaaactttcacctttttttttccctttttataaaa

SEQ ID NO: 38472 - DNA, 455 bp, Glycine max
  Clone ID: PAT_MRT3847_134741C.1
gttcaaactggtcaaagccatgggcacctccaacttatctattgttctctacgtctgcctagccttctttttggtgctacttaccataggcacactctaccgataccgtttctttcaccttgaacaagtacaacccagttcaaccaaacattatgctccaaaaagacgctagtatttcatcctctggggagttacaactcaccaaagatggtagcacacggcgtgcccacctctggatcagtcagtcgagacctttacgctgccccaatacaaatttgtgacagcgaaaccggctagggagacagttggactacattctttagatggagcatctacgcacccaacaaagtaaactgatatgacggactagccttcttgttggcacccggaccttgtaatgcccaatcctacaatggaattcgtggtcttttcaacagacccttaagggacaagtc

SEQ ID NO: 38473 - DNA, 1518 bp, Glycine max
  Clone ID: PAT_MRT3847_134742C.1
actttctattccatacctctctgcttgtcttacacacaagacccaggcttggtatgacaaataagatctaggctacactggtttttaatcaaaattgcaaaatgcatttactgaagtctgacaagaacttatattctcaggcacagccttgtgattcactgcttatttaaaagcatgaaaagaacactacaataattgcatcatggagaacaaaataaacccctatccatccatatcataatcctacctcaactatatagaccaccagaattcattctttcctagacacagatacacgattctcagcagtcatctgctcatccatgtcaagtgccgatacccaacccacttagcagcaacccgcaaaccaatagcaaaagatgcaagaagaagtggaattggaagcctcatctgtcttgtttcaacttctccaacttctttccctcctgtggacgttttggaatactgatatatggctaaggcagtgtatgaaataatcaccaaagctctaacccaaggctccccaacaccagcaagcacagctgcaacaggcattgcagctgaaacatcatctctcttcttgacaaattttgaaaaggcatacaccccaagcagaatggtccagaaaaaaagttcagaaatatatcctctaacagcagcatagccaataagaccagatacagtcaaaacattatgttggtcgttgatggagtttggtacagtagcttcaccaatagctaaaacaattgatgccagcataatgatgatggtcaggtctggtacaggagcattgtgaattatccaagagtaacaagcccgaactatgtaaaataaatcctctatgcatctaatagaaaatgtgattggacttcctatgaattggtagactactgcaaaagcgtattttaagacgtatcctacaaaacgaacaattgcaaatgcaccattcttccagtttgacagttcaaatagaacagctctccaagcatagaccagaaaagccagtaccacaagccatggccacctaacaggaagactcggaacttctttggcgaggtacctaaagcgttcgggcatggtgctatttccacgcgcctctttctccacttcatccaacccagtcaaaacatcgccgttgtcactctccttgttgttgtcgtttacagcgaaacgcttccacggagagaaggtgggggaagaaaaggaaaagccaatacggttgcgtctgaattggggactcaagggttggagtttggtggaagggaacgagagtttgaaggaggataggctgggagataagagggatgaagggattgtggtggtggacatggttatttgagtttgccttcggctacaaaaggtttcgcattgtttttaagtgaaaagggtaaccaagtgctctcaatctgctgcactccacgataaaaggtaactcgcctcctgcctcctgcctcctgcctcctgcctcctgctacggtgctagtgctactactgccctattccaaaagggattatctt

SEQ ID NO: 38474 - DNA, 787 bp, Glycine max
  Clone ID: PAT_MRT3847_134743C.1
ggattctatgaaacactcaaattgatgaaagcaggtggaaggaaaatagttttgacaattgttgaggatgaagatgaagaaacaacaagagagctgattaagttattgaaggctgcggcatctgcaaatcgtgacttaatatttggttacgttggagttaaacagatggaagaatttgctgaaaattttgatattgatactaaactaccaaaaatggttatttgggataaaagtgatgattacctttcagttgttgattcagaaaccatagagggggaggaccaaggaactcaaatcactaaatttctcgaaggatacagggaaggaagaaccataaagaaaacatttagtggcccttcactaatgcgattcatccatcgatcctttgacattagaatggtgtacatcattgtttttgtggtggcagtactgatgctaattcagacattcagtaaaggaggtgatgaataccagagtgtacccaatcaagttcaaactgatcatgcaatcagttctgtttctgaagctgaaaacaaagagtataaacctggtgacaaggaagactaaaaattaacataatacattgataattaatgaacgtggtcaggagtattctagaaagtagctggctttagaattaccatacctattggtatgagtaaatattttgagtttgtgtatctccataattttgaatactgttcaaactcttgccttttgatttacacctttccactagttatttcttagcatgaaaaaggcttatttattactttaaaaatgacaa

SEQ ID NO: 38475 - DNA, 505 bp, Glycine max
  Clone ID: PAT_MRT3847_134744C.1
ttagatttggctttgtgtctttgtgtgctcatttttcactaaacaccaacccaacctcatacacaaacattcttaattttgattttttgttattattttctttgtttgttaattacttatattaagcatcatgggaaccccacaatccaataacttgccaccaggttttaggttccaccctacagatgaagagctcattcttcactacctaaggaagaaggttgcctctattcctttgccagtttccatcatagctgaggttgatatctacaagtttgatccatgggagctaccaggtttgtctacgtttaaataagatctatattcttttttatattttaaaacttataaagataagaattgctttaatatctagaaaaaaattatggattttgatataattaattttagaaagattggacactctagaaaagtttttcaataatagcattaaaatctttaaattttctatcatgtcatagaatttctcttaagatataccatg

SEQ ID NO: 38476 - DNA, 276 bp, Glycine max
  Clone ID: PAT_MRT3847_134745C.1
aaaagggcgttaaggaacataatggggaccgctgggattttacatcggagtcaaactaggggaaaacaaagccccccagggacccccccaggggggggggggggaaaaaaaaaaaccaaaaacggggaaaaaaaaaccgcccccccctaaaccaaaaaaagaacgtggggggccaaaatccccccaaaccccgcgcgttggacccccagaagacaaaaaaacaccccgaaaaaaaaaaaaaaaccccgcccccccacccgccctaggagggggggg

SEQ ID NO: 38477 - DNA, 457 bp, Glycine max
  Clone ID: PAT_MRT3847_134746C.1
tttggtgaaagggacgcggattcgaaacaccagtgtgatccttcaaccctagtaccgcggagccaccctttgtccaccgtggtcgtcgttgaaggaggtcgtcaaccgcaagttgcagccgcaccaggtgcaaaacaaaacgtcatcagctttggaaaccctagcgtgaggcaacatcaagtgtagcaatggttgatgtccataagttgatttgccaaacctgtaacaacgtgggtgttggtgatggttctgatggctttttctactgccttcgctgtggttctcaatgcgaggatgtgatggacaccgctgttgatgacgatgatctcttcaacaagagtgctgtctacttgcctagtcaccaacgccagcgatctgttgcaatcaaagccgagcccatctctgagtatgactccttttacgagtcccactccaatttcattaggaatctgggttt

SEQ ID NO: 38478 - DNA, 340 bp, Glycine max
  Clone ID: PAT_MRT3847_134747C.1
gtcaaagtgtttcttttgcaagaagaaagagcacatgaagaaaaattgttcaaaattgaagagctggcgcgacaagaaagggtatggaaaacctaaggaggccagtgggaagtgagcagtacatctattcaggaggcaagatgagctcatatgtggaagtcattgggagatgcaatttagttttaagcaacgattttattttgtgtttagaaaagatattttacgttccaagtttttctaagaatttgatttatgtatcaagacttgcaccattgggcttttcctttaattttttaagttttggtttatctttaagtaataaatatggaattattggttc

SEQ ID NO: 38479 - DNA, 167 bp, Glycine max
  unsure (1)..(167): unsure at all n locations
  Clone ID: PAT_MRT3847_134748C.1
aangnagcntgcncgcntacgtaatctcggaattcggntcgngtgaggcnanaacanntgatatcaaggnaanttgtntccgananaagttgtagatgnaagtcnganaanggttagtgggcgagcctnttctccaataatctngaacttcaagctcaggtcatgtg

SEQ ID NO: 38480 - DNA, 396 bp, Glycine max
  Clone ID: PAT_MRT3847_134749C.1
ccaaatctccaagggcacccattcatttaaaaacaaaaccggaacaaaacaaacccttttttttccaaacgggctcactctgatcggattctatcctaaaaggcaacaaaattttttgaaggtcacaaagttggaaatatataaatatggtataaaaaagttactataaaaacgggtacaggggaaattgtcaggctaagtcatggggttgaaaattttatcctttttaaacggggttttaaaaaattaccattttttcagcatcaaatggaccaaaaatatccttcacggtttaaatttccatgctggcagggccacttttttttttccttctatcctctcaaaagggatattcgtaagcttaaagcatcctcacaacttgactcattttaggcc

SEQ ID NO: 38481 - DNA, 1366 bp, Glycine max
  unsure (1)..(1366): unsure at all n locations
  Clone ID: PAT_MRT3847_13474C.1
ccacgcgtccgcatgggtatcttcagtaccctcttctctcgccgcaccctctccctttccctcctcaaaatcccttccagacccacctcctcccagcccgcccctaccccaaccccaaccccaacccttgccgggcccaccaaaaagcccctccacgtcctcttcacccaagccctcggcctctcccaaaaacccaccccctccgacgaagaagaagaagaagaagaagaaactgcctccgaaaccctaaccgaactcaagaacaacctgaagcagttagagcaagagattaagaccttcaaagacagcacaaaagatgttaccctaaaatcagagaagaagaagcagaagatgagcttgttcgctgtgtttaccaataagcagagggaaccgaaaccaaaggaggagtcactcgctgctgctaagaagctctcccccgatgtggcggtgttcgtgcagtacttgttcaagaaggggtatttcaacgacgccaatttcgctaaggggaggaagaactttaatcctgattggttctccaatgtcttcgccttaggctatatcaagtttgccgccaacaaattcgccagagatcatcgagaaatcgccaaatggctatcaggaagtgccttgaagcaagtggccgtgtttggttgcccctacccccacaggagtggcgtctttcctgctaaaagtctgcgaaagtttttttgaggttccagaaaacactgtttgcagtggatgtgcactgcaacaatcatgcaagtttgcgaatcgaagtgtatggaaatgtgacgacaccaataatttggattttttgactgttatgaaggttattactccatatgctttagagtcagtgcacccccaactggaagtgcctgatgaagtaaagaagtcggtgagtcaattgctgaaggaggttgtgaaactgagtcaaacgacctgagattgcttctggttgatcgtatattgttttaacttattcttccatatggagtaataaccttgcagaccatttttggagattacctttcnttgctacacaagccttaatgtttcaaaatgatgctcgggtcaaaagaagagaattcatatggacaacctacctctccttaatgcagaatttctcatgagtgacaacgttttctttggataaaatgcttgtatgaaaaggacgaaagtcatctttatggactattaatagtatgggttttggtttggggaagtaaggtgatttttttttttggtaaaagtattgaattctttagttcatagtatttaaaagaatagttgtttatttttatcaatttcttgaatgaatttttaataaatttacccaaaaaaaaaaaaaaaaatttaacaaaac

SEQ ID NO: 38482 - DNA, 395 bp, Glycine max
  Clone ID: PAT_MRT3847_134750C.1
agcatctcttattaccaaccttttttctaaactttctcttgccaagtatcaacacataaaacaatggcttttcggttacctggtatcagaaaggcttcccttgctgcaatccaaggaaattcaaaagctgtggatgttccaaagggctaccttgcagtctatgttggagataaaatgaagcagttcatgatccctgtaacatacttgaaccaaccttcatttcaagatttgttgagtcaagctgaggaagaattcgggtaagaccatccaatgggtggtctcataattccctgcagagaagatgtgttcctagatatgacatctcgcttgaataagtgctaatcccatgaagatgaaactgacattggcctagactaaactagacacaattttgg

SEQ ID NO: 38483 - DNA, 981 bp, Glycine max
  unsure (1)..(981): unsure at all n locations
  Clone ID: PAT_MRT3847_134751C.1
ggaattcccgggtcgacccacgcgtccgcggacgcgtgggcttggcattgcagattaggacatcctaatgtggttactatgaaacatgtattcaaactttgtaatctgcctattatctataaaacaggttctgacttttgttcacatttttgcattggtaaatcccatagacttccctcctccccttctcttagtgtctattccactccctttgaactcatctataatgatttgtggggtccttctctacttgtgtccagcactggttacatatattatgtaacctttgttgatgtgcacactcgatttacttggctgtacttgttaaaaagtaaatcagatacactaactatttttaaacagtttcgaagtccggttaaaactcaatttaacctaccaattatagctgttcattcagattggggaggggaatataggcctttcttatcttgcagatcttagtattatgcatagattgatctgtcctcatacacaccatcagaatggtgttgtatagaggaaacaccgacacatagtggaaacagctttaactatgttgtctcaagtctcaatgacacttgactattgggatcatgcagtcatttctagtgtttacctagtaaatggacttccttcagcaattcaaaatgaagtgccttatcaaagactgtttcactagctgccagattacaaattccttaaagtctttggctgtgcttgctttcctcttctcagggccctataatcaacacaagctgcaaccaaggtctcaagaatgtgtatttttggggtactctctttcccacaggctataaatgccttgctgctgatggaagaatatacatctccaaagatgtaattntcagtgaaatcagatttccctttccttccttaatgggtgaatcagatcagactccttctgacagtgttgataatcacaatactttaactgaactacagtctnctcagcattttcatact

SEQ ID NO: 38484 - DNA, 175 bp, Glycine max
  Clone ID: PAT_MRT3847_134752C.1
ggtgcagcgtcttacctacctcgagaggcacaggtatgcctccatagtcaacccatgcatggtcagtaaaacccttgttgggaagcttgtgtattataccaccaataagagggccagctggcccaatttcctcgtgactggcaagatgattcaggggattgcactcttggggcct

SEQ ID NO: 38485 - DNA, 156 bp, Glycine max
  unsure (1)..(156): unsure at all n locations
  Clone ID: PAT_MRT3847_134753C.1
cacgcgacatctgaactgcttctctgattccagtttcatggccgcattccaaggtattgatctcttgccgacattcagcaatgaatttgcgccattgnagggaacggtcaaaagcttagttgcaacaacgtggctcaaggttgagcaaccaacacc

SEQ ID NO: 38486 - DNA, 902 bp, Glycine max
  Clone ID: PAT_MRT3847_134754C.1
agtagtataagcagtagtagtagcataagcataataataataataagtctgacataaaagttgttgtatgaaaagagaaatacatgatgcatcataaggtagttcatgagtagctagctgctatgtactagaggggagcatgcatgcatcaccaaccaaccaagcaaccctgcagatggagtgaagctgaggactaaataagtatacacagggaaagctaagcaaccacacctgacaccacttccacttggtcactagtcactactactgactagtgtttatttatttaattttgtataatatatatgatgtcctaattgaaagaaagaaaggggttgttaaggaagggtgtgaggcttctcgaaatcctcgagactggtggggcgaaaccaggccttctcttccagggcatcagaagtggaagtggaagtggaagtgggagcagatgcagcttcgtctcctgctcctccggggggcccaaataccccagtctgtgggtgtggggcccagtatttgccggattgtgttgcctggatcacatcgtctgggaccgccccagagtggatctgatcatcagggttcttgtcatacactgacccgccgctgctactgtatgcagctgctattgctcccctcctggaagtgagaggagctgagggggggttggaagtccagatctggttggcgactcgcttccccaaggcggtgatccctcggctactcgaattggcggccatacaatgagagagagagcgaaatagtgtgtgcagtagtagtagtagttgtttggtttgtgatgtgttagatgaaaatggatatatttatacacaaaaataatgagaagaagggtggaggtagacaccagacagatggtgcaaatgacccttcgcttttcgtacctc

SEQ ID NO: 38487 - DNA, 189 bp, Glycine max
  unsure (1)..(189): unsure at all n locations
  Clone ID: PAT_MRT3847_134755C.1
gctaactnttngtgactatnatngntcaattttnanttttcnnttgttgcccntcttcgttgcnngccaccatgcntatgatcnacaccgcaatgtnccatttttnctgctgttttcagangcaaatctcngcctcnctctgctgctttctccncctcnttgctcttcgacgaaactcatacacngttt

SEQ ID NO: 38488 - DNA, 120 bp, Glycine max
  Clone ID: PAT_MRT3847_134756C.1
tatttgtgtggcgtgttttaataattttacctttgtttatctgtggtagaacctttggcttttctagaagcattatgagaaaggtgcccgagccaaggatttgaccggtgatgaggaaga

SEQ ID NO: 38489 - DNA, 354 bp, Glycine max
  Clone ID: PAT_MRT3847_134757C.1
ctcgtgccgcaaaaaaaaaaaaaaaaaaaaaaaaaaaaaaaaaaggaaaaaaaaaaaaaaaaaaacaaaaaaaaaaaaaaaataaaaaaaaaaaaataaaaatagaaaaaaaaaaagaagaaagaaaaaaaaaaaaaaaaaaagggggcggcccgggatattattattcatcatcccgaaaaaaaatttacagagacggccgactgggggctcaatctggcatgagaacaaatggaccaaactctgggggacgacatgaaacaatcggcttctcgaaaaaagaagtggccggtgaaacatgcgcaaatataagagtcggagatccaaaatgtaaaagccgggggcccagagagg

SEQ ID NO: 38490 - DNA, 110 bp, Glycine max
  unsure (1)..(110): unsure at all n locations
  Clone ID: PAT_MRT3847_134758C.1
cttccgttttgatatagtccggacgancaaaatagcggtggattacattagtgctnccagntcattcttccaaggggaatcgcgtgnaggncngnanagcaaatagtgac

SEQ ID NO: 38491 - DNA, 562 bp, Glycine max
  Clone ID: PAT_MRT3847_134759C.1
aaaaaaattaaaaatagctttcaacccaaaaagaaggggaatgacaattgaaacgtttttaaattttttaatttacgatgaccacccaacaacataacaatgacccacccacccacccccaccggtttttacggggccccttttgcaatccccaccccacacggaacaacgccccgacccggattcccgttcgttcgccgtttttcctttttgagcttctgcccttttcgggaatctctccctccccattcccttaaaggcaaactcgcccccgttttgtttcgggtaacggggggtccccgaaagtataatccccgcaccggcatttaaacccccggagccccaccccccttttggaattatgccccggtttttttggggggctttaaaatctaggcccgggctttgctggtaaaaaccctccggcaacctctttttttttcggggattgaaaaaataccccggttggaaaatccccctgggggggggggggcggaacaaagaaaccttttttcaaaaactctttttttttgtaagaaaagatattttttttttttttaag

SEQ ID NO: 38492 - DNA, 413 bp, Glycine max
  Clone ID: PAT_MRT3847_13475C.1
ggaatgttgctcgatgcaaaatatattataaacaataaagaaggaaaatttttctggtgttgaaaaagagaacagaggaaaagagagaaagagcaacgtcagagtttgccgtagggttctccttggttcgtggtttctggtacagatagaagggaatccttcttctctctctctctctctctttctctctctttttctgagtttgaacttggagtaactgggtctatatttttgttcatattagagtggccatcacgggattttcttggtatatataaaagaaacaaaaattgtctcttgggttggttccaagcaagtagaggaaactatccattaagtttatagtatttttgtttgacagatgtagagaactcttcagctttctgattttttttttgttaacacatacatta

SEQ ID NO: 38493 - DNA, 286 bp, Glycine max
  Clone ID: PAT_MRT3847_134760C.1
tcgacatcgagcgcgagcagctccatccgaagcatttaatgattaatgactatttccatttcttcttatccaccaacaactgtgacagcatttcttacagcaaatgggagaggaccaaatactccattaaaaaagacggatgctcgcaagcatttctcgtgtaacaaataaaaaaccttgtttaatttatctggaacaagcatttaatgattaatgactatttccatttgctcttatccaaaataaaaaaacaaatttaataaccactgatcctgataatacaacc

SEQ ID NO: 38494 - DNA, 498 bp, Glycine max
  Clone ID: PAT_MRT3847_134761C.1
tttccgaaaacagaaaatgtgctatgaagatacagaatttcggacaaagtgggaagcggttagatttttctcaataggcagaaatcaaaagcctgaacctttgaataatatgcagccaggaccaccacaactcttccccaccggtcaccggcgccatttcagggcttttttcttttccacttcaatgttgacgactgcgttttcaacacccaaaacccatgttggagatgctattatttgggggtgggggattttctcagttgttaaacttgtctaattgatgcttggaaaactgtgcagtttgctcaggttgtgaaatgcgttaccctaatttctgcaagaaccttactgttaaatatttaagttgtttgtgctacattctagtgatcacttatttggcatgtaattagtggagttcattaatgcaagttttcaaatctatcaattaaggacaagttgctatgtaaaacagcagtgagtgactgagtattatttttc

SEQ ID NO: 38495 - DNA, 327 bp, Glycine max
  Clone ID: PAT_MRT3847_134762C.1
aaaacaatggggtctcaagcttaattgacgggcccttgcgggcaaaaagagaatttttatcaacccattcgggtacaatgattgattttcctaagcatttttttttgggggaaaagaatttgaattttacacctcaaaagttttggttggggggaaaaaaagggtttacacccaccttatgggtcggcggaagaagcaattgaaagaagaaatgttcccaaagggggccggggagatcttgagcataactttactttcctctttccaaattattaaagatctaaacaggccgcctttggtagccaaactttgtttcccacaatttaa

SEQ ID NO: 38496 - DNA, 1051 bp, Glycine max
  Clone ID: PAT_MRT3847_134763C.1
cccaaacacaaacatcatagtatatagtatctatctaaagtaaataatcatggcacgggagaaccctcttgttattggtggtgtgattggggatgttctcaacccttttacaagctccgtttctttgactgtttcaatcaataatagggcgattagcaatggcttggaactcaggccctctcaagttgttaatcgccctagggttactgttggtggtgaagacctaaggaccttctacactctggttatggtggatgcagatgcacctagccctagcaaccctgtcttgagggaataccttcactggatggtgacagatattccagctaccacaaatgcaagctttgggagagaggttgtgttttatgagagcccgaacccttcagtagggattcatcgaatcgtgttcgtattgttccagcaattgggcagagacactgtcatcaccccagaatggcgccataatttcaattccagaaactttgctgaaattaataaccttgcacctgttgcagcagcttatgccaactgccaaagagagcgtggttgcggtggaaggagatattaacaagttcaattaatgaagattcttggatgccttactccagcttatactttagagaaataaagacagaagagagaaaaatatatatagtaccttaagtaatatgatgtaataaaaggaaagataaataatgataataataataatgataataataataatagatgcttagtgtaatagaatagtagcactatcatcaaataagttagaagagtaatggagaaaaagaataagttagaagttaataaaatctctccttttttaaataataatttagagagaaggtaccatcttgcaatgctagagcatgccattcaggaacttcttcaccagattatggtagcaacggaaaaaaaatacaaaaagttcatgcatggttcatacatactacagggatctcatcctgtattattgtaatgtacgaactgttattcattttaaacaacgtttgcttcaataaattacatacaatattattaacaaaaa

SEQ ID NO: 38497 - DNA, 289 bp, Glycine max
  unsure (1)..(289): unsure at all n locations
  Clone ID: PAT_MRT3847_134764C.1
tccatgtgcaaccccctcgacaaaacagaaccatcagaagcctcaggctgggagtgagaaactgagaataatggcgnctggatggagaaggacgnggcgcacatctaataccgttccccaaaacacacacgaacctgagatgggggacgatgacaacaccatcgaggggggggccaaaagcactggcaatccctcatgggggtgcgagcccatcaggganncccacgcgaaccaggggaggggtggggagacacgaggggcccgccccacaggggagggaggaactccc

SEQ ID NO: 38498 - DNA, 144 bp, Glycine max
  Clone ID: PAT_MRT3847_134765C.1
acgcagtgcagcgcgtctcgtaagtctcggatttgcgctcgagcgataatgctcttttcccgtttctgttttaaagcaattatttcttaattggaagaggatgcgtaacgataacgttcacatgattcatagtctcatgggccg

SEQ ID NO: 38499 - DNA, 131 bp, Glycine max
  Clone ID: PAT_MRT3847_134766C.1
ctgcaaacgccggaacgggttgctcaagaaggctcctataattgtctgctcttgttgatgctcacgtcgctcttgttgtcttatcaaggcaggggccccttcttgagttagctacaacacggttctaggaa

SEQ ID NO: 38500 - DNA, 240 bp, Glycine max
  Clone ID: PAT_MRT3847_134767C.1
aagagggcacataaaaccgaggaataacattgttagcatgacaaatgactgaatcagatcataaatcgtaacagcgaagatatagtactattttaaattaagtttcaagtataggtggctatattttttggtacagtatttggatcctgtatttattttcacctaactatcattctttgataaatacactattaagagtaggcttcctgaatagtattttttaagagaaaatatatttta

SEQ ID NO: 38501 - DNA, 371 bp, Glycine max
  Clone ID: PAT_MRT3847_134768C.1
tgtgtacaatggaaattcaactgcagaacaatcataattatgtttgttggtaggagtaaacctttgggaagaaaacatgagatgagttcttgaacagatgtttcttagaattaaagcatctcatgtaagcataaatcaaaaacaaacttctaatctttcatgtcatgaaacgaacaaaggcatttggctcctctagagtaagtaatctcagctgttgataaaaaaaaaaatcaacggttaatatttcaattaatccacaattggttatgcacttatgcatgcacatgtaatatttactgttgattttctcattgacaactgagatttgttactttgtcctttaaagtgaaaattcaaacaaaggggttggt

SEQ ID NO: 38502 - DNA, 209 bp, Glycine max
  Clone ID: PAT_MRT3847_134769C.1
tttttaattgttctgggggtaccccacggatagagtgcaagagagatttagctcgtaaaaccttgggggtaccaagtgcccatgtgataaaacccgggggggacaccccccttttgggtgagagccctgaaaaacccaacttttttttaaaggaaacccaaaaggggccccccggggggacccctggatccctcccgggccccgggggg

SEQ ID NO: 38503 - DNA, 259 bp, Glycine max
  unsure (1)..(259): unsure at all n locations
  Clone ID: PAT_MRT3847_13476C.1
ctcggtatagccctagagacgtttnngaatcttngtggacaaaactggagaatgcgtcacacgcatacaaagttctccatttagtaactggtcgagagtcgctgcttggaagaaaggctgatgttgatcaagattgagatgtctgggaatgcagcagtcaaactgcatgagtgggcctcatagatacaagtgtttttgacgaacagcaagctgtacaaactatgatgatgcatgtacgtcgacaaaaatcagaaccaca

SEQ ID NO: 38504 - DNA, 283 bp, Glycine max
  Clone ID: PAT_MRT3847_134770C.1
gaagcccgccaagtacctgcatgtctagttggactctctggaccacaaccgtgccaacagcgtggctggggacatccttggtaccagcaccgatctctgggacgtgaagtccacgtcgttccacccctacagcgacgtgctctgactgcacatgctccgctagtgccagctcattcacgggatgtgtgccatgctcgccactctctgagctctcactgttgaatggttctctgtagctgcctgaccatactcctgaaaggtggagctaggggaaggatatctt

SEQ ID NO: 38505 - DNA, 429 bp, Glycine max
  Clone ID: PAT_MRT3847_134771C.1
cactgtgcccttgactgatggacaagatctatgtcaattcgttacatgctagccacatttttctcacgtaaaggctgttaccatgcaggagctggaattatagtaggcgcaggctgaggcaatgtttgcatctacttcttcagatggcacctgcttgtgtatgtggaacctgcatttccaatgacaggaagcggtgactgtatattatcatgcctggattctatctctggtggttctaaatccatggcaaccctaacgttaccttaacttccctgaaatagtggccaaattctccttgcattggcaggattatacaacaagattcacctctattgtggcggaacgtcatgaaactttgttcatgcatgtgagctaaaagggcatacacattggatccgtaatttggacttcatattacctattagcatc

SEQ ID NO: 38506 - DNA, 219 bp, Glycine max
  unsure (1)..(219): unsure at all n locations
  Clone ID: PAT_MRT3847_134772C.1
gnagtggtntgtgtgttgggcttgtgcgtgggcataggaggttgtgtatgtgtggtggagaatggaatggaagaatcatcattgatattntcacaggtaccatcctgatatgccgccgggaatccaggatagncttgggagttttgggctaagagctggcatgtccggtactcccatcagtccgtaaggnaccagcgtcccgctttcacatatctcgct

SEQ ID NO: 38507 - DNA, 189 bp, Glycine max
  Clone ID: PAT_MRT3847_134773C.1
cggggagttgaattgaaacttttggagagagaaaagaagagcaaaaacaacacatcaatctgcattttggcattgggctcttcgtgttgagtttgtttggtccaatccaacgcttggtttggctgtgtgtgtgtgtttgtgttgggaacaataagaatagcagtgggaatcaatcagcgaccccatgag

SEQ ID NO: 38508 - DNA, 1093 bp, Glycine max
  Clone ID: PAT_MRT3847_134774C.1
cacttgtatgtgtagttgttggaagcactagattggaaatttatgcatgaaacagatctggtaagggttcaggttttcactttttttagtgtaataattttttcttgtttttagaataaaaggcactgcaaactcctatcttgacctctttgtcttttgcgaatgttagaaaaaaaattctgatttgatgatcgaagatgtacataatgatggtaatctcatctccaaacaggtaagaatgatatagtatttcctgcatccatattcatgtttgaagcagtgaatgtcacaatagcttacttcaacatagatgtaagctagaacctagaatctgattttgattgtgcccatttatcaggttttcagattagcagtcacttttcagtgacccactgtataaatttcatgagtctttatctaagtttctgaaatcaacataatttaccagtttggtgttgtcatcaaatcttgctaaattaagctttccagtataaatattggtggacatatattgaatctcatgaaaatggaaaaacaggcccatctcaattagtgtgttttaaatctaacatgaataatactggcgctcaagtagtagtaggtagtggtagacatggaatgcagtttagactatacattttgtttcttcatgttcttcatttaccactttttagaaatggtcagggtggaaactctaaatcatctatttttcttcatttaccactattatcacattgtggatattctagaagctcagtccatatgtcaatcattgtcatatggccagtcattgaataaggagccctagtaattatttagaattcggctcgagaaaaagatagaatgtctttctgcttaattatcttacatttatagttgtttgtaattttttgtgcttgcattttaaattttttgtgaatatgacttattcaactatttaattcttattaatatttgtctttaggagtcaagttgaaaatcacgatggcagtctttggttagggaggaaaatgagtttctcaagattcaggtctagatcacacttgtttgtactcttatttttttaaaaaaaaaaaatttcggacgcgtggtg

SEQ ID NO: 38509 - DNA, 331 bp, Glycine max
  Clone ID: PAT_MRT3847_134775C.1
atcccccaccatcgagcaccacacattctcaccttatcagcctttattcacactgtcaatattgagcctactgataattatgtgggggagatctggaatttattgcacagattactctaaatctaaaaccccttttcaagctatccatcaattatgtggaaaaagattattcatatttgtaagactaatctgcttctttagtagatgcacatgatttttgagatatactgttgttcttaattcaactcttggttttttattttttatattatcttgttttaattaatacttttttaatttttttatacgacattattatttttctttctac

SEQ ID NO: 38510 - DNA, 350 bp, Glycine max
  Clone ID: PAT_MRT3847_134776C.1
gctgcgagaagacgacagaagggccatttattgggaatattcttccgctttgatagccttccttcgtctgcctatgccttgagtttcaacacttgagtggagaatatgaaactgttgagttggaaattgatgctctgttgttggatcatgtgacacaggcttagtgattcactcttgctcttccgataaaattgttattttctccacataaggcacgagatcatcaactgtccatgtattcctcccttgtggagacaccatgtactgtaatgtctccgtaacttcagcctgcaattattagggtgagcaaattaatggcctataaaaaaaatggacaaatgaacaaaaat

SEQ ID NO: 38511 - DNA, 649 bp, Glycine max
  Clone ID: PAT_MRT3847_134777C.1
ctttttctcttttttttttttttttttttttttttttttttttttttttttttttttttttttttttttttggccgggaaggaggaaattaaaaaacccagggggggttatgatcttatgcccaaaggggattttttcctgaacttacattcagggcttcaaaaactaaaaaagggggcggcccgtgggattataaaattaggggcctatatgacaaaaaaggagccatattacaagctaaatttctacaaacaaaaaaaaaccctcctttcatcccaaacagggggaaatcggatgggggatcttacccttttcacttaggggggaaagccccaaaaaggggaccagggccagaatctgcaaggggggcaaagaggttgtcaataggaccgggggcagggtaaatgggctggaaccctgcccccttgacagcaagcagggcccgcctgcccttcttggtccccttagttcccaagcccttgatctttggaggaaaaccggttccccaaccaaggggggcaaacccagggcccccggggtaacccacatcggttccggggaccttgttgggggaaaaaaggggccagggttgacacaccctggcttgtttttggtagcccatcttttcccctcggcccagcccttgaaa

SEQ ID NO: 38512 - DNA, 286 bp, Glycine max
  Clone ID: PAT_MRT3847_134778C.1
tcttacacccacgcttcctctaaccccttatcctacgcttttaccctaacttatctctcatttaagtctgcttcatatacactgaacttaatcctatacaaccaacatattcaccaatacctacaatctccctctacctacctaactcaatcaatattatcaattcaaatcttacaatctacaacacaacaatattacctcataaatattaaagaatctacctcaaaccactcactctatacactaatccaaatcatctactcaaagatcccacatatacttatca

SEQ ID NO: 38513 - DNA, 270 bp, Glycine max
  Clone ID: PAT_MRT3847_134779C.1
gcgtccgtccggattcccggtcgacccacctcgtcgtgcaagcgacgatggtgaggaagcttccgagatatttcgcttgtcagaagggaaaagttatgggaggatgttgcttgattgccacaggaggatcgtgcgacgcaaaaaggttgtgtacgaccccgaccccctttgaccgtgtcatgatcctgctggagatgtggttctgcaaatgtggcaacgccaattaaattgaggtcaaaatagaagttctggacccagaccacacactga

SEQ ID NO: 38514 - DNA, 243 bp, Glycine max
  Clone ID: PAT_MRT3847_13477C.1
caatgtccagtgggttagagatccagcgagcgaccagtttcaaagagaggatttcccattgtcaatgcgactgattgcgctgcgtctctacctcttctctctcgattcatccctcattcataatcttccaatccaacaacctcagcctcacactcacacatacacacatctgaacgcgtatcgtccctcccatggcttcaaagcgcatgctcatagagctcaatgactttcataaagacccac

SEQ ID NO: 38515 - DNA, 399 bp, Glycine max
  Clone ID: PAT_MRT3847_134780C.1
ggtctgaaggcgaggttaagcatagaagaaagaagagaatggctagagacagcgtcctaacacgcgtggcgaccggagccgccgttggcggtgctatcggcggcgcagtcggtgagataattttcacttcttattcacggtttggttggatccttttcattaataggcaaacacggcacagctttcgctctgttcttaggttagtgtgaattttggaactggtgtgttgcatgcaggtgctgcttatgggacttacgatgcaattaggtataatgtatgcgattcaaacaagatatttattataggtattatcgaatggggaaatgcagcaagatttatgctgttcctagtgatttgattgggggcagtttagtctcaaaagctatgctgattatgact

SEQ ID NO: 38516 - DNA, 2068 bp, Glycine max
  Clone ID: PAT_MRT3847_134781C.1
gaagtgggaaaacagtagatgatcccaatgggaattggcaaaattggagatcatcgacatcaagatgctcaaccgacccccagctcgctttccctttctttctctgataaagcgtcgtaacagaacaccactattcccctacggaagagggcacaaggtccattcttagaaaattggtcacacgcatacacaaaactttaagaaaatcatatatgtaaaagtaatatacaatggatttttgtagtaaggttattttaggttaatgttacgcgaacaacatgtgtttgatgggaaattgatgagctattgctctgttaggcatctgaagctgtatattttgatttactaaattttcttttcaacctcatctagctatttggttatgttactcataggatttacatataaatcttctgctgacttctgctgagtacaaaattgaaagcaaacaagttttggcttccaaaagtacaagactacgagttgataagaacatattcatctactgccaaaggcctgaagttgaaccatggattgttcagctgcaagaaaaacacaaaaggctgaccgtgaaaagttaaggagggatcgactcaatgaacaattcgtagaactgggtaacattttagaccctgataggcccaaaaatgacaaagcaaccattctatgtgatacaattcaattgctaaaggacctaacttctcaagttagtaaactcaaagatgaatatgctatgctaaatgaagaatctcgtgagttgactctagagaaaactgatctcagggaagagaaggcttctcttaaatctgatattgacaacttgaataatcagtatcagcagcagctcaggaccatgtttccatggactgcaatggatcattcagttatgatggctccatcatcgtatccatatccagtgccaatggcagtacctcctggtccaattcccatgcagccataccccttctttgctaatcaacatcctgcagtcatctccaacccctgttcaacttatgttccttatttagcccccaataccattgttgaacaacaatccaccctgtacgtatcccctccactacatccttgtgctcggtccaatgtgtcaggaaaacaagagtccaagagcaagtcatccagggagagcatggctgaaaagaatgaggattctaatgatgtcactacagaccttgagttgaagactcctgggtcttctgctgatcaggatttatcatccggacaaagaaaatctagcaagttgtcaaggagggaaagcagttgcacagaaggaagttcattaggtaggtgttcttcttctcgcagtgttcaggacagctcatcgagcagtgtggcggcaagcagaaaggataatgaatgaaaaagtagacaagttagtcaagttctcatgccttgaagccgctgaaatttttcattgtgcatctgctgctactctggaggtgtaagtcattctgttctaatcccaaaataaaagtcacttctgctatctcttcctgaccaagaatttggtccaagtaggtttaaatcttacataatttaagcataaacttccccttttgggggaaaaacttgaaatttcagctggaaaatcaccaaattgaccagtgtggctatcgtgtaggtttgtaaactctttcatagttgttagaatgcatgattcgatacaattcagcaagctaacaatttgtatcatgcaatgaattgtcgatgactttgatctgtacaatacttgcattaattgatgatatcaatgcaatttcatatagtcagttcaaactctggagaatcgagattcggcacaagttgtcgctcatacaatatatgcaccatttggctacatgcacctcacaatattatgtggctcctaaaggcaaagaaaaaacagaagaatgtgacttgagaacactgtattgtccaatgtctacaatgtgagtgaacttaggatgttaaaaatgtgagaaccttgtccttcaccgcaaaatctctcaaaagatccatatatgaaaaaatgttaacaatgcatttttttatccaatattctctaactaat

SEQ ID NO: 38517 - DNA, 1120 bp, Glycine max
  unsure (1)..(1120): unsure at all n locations
  Clone ID: PAT_MRT3847_134782C.1
cggtcatcctatgcccttattgagaatttgagaaattggatggagaaagggtcaaggctcaaaatatggaagcagtctgatataactcgaaacattcattaacttagctctctgttggttttccagttttcatcatgtcatcatttatgtgtgatctgtccattcctagaaaatcggtcacacacacacacaacacttttagaaaatcatatattttaaagtaatatacagtgggtttttgtagcaaggttattttatgttaaatttaggcagaccaaatgtgcatgatgagaaattgattagctatgctctgtcagccatctgaagccgtatattttgatttacaaaattttctgttcaacctgaggtagctatttggttaagtaactcaaaggatacattttgatcttctgctgacatctgctgggtacaaaattgaaagcaaacaagttttggcttccaaaagtacaaggctactagtagataaggtagttattaattgatctctgttaacttctgttgcagttataattggttaagtagctcaagggatacattttgatcttctgctgacatctgctgggtacaaaattgaaagcagacaagttttggcttgcaaaagtacaaggctactagtagataaggcctgaagttgaaccaatggattgttcagctgctagaaaaacacaaaaggctgaccgagaaaagttaaggagggatcgaatcaatgaacagttcgtagaattgggtaacattttagaccctgataggcccaaaaatgacaaagcaaccattctgtgtgatacaattcaattgctgaaggacctaatttctcaagttagtaaactcagagatgaatatgctatgctaaatgaagaatctcgtgagttgactctagagaaaactgatctcagggaagagaaggcttctcttaaatcagatattgacaacttgaataatcagtatcagcagcagctcaggaccatgtttccatggactgcaatggagcattcagttatgatggctccatcatcgtatccatatccagtgccattggcagtacctcctggtccaattnccatgcagccataccccttctttgctatnaacatcctgcagt

SEQ ID NO: 38518 - DNA, 400 bp, Glycine max
  unsure (1)..(400): unsure at all n locations
  Clone ID: PAT_MRT3847_134783C.1
cggagacnacaaaaggttaaattaacaatttaatacatacatggcaaacacgctanttcgtacttttaaacaggtaaccggcacactaacttttatgccataaacctctaagtccatcccaaggacacatttgggttcaatataaatggcaccgnactctctaatattccatactacaaaaaacatcgatattgggtggagaaatttaactcgaccttgtatgatgaatgtgttaacaatggcaattcacctgcactgcccgaaacttttaataattacaacaagctcgtttctattggctttaatataatattttttttttgaagaacacttgacaaacatgccgttacataaacaaacttaaataatgtttgtttccacacattgaaaaaataatttt

SEQ ID NO: 38519 - DNA, 277 bp, Glycine max
  Clone ID: PAT_MRT3847_134784C.1
cggacatcgacatgttgacaggtttgttttacgcaccgcagtcagggctaactggaggagttcggactaagaatgggcgcactgccgactgtttgatgcgagcactgaaggtcggaacagtatggatcacttgcgttaatgaattcgatgcttgtatttctagaggttgttacaaatagctcagagttggcaaggatactactatctacagaatcaacaatgcacctacggctgaaagatgaggtataatcagtgatgaaacgtgcgttgttgtgaa

SEQ ID NO: 38520 - DNA, 621 bp, Glycine max
  Clone ID: PAT_MRT3847_134785C.1
atggaatgtaccttttgacagagaacaagatctctccaacaagcctttttattatttcagaatttaggattgtttaaggtttgatgatttcgtgtcgggggtgtttgtccaaaagggaatttgaggccttttgatgaggctgtgaagagacccactgcttccaatttcccgaatagtgtttttgtcgtgatttctgagggacatgaagtttctgagcctggtggggaattcttttggatgttctgcatctggtgagcgcttagtttctgcagccagagatggggatgttcaagaagccaaggccttattggaatataaccctcgtcttgcaagatagtgtatctgttacttgagtccggagttgatatcaatctcaggaattatcgcggtcagactgcattgatgcaagcttgtcaacatggtcactgggaggtggttcagaccctggttatttttaatgccaatatccataaagctgattacctaaatggaggtactgcccttcacttggctgctttgaatggccatacccggtgcattcggctcatcctcgctgactatatacctagcgtccctaacttttggaatgcattacagacaggtgatcataaatcaatctca

SEQ ID NO: 38521 - DNA, 329 bp, Glycine max
  Clone ID: PAT_MRT3847_134786C.1
gggggtattattttattatttttttttattagatctaaagttataaaaaaaaaaagtttgaggtcatattggtggtaaaaaaggcaaaaggaaaagctaggtagaaaatttagaatgcttaagagcctaataaaaaggataaccatgaaaaaaccgagggaaaaacaatggaatcaaccaaagtccaaggggcttcttgcaatgataaaaaaaaactttttcttataaccaacgaggggaaggttaattgaaaaaaccactgcaacaaaaagagaaagccacgggcaaaatatttgttatgggagggaccgacccattttaatagcatg

SEQ ID NO: 38522 - DNA, 817 bp, Glycine max
  Clone ID: PAT_MRT3847_134787C.1
cgctcacttcttgatccagtccttcccagcaaccatgctggattttaccattctgccgtcctgaacacacatgacgtgtgtggggaaacagaaaccttatgggagttggcaaagaaaagctacacagcctttgtaaatgctatgaactgcaacaagcatttcacagacatgtctgacctgaactacctcatgtgcaaggctattgagaaccccggtttgacgccatcgtcatcacttaggacagccttgatctctgtgtttgaagatcctgtcttcgacgactcggccgaaatgcatggagagattggattggaagactatgtaggttgtgcttctgctcatggtgttggtccatccattgccgtattcgacaccatacggaatggaaagttggattgtgcttgtatatatccatcaccccttcattcaagagagcagattcaaggactagttgatcatatgaagagaatacttgtggaaggttgtaacagtgaaaatcaacaaattgaaccataatccgcttctgaggctgggcaattggttataatttcataatcaaattcataaacttcgttgcctcttcaatttcagtctgtgactctgtgattctccttgctctgttgaatttcccagggccaggtattttaatatgaaggtagaaataaatatattgcatgcaatttacaatgaaggattcaaagcatctgcaaaagttgccattacattaaaaaaatgcagagattcatttttctactgtcctatggaatggtccggtggcacgttcggagagcggcgacgtgatcggttcgctgcccgc

SEQ ID NO: 38523 - DNA, 398 bp, Glycine max
  Clone ID: PAT_MRT3847_134788C.1
aagaacgccagctccagctacctccaacccaacacacccatttattactctaaacattactagtaaaattaataaaaagaagatattcttcttcctaataacataccaattcatttcaaagattgattctgcacaccagcaacaaaaaaattaagttccaaagaaagacatcttcacttactatgctcctctgctgcaatagtaaggcaaaacgaatcactgtgttctagatttcgaaatccaaatggacgacgacgacgaagaatacccaattcccgtctcaaagaaaccctccacgcaaaacgatgagatcatggaactgttatggcaaaacggccaggtcgtgatgcaaaaccaaaaccaacgaccgttcagaatacaaccgccgacgacggacg

SEQ ID NO: 38524 - DNA, 694 bp, Glycine max
  unsure (1)..(694): unsure at all n locations
  Clone ID: PAT_MRT3847_134789C.1
gctcgcttcttgatccagtctttcccagtaacaatgctggattttaccattctgccatcttgaacactcatgacgntgtgtggagaaacagaaaaccttatgggagttggcaaagaaaaagctacacagccattcgtaaatgctatgaactgcaacaagcattttacagacaaaaatgacttgaactaacacatgtgcaaggcaatcgagaaccccggtttgacgccatcatcatcgcttagaacagccttgatctccgtgtttgaagatcccgtctttgatgactcggccgaaatgcttggagagtttggattggaagactatgtgggatgtgcttctgctcatggtgttggcccatccattgccgtattcgacaccatacgaaatggaaagttggattgtgcttgtatatatccatcaccccttcattcaagagagcagattcaaggactagttgatcatatgaagagaatacttgtggaaggttgtaacagtgaaaaccaacaaattgaaccatactccacttctgaggctgagcaaatggttatataatttcgtaatcaaattcataaacttcgttgcctcttcaatttctccttgctctgttgaatttcccagggccaggtattttaatatggaggtatacataaatatattgcaatttacaatgaaggattcaaagcatctgcaaaaa

SEQ ID NO: 38525 - DNA, 256 bp, Glycine max
  unsure (1)..(256): unsure at all n locations
  Clone ID: PAT_MRT3847_13478C.1
gtacaccccagtccggtccggattcccgggtcgacccacgccntncncggnnttacgtttcctttnnctgttgnnncggggaaccatncatagntatgnnnaaaanatgnnngggtgtggtttcccnaatctttggcatttaaacttccntaacnctgnattgggttagatgtttcaagaactgatattggtccatctgctcttttaagaatgttantccttatcacangaatttgaggggtttttaaattgctct

SEQ ID NO: 38526 - DNA, 318 bp, Glycine max
  Clone ID: PAT_MRT3847_134790C.1
atcaaagcaatctataaagtagtactgattacctaaaaaatcattacataatatttatactccatacaaatgaattaagtgttgtgtattttgtgataaacaaaaagggttatgagccatttaaatacaacacattttaatccatgccgtggtgaaaaataaaacttactaatcaaaaaatgcttcctccggcattgaaccatataagttatttactcatagtattctttgttattaagggtgaagaccatattttcttgtgagatattatttaccttaatagtcaaatgtgttgtaaatacaatattaattttattc

SEQ ID NO: 38527 - DNA, 957 bp, Glycine max
  unsure (1)..(957): unsure at all n locations
  Clone ID: PAT_MRT3847_134791C.1
ggtccggnaatcccgggtcgacccaggctcgagctctctttctctctctctctctcacacacacacacacacattcggatccttttaacaccgccccattattgcttgctcgttaattacggcaatgactcggctatttcgatccaaatcttgcggactggtggagttcaacgctgctccgccgagtccacttttccatgatgtgaaaagtgaggacgaagacaatgaagaagatgaagatgaagatgaagaagaggaagaagaagaagaattggacagtgatgatgatgtttcgagcaacccggtttcaacggcgttgatgaatccagggtcaaaagtggagaacaaaggttggcgtggtgggcatggttgccaatctaaccagtttgcgatgttggatattttgttggctgcgttgaagaagtcgctggtgacttgcagtgtggagagagaggatatttcttcgttggatattagctggcccacagaggtgcgccatgtctcgcatgttacctttgataggttcaatggctttctcggtttgccctctgagctcgagcttgaggttcccaagagagtccccagtgccagtgctaaggtatttggagtttctgcaaagtcaatgcagtgctcttatgatgaaagggggaacagtgtcccaacgattctgctgatgatgcaaaagcgattgtattcagagggtggccttaaagcggaaggaatattccgaattaatgctgataatagccaagaagaatttgtgcgtgatcagctaaacagaggtctggtaccacttggaatcgacgttcattgtttatctggtttaataaaggcttagtttagagagcttccaacgggggtacttgattccctcacccccgaacaggtgatgcattgcaacacagaagaggattgcaccaatcttatgaagttgcttccttcaactgaagctgcatt

SEQ ID NO: 38528 - DNA, 317 bp, Glycine max
  unsure (1)..(317): unsure at all n locations
  Clone ID: PAT_MRT3847_134792C.1
gtcttttcgggggggggggcttcctgcttgtttcttgcggtggcttgcttcgggctctggttcccggtctgggctcgtcttccgccgctcggttcgcgtctcgtttcgtttgctcccccccctcgctctctgggctctgttttccttgcgntttcataacctggggggggtgcggctccctgggtctgcttccggtttgagtctgggggctccagtcgctgttccctgtagcgctttggtccccttgtcttgccttggctttnccccgctctgatcggccttgctcgtttgtgcctcactttgctcggtctaaggct

SEQ ID NO: 38529 - DNA, 346 bp, Glycine max
  unsure (1)..(346): unsure at all n locations
  Clone ID: PAT_MRT3847_134793C.1
gccaatcacgcttttattaatcaaggcctttctggatggtccttggattaaattaacccccccagaattggcccccccgcctggtggtaggtaaaattttcaaaaatggaccaaggccccaaaaaaccattcaaacctttttagggccccccttccaacccttggttggccaaaccaaattggtttgaaaaagggagggccattggagggacccacctttcaaaatcttgaaccaaaggccacggccgtggcantggttgtggctgttgctgttgttgacctttgaactgaggcaaacttattagaagaattatggttccttttctctttaaaaagctggaaaaag

SEQ ID NO: 38530 - DNA, 788 bp, Glycine max
  unsure (1)..(788): unsure at all n locations
  Clone ID: PAT_MRT3847_134794C.1
atcctcttccatttccaagttatcccacacatgccacatgacggatgtggtaattgtctccgcggcgcggacgccagtcggttccttcaacggggcgttcggcgcgctgtccgcacacgagctcggagctgtcgcaatcaaaggcgccctggatcgcgcgaaggtctcgcccgaggatgtcgatgaagtcatcctggggcaggtgctatccggtggtgaggggcagaaccccgcgcggcaggccgcgatggcggccggcattccgcaggagaaaacggcatggggcatgaaccagctctgcggctcgggcctgcggtcggtcgcgcttgggctgcagcagatcgccaatggtgatgccaggatcatcgtcgccggcggcatggagtccatgtcgatggcgccgcatctgtcgcatctgcggaacggcaccaagatgggcgacgtcaagttcgtcgactccatgctgaaggacggccttatggacgccctccgcggctatcacatgggcgtcacggcagagaacgtcgcggccagatggcagatcacccgcgaggagcaggatgcgttcgcgaccagctcgcagaacaaggccgaggatgcgcagaagggcggccggttcaaggatgagatcgttccggtcaccgtcaagaccaggaagggcgacgtcgtcgtcgaccaggatgaatatatccgccccggcacgacgcaggagtcgctggccaagctgaagcccgcttntcacaagggaagggtcggtgacggcgggcaacgcttcgggcctcaacgac

SEQ ID NO: 38531 - DNA, 556 bp, Glycine max
  Clone ID: PAT_MRT3847_134795C.1
tagggtccaagaaggagcaggtttgctttcaattgtgatccaagaggctgaagaggttgagggggaccatcacaacaacccatttgcagtgctgacctttagaggcgaaaagaaaaggacaaagacgatgaagaaaactcgacacccgcgttggaatgaagaattccaattcatgctagaggagcctcctctacatgagaagatacatattgaggttatgagcaagaggaagaactttagttttctgccaaaggaatcattggggcatgtggagattaacctaagagatgtggtgcacaatggtcgcattaacgataagtaccatctaataaattcaaggaatggagtgatgcatgttgagatcagatggaaggtggtttaagaaaccaaattagtgtgttataaggtctttttccaatagctgggtttaaattcaatactgttaaatagaagaggcaaaccacaccattgagacatccataagaaattgtcttttcgagcaacattttggccacagatatgtatatataatataattcaattaagtgttgtgtcc

SEQ ID NO: 38532 - DNA, 213 bp, Glycine max
  Clone ID: PAT_MRT3847_134796C.1
tttttacagtcaaattcaatacacggtttttttttttcttccactttactaaagaggatcccttttttaaagagagaaaaagacgacataccagtgtcttataaaactcatcagatacaaattctatttggcttaattacgtcaacaacctgtcgctttgacgagatatgtggtttcgactatagacgaatagctaagcggagttatttacct

SEQ ID NO: 38533 - DNA, 304 bp, Glycine max
  unsure (1)..(304): unsure at all n locations
  Clone ID: PAT_MRT3847_134797C.1
gaccgcacagtttctgaattctgggtgttgagtttcattttctccatttttttttctctcgcttggatgtgtgagtttcaatccaggagatcagggattacactatatttgagaatctgaaagagtgactatgtggtctatttgagcgtgtgaagtttgtgtttgtgtgaaaggtgtgaggcttattattcatacaagagtttgtgtctgttcacagaactgatggtggtgtggtgtgtgtcggtggcaatgtacgcaactttggtggagaggggtaganagagagctggacatgtcaagaaag

SEQ ID NO: 38534 - DNA, 106 bp, Glycine max
  Clone ID: PAT_MRT3847_134798C.1
cccacgcgtccgggacatcatatggaaaagataaagaagctgccaagatggagttggtataagcccttaaattgttgtatgaacatgttggagacaagactgattt

SEQ ID NO: 38535 - DNA, 1942 bp, Glycine max
  Clone ID: PAT_MRT3847_134799C.1
gagtaaaagtaaaaaaaaaaaaaatatagaaaattagtagaaaatatttacaccaagcaacaaaaaaataaagacattttcacggaaaatgtcatcatcactatgagagaaaatccagagaatgcaacaaactaagaaacgaatccctaaagctaaactatacagctctatgatttaccatttactctatctagatttattactgtgataactattagacattcactatacaaggtagtttgttactaaggtcatataaaaatgatcaaatgtgtagttgtgtgtgcagacaagtttttacctacgcagagcaattcacatatacaaagggtatataacaatttaaaaactgttttagagattcatctgcggccctttattgtataactttccctaaacattgaatggcaatttgaagtcatagagcagctttaagcatcaacatcagggcctggatatgctggtaaactcattatacgcttgtctaagacaggacctccaacggtaaaatgataaaggctctggaatgttgacccttttaacccaagcaactgatgaacggggttatcaaagaaacaaccaattccagttgctgagattccaatagcatgtgcttcaaggtacagcacctgtccaagaactccagtctcccaaaataaacgtggatacatccagacattcttctcgcgcaaagtaggttccatacgggccaacataccaaggctgaagcaaccatcacttgcaatgtcctggtggcatgaaagctgcttggaaagttgccggcaatccaatctaagtagttcatacaaaggaagatcatcagggcagccctcaggtttggtccacaaaaagtcaggaagcatagctttcttcaatttatcaaaatgatcttcattcctgactagaaaatacaatccttggggcaaccccaccactctatgcacaaacaaagcagcatgaacctcagcatcccatggaagtgctcggaatggcaatgccagctccctcccttgcctccctccaccctggcaacctgaaggaagacaatgcaacagaatctgataaaaggcatctctctcaatttcagtaactccatccatatcaacagcactcctacgcttcctaacaacttccctcacagtcaatcccttatacgcactctccccacaaacaccactcctctgaaatggctcaaccaagaatctttcccccaatgtcaaaggcttcttcacagcctcagcagtcctataaataacttcccaacacacatgctctttgctaagggaattaggcttccctttccagtccaacttatcaaatcccaatatagcttcacttaactccttccaattcacatcaaacccaccaaccccacttggataaaccagcatcacacaatcaggatgctcaaactcaatctctggaatcttccctctaacagcacgagacggaatctcaaactcagggaaaacatgaagccccatgagactcttcaactcctcacaccctagagagtccagaaccttcacatcccaaccaagacccgcagcagccatggcaaccgcaccaatggcgtgaccaacatcatggttacagtacctgaaggcacgttccccgtacttccaagcctcgcgccagaaaacagaggacaacccaacaaggaacgaattgggaggaaaaaacttggggaaaaacccagatgggatttcagctctgagctccaaagaatgctcctttggggcataatgagcgacaaaagcggaatcggacacaccgggtatgggtggtgcaacgacgtaggcctcggtggggtgcaggttgccgctgctgggattaaccctaagggaccaggtggagaagcccgtggatttccacgcggagagggagagggagtcgaagaggagctgggagagggtggatttggaaacgggcggacgcgtgg

SEQ ID NO: 38536 - DNA, 275 bp, Glycine max
  Clone ID: PAT_MRT3847_13479C.1
gcgaagcgcactgtcaatgaagcggatgctgtgtagaatgtaggcccagaggctatgtccctacctttgttctactgggtatccaacatgaatgattgaaagcgacaagaggagactaagagaggggatgcccttctggcctacaccaatgtgggtgccagccccaacgatattacatctgaccccaaagttgatgactccgatgaccctatcaagcccgtgcagcctccgagtgctttctcatgtctcttggacgagtgatgaatgtgttcctc

SEQ ID NO: 38537 - DNA, 202 bp, Glycine max
  Clone ID: PAT_MRT3847_1347C.1
tacggctgcgagaagacgacagagggggaacgaccatatcctactgaagagccgtactgggtgatctgaccaaaagggttcgtaatgtgagagatgaattatatggtctggtgtttgatgatactgatatggtcgacacgcatcttacacgatagagaaagcgaatagtactgtcataagacagtcaccgatctatgggtgg

SEQ ID NO: 38538 - DNA, 448 bp, Glycine max
  Clone ID: PAT_MRT3847_134800C.1
cttattttttcttccttctgcacattttgtgcaatatggtcgttttcatttccacccctctttattcgtggtgtgtcgctattgcgctcgtcttaatgatcatctctcaatgttgcggctgttctaaaaagaaacaaaagaaagctaaagagccgctgaaagcaatgcctactcagaaagcggaagaggcatctacagggagcgagaaaacgggtcaaagcgttgtttctgttaggccacccaatgtgccgacaactgctccagtccgttcaaacccaaccatcagcgcgggaacagaataatgtttttattacacttacaccttcagatgtgaagacacctgcaccagtgggcgggaaaacgggtcaaagcgttgtttctgatacgccaccaaatgtgccgacaactgtgacttcaaaaacgccgatcaaagcaggacagaatgctg

SEQ ID NO: 38539 - DNA, 223 bp, Glycine max
  Clone ID: PAT_MRT3847_134801C.1
gctatccaccaccaactcaaacacagcctccactagagaataagagataccttcctgtcaacccagtctcggtagcttaagttgtctccttgactctatagacgctcttggtgatgaacatgatcatgcttgagacactcatcataggatatcaaagagactagctactccatctgctcagttgatgtcactagccatcatgggatccgttgcagagatcaat

SEQ ID NO: 38540 - DNA, 176 bp, Glycine max
  Clone ID: PAT_MRT3847_134802C.1
gaccagctactagtaggcggcctttgcggttggggggagacgacttattgggcccccaccaagaacaagttcccgtgatctgagaatttcaagggggctaactctcccgcccacctaatcttagttttaaacaaccgagaagccgttcttcccttgattgcgttgggataaccata

SEQ ID NO: 38541 - DNA, 282 bp, Glycine max
  Clone ID: PAT_MRT3847_134803C.1
ccggtcccgaatcggcgggtcgggccaggcccacgctttcgcgttcgattgggcggaggcgtggagaagtactgataaacggtgatgccccgagggcgctccttcaatccttaaacaaatgcgtttgtttgtgggtgtatggagttgatcacttaattcgtagcttattaatgtgccaagccgcagtgtaatgaatgtgaatctatgtgctggccacacacttctagaatgaccatcacttgcggtcttagcacatttaggtgacactctcctatttgatat

SEQ ID NO: 38542 - DNA, 495 bp, Glycine max
  Clone ID: PAT_MRT3847_134804C.1
cttcaccaacgccgacgtgtcttcgtggagcagagcagccaccaccaaaataaaaagaaagaagcacacaccacaagtcaacgtttgtatctatctgcattaaacccaactgcactctctctctctctctgctttgtttgtagcactaaaaccctattcatctcttttttgtttattcttaccattttctcatcatcatgatggctccttctcagccacctcattgggccccatctccatctctaacaccaacaccaatcctccacaagtctttctttcccccaccgtcaaactcgccggcggttgacttcagtccgcccttgattgcaatggtcgtcgtcgtcgccgccgctttcctcgtcgtcacctactcccgcctcatagggccccacctcagacctcccatccaccgcctcctccgacgcttgcgtcgacgccgattactcccatactgcgacggggacctcgagtccttaccctacgagtctgcctttg

SEQ ID NO: 38543 - DNA, 1982 bp, Glycine max
  Clone ID: PAT_MRT3847_134805C.1
cctaatttgtgtaccgtgcctttgctctaatgccacactcgtgactacgaacactgcaggaagagagaaaggcgatggacctcggaacctatgaagtgccagaaggagtggacattctaggaagatacgatgcagagtttgcaaaaatcctcacaaaagacgctttgaaattcgttgctgagctgcaacgtgagttcaggagcgatatcaagcatgcattagagagcagaagagaggcaaagaagaagtacaatgaagggactcttccggggtttgatcctgccaccagtcacattagagaccaggagtggctgtgtgcacctgttccaccagctgctgctgataggaaagtggagatcactggccctgtggacagaaaaatggtcatcaatgctctcaactctgcagctaaagtctttatggctgatttagaagatgcactgtcaccgacctgggaaaatcttattagtggtcaagtgaacttgaaggatgctgtggatgggacaataagcttccatgacaaagtaagaaacagggtttacaagctcaatgatcagacagcaaagctttttgtgagaccaagaggttggcatctacctgaagcacatattctgattgatggtgaacctgcaactggttgccttgttgattttggcctctatttctaccacaaccactcggcattccgacgcactcaaggtgctggctttggccctttcttttatcttcccaaaatggagcattcaagggaagctaagatatggaacagtgtgtttgagaaggctgaggatgtagcaggcattgaaagaggaagcataagggcaacggttctgatagaaacacttcctgcagtgtttcaaatggatgaaattctatatgagctgaaagagcattcggtgggtctaaactgtgggcgttgggattacattttcagttatgttaaaaccttccagactcacccagatcgtctactaccagacagggtccaggttggcatgactcaacatttcatgaagagttactctgatctcctcatcaggacatgccacaggcgcggtgtgcatgctatgggaggaatggcagcacagattccaatcaaagatgacccagttgcaaatgaggcagcactggaacttgtaaggaaggacaagcttagagaagtgaaggcaggccacgatggaacttgggctgcacatcctggtctcattccatcctgcatggaggttttcaacaacaacatgggcaatgctcccaaccagatagacacagtgaaacgcgatgatgctgcaaacttaactgaacaagacctcttgcagataccaacaggaacccggaccatggaaggtctcagattgaatacaagggtgggcattcagtacttggcagcatggctcagcggaagcggttgcgtgcctctttacaacctcatggaagatgctgccactgctgagattagcagggtgcagaactggcagtggctcaagtatggagtggagctagatggggatgggcttggagagaaagtgaacaaagacctttttcatagagtggttgaagaagagatggctaggattgaaaaggaagtgggaacagagaagttcgagaagggaatgtacaaggaggcttgcaagatcttcactcgccaatgcacgtccctaacacttgatgattttctcactttggatgcctataattacatagtcgtgcatcaccccaaggaaggaaccgtcaaagcttcgaactaattaaggggttcattattgcctaatggttggatcacttggactctgtcttgtgtacttaaagttactgttgtgagaaaatcacaagtgcacggtggttatcgtattcacatgattatgtgtatgactttgtgattatcgttattcaataaaaaggagaaaaatggatttttcgttcctattaaatgatcagaaatcagtttatgttcttccaaaaaacatgtctggttttgatttctc

SEQ ID NO: 38544 - DNA, 457 bp, Glycine max
  Clone ID: PAT_MRT3847_134806C.1
ctcttctggatgcagactccactcgctgttgttgctggcggagccctttatctggcggttccaactcaattctctgctgctagaggcaacagcaaagagagtatatggaagaagctgggaacattgggttaccttggggcttttactttgactggcggtatcgggctggctttttcagcgctgtcgaaccctcgccgcattcccatcctgcccatcatcttcagcatcatcgctatggcgactttcattctcaacgaaatttacttggctaccgaccccatcatcccagtcacgctgctcaagtctcgaggtatggcgtttacatgcttgagcacaggcggcttcatgatggcccgctggagtgttcttttcttcacacctaacctacactcttgcgggacgtggctgggctcccgctgctgctggtagcattctgatcgccacgaacggcggcttt

SEQ ID NO: 38545 - DNA, 2079 bp, Glycine max
  Clone ID: PAT_MRT3847_134807C.1
ggaattcccgggtcgacccacgcgtccgcgctcgtgactacgaacattgcaggaagaaagaaagaaaggcgatggacctcggaacctatgacgtgccagaaggagtggacattctgggaagatacgatgcagagtttgcaaaaatcctcgcaaaagatgctttgaaattcgttgctgaactgcaacgtgagttccggaacgatatcaagcatgcattagagcgcagaagagaggcaaagaagaagtacaatgaagggtctcttccggggtttgatcctgccaccagtgacatcagagagcaggagtgggtgtgtgcacctgttccaccagctgctgctgataggaaagtggagatcactggccctgtggacagaaagatggtcatcaatgctctcaactctgcagctaaagtctttatggctgatttagaagatgcactgtcaccgacctgggaaaatcttattagtggtcaagtgaacttgaaggatgctgtggatgggaccataagcttccatgacaaagtaaggaacaggatttacaagctcaatgatcagacagcaaagctttttgtgagaccaagaggttggcatctacctgaagcacatattctgattgatggtgaacctgcaactggttgccttgttgattttggcctctacttctaccacaaccactcagcattccggcgcactcaaggtgccggctttggccctttcttttatctccccaaaatggagcattcaagggaagctaagatatggaacagcgtgtttgagaaggctgaggatgtagtaggcatcaaaagaggaagcataagggcaacggttctgatagaaacacttcctgcagtgtttcaaatgaatgaaattttgtatgagctgaaagagcactcggtgggtctaaactgtgggcgttgggattacattttcagttatgttaagaccttccaggctcacccagatcgcctcctaccagacagggttcaggttggcatgactcaacacttcatgaaaagctactctgatctcctcatcaggacgtgccacaggcgcggtgtgcatgctatgggaggaatggcagcacagattccaatcaaagatgacccagtggcaaatgaggcagcactggaactggtaaggaaggacaagcttagagaagtgaaggcagggcacgatggaacttgggctgcacaccctggtctcattccagcctgcatggagattttcaacaacaacatgggcaatgcttccaaccagatagacacagtgaaacgcgaagatgctgcaaacttaactgaacaagacctcttgcagataccaataggaacccgcaccatggaaggtctcagattaaacacaagggtgggcattcagtacctggcagcgtggctcagcggaagcggttgcgtgcctctttacaacctcatggaggatgctgccactgctgagattagcagggtgcagaactggcagtggctcaagtatggagtggagctagatgaagatgggcttggagagaaagtgaacaaagacctttttgatagagtggttgaagaagagatggctaggattgaaaaggaagtgggaacagagaagttcgagaagggaatgtacaaggcggcttgcaagatcttcactcgccaatgcacgtccccaactcttgatgattttctcactttggatgcctataattacatagttgtgcatcacgccaaggaaggacccgtcaaagctttgaactaaggggttctttattgcctaatagttggatcacttggactctgtcttgtgtacttctagttgctgatgtgagaaaatcacaaatgcacgatggtgtcattgtgtctatgacttagtgattatcgacttatcgttattcaataaaaagaaaaaatatatatttttcgttcttataaaatattcaaaatttagttttcgtctttccaacatgttttgtctagggagcgattcttaagatacaaatatgttatttgtgaaataggtgtctaactctcttgacttgatggtgacataaatagcaaaatttcacatcatcgttataaacatggacatttggttt

SEQ ID NO: 38546 - DNA, 458 bp, Glycine max
  Clone ID: PAT_MRT3847_134808C.1
gtgaaaactaagtagaaataaataaaatttaatttaagagaaataaaactaagagaggaggaggatgcatccggatccttacgaaaggtactaaggaaaaattagagaaatacattttataaattttaaagagaaatacatttggtaaaaattgagaaaagaaaaataggtgaaaactaagaaaaaaataaaaatatttaatttaagaaaaataaaaattagagagggaaaagttactattcatctttgatttcattttttaaaattctcttcacctatttctcttttatcaaatatagtccattattttttattccatatgattctgacttccttgtttcttctatctattacaacacaacgaatccataatggagacataatatcgcagttcacacttcacatccaaacacgagcataaatgatgggtggagtgtgtccacgaaatgagataagat

SEQ ID NO: 38547 - DNA, 406 bp, Glycine max
  Clone ID: PAT_MRT3847_134809C.1
gtgcattttgggatgcccacctttataaagcatcagaaaggatgcgagtgcccggtgtacaacttattatcggacaacgctagcggtcaattttgctacttagcggaccacactgcacaagttcacaccatcaaaagcatggagctgtgcctgcggatccccggatggtatttcctgcatgctgtacattataaggatgtccacaccctaggatcctccctgatttctacagaataatgatctcctgccccacgcgaataggataaacactctataggcgagacactgccatggggcataaatgctcaacatttttaagactgatgtacctagagctggcatattggatgactaaaaatattacaaaagccagctcatggcatagcatgataagaaaacatggcca

SEQ ID NO: 38548 - DNA, 393 bp, Glycine max
  unsure (1)..(393): unsure at all n locations
  Clone ID: PAT_MRT3847_13480C.1
gctacacgcgttacactggacacagacttaacactcatccaatataatactctagaccgattggacgggactattcaaacatatattttgcattacataatacgaagcaanaactactacatggcttcccaacaaatagtaaatggagttgcataacacactcatcgatcgaactatctagcatcatacacggcacatcctgtgtaccccatatgtgtgcgcatgctaagagcaaatgccgggtcacaccttccatttttcaaattcatacgctggtaacataaaagagcttgaattttgatgcccaccacctccaaatgcctgatagataagcgtggcatcttcattctccacactccccanacttatctttagccttctgtcattcctaag

SEQ ID NO: 38549 - DNA, 131 bp, Glycine max
  Clone ID: PAT_MRT3847_134810C.1
ctttatgcaatttatgccataggtatggacttccagcccttgaaacctgcggtcgaagaacaaggactttcaactgaggacctgccattttggcacttatcggagacgtacgataggaactccttttccca

SEQ ID NO: 38550 - DNA, 822 bp, Glycine max
  Clone ID: PAT_MRT3847_134811C.1
aagaaatctgaattgtcggtcttagttgatcgggccactggaggaggcagtatcaaagatggtcaggtggaacttatgcttcataggcgcatgctctttgatgatggcagaggagtagacgaacgtcttgatgaactagtgtgccaaaatgatagatgtcaaggactaacagtaagaggaaattattatgtgggcatccacaaacttggagctggttcacactggcgccgtacaactggtcaggaagtttattcaccactattattggcttttgcacatgaggacttaggaaactggaaggcctttcatgtgaccagaggaactgtcattgatcctaattacaacttacctcccaatgttgctctgataactcttgaggtgttggataatggaatggtgcttctccgtttggcacatctatatgaggctggtgaagatgctcagctttcaactttgaccaaagttgaattgaagaaaatgtttgccacaaaaatgataaggggattgattgaggttagtttatcagcaaatcaagagaaggaaaaaatgaagaagaaaacatggaacgttgcaggggacaagggacaagggtctaaatcagttaggggtggccctgtcagccatattaatctcgtagttgagcttggtcccatggaaatacgttctttcctgttgaaattctaaaaaatacaatagcccatttgaagatttcgtaataagaaatcaagtaatctagcatgtgtctcttttaattgcaatattccatatcttactgtagaatcatgttagacagttaattatgcaaagtgtcccttaatatcc

SEQ ID NO: 38551 - DNA, 193 bp, Glycine max
  Clone ID: PAT_MRT3847_134812C.1
cccacgcgtgcttccacgcgtccgcccacgcgttcggacacgtgtacgacttaagatgctctagatgagaatgagcccatggcacgttccatatcatgggatcatgtcactctgttgtagtggtcgaaacatatgtacgggtacctgccgtagcacagctattctacattgataggaaggtagacttcgctgt

SEQ ID NO: 38552 - DNA, 278 bp, Glycine max
  Clone ID: PAT_MRT3847_134813C.1
agacgggggcggtaatgcattggttgccaggctagctccatctttcgcatcttgagtgtcagccttgcgcgtctgtgatgcaagcgctagctgttcgctacgccaaccatggccaggtgatcttgcaagcgcggccggcagccgtttgggctcggacaaatgccttacctagatcgtcccgagcgccctctcttgtttccagcgccttcgtacgttgtggtacttgtttccgtgcgactcgaacttgggtggcttgcccttgaacgcatactttttgt

SEQ ID NO: 38553 - DNA, 1385 bp, Glycine max
  unsure (1)..(1385): unsure at all n locations
  Clone ID: PAT_MRT3847_134814C.1
ccagcgtccggccaatttcttctttcatcgcctaaagcttccccagattctttcactgtcttcaaccattgtcctcaaaacaacaatcgaaactccgcggaagcttctcgaaaccctaccgaggcgattttctcactcactccgaatctgctgccaagttccaatggcgttttggtggccattgctcgttctggcactcgctttctccatctgcaagttccttctcattctcattcctcccaaggttccttccatcgacgtcgacgcttccgatgtgttggacgatgggagcctgacgcaggagaacagtttcatatacgtgcctccgaggggaacggcacagcaatcgagcggaaaagttcagtgctatgagcctgctaccatgaaatatttgggatatgttcctgcattgacgccggatgaggtcaaggagcaagtggaaaaagtacggaaggcacaaaaaatgtgggcgaagacaagcttcaagaaaaggcgccactttttacgtatacttttgaagtatataattaaacatcaagcacttatatgcgaaatatcttctcgtgatactggaaagacaatggtagatgcctctttaggagaaataatgacaacatgtgagaagatcaattggctactatcagagggtgagcagtggttaaagcctgaataccggtcttctggaagatcaatgcttcataagagagctaaagtagaatttcatccccttggtgttattggagccatcgtccatggaattatcccttccacaatatttttaatcctatgctggctgcaattttttctggaaacggtattgtgattaagatatcagaacatgcaagttggtctggatgcttttatttccggatcatccaatcagcccttgctgccataggagctccagaggacctcgttgaggtgataacagggtttgctgaaacaggagaagcattggtatcttctgttgataaagtcatatttgttggatcgcctggtgttggtaagatgataatgaataatgcttctaacacacttataccagtgacactggagcttggtggcagagatgcatttattgtttgtgaagacgtagatctggaccatgttgcacaaattgctgtcagggctgtgcttcagtcaagtggacagaactgtgctggggcagagcgattttatgtccatagggaaatctattcttcttttgttagcaaagttaccaaaattgtgaagtctgttacagctggcccaccacttgttggaaagtatgatatgggagctttatgcatgcatgagcattctgaaaagcttgaaggccttgtaaatgatgctttagacaaaggagctgaaattgttgcccgtgggaatcttggacatatanggcg

SEQ ID NO: 38554 - DNA, 907 bp, Glycine max
  Clone ID: PAT_MRT3847_134815C.1
cggaagacgacagaagggggggaacatcgcagcaatcgggcaagatagttcagtgctacgaacctgcaactatgaaatatttgggatatgttcctgcattgacgcatgaggaggtcaaagatcgagtgtcaaaagtaaggaaggcacaaaaaatgtgggcaaagtccagcttcaagcaaagacgcttatttttgcgtatacttttaaagtatataattaaacatcaagcgcttatatgcgaaatatcttcacgtgatactggaaagacaatggtagatgcctctttaggagaaataatgacaacatgtgagaagatcaattggctactgtcagagggtgagcagtggttaaagcctgaataccggtcttctggaagatcaatgcttcataagagagctaaagtagaatttcatccccttggtgttattggagccattgtttcatggaattatcccttccacaatatttttaatcctatgctggctgcaattttttctggaaacggtattgtgattaagatatcagaacatgcaagttggtctggatgcttttacttccggatcatccaatcagcccttgctgccataggagctccagaggaccttgttgaggtgataacagggtttgctgaaacaggagaagcattggtatcttctgctgacaaagtcatttttgttggatcccctggggttggcaagatggtatgattcctttggcctatcaaattgctccttcttgtccttcatttctaaattgtattctctaacaataataattttgtttccaattctgcaaaatatggttctgaatgtgttatgcatggttgatgtttaataaagaaattctagagagtactcagtcaatctttaactgagatgtatttgaatcttaagcctgatctgtagcc

SEQ ID NO: 38555 - DNA, 806 bp, Glycine max
  unsure (1)..(806): unsure at all n locations
  Clone ID: PAT_MRT3847_134816C.1
cggtccggattcccgggtcgacccacgcgtccgcatcgcctgaaggttcccagattctttcactgtcttcactcttcaaccattgtcctcaaaagaacaatcgaaactccgcggaagcttctggaaaccctaccgaggcaattttctcgctcactctgaatctgctgcgaacttcttccaatggcgttttggtggccattgctcgttctggcactcgctttcgccatctgcaagttccttctcattctcattcctcccaaggttccttccatcgacgtcgacgcttcggatggtactctgcctcactcaatctctatcgctcgtaaatttgttgccacgctgaaaatgtgatgtagattttttactgtcacagtgttggacgatggcagccaggcgcaggagaacagcttcatatacgtgagtgcctccaaggggaacggcgcagcaatcgagcgggaaagttcagtgctatgagcctgctaccatgaaatatttgggatatgttcctgcattgacgccggatgaggtctgtgagcctgtgcttctaaggaaactgatcgtttgatgcatgcttttagtatctagtttgagcaacatttgttttaagatgcaatttttttttctcttggtaattagtgtttgggcaacatccctcccccataccttcgcatagcgaagagcctctgggcaatggggtacgaagttnttttaattagtgtttggaaattttgatatttaaggatacgatacttgaaaatttttgtggctgaagaaaataccatagtgtttataaggtagcattggtt

SEQ ID NO: 38556 - DNA, 124 bp, Glycine max
  Clone ID: PAT_MRT3847_134817C.1
acaacccgttctgcttttgctctgggcacaggaccgtgataaaaagtgcacctatgcacccttagctccacataaagaatttggcacaacccatcataagcccccgtccaatctctcacacacc

SEQ ID NO: 38557 - DNA, 168 bp, Glycine max
  Clone ID: PAT_MRT3847_134818C.1
gttatcattgcgccccccctagtgaaattacgcgggaaacatgtgccactaccacacaccctgtgcattgaaaagattatgggcaagggtaaattgttggcaacacttttgggaaacgttattagcagaaagcattgctacgctcgtttgcttggccatgctgaggct

SEQ ID NO: 38558 - DNA, 1307 bp, Glycine max
  Clone ID: PAT_MRT3847_134819C.1
ggccgcccttttttttttttggggaaaagggtggggttggtgcacattaattggaaatctggggggaagaaattagaaatgttgaagcaaaacactaccttcatattccctttattgtcacaaatgacaaaggaccctcttcagcgcaaaactatcactgagataagaagattcaggactagatgtctctacttctcatacacacttaattattgcaaaaaggttaacagttaaatacacaggcacaacatataggatcatggcttagctgctagatctacagctttgaggctgcacctttgtctaagaaccatttcaactccccttcaggtgaaaccaatccaacaggaagcttaacagaattttgagattggcctaacacagagtgaactgcatctgctttacccttgccagtcaccacaagcgctgcgtaagcagaagtattaatcactggtaaggtgaaagttattctctctggtggtggttttggggagtccttaatgaaggtaacccatctttgtttctcctccacaagaggatggcctgggaacagagaagctatgtggccatcagggcccatgcccagcagcatgagatcaaattttggaaattcattggctggtgatgaagctatcacattgttcttgaccaagtgtctgagacacgtctcataatcatctgccgctccctcggctgaaagcgcatcattgattgcataaacattgcccgggggaattggcaccttggagagaagtccatctaaagcaagcttgtagttgctatcttcgtgagtcttaggcacgactctctcatccacccaaaacacgtgccatttggaccattcaagggtatcaacataaggaggttccagaagtttccggagataattgatcaaagagccgccagacaagcagacagtgaaagcccctctttcggaagtgaatttgttggagagatcggcgacgtatttggccagggacacggcaagatcctctttttcgaagacctcgacggcaacgttgttgttggtctccgccatcgatgcttttagcgggggaacaggtctcttgagattgacgacgcaaagacttttgaatctgagggggcgagagaggaagaggtgtgtggagggtggatgaaggagggtgcggtctgggaagaaggcgagtgagagtgggagagtgttggaaagggtgtaggccatgccccaccttatatgtgcacacgaatcaaatcaaagtggcagtgacaatgcccaccatttcgttcgcttccttctcttccacgaattccttccggacgcgtgg

SEQ ID NO: 38559 - DNA, 810 bp, Glycine max
  Clone ID: PAT_MRT3847_13481C.1
ctctctctcgaccaatccctagagagatccggcatccaagcccccaacctcagatcttcattctattctgatttcatactctaaatggatcctctccctgatgccattcttcaatacatcttgtcccgtatcaataacgctcgcgatgtggcagcttgcaattgtgtttctaagcgatggaaggactcaatggcttacatcagaactctctacttccctcgcaactcgtttgataacccttctctccgtgaaagtccggacgacatagtgaaaagaatggtatcaatggttgtgcgattagaagagctagttgtatacggccccttctccccttccggccttgcttcgtggctatcacttgttggtatgtctctttctcagcttgagcttcgaatggacaatcttgctgacaaccaagcctcccatgaaagcccttcaaaattggattgcattggtgcagcaaggaatttggaatctctaaaactatggggtgtcttaatgatgcattccccaaaatgggatgtcttccaaaatcttagaacccttgaaatagttggtgcaagattggaagaacctgtattgactgtggtgtttcagtcatgtccatatctgagaaggttgaaactgcttggatgtgaaggggtaggatcaatctcaattgaccttccctatttagagcagtgtaagctggatttttatggtctagggaactgttcacttacgctatcctccccaaaaatcgaatccctggatgtactaggctgcagttggattagggttcctgagacccaccatttgaggaatctttca

SEQ ID NO: 38560 - DNA, 333 bp, Glycine max
  Clone ID: PAT_MRT3847_134820C.1
gcaagaagcttatcttgccaatctcggaaatgtgttacgagaattgtatttgcacagaccatacgaagctcgccaattgagaaagaaagctctctctcgcactgaatggctgctaaaagctgatgtgcctaccctagcacagattgaagagttccattccatgcacacgatgatgaatgctcctgattcaaacgataatatcgatttactgacgagcatccatttgttgggtttacaaagagccggtaaagctttttcaaacaaaattgtttttgatgataaacttgagttggctaacacacaaaagatctttgatggaaaattttcaacgga

SEQ ID NO: 38561 - DNA, 1122 bp, Glycine max
  Clone ID: PAT_MRT3847_134821C.1
ccggaatgattaatggctggaccagctaattttctggtttttttccatttttttttttttttgaagcaaaatactaacttcatattccctttattggcacaaatgaccaaggaccctgtccagtgcaaaactatcactgagataaggagattcagtactagatatgtctcttcttctcatacacacttaattattgcaaaaaggtaaatagttaaatacactggcacaacatataggatcatggctaagctgccagctttgaggctgcacctttgtctaagaaccatttcaactctccttcaggggaaaccaatccaacaggaagcttagcaaaattttgagatttgcctaacacagagggaactgcatctgctttacccttgccagtcaccacaagcgctgcataagcagaagtattaatcactggtaaggtgaaagttattttctttgggggtggtttaggggagtccttaatgaaggtaacccatctttgtttttcctccacaagaggatggcctgggaacaaagaagctatgtggccatcagggcccatgcccagcagcattagatcaaattttgaaaatccattggctggcgatgaagctataatactgttcttgaccaagtgtctgagacatgtctcgtaatcattggccgctccctcggctgaaagggcatcattgattgcataaacattgcccgggggaattggcaccttggagagaagtccatccaaagcaagcttgtagttgctatcttcgtgagtcttgggcacgactctctcatccacccaaaacacgtgccatttggaccattcaagagtatcaacataaggcggttccagcagcttccggagatagttgatcaaagagccgccagacaggcaaacagtgaaagcccctctttcggaagtgaatttgttggagagatcggcgacgtatttggccagggacacggcaagatcctctttttcaaggacctcgacggcaacgttgttgttggtctccgccatcgacgctttcagcggggggacaggtcttttgaatctgagggggcgaaagaggaagaggtgtgtggagggtgcggttttggaaggaggcgagtgtagaatgggtgtaggcc

SEQ ID NO: 38562 - DNA, 493 bp, Glycine max
  unsure (1)..(493): unsure at all n locations
  Clone ID: PAT_MRT3847_134822C.1
gaggggtcaaaaacttttcacaaattactccttcacaagtggagaactataaagatatatagaattctaattccaaagcagaatcaaacaacaagcaagtgatgggtctgggaagattgatggtgactctgaaatctaagataaggtctttgaagattatgaagaagcctgattatgataaggtggagaagagtgagagcatgagaatggagattaggagcaggaaggccagaaagctcattgaagagaccctcaaagtggctgattcaccaaagtccaaagcttttgctttctgatatatatatataaatatatgcttcatttgtactcagattatttagtatcattattatttgttcaatgttttctcttcaattttggttcatgcaccatatgtagtttcaatgacatgtatttttatctttgttcctgatgtcttttaatatatatcnnnnnnnnnnnnnnnnnnnnnnnnnnnnnnnnnnnnnnnnnn

SEQ ID NO: 38563 - DNA, 457 bp, Glycine max
  Clone ID: PAT_MRT3847_134823C.1
gaccggagttttcccggctggtcggcttcatcctgctcgatcacttctccctgccgtccttcacccaggcgctggataccctggtgaccgccaacctgctggccgccgggaccttcgccacccagacctacagcccgaccggcgccgaggtgctcagcgacctcggcatcgtcatccgtccggatggcgactaccgcgccgtggagcaggcccgcttcgacctgctggtggtctgcggcgggctgcggacaccgctggagctggatccgcgactcaaggcgctgctgctgcgcgccgccaagcagcaggtgaccctgtgcggcctgtggaatggcgcctggcaactgggtcaggccggggtactggacggctatcgctgcgccatccatcccgagcaccgcggcgccttcagcgagcgggtgcgtggctgcaagacttcggcggtaagccatgtgct

SEQ ID NO: 38564 - DNA, 279 bp, Glycine max
  Clone ID: PAT_MRT3847_134824C.1
ctcctttttttttttttttttactaataatctacatctatatttatttgaacaaaacaagaaaccgtgcttgctgatcgtgagacacaaaggaccattgggtgggtcatcgtacggagagctagccatgctcacccgatggatcagatagaaagaccacatgccctgtggttcttgaactgagggggaggaggtcggatacccatcccttagataagctgacatgttattggaccactaaacaaagaaagggcatgcctggaacaacatgacactatgc

SEQ ID NO: 38565 - DNA, 229 bp, Glycine max
  Clone ID: PAT_MRT3847_134825C.1
tgggaagaagattttgattcagaagtatcgtctgcatggcggagttgagtgatggactgtgagaagagactgttttattggagcggagtgtagtaatgattgaatgggctcccgtatattcaagagagacatttcctgcaagtgtggggaatttttagttttaaggtggaagatttcgtaaggtaggaggtttggagggagcggcgggcggtttgaaaacgggtgtcac

SEQ ID NO: 38566 - DNA, 234 bp, Glycine max
  Clone ID: PAT_MRT3847_134826C.1
ttcccggtttcgcgaccgacagaaaccgcgagcataggttgccgaaccttaaaacctgaaacaaaagcaatcgttacttgattccaagaatctctcaatttcttcctacttttttgtgtacgatttcttaagggaaagaaaatcactctctgtgctgggcacagactttcggaataattttcggttccaggcttaggtcattggctgtacactctcctatgtgatataggactt

SEQ ID NO: 38567 - DNA, 323 bp, Glycine max
  Clone ID: PAT_MRT3847_134827C.1
aatgcgaaaacatgacctttatgttgggtgggacgcaaagattgataatcattttatggttttacaacgggttccaacgtaaaaaattcatcgtgtgccaatgatctacccttatatgttccaggggagaattttggctccatatgaccgttattctattatcctgcagctgtcaaaatgtttaaaatattcaagcttattataacaagctcaggtttgaaaaaagagacgcctctaggtcaactacggaccactcacgccctgcttacttaacaaatgtaatttcggactgaacatcatatgccttatgctgagaaaggagc

SEQ ID NO: 38568 - DNA, 500 bp, Glycine max
  Clone ID: PAT_MRT3847_134828C.1
ctgcaggaccggtccgaattcccggtcgaccccgcgtcaccaaaaccaacacaccgaaaccaaaagtaccaaaagcaaaacaaatccgtataacccaaacctaagagagattccataggacaattttgtgtccgctgctaaatctcttctttctctcctttgttcctctcctcgaagaactcagatcactaccaccagcaacttccccgagtgttgtttttcactttttcttctcagaatccactctcttcgccagatcttgcttccagtgctgaagagaggcaggaaagacatcatagcaaacacttaatcactgctagagaaacaacaaaacatgatgactgggggtggttgacacttggcagtctgaagagctggtcagaatgttgcatggccaaggaggaggggaaactgatggaaagaggtgctgcaaaaatttcttgacaaacaattatacacttcaaggcataaactctccaattaattagaaacaacatttg

SEQ ID NO: 38569 - DNA, 481 bp, Glycine max
  Clone ID: PAT_MRT3847_134829C.1
cccacgcgtccgcccacgcgtccgtccctctcactcacttttgctctctgatttcacctcaatgcaccacactgcacgtaagtactcactacctttggctcttctttactatggatgaagctgcaggcagccaaccctagcttgcatatcccctcactctccatttcagccgcaagccacgcaccattcttcatctcttatagttttacttcatctccgttcatagcatatatattattatgcgtaagtgaaccaaccactcacctcctcatctccgaccaccaccagcagcctaaccagtcaggacttgcccgccatgaaccaccatacatgcgtgaaccaactgcagtgacttcctctttaaccaacccttgtgaactataggaaccacgtgcagtagcgaatcagcgaggttaattaggcaaattggcaaaaatgcaaagaaccccttctcgctaagccaatctgtcggtttagcgag

SEQ ID NO: 38570 - DNA, 960 bp, Glycine max
  Clone ID: PAT_MRT3847_13482C.1
tcctcgacagacgcctccctttttttttttttatatgaaaaataatgttgattataccactaattaattaatcactgtctgaattaccaaaaaatagtcactgtctggcacctacgttaagttttcaacttacagatgcacatacaaattctcaatagttatctaactcaagcatccaccaccgtcgccggcgatgtcaccggaaccgggatcctgcggcggcaaataagaacgcgatatgaggctgaggagaaaatcagaaaaagcacggagaatgaacttgtgcgtgctcttcgggttgagcgcaagatagcaaagaagaagctcgtgcagctcgcgccatttggccgccacgtccatcaactcgggacgcgccgccaccatctcctccatcgactgccggaagtccgcgtaagggtccggcgagtactttcttaccgcaacgctgcggtccaataacgcctttgcttcgctctcgtcagaactggacaaaccaagaatgagactcttgagttggtcctgtattttgtcgatggtggcggattcgtctgccggcaccggtgacagcgaggatgaggatgtggtaaaacagtcggcgtcggtggtgttggcggattcgatgatggagttggagcggccgggggaggtgaagaagaaacgttgggaggcaaaagcggtggctaggtcggcaggttcgggttcgggtccaaggctcggaaatgggttttgtggggtcacggtactgcgatcattgtcaaagttcggggttgatgacatggcggctggtgatggacggttgtgattgtgatcaacggtcgaggaagtggcggtggggattgtcggaggagatttgggtgtgaacggttgcatggaattggagaaacataagttcaggttgaagcggctaaggctgttctttttcttgttcgcggcgtgttcggacgcgtgggtcgacccggg

SEQ ID NO: 38571 - DNA, 182 bp, Glycine max
  unsure (1)..(182): unsure at all n locations
  Clone ID: PAT_MRT3847_134830C.1
ttcttctcttgcggctagngntttagcgcgnttcttcctanatntaangaagangggtaagganaangttcacatcagtatnggggtcattggccatgtcgactctgggnaatccactaccacggncacctgatttacaagcttggnggnattgncaacgtgntatcgagaggttgnnaaga

SEQ ID NO: 38572 - DNA, 226 bp, Glycine max
  unsure (1)..(226): unsure at all n locations
  Clone ID: PAT_MRT3847_134831C.1
anggagggttttttttttttttttttttatatttttttattagcatatttttaaaaacaccctcctctggtttattctcttctactttctacactggcccagggttaaatataaagaggaggtaagctgggntgtagtacacgtgctccaccagctttggtgtttaaaacaccccctttacgcttaccttcgaatttttaaaaaccggtttcgctgattaaacccc

SEQ ID NO: 38573 - DNA, 221 bp, Glycine max
  Clone ID: PAT_MRT3847_134832C.1
atgctcgagcgcatttttctaattcaaaagccatttcatttcataagccaaattacaaagtggagcatttacactaatggggggcaccctaattacaaaatctttatcttgatcatccttactaacataatttccctaatttttatgtaattctctacaataaaacaagaatttgctcactatactcattcattcatatttaatctcctttttatttcctt

SEQ ID NO: 38574 - DNA, 245 bp, Glycine max
  Clone ID: PAT_MRT3847_134833C.1
ggatatttgttgcgaaattttaaaattggagggaacaagcaaagtcgaagcggcgcatggcggatccggcagatccaatcattgaagtagaagaagtagaggaggatggtaccacgcaccaccctgctgctacttgacacgagttttttgatttatcaacgacagctgatccgagttacataatctccttgataagaaagcatttgccgttggattctgcttctcggagaagcttgagagaagtt

SEQ ID NO: 38575 - DNA, 304 bp, Glycine max
  Clone ID: PAT_MRT3847_134834C.1
cccacgcgtccgtagaagttggcctagtttttaatccaagtaatttttctataataaaattgtgggctagtctggtctttatctttctggtgttcttttcagtatttcaagaattattgtcagggtttggaatatgagtttgtaagggttgtgatatcctagatgtgaaatagtttgaggaaaataataagagaaagaaattggatggattaaactagaagagaaattgttaatatttttatattaatttaaaaatgaaattaactttttactttattaatctttaaacttgtatattattatt

SEQ ID NO: 38576 - DNA, 350 bp, Glycine max
  unsure (1)..(350): unsure at all n locations
  Clone ID: PAT_MRT3847_134835C.1
tacggctgcgagaagacgacagaagggaagcacaaatcataaaatagtagcatagaattgaaaagggaaaaattacttcaaaaccccatcttgaattcaacaattgtaaaactaaatgacaaacataaatttcaaattacaagttttgactctcagatttcatttcccctaataagtccaatgtacattcccattcaaacaactaaaacggcagaaatgactctggtctaaggtttaccaaatcttactagacattgaaagcctaatcaacagccacaattactccgaacctactttattctaaagtaaaatgtacacttgaaaccaaaattgtagtcattcccannnaa

SEQ ID NO: 38577 - DNA, 683 bp, Glycine max
  unsure (1)..(683): unsure at all n locations
  Clone ID: PAT_MRT3847_134836C.1
ggctctagtggtgctaaagtcgaacttaatcactctgtttctctcgttaccgttctctatctatgcccatctcttcaggtaagcaataatttctgtttgttgtttatatgtcgttttacaccactttctgctctcatactcgttcatcgatgggtataaattagtgtgttgaaattgcaaaacagaaaatgaaaaactggtgttgtgaattgaggcatcgtaaattgactctttaagttgtcctcaatgaccaaacttaaggccactcctattcttctattctgttattaaaattgtcggagtatttctttgtggttattgtaatattctcattttatctcttaattagagagacaactccatggccatgagtttcttgtcagcatatagaatacaatgatgcttaatatcatattgctaaattatggatagctttagttttaccatgtttgctacttttgttagttttgtaaacactactatcaataactattccatcagtctgaaataaaacatccccccataacatgttttgaaaacaaaaaaaaatgtaacgttagcctttacatggtgaaaatacgttagtttgattgtgttttttggttattatagcctgttangtttcacatctaggatgtgattttaaaagagctagcttccacattctaaaagttatttcttac

SEQ ID NO: 38578 - DNA, 450 bp, Glycine max
  unsure (1)..(450): unsure at all n locations
  Clone ID: PAT_MRT3847_134837C.1
ctgacatcgtcgcaagntccaataaagtcgttccactctcgcaggtgacatatctaactaagggggcttttactactggactcgaactacttccttactgccttcactgggaatattaaatgctgagtctgtagcttaacaaaccacatcttacattcatctttattcaacaaactatcgggtcctataccccatggtcctaccacaccttctccacattactgaaagtctgcactctcatcataatatcccatcaaaaaatcttttcttacaatcattatgccatgacacatagctgttttgattaaaagcttacctttgcaacattattagacacagtacaactggaaataatttgatataaaacagaaaaaccatagcctagactgaccattgcatatagatcattacgcattctataacactagtcagtgaaactcaaaccatacc

SEQ ID NO: 38579 - DNA, 310 bp, Glycine max
  Clone ID: PAT_MRT3847_134838C.1
ctccgtccactcgtccggattattacaataatcatacaaaacggggcccaattctgggggaggttattacatggtgggcgcccatcaacaccccgaccacacttctgtgcatggctttctgaacttcatcatctttacacatcccaataatatcacacgacaacgctcatgcgtatagttccactaggctcaccgacgtggaggtcataccaatcatcgagaagtcgctgctgaaacacgacattgttttcatcgcgctcagtttgtttgatacaatcgtttcaaatcagcaagcacactcttcccatta

SEQ ID NO: 38580 - DNA, 124 bp, Glycine max
  Clone ID: PAT_MRT3847_134839C.1
ctcgcgaacagtgtcacaactatcccaaataagacagttgttaagataatttgaccttcacttcttgaatttgcaattaaagtgcaatagaggaatgtttcacctgtttctcttggaccaccag

SEQ ID NO: 38581 - DNA, 390 bp, Glycine max
  Clone ID: PAT_MRT3847_13483C.1
gaggttctaaaaaacccttccttttgtgcgctgtagcgcttgaacccttgaggccaattcaaccataaaaccctttaggttggcccataaaaccacgccccccagtaaacccttaaaaaaaaaaaaaaaaaaaaaaaaagggtaaaagggtttaaatcctttgacccaaataaaatattcaaatctttttctatggggtgggaaaaacaccaatacaatggtggtggctgaaaaaggggattccttagtctaaaattgtttggaattgcagaagaaccagataccccattattggtcttatctatctatctggctatattctatttatcttcttattggagttctcattgtgtctgatttcaaggatttgtgttggtttttgggtaacac

SEQ ID NO: 38582 - DNA, 420 bp, Glycine max
  Clone ID: PAT_MRT3847_134840C.1
ctaagcttccaggctcagtttatacttcactggcttttttatttggtgagaagaatccatttggtgcctctcgtatccacatggtgcatgttgatgatgtagcacgagcacatatattcctgcttgagcatcctaatccaagagggagatataattgctcaccattcattgcaactgtcgaagaaatagcagaacttctttctgccaaatacccaaaatttcaaataccaacaccagacgaggtgaagaaaattaatggtcccaagcttccacatttaaactcgaagaaacttattgatgccggatttgagtttaagtatagcttggaggaaatgtatgaggatgcaattgaatgctgcaaggaaaagggtcatctatgaatcacgattcatgaagttaataagattagtgatagtagta

SEQ ID NO: 38583 - DNA, 371 bp, Glycine max
  Clone ID: PAT_MRT3847_134841C.1
cacacttgtacttacggctgtagatgtggcgtaccacttccaatggtggcttcgaccaaggaagctatctcctagtggtgaaagttaaagagccctgtgctgatgtccgctggacataaagaaacacgacgactgcatagttggaatatggtttgcaaacagacagaggattcataggggaggactatggaatgaaaatcaacagggctcataacgttactcatgccccagagagagatgagagggagggaaatgggctcttactgatataacttggctgtagattgccagagagggaactgtacaaagcgcagtttggtagtgggctaaactgctaatgtgatattagtggggccgggggacattcttta

SEQ ID NO: 38584 - DNA, 240 bp, Glycine max
  Clone ID: PAT_MRT3847_134842C.1
tacgggcgagaagacgacagaagggccatccaaaatataaaataaggaaatagataaatataggcaaaattttacatttaccatatccactactatatacgtgagtacactagtaaggagacatacacggaaaagagtgagattacaatcaaaatactgattcattttgtaaaagaaaacagtcagatttacttcttcatacagcaagcaagaatgtattcaatgttgacaagcatctac

SEQ ID NO: 38585 - DNA, 430 bp, Glycine max
  Clone ID: PAT_MRT3847_134843C.1
aaaaaaaaaaaaaggggttttggctttaattccaggggggaggaaccaggttccagaaaaccttttggggggacctttggaggatattggattccccacagtttttatttcccccccttccttttttaatttgcaaaaactttaaaccccggggtccccttccgggggaccgggttaaaaccaggctgcaaaatgtggaaaaaaccccaagcattggcgggggtacccccaaacagaaaaacctgccccctgttgtctttgaaggaattttaacccttcccccccttttaaaaacccccccccccctttgcttgcgggccaccccccaagccagccaagccgccaacccccacccaattgtcccccccttgggggctgcccaggcggttaattgggttcacccccggttgaaaatggtggaacaaacccc

SEQ ID NO: 38586 - DNA, 1141 bp, Glycine max
  Clone ID: PAT_MRT3847_134844C.1
cttaatggtacaattcctaagcaattgggaaccttaaatcttgtcaacatttcctttcttggaaaccgtctaactggtccaatcccaaaggagcttggaaacatcaccactctcaaagctttagtattggagttcaatcagttatctggaagtcttcctctagagcttgggaatcttacccagattgaaaaactgcatctaacctccaacaatttcactggagagttacctgcaacattggctaggctcacaacattgaaggaacttagaattggcgacaatcaattctctggagcaatacccaattttatacagagctggataaatcttgagatacttgttatgcaagggagtggtttgagtgggccaattccttctggaatttcaattctgagaaatcttactgacttgagggtcactgacttgaatggatctgattcatggtttccacaacttaataatatgacaaacttggtaacactaatattgaggagttgcgatactattggatccttgccagataatcttggaaaaatgactaatttggaagtattagatggtagctacaacaaatcaacgccagagaatccaagcatttttgctgatcttcggctattagatgtgagtttttacagattaactggaccaattccaagcatttttggtgatcttcggcacttggatatgttttttttagaagggaatcatctcgctggatcgctgcctcggttgatagataaacctcactatgtagatctctcttataacaatcttagcatcggcaacaacatagaggagctgcagtgtcgacaggaaactgtgagcttgtttgcttcattttctaatggaaacagcttaggaaatgtttcatgtttgtcgaacattccgtgtaaaagttgtcaaagatggagatagagattgtcatggtggtacaaaaattatgtccccaaaatggagatacctgcttttcaagagagaaaacaattacaagaggtgacaaaactggcggagcagtgacagtggatgttaagttgtaattcagtagttagttgtattagaggctgttagtgatagttatagactttcctatataagggagtccctgtaaagtgcagtaagtgaataatagaattttgcatct

SEQ ID NO: 38587 - DNA, 402 bp, Glycine max
  Clone ID: PAT_MRT3847_134845C.1
gtttccaacctatccacctaaggccaaacctttctcacaaatggaaaaaccgcaacgaaagaaagaagaaactaataaaagcaaaaaaaaaaaaaagagagaaaacatctaaataccaaaatccccctctcaattcattttctttaacttttgttcagcaaccacaacaacttcttcccttcttctctttctctctctaaaaccctttttctctctagattatttccttcatcattagcttaattgatcaagctttagtcctttcgtttgcttcaccccatggatctaacattcgcaccttaaaagagatccttcaaagttcagttcaatttcggatcaaagtggtggcgttccgacactgataaattaaaattgagaggagagagagaaaaaaaaatgaaa

SEQ ID NO: 38588 - DNA, 446 bp, Glycine max
  Clone ID: PAT_MRT3847_134846C.1
atcgagacgccaaaaccaaaggacactctttgcgaaacccttgatctgaaaaaaagtaccaatggggaggccctccaagacgcaggtttcgaacgaattttcctccgaagaggaagaggaggaggcctccgccgccgccgccaaccacgagatcgaagatgacgacgaggagctcgaagcggtggctcgctacgttagctccgatgacgacgataattcgccggatgaagccgctgaagacgacgacgaggataaacaggatgagagtaatgttgatcctgaagttagcaagcgtgagaaggccagattgagagaaatgcaacaattgaaaaaacagaaagttcaggagatattggacgcacaaaatgcgaccattgatgctgaaatgaataataggggaaagggcagattgaactatctactacagcatactgagctgtctgctt

SEQ ID NO: 38589 - DNA, 314 bp, Glycine max
  Clone ID: PAT_MRT3847_134847C.1
tgtaagacgggtacttgcaggcctgacgatgtccttgtctgttctttgcaatctcggcttcacccgagaaagccatgccttagactaggatatctggcatgccgtaagggcaaacactaccatccgaagtccattgtgtgatttgataaagcctgtcctagcaagacaagtaatggatgacccccctatgcactttgttcaaacacattacccgctgacctttttctatgaaaagaacttcatccactcaatacagtgaaagagcattacagctagtcatctatttccacaaccatgggggtgaaagacatggt

SEQ ID NO: 38590 - DNA, 344 bp, Glycine max
  Clone ID: PAT_MRT3847_134848C.1
aggaaggaacggaaattaagttatggagaaattgtgggaactttaagaggaacattgtgggcgctgggtgaccatcaaataaaacactggatatgctggagaagcaactgaaggcatggatgaacggggggcgctacaactactgtaatggcaactcactctgaccaccaaaagaccctggataatctcagaactgcaatgaacaacaccggcgatctctgggctggcaatgtggacaaccaaaggttcagagatcttaaactgagttttgaatgaaaggaaaccaatacagatctcatagggacaagaaatcacaatcacagctgatttacagtaaaaagggt

SEQ ID NO: 38591 - DNA, 682 bp, Glycine max
  Clone ID: PAT_MRT3847_134849C.1
tttccaacaagttaacagccactcacttccaaaaaggaaagggttttttcagttattatttttattttccttacattcttcacactatcccctttcaccacaaaaccctaaacccgcattctccaatccaattcaacccctcccttcccatgttcttctccttctccttgcacccgaattcaacaatctcttccgatgtgacaccgcaagaactcagagcacggccacttgttccgcaagaagaagaagtagttgaagcgctgtgattcgtttgattttaagggtagcgactagcgagtgagaatggaagcgcgtgtggggatggtggtggaagggggccagagaaccctcaacgccgacagcggtggtgccgcgaaattcctggtggcgcagaacaaccgccagctcgggacggttcaccagcttctggccggcggcatctccggcgcgtttagcaaaacctgcactgctccccttgcgcgcctcactatcctctttcaggtgcaaggtatgcattctgatgtggcagcattgagcaaccctagcatattgcgtgaggcatcacgtattatcaacgaagaagggtttagagcattttggaaaggcaatatggtgactattgctcatcgtctcccatatactgcagtcaacttctatgcttatgaacgctacaagaatgtaa

SEQ ID NO: 38592 - DNA, 459 bp, Glycine max
  Clone ID: PAT_MRT3847_13484C.1
aggctcgagccgcgccacttctgaatctattgaatcaacaattatgtcggacgaagagcaccatttggagtacaaggacgacgccggagcctacaaagcctacaatcagcatgccgggaccatccgcgagaacggctacatcgaaaacaaaggccggccctgcaagggttgtggaatggccctacctcccaaaactagaaaaagcactcggcacttctaagaagaaactgctgggggaattgaggatcaactgccaacacactttgcgatatatgtgccaaaacagagaactgagatgtggctaatgtgaaaaaaactgacaaccaacccattgataaccctggggatggaaaaaagagtctgcttacagaacctgtttacactgatgatgacataaggccatgcactggtgatactccaattactccgataattgatggataagaggatggccttgat

SEQ ID NO: 38593 - DNA, 303 bp, Glycine max
  unsure (1)..(303): unsure at all n locations
  Clone ID: PAT_MRT3847_134850C.1
gaagacctagntcactatgcagatgaaagaggaggagccancgnnnggggcaagaagtctgaanctgatggcatggaaaagaaaacctggcncatgcctagaganaattaaaaagaaccagaggcaagattacttaaatggtgcagtgtctggctcggtgcaggccactgaccggntgatganggagctcagggatatataccgatcacagagtttcaaaggcggaaatangcagtcgaatcgtgaatgacagtctgtatnactagatgttnaactcctcnaagttnaccaggacagnntttt

SEQ ID NO: 38594 - DNA, 373 bp, Glycine max
  Clone ID: PAT_MRT3847_134851C.1
catacatggttgaggaatggtttgattgcgtggaggaggtggatacctttgaggaagtttctacaagtgcagcacttaatggtgtagagggtctggactatatggacagaattcctcctgccacatctgagggttaccctcatgtgctttcacgcaaaaatggcgaaaaaggcaaaaggagatttgcttctggggatggcgacgagacgacattgatttccggaaccagtgttaaagaagctgacaacaagctaatacttgaactagccaaaagagctcctacatagcccggccttgaaagtcccacggatgagaacctatctcaccgaaaaaatcttgacaacctacaacgggctgctccactactctccct

SEQ ID NO: 38595 - DNA, 168 bp, Glycine max
  Clone ID: PAT_MRT3847_134852C.1
ggcacaagtgagtttgtcgatcgagatcactcgcaccagtgtgctgaagttgaaggtccttgtattctgcgttgctgcgcttctggcagcatggcactgccatgcgtatcatgagtccgctctgcgaatgaacacatggctatcgcgcccgtcccctggaggtgtcca

SEQ ID NO: 38596 - DNA, 334 bp, Glycine max
  Clone ID: PAT_MRT3847_134853C.1
ggatgccgcctcaattactgagaagacccatgacagcatcaacaactggctctctctccttatgaagagcggcatattcaccctcggatacaataccgttctctaatctcttacgacctccacatggaaattgattatcattgctaacaactgcccccctttaacgaactcagagattgaatactatgctatgatctctaaggatggcgttcatcattactatgggaactatgtggatttgggcactgaatgtggttgatattacagattgtgctgccttaccattatagatcctggtgactcagatatcatccacacactgcctggagaacat

SEQ ID NO: 38597 - DNA, 287 bp, Glycine max
  Clone ID: PAT_MRT3847_134854C.1
cttgatatcatcctggggattggcaacgggacaaatactttggccttagctgtttgggatctgaatctaaactccctaagattttaataaaaaccgttgtacaataacaccttttttctctagataaccatacacaaattgttaactttaaaagcaatagggtgttaaagaaaacctttgactcccccggccttaaataccaaacagggttattggcctgatgtgaaaaagcccccaccaaccgaatgtgattcttgggcattttatctgtttcattcattcaacca

SEQ ID NO: 38598 - DNA, 489 bp, Glycine max
  Clone ID: PAT_MRT3847_134855C.1
gcacgagacactttctacctcatcataatcctcgtcgtcaccatcttcttctttttccttcatcctctggctgcacaaagtgaagcttcaacctcccatcttccctgtgagcatgcagaaactcctgaatgggtgtccttacttccttaaggacaaaccttccattatccctataagacatgaagctaacacaaggcttcccactcctccctatgctcgaaatcggaggagggtattccaccccatcattcttcctctcattattaaccctaattgacgacctcgtcctccattcacaccaatcttccaaccctaaactctttgtgttttcataacattcgttctctctcacatcattttcccagcactcattactaccattcacctcgttattcttgcgagtcttcgacatcatcggagctctcaaagccaagcccttcagtgcacagatgcatgtttttgtgcggtgttgttgttgttggagtggtg

SEQ ID NO: 38599 - DNA, 2468 bp, Glycine max
  Clone ID: PAT_MRT3847_134856C.1
acggctgggagaagacgacagaaggggataccaccctcaaataatcaaacttatcgtatgtatgacttctatcttatttcaacacgaagtgcagacaaaagcagcgaggtttttcataacaaaggagaatgaaggctttttcagttaaggttgaggaaggaagggaaggtaaaaatggcaacctttctgttggtcctgtgtaccgtaacctcctctcagaaaatgaatttcctccaatggatcctgatttcagtaccacttgggatattttctgtgtgtctgtcaaaaatcatcctaataatcgtatgctgggaaagcgtaaaattgttgatgaaaagattggaccatatgtctggaagacatataaagaagtttatgatgaagttctgcatatgagttctgctttacgagcatctggttccgaacctggcactaaaattggaatttatggatctaattgccctgaatggattgtggcaatggaggtttgttctgctcaaagctttatttgtgtgcctctctatgacacccttggacctggtgctgtaaattttatcatagatcatgcagaagtagattttgtgttcgtccaagataagaaggttaaagagcttttaaatcctgaatgtaaatcctcaaagcgactgaaagccatggtgtgcttcactacattaacagaggaagagaaagctaaagccacagcaattggaattaagccatattcgtggcatgaattcttgcacttgggaaaagaaaacccaaaaagtacttttccacctcaagctcatgacatttgcacaataatgtacactagtgggacaagtggagaccctacgcgtgttgttttaacgtatgaaaacgtaacggctttagtaagaggaatggatcttttcatggaacaatttgaagacaagatgaccgtggatgatgtgtatttatcattcctacccttggctcatatccttgatcgcactattgaggagtactttttccgtaagggtgcatctgttggatactatcatggggatctgaacgcgctgagggatgatttaatggagttaaagccaacactatttgctggtgtcccacgggttttcgaaaaagtctatgaagggatcaagaaagcagtggaagaactcaatccagtgaggagaacagtttttggcatgctctacaactacaaacttggttggatgaaaaaaggatacaaacatagacaagcatcacgtttagccgatttattagccttcagaaaggtcaaagctaggcttgggggtcgtgttcgactaataatatctggtggggcagccttgagcccagaggtggaagaattcttgcgtgtcactacttgtgcctttgtatgccaaggctatggtctgacagaaacatgtggaccaactactcttggctttcccgacgaaatgtgcatgcttggtaccgttggtgctgtatccatatataatgaaataatgctagaggaggttccagagatgggctacaatcctcttgaaactcctccatgtggtgagatatgtgtgagagggaaaactgttttcactggttactacaaaaatccagagttaacaaaggaagctattaaagatggatggtttcacacaggggacataggagaaatgcttcctaatggtgttattaagattattgacaggaagaagaatcttgttaaactttcccaaggagagtatatagcacttgagcatcttgaaaatgtttatgggatcactcctatagttgaagatatctgggtttatgggaatagcttcaaatcaatgctggttgcagtagtagttccaaatgaagaggttgccaataagtgggcatattcaaatggtcacattacggctttccccagactacagaagggcgatcaactaaagaaatatgtgctatctgagctcaagttgacagctgagagaaataagctgaggggatttgaacatatcaagggggtcatattagaaccgcaagaatttgacatggaaagagatttggtgactgcaacactaaagaagaaaagaaacaaactactcaagtattatcaggtggaaatagatgaactataccaaagtttgaaagggaaaaaagcataacttctgagatttctaaattctagacacggatatgcctatttagtagtaccctgtaaccagttatttccgttccacaacccccatcgatatattgtcctagaagctcaatgctctagtattttgcgtgaggtattatgcagcagcaactagcaagtgctgaaccataatattacctaattgtcaaagtctatatatgtgtgtgtttgtgtgtgtatgactacgagaatgaacaatccatttcgagtgaagaaagtataaatgttgtcaaacctcatatgcccgcggcacgctacagcctacaggcatgttgaatataaaaactagtgagctcgccccagcccggggaattaattcccg

SEQ ID NO: 38600 - DNA, 205 bp, Glycine max
  Clone ID: PAT_MRT3847_134857C.1
ttctaagtttttttcttcttctatccgctctctcacttgatggcgccgggaatcggaggcctgcagctgacttccctcgccggcgaccggagaaccgccgccgccgactccgatgagctggaggacatgcggctcttggactcctacgacgaaatcgacggcggacgaggcggattcaggtggaggtcaccggaatgacctgcgc

SEQ ID NO: 38601 - DNA, 520 bp, Glycine max
  Clone ID: PAT_MRT3847_134858C.1
gatattaatgtgtgcttttttttgtttttttttttaacggagggaccattccaaaacaacatctcttttattaccgcacatgacaaacacaaaacgcatcttattggggaagattgtagcatacccccccctaatgggggggaacccccaagcaacttgcgaaccttgttcaccaccacgaacagcccaggggggaacagaccctggcttgagatcgtaggacttttacccttaggaagcgccaagggaacctcggggaacaccgttttcagagcacaatccaccgcgccggggtacggcggcgcctcctggggctccacactcatgttataaccctggtcttgatcacttcggggggggtggactccaccggcggcacgggcaaaaccctgaggctcgccaagacaagggtcccgaagccgttgcgcctttcgccggtcgggagaataatttatttgacctggccggaggacccccccaacgacgccgccaccagcatggcgcgggtgaccccccccga

SEQ ID NO: 38602 - DNA, 625 bp, Glycine max
  Clone ID: PAT_MRT3847_134859C.1
cactctggcaaattattgaaccatacgacggatccatccactagtccggaagccgctatgagaaaagctcgtgtctcagttcgtgcccgatcagaagcacccatgatcagtgatgggtgccaatggcgaaaatatggacaaaagatggctaagggaaacccttgtcctcgagcatactacagatgcaccatggcagttggttgcccagttcgcaaacaagttcaacgttgtgcggaggacagaacaattttgacaacaacgtacgaggggacccataaccatccactgccaccagctgcaatggctatggcatcgaccactgcagctgctgctagcatgttgttgtctgggtcaatgaccagtgctgacggaataatgaaccccaatttgctaactagagctattcttccatgttctagcatggcaacactttcagcttcagcaccattccccacagtgacattggacctcacacacaaccaaaacgcgtttcagaattaccaaagacctcaaaccccattgttcccatcacagccccaggactttatcgctggatccacgccaccacaactgccgcaactgattgcacaagcgctctatatcaatccaaattctcaggccttca

SEQ ID NO: 38603 - DNA, 126 bp, Glycine max
  Clone ID: PAT_MRT3847_13485C.1
gctcggaattcggctcgagggacattcaccacataatcaattgcctgcggatagtgattgctgcattacatgtgcatatgactcttgtgctgttgctttatctcattcacaccacttaaataacac

SEQ ID NO: 38604 - DNA, 366 bp, Glycine max
  unsure (1)..(366): unsure at all n locations
  Clone ID: PAT_MRT3847_134860C.1
ccccctccaaccccanaanaaaaancaacaaccgggggacatttaaaacacaaagcggccttccaaaccccctgagagcatnacaagactggcagaaagcctcatgcaaccgccgcgagaccaacaaaaaagcaagcctcttctcaaaaccactactccaacggagatcgagtgcaaaacccgtaaccgcaagttcccatcccttcaagcccttggtggccacacggccagccacaacaaacccaagccccaaggcgaagaacccaaaaaggaagccaccaagggcccgacctcggggaacaaacccaaaatgcacgtacgttccacacgcggcacagaaccccccccggcccaagcactcggggg

SEQ ID NO: 38605 - DNA, 2052 bp, Glycine max
  Clone ID: PAT_MRT3847_134861C.1
gaggaagatttcatttgagggaagagcattagaaagaaaattggtcaaagtctacaactcaatggcagcatgaatcatatacttttccacaactccatgcctttaaattacagaaaattacgttcacattattaaccacgacgagggctagcttctttgacttagcactgttcttaataattcatatagttgatatagcaagcatagcttaaagtagaagcatttcatcacaccattgcgttaatgatacctccctcaaaattccccacgcgtccgcccaaacatcccttcagctccatgatcatggatagatcatctcaaagcagctccgattcaccgactcgagagcccaaggtgttatccatcgaatgtcttaaaggaagctccaaaggcgacgagtggaccggcgacatgctccaaaccggcgatatcgtggaggagctccgactcggatcgacggcgaactcacagatccggtaccagtggccgttcaagggcgggaagagcggcgtgcagaagattctgcaggatgcgttcaaaaagaaggagacgtcgatcgttgttcgggtgcggcgaggatcggaggagctggcggagctgcaggcgtgcatcgtgcccaacgaattcaccgccaagaagaacttggtgctgcgatccatttctgacccgaattacgtggtcgggtttgtggatcggaccgaagcggaatgcttcgagattcaagcttcaaggaacacaaggatggtaaatgcgctaaccaggaccaagctacaagatggatatgtttcatattcatgggagaggaggatgcaggaaatgctatcagttcccaattctagcaacttcctttccatattattccttcccaaagcttcagatcgggtagcttctcgctataatgatctggaagacaccctagccagggcaaatgcgtggctcaatgcaggtcaagcctcaggtgtccctattgtcttcatgaacatccaaaccgagtccctacttactaagatatctggagaggcttcctccactgtgaacgcagggtcattatctgacttatctaacttagcaaatgcaagcctttacggctttgaggattaccatggaatagatatcggagttgttcgagctgttcgcctatggtatgctccggttgcaggagagttctctattgagatcaaactaaaagaggaagatgcgaagcttggctttgccattagtcgaactgaagagggatttattttcatctcatcagtgattaatcaagaaaatgtaccggccacacgatcagggctgagcaatctttataaactagcaacggatacttgtaggatgttggtagtttcaagagtgtcaaatcaaaaagtccttccatggatggtttcatcaacaggagccattcggtgttatgacactgtttcactcagccagaagctttccttgcatagacacaccagagttcccattctcctacacgtcttcctttgggaccgggctttggtttcttcaagtggaggaagctctagatttagggctctgtcttcttctgtgttgccatctcatgcatctgaaattgaagtagcacgccttccagatgaaactcatgtactgccattgccccctccaccttctgaaccaagtgaaatttcgcactccaggcttgagagagacactgcaggggaattctcttttagattccacgattttgccttgtctagcaactgggtatgatgttgatataatacgtaattgcatgtcaaattaatgattgttatgctattgtagtttgttattgtacatatagtatacattgatttagacttcgggccttcgattttgttttgcttcattagcttgtccacggtaaagcagaataatgtagcatatagaattggttagttatctaggattttttaaaagcatcgtgacctttttagcctttggctttccctctatagttttgggtgtggataataaattgagagaagttattggtttcctactcgggatgttttgggtcaggaaaaatttatacacttgatatttttaatt

SEQ ID NO: 38606 - DNA, 165 bp, Glycine max
  Clone ID: PAT_MRT3847_134862C.1
ggactcttctctagaagggcaatatgcaaacgacgatgctacaaagttggttgagcttgcttcaaaatgtcttcagtttgaggccagagaacgacctgaaattacgttccttcttactgccgttgcgcctcttcaaaggcagaagaggtagcatctcttgtgtta

SEQ ID NO: 38607 - DNA, 520 bp, Glycine max
  Clone ID: PAT_MRT3847_134863C.1
caaatcaatttttgacttgttcgaagaaatttgtctccaattcagagatttcatgacagagtaatttttaatccccctactttttagcttttaggatttttttatgggctaaaaatccttgggatatatgtggtagttgcctttgtttatggagtaaataattatatgtttgccttggctgaggctgacccgtcaacattgaaaaattccatgaaagattgtagttgttaggtttagaactacttcatatcaatgttgttaatggcggatggcggttcatggcggaaagtaaaaaatcccccataaaaatatggcggatggcgtaacggaaaatggcggatgtcatggcgggcccaaaaaaaaaacatatatataaactcattgaaattgaaaaaaacaaaggattgcattcaaataaactaaaaaagtttcatgagttcataccataatcaagtacccacccccaataaactccttaaagagttcaaataaactcagccctttaaaagagggctggccc

SEQ ID NO: 38608 - DNA, 444 bp, Glycine max
  Clone ID: PAT_MRT3847_134864C.1
acacttcaagagataaacaaacggaagtatacaaagattactaaagccacacactttctggcataagatttgtagataaacacttgcgaacctgactatggtcaagccggggcaggtatatgccacactagtgcgctgcaacatagcagctacccgaatagaagacatctacagagccaggcaagacatgtgaccatgggaatgcatatcaaataacaatcggagaagctacaaacactgccacggcacatcataccatgtagcaagcatgtaaggggcgctgatcacactaataaacggctcacgtgagctgaacaaaagggaccaaactgtgggcatcaacgactccgggcaaaaaggcctacacaaacgccacctgaggcgaggcatgttgaagtgcctgatccttccttgccgctccgagagacacccttcacagagaaa

SEQ ID NO: 38609 - DNA, 367 bp, Glycine max
  Clone ID: PAT_MRT3847_134865C.1
gtacagatgccaaaagacgacaacttgggattctcactcttcatttcttttcactctccctccatcatcgacaggactccctttttgtttctttcccctccttggcgtgggttctggtgtgacgttacagagaacagaggcgacacaatgcttgacacggaagcacgggttccattgtagatgcttattcgacacgcaatgtgcacatgtctgctggaccgatggtttcatctctgctcagtgccgtggccctcttcgcatatgcttttgcatcatgccatgttgatcgaatttaccactgccataccagccatgctatacactcaccctcatctccattgatatctctaacccacacatatttacc

SEQ ID NO: 38610 - DNA, 188 bp, Glycine max
  Clone ID: PAT_MRT3847_134866C.1
ggctcgagatataatcctttttggaggcgccgattttgtcttaactgcagtcaatctgattctaacgggggggcggtatgcattggtcactccgtcgccttctggatccgtcgatccctctctgtagcttcacctacgcacaccctgtaatggcgaccacgagatactaaaaagatggacaagaggac

SEQ ID NO: 38611 - DNA, 165 bp, Glycine max
  Clone ID: PAT_MRT3847_134867C.1
gtactagcttggacctctaagctggcgctgttgttttgtcttttaaattttttttgccaacgaacgggcaagcggtcaaaaaagcatacttagcttgtcggtgccaaataccagccaaaatttagaatgagtgtttgctcaagagcacaatcatagtactgaaat

SEQ ID NO: 38612 - DNA, 400 bp, Glycine max
  Clone ID: PAT_MRT3847_134868C.1
gctacacagagttagaattaaattagattataagtaaacgtagagttgactgaaagatacgaatggaaccgaacaagtgaaggattgcacaacacatagagatcggatgacaaaacattctcactacgaacaaaatgattgttaacagcaaatctacgcaatcaccgatgatcgtcaaaatcgatccttacatcgtattcatgacgactcatgctacaccgataccattcgacgatcacgacgtcatcaccaagatcgcaactcagccgactcagattcgcaaagcctgtactatcttcaaacgctgttgcgaccatcgcgattccggactcggcttcttaagaaatgccagtaccaacgtgcaaatcgtacacttaagtctggatgatcatttggcacg

SEQ ID NO: 38613 - DNA, 620 bp, Glycine max
  Clone ID: PAT_MRT3847_134869C.1
ccacgcgtccgcgaagagcactacacaaaatgtgaacttatcccaccgattatacggatgcgggaagacaacaggaggggacgaaaaagcgagagtaataatcaaagtgcctcgagctgtgaaatcaccaacacggaatcaaatcaacacatttgaatggaaggagagaaagacgagtgcgggaggaaccttacgtgaaggtgacaaaccgccgcgatcgcgtagttgtcgttgacaccgcagatgctggtgtcgtgatttggaaattacaaaaaattagggtttaaaccttctttttgatgaaacggtgactttaggagacaataagaagcaactcaggtttaagaaaagcggtgagtttaagtgaacagatctcggccacacattttatccaacggtttagctttctcaaattgcagacgatccgttcccgttcagtggtggtggcccactggcggctatcttccatgggtaaaacataaaaccatgacaatggtgtttgggaaggttggaacctcaaaaacaaaaaaaaaaaaaaatagaggatccaagaagaaacccctaaacaggataggtaggatgcttaaacctcaatcgattctctcactttccatccactt

SEQ ID NO: 38614 - DNA, 502 bp, Glycine max
  Clone ID: PAT_MRT3847_13486C.1
aaaaggcataaacgggggttgttattggagaaaaaaacgcgatcgcttttgcatttttactgggaaacataagatgaactaaatccaaagggaaagggagaacccctttttttttttgaaaaccgagagcttccaaatacaatagggcaaaagttcaggcaataattacccataaacatgcataaagtttttttttttcaaaagtcccactttgattaggaaaccccaaactttttttaattaaataaaaatactggtgggaattcctttgaaagtcaacccttccttacttgaacgatggaacaaagtgtttggcagttgaactggcccaatccggtttttaaaacttggatcactggtccttgcattgatttttccttcaattccagccaatttggttccaaaccttttgaaagcttttaaagcctttttatcaggagcccaatttggagtctccctttttccaagggatattttataaaaagcatgccttgacaatatt

SEQ ID NO: 38615 - DNA, 1518 bp, Glycine max
  Clone ID: PAT_MRT3847_134870C.1
ctcgagccgattcggctcgaggatggagtctctggtaatcatgctactaaggaactgattcattttcctcttcagaactctccattaaggaattaggattgcttcttatagagaaatgcttacgaagattgaactcgctcagtttgtacataggagagttctgaagaggaaaatgatggagtctctggtaatcatgctactaaggaactgattcatttagcatctaatggggcaaaatttatagatgaagtactcaatggtcaaaatgaatgctgtctggagaattttcgcatggataaacatgtattctataagttatgtgatatcctgcaagccaagggtttattgcgtcacacaaatcgaatcaaaattgaggagcaactgggcatatttatgttcattattgggcataatctacggacaagggctgttcaagagttattccgttattctggagaaactattagtcgtcactttaacaatgttttgaatgctataatgtctatttcactggatctctttcagcctcctggctctggtgttccttcagaaatctttgaagatcctagattctatccatattttaaagactgtgtggggagaaattgatggtatacatgtaccccacgcgtccggtgtagatgagcaaggaccattccgcaataagaatggtttgctttcacagaatattctggcagcttgctcatttgacctaagtttcaatatgttttggctggatgggaaggatctgctacagacttgcaagtttttaattcagcaatcacaaggcagaacaaattgcaggtccccgagggtaaatactacatcgtagacagcaagtaccaaaatgtgcctggtttcgttgctccatattccagtactccctactactccaaggaatttctcagcgattaccacccgcaagatgcaagtgaactgttcaatcaacgacattcattattacgacatgtcatagatcgaacttttgggatcttaaaggcacggtttcctatattgatgtctgctccttcttatccattacaaacacaagtgaagttagtggtggctgcatgtgcattgcacaattacattcgcagggagaagccagatgattggcttttcaagatgtatgaagaagggtcatttccaatggaggaatcacaacccccattggagatggaagtaccaccaaagatggatgttgagacccagacacagccatcagttcatacttttgattctgaagaaattgcacttgcttcacagttaagggactccattgctactgaaatgtggaatgattttatccaatgatttcccccccatgtaaatttctttagttaagcttatatatatgatcagattaggtttgattttttctcagggtctacagtatatgagactatgttgccttagtttacagtggcattttgttcataaaacagaagtatgcatgtagatcatatctcatcacataagcttttgcttttaattcttataagatggattataagcttc

SEQ ID NO: 38616 - DNA, 730 bp, Glycine max
  Clone ID: PAT_MRT3847_134871C.1
ctcgagccgcaagttttggattcgttcgacttcgactccaaaagacgatgacgacgtcgtctctctggtcaagtaggggctattcactctctattgggccacgcgtccgcgaacgtcgtctctctggtcagaactcagaagcagtcctaattcctcaatggagagttctgaagaggaaactgatggagtctctggtaatcatgctcctaaggaactgattcgtttggcatcaaatggtgcaaaatttatagatgaagtactcaatggtcaaaatgaatgctgtctggataattttcgcatggataaacatgtattctataagttgtgtgatatcctgcaagccaagggtttattgcgtcacaaatcgaatcaaaattgaggagcaactgggcatatttatgttcattattgggcataatctacggacaagggcggttcaagagttattccgttattctggagaaactattagtcgtcactttaacaatgttttgaatgctataatgtcaatttctctggatctctttcagcctcccggctctggtgttccttcagaaatcattgaagatcctagattctatccatattttaaagattgtgtcggagtaatagatggtatacatgtaccagtaacggtaggtgtagatgagcaaggaccattccgcaataagatggtttgctttcacagaatattctggcagcttgctcatttgacctcaagtttcattat

SEQ ID NO: 38617 - DNA, 499 bp, Glycine max
  unsure (1)..(499): unsure at all n locations
  Clone ID: PAT_MRT3847_134872C.1
agcggttcaagaaagtgcaaacacattggtgcatattctagaataaccttactgaggaaatctatgtgggactttggtaanatagaatggggctgtggagagcagttattaacagtaccataccagaactcccttaccaagtatggactctcatttctttgatttttaccttccgccaaaataccctgatgttccaccggcaccatactatcattctgctggttggcggattaacattaatatagatgaagcacggaaaggttttccttaacctactaaatacattgacaggcacaggaaatgacatactgcatccaaaatcttttaccatccttcaagacctagggtcactgcaaggcttaatactcaactctaagacttacttcaatgaagctcgatatagatcagcaagttataacaactcaaagagagaaaaattcaatgccatacaatgagaatacctttttacttaactgcaagactatgatgtatcttatga

SEQ ID NO: 38618 - DNA, 206 bp, Glycine max
  unsure (1)..(206): unsure at all n locations
  Clone ID: PAT_MRT3847_134873C.1
ngtcgtancacgcgtacgtnngctcggaattcngctcgagnggatctttnccatttgattaagnaggcngtttcaattngnnagcntcttgngnggaacaggaatgncaaggactccnagttcnggttgagtcttgntgagagcagantccnccgacttgctcgctactacnataagnccaanaagctcccnccnntctggaagta

SEQ ID NO: 38619 - DNA, 488 bp, Glycine max
  Clone ID: PAT_MRT3847_134874C.1
cttaaacgtatataggattgaggtgtatactcctcagaggcaaagatgagtggtgttggatatattgggtccaagatcagcctcatatcaaagtctgacattcgttatgtgggcatattgcatagcatcaattcagccgattcaaccgtagctcttgaacaagttcgttcttatggaacggagggccgccgaggaagtcctgcagaggaaattcctccttctgacaatatttttgaatatatagtgtttcgtggttcagatgtaaaagatttgcacgtctgtgaagctcctgctcaacaacagtcgttacctcctcaagttcctaatgatcctgctattcttgggactaccgctcctcgaccacctagttttcagagttatgctcctccaccaccgatgggagtacaaccacctaatttcgctgtgaacccgttttatattcaacaagtagctgctgctgcttcatttcagcaacagccgcaatattg

SEQ ID NO: 38620 - DNA, 229 bp, Glycine max
  Clone ID: PAT_MRT3847_134875C.1
ctggtgccctctacacatgagtattcttggctactaccagatactgctatgggatgcaggccaatacagagcacacacagacactaccagagcgctgctatgctgttacttgaacaccttctatgatggttggtgaatactctacatggacttaacatgggtgacagctttgctaaccttgatgtggaacacacgacaattgaatcacccttgtacgctcagacaaggc

SEQ ID NO: 38621 - DNA, 814 bp, Glycine max
  Clone ID: PAT_MRT3847_134876C.1
ccacgcgtccgagaaaaaatgggagggtgtctaccatcctagctaaatccagaagataatggttcagctgccagcagtacaaatcgtttcatgctgtatgcgagagcactttcaatcacatggggagacactccagaatattggacatgggtacagcagaaagaagaagcaagtggcacgatagtagagttggctaagttgaaaagtgtttgctggctagaagtgcatgggaaatttgacactagaaagctttcagcaggaattccatatcaagtgttctttctaataatgttggaagaatcagctcaagggtgggaagttccaataaattttagatttgtccttcctggaggaaaaagacatcatccttaggagaattttaacaactcgagccgaatcggctcgagacatattccagtgggagagtttgtggcatctgaaaaagatgttggcaacatagagatctctatgtatgaatatgaaggtggcatgtggaagacagggcttataatccaaggcattgtcatcaaaccaaagaactaagaatcaagtagatactaagctatatataaaccccctctgccatagtaacatgtaatgaagtattttattcccatatttagtactctctgatctctagttatagaatgaatagagacatgttcactctagttggcatctagagatccaagaaagagaagaaaatatataaagatgtgataaaaaagaatgagatggagaaaatcgatatgcatttttaaagtgttctcatatcattactcaaataaaatacaatagcctgctgttttcttcc

SEQ ID NO: 38622 - DNA, 485 bp, Glycine max
  Clone ID: PAT_MRT3847_134877C.1
ctgtggtcgtccttttttttttttttttttttttttttttttttaaaagaacaataaacttgttattcggatttttaacaccggcacgccacggaaacagttggcttgggtttaatttacaccatgaatgaagcactgaccctgtgatcatcttaacatgccacaagccacattacaaaatgcatacacggacttgaaagaatttacccacacttgtaaggttactgagccgtgcatgcaatggcccaaaacaaatcccaaacacctggagaaaaattctttgactgaagctgaatttacatatgtttctgagagaaacccgaccccgctgttgcgccatgtgagagtgctgattccaacaccagaacccctttgaagacatttaaggccccaactgcttgagaagaccaacggtcaacgctgtgggccactaatcctaaatgggaccctagaacgattagcctatacattgtgggctggcaaca

SEQ ID NO: 38623 - DNA, 488 bp, Glycine max
  unsure (1)..(488): unsure at all n locations
  Clone ID: PAT_MRT3847_134878C.1
agttnggagtgnggctcgagctttcttctttccaagattctggcagttactgtcagattcattataaaagatgcagaggagaagaaggcctcttttaatccaaggccacttttcagattattcatcaactggcttctagatcttggttcacttgagcctgttactgatggtgcaaatcttcagattttaactgcttttgccaatgcatttcatgctttgcagcccctcaaagttcctgcattcagttttgcatggcttgagttgattagtcacaggagcttcatgcctaaaatgttgactggtaatggtcaaaaaggttggccttatatccaaaggttgcttgtagatctgttccaatttatggagccttttctgaggcatgctgaacttggagaaccggttcgtgtcctctataaaggaacacttagggtgctcttagtgctacttcatgacttccctgagtttctatgtgactatcactttacctt

SEQ ID NO: 38624 - DNA, 865 bp, Glycine max
  Clone ID: PAT_MRT3847_134879C.1
ttgcatagcctgcaggtttgaagaataccaaataaaacatgtggaaagcattgaaggtaattttgaaagaactggtacctctattgcaaattattattgtgtaaaactattaactaacttgtattcaacaaatctggatatatttaaagctttgctgaaatttattactgtttgcaactaaaaagacttgctgctttgctcaggcaggaagactcagcaggatacgaatgaggagaaagctattattctttacacggttagaaggtcttgaataccatattcttatattgatttattattttctaatgtctgtgtgcatatgtgccagtctgatacactgccacctgaaacaaatggaagcaccaaatcggaaggaaactcaaagtaaattctatatctcttcaactttttttcttcttttctatgatcatccagtaggaaattttagttgacaactgtgtatgattaatataaaatgctccaagtgttaagaatagtcccacatcgggtaattcatgaacatgataagtgcttatatagctgggtagaccacccccttatgaaccggtttttaaggggacctttcggatgcctttgctgcactataaaatttaatatggtatcagagccatattctgcttctgtccggtgggtgccgccagccctcgctttgtggtgacgagccctggctcgagggggcgtgttaagaatagtcccacatcgggtaattcatgaacatgataagtgcttatattagctgggtagaccaagtgcccatggctgacctgaaattcacacaataaattttttatctaattctatttgggccttttgtacatctgctaatacatgaattgcaattggg

SEQ ID NO: 38625 - DNA, 166 bp, Glycine max
  Clone ID: PAT_MRT3847_13487C.1
aatacggctcgagagaagaggagctaccaacgagtgggaatacctagtcagtcagttgttagacacattagtcaggttcattacaaaaagcgccggcctcacccttacttacccttcgtttgtcaatctcgtcgtcggcgcaactgctatatttctgcgtctaacg

SEQ ID NO: 38626 - DNA, 715 bp, Glycine max
  unsure (1)..(715): unsure at all n locations
  Clone ID: PAT_MRT3847_134880C.1
catgacaagaatcgcatcatgcatataaaaaataaataaaaatcgcgccctttaatttaatcattcgccccaacttaaaaagctgcagcattcacgttcaccactactctatatatgtatccatcataaaaagcaagtacctctccttttttctcatatgcccttaaatgcacagaagaacgttctcatgtgtagcgtcaagaatttgcccacctaattcatattaagcttggcgtgcacgtcacctgcattcaccctttggtcaacttgcattgacttgctcttatgcacttagaggtgcaccactgcttacacttgcgcatcaactatatcaactccaaaatcaaaagtcataatatcactcaattgacagtgactgccatcaaaagaaacgaggtgataaaggtagagcctttgtgcctttagaatagaggatcaatatggaaacaaacaactacaatttcaaaaagagacagattgtggaaaccccaaatccaatgcacatatacaaggatggaataaaaaccaaaattcacttgaaannngcatatacatgtctagataaaactgaaaattgtcaacaatgtctaagttaactgaacaataataaagaataggaataacagatgaaactcnnnatagtnnnntagtaanncnnctnntgcatacagnntataatatnnccccacaatctacnnnaccnnncccacaaata

SEQ ID NO: 38627 - DNA, 425 bp, Glycine max
  unsure (1)..(425): unsure at all n locations
  Clone ID: PAT_MRT3847_134881C.1
gttcacatcttaaaaaaagttttcaaggttaaatgattcttaaagttttatgcgaagtttttaattaggcacttataatttaaaaactcttaataatattcttagaacaaacatttttatgtgctaggaaataacattcttagatataatatttctaggatgtgatttcaaaaaatgtaagaagattccattaaataaacactctcatatagtcaggtagtcacatatctttttttttttttttactgaatatatctttcttggcttgnaataagtgttttatgaatttttatgtcaaattaattccattgttctctttaattggtcatcaacccaagaatgattttaaatttccttaattattttactcaatacttaaatttccacaaattaatgttacatataataatatatttctaaatcat

SEQ ID NO: 38628 - DNA, 198 bp, Glycine max
  unsure (1)..(198): unsure at all n locations
  Clone ID: PAT_MRT3847_134882C.1
tttggtcttgctttatttattattactattaccatatgcctaataggttgttttggggtggggtgtnggcangtcacntnctccatgcaacaacgtgtatgngancggctaagtatagtatnatgagaagaatgctantgccaaaannnnaganngggcccaaagaccaccgganatcgcgcngnnncgtcnaggngt

SEQ ID NO: 38629 - DNA, 414 bp, Glycine max
  Clone ID: PAT_MRT3847_134883C.1
atgatataaaacgggcttttcttaacagaagaaagaaccacaagccgacaataagggggctaatcaaaccataaatgtccacaataccaaatacctgcgagaggaaccaccacgacttgagaccgttggctccttaaagagcataagacacagaggttcccctcccttcacacaaaccaggcagggccagaatacagcagagtaattatccagtgaacttaaagggatcctggcttctcaaaaggcaaattcccatctcctcactttggcttcaaaaggataatcctctactctacttttgtggacatataaaagacactggaacataataaacaaacttgggcatcatggaaccaccaccttgtctccttgggggagcggccatttctgcagggcttacataacgggcaatat

SEQ ID NO: 38630 - DNA, 355 bp, Glycine max
  Clone ID: PAT_MRT3847_134884C.1
cacgcatacacggtatgaacaatttagtgtcactggccatgcagatttggatgagggggatcatttttaagcggatgaagttacatatcaaggcaccagccgcggctatacctggggatgcactactgctagattggtggaatatgagtcgcggatcgacactgggtgaattgatgagaatgatgtagcgacatcacacgttgatactagagcatatcagcctcacacgagagattattagttaccgaacacagcatttgatattacatctcggtctagatagtatatgaagtgcgctacaacatacatcattgctagatgtaaaaactcaacatatgatataaacactgctgat

SEQ ID NO: 38631 - DNA, 1419 bp, Glycine max
  Clone ID: PAT_MRT3847_134885C.1
attcgaagcttaatcaatttacccgtgcattgcataggctctcatactagtagaatgcatgagctctcatactagtagattatatgtgcaataatgtgtaaatcatctagatggtaaggattattcacattatttaagattatatataatcatgactatttaatattacattggtgactaatattaaataaaaataaaatcaatcttacatttaactttgtttgctttggtttgatctagccccacgcttactaagttttgttatgatgtatgccatggcaactttagcacctaggctagagtgaccacgagacaggcatatagcagtagcaccccctagaagcaacaaaccattggctatcaactttcttgatggccttcttaggatcatcctaatttgagattcatcagtaacttgatcatggaagacggtagcatttgctggagagatgttactcgaaataaggtccaagcaagcgggtaccttctgcattaaatccaccgaagtgctaactgaactcaataaatgatagcttataacagagtatcttctaagtgcattatccatcttgcatacatagttccatatgcccttgcgaaaagccagcttagccatctccgtatttaaaccagcatcttcttgatgaaacattgtgatctcacaggcattgctaccaggtacttctcttattcgccagccagatctaaaaaactcaactcgtacatattttctttgtcgtggtgccaaaggatgctcgcattccttcataaaacagtaaaatgtttcatcactcccctcccacaacttccaagctagcacatattctctgggctttaaaagagggaactttttaattgtatgaccaacttcagtaccatcagatttgtctacctgcagttgattatgctcaaccagtgttttatcccactgctttctgtaatcattgtccatgtagaagtttcttagcatctcagatgaaatgtcattgaacacagtcttgctcaaatatttcaggggaccattcttaggcctgcagcatttcacactgtagcttagatgatggtttcttttatctagaacatcctcccatttatcactgccgagcttctcatccaaaatctccattaaaaatttcaaatctgcatctgtcacaaaatttgaggttctgcttctggagcttgagtttgaattgatagaatcggaaagcagtaatgaagtggatggagacgaccgagatgaagcgaagaaaaatctgttccgctgccaaagcaataatataaggaacacaacaacagccgcaacaccatagccatagccatagccatagccatagatgtttaatacactcatcgtcatcgtcgtcgtcgttatcgtattcatattctttttccactcctcgactcgttcaatcaattctc

SEQ ID NO: 38632 - DNA, 243 bp, Glycine max
  Clone ID: PAT_MRT3847_134886C.1
cacggggacttgagagcttccgtacaggtgtaaggtggctccaagagtgtggagtaacttcgtgatcaacgggatcatctgttgccagagggagtacatgaggtctcacgaagagctcattagcatgaggaacgtgtttgaggaggaaatataggaatggctacatgttcgaacgggtgatcttgtaaatatctattcagatgactatgttgttcaatggatatttcctgagaagctgatcaa

SEQ ID NO: 38633 - DNA, 413 bp, Glycine max
  Clone ID: PAT_MRT3847_134887C.1
aaaataataagcagtggccctcctctttacatctgatctgatggatatggaaatgaagtctttcattgttagtgctcttattctagttttgttccttcatcttcggttgcttcctgggactgcagctcgaccacttgagataaggaagttagaaagcactagccagagaatgtgggcaatgcttcattcagggccaagctctggtgggaaaggccataaatctgagactggggaagccccaattccaggacagcttaaacaatctgttccaagccctggagttggacactaattaacacatgatgctgatcctcgagtcattttgttctatcactagctaggagtaattatcattaataacatgtaactggatagtagaatgctatgctcttttgtttgataaaactcatgtg

SEQ ID NO: 38634 - DNA, 159 bp, Glycine max
  Clone ID: PAT_MRT3847_134888C.1
ggatgcgtctacactaactaaagccgagcagcgagagagagaaatcctagcaaaaatgccggccggccagggttcgagatcgcgcaccaaagattccctctctcgtcgcttcaggaagaatggtaccgaacgcctcatcacaggactcagaagctacca

SEQ ID NO: 38635 - DNA, 764 bp, Glycine max
  Clone ID: PAT_MRT3847_134889C.1
tcctctagagcggccgcttttttttttttttttttttttttttttttgctagataatttttatctctcttatgggagcttaatgaatttgtgacaacacaaacctggtaagatctaataattaagtatcagcaccaagcatcaagggagacaatagcaataataaaggcttcaatgcgcttggatgaaactttcttgcaaaaaggaagcacatgttggtgatgttcccttcataaacacatgttgatccaaacctcatgtggttcaaaaacgcttctgtaatatcattggacccaaatgttcgaggatgagggccacgccttgaccaatccacccaagtgatgctactattggagcttaattgagggtacatcatatgcacaaaagttggtatataatgctcttctgcaaagcatggtgaagtacaatagtgctgagctatagggtagtatctggtgtcagatacaatgtgaatggcaagctcacgatgcaccacaaaccattgagacccttttctccaatcggttatgtcaattataggccccatttttttgcagtatcttcctctggcattgtatcctgggtcatcattaaagtctaagaagcttatggttgagttcatgagatagtcatatatggttctgaagccaaataacggaatccaagattctgaaagcagaacaaaacgttgattggataagtccatcagtgcatttgctagaagaccttttccagcatccatcaatgatggtgcgccccagacca

SEQ ID NO: 38636 - DNA, 297 bp, Glycine max
  Clone ID: PAT_MRT3847_13488C.1
caatacgtcgggagctgtgaggcttgggttattggattattgagattactagtctttgctggtgcctagagagtccttcacacatgcaatgttaccaatatgcctagggggtgagggaacctcaaattgaactcaagcaacttcttaaagcatgtgataggcgtcatgatgacagtcctgttcacaccatattgggaggagacccgtctgcagaagatacggactatcttctgtgagagacatttttggcaccatattcttgatcttaaaggctcctaatatgtaaaagataggtta

SEQ ID NO: 38637 - DNA, 758 bp, Glycine max
  Clone ID: PAT_MRT3847_134890C.1
ccacgcgtccgtttacattagtggttgtggttaattgtggtttctgctttgctgtgatgttttgttccattttttttatattcttcgtatgtgtattgtgtcccctttgctctaaagatgctattactcaatttcattcagtgtgcgtagtagtattttatgttttttttttccttttctgccaggtttagtaatgtttgttagaatttggaagtaagctaggtgtatcttgtggctctcttttttgagatttggactgatgatgcggtaatatatatatatatatatatagttgaggtgggttttttggtgtattgggtattgcttgctttttgagggcagctgttggaagatggactatagggtttcgcatttgcaagctctagagaccagaggcaaaactttttttccacactgaattaacattttttttccccgtttttgggttctgtgtttttagaggaagaggtttcatagaattgatgcttaggttttacatttgaactgagtgcgtttggatttctgccttatttctacaaatgagttttttggagcctgctcttgctgaagtttattgtttccaagttttcatattgctgtattagcctcctgttgtgctgtgacttcatttgtatgatgttttctggtttaggaagctttttgtaaaattttgtggtccctgaatgaagttcatttgtcctatattggtgatcatgggagttcaaagcataactatgactttaaatatcatataattt

SEQ ID NO: 38638 - DNA, 410 bp, Glycine max
  Clone ID: PAT_MRT3847_134891C.1
ttttttttttttttttttttttttttttttttagcccttgacagacggaataccattttgtcatcatcacagaagctggcataccaatttattaaatacatcaaattgtggataaagaacctttaaatctttcgaaagtgaattaaatgaattaaccaacttgccaacaaaataagggtaatttaagctcattgcattgcaccttcattcaagttcaatttagggggcggcacctccttaattggcccttttttttgggttttggggttgtacaaaaaaagaactttggactgaaaaccagccccaggggcatggcaggggcctttcatgttccattaagaaaacaaaaaacccttttaatgttaagggaaaaagggtcaagaaaacatgccctgtttttttatttgaag

SEQ ID NO: 38639 - DNA, 550 bp, Glycine max
  Clone ID: PAT_MRT3847_134892C.1
gataataatctgaatattattgtaattctctattttcaaagagtgaatacaagacttatttataagctgccagcaacctaattaaggaaagaaatacaatggaacaaaatctgtacaaatcaaatttgtactaattacagaataaaatctgtgctaattatggaatgtatcacaacactccccctcaagctagtaaatgtatatctatcattcccagcttgcaagtaaggtcttgaagctgctccgtgggaagtcccttggtgaaatgtcgatctatctctatgaagctttgaagggatgtattcggtggctataagaccactgtactatttctccttaatgaaatgtcgatctatctctatgtgctttgttcgatcatattgaattggattgtgtgcaatgctgatggcggacttattatcacaaaccggcataggagcttcatattttattttgaggtcatcaagtatgaacttcattcataacaactcacagacccctttgagccataactctgaattcagcttctgcacttgatcttgcaactaca

SEQ ID NO: 38640 - DNA, 528 bp, Glycine max
  Clone ID: PAT_MRT3847_134893C.1
ggctcgagcacacacattccacttagttaaacatggagaaatcaggctctaacagtcctaaatctgctttgaagtttgtgaagaccacatctcagtctgcagctcaatggagcagtactaattcaagaggaatggcttcacgaaggtctccacccaaagaaagttacatggcttcaagaaggtctccacccaaagaaagtaacatggctccaccaaggtctccaccaaaagaaaatactaagccacaagaattcaaactccacacccaagaaagagctgtcaagcgtgcaatgttcaattatgctgtgacaacaaaattctatatcatggagctgcaaaagaaacaagaggagaagctgcaaaagttgattgaagaggaagaggttcgtttgctgaagaaggaaatggttccaagagctcaattgatgccttattttgataagccattcctcccacaaaggtcaagcaggggtgttccaagagaatcatgcctccacatgatgagcagcatgtgctggagctgcagca

SEQ ID NO: 38641 - DNA, 935 bp, Glycine max
  Clone ID: PAT_MRT3847_134894C.1
tacggctgcgagagacgacagaaggggacacacacacacattccacttagttaaacatggagaaatcaggctctaacagtcctaaatctgctttgaagtttgtgaagaccacatctcagtctgcagctcaatggagcagtactaattcaagaggaatgacaaaagatgtactcaaagacaagttctatgacaagactaaagcttcacgaaggtctccacccaaagaaagttacatggcttcaagaaggtctccacccaaagaaagtaacatggctccaccaaggtctccaccaaaagaaaatactaagccacaagaattcaaactccacacccaagaaagagctgtcaagcgtgcaatgttcaattatgctgtgacaacaaaattctatatcatggagctgcaaaagaaacaagaggagaagctgcaaaagttgattgaagaggaagaggttcgtttgctgaggaaggaaatggttccaagagctcaattgatgccttattttgataagccattcctcccacaaaggtcaagcaggggtgttccaagagaatcatgcctccacatgatgagcagcaagtgctggagctgcagcattgccaatgaaatgtacaacttgcaccactatggtcatcaagctctcaagcccattaagtagaaagctttgtgggaaggagcatgtaaaatgtacactatccatgtattcttttcatccttgtattccatgcatgttgtacactatctatagggaaacttagagttttgtaccataccatgcgactacctagctccttgattaggcggcgatcgaggagatgttttgatgatgttttctttgtcacaaaaataaagatcaaccatgtatttttggtgtgccttgtaccatttggaaaccaacagaatagaattatcactttgcatgtgaaaaaccccaaag

SEQ ID NO: 38642 - DNA, 415 bp, Glycine max
  Clone ID: PAT_MRT3847_134895C.1
tcgttgacgcgtgggcctgattcaaatgataatattgatctactgttgagcattgatttgttgggtttacaaggagcaggtcaagctttttcaaacaagattgtttttgatgataagcttgtgttggctaacacacatgaattctttgatggaaattttttcagtggattcttggataccaatttttgtgaattgttatttatcctgtaagacaattaccttcagaagctgtcgttgtaaaatgttacatgtggtagtggacgtgggggtttacccaccactgcttggattagatctgcagttaccaatcgctcctcagatatcaacaaaaggattcgcacagcacttgctaaaggttagaaaatcgtttctcttactagagttgagccttttccagttggctttactggttgtt

SEQ ID NO: 38643 - DNA, 455 bp, Glycine max
  Clone ID: PAT_MRT3847_134896C.1
aaaggagatttgtttctggggatggtgaagagatgacattgatttcaggaaccattgttgaagaggcttacaacaagttaatagttgaactagagaaaagtgttcctacattgattggcattgaatgatccacggttgataaacttcctcgtcgcaaaatttttgacaaacctaagacgcgctgctttactattctccccatggagtttaatcttgtggttcgtcagatgtttttaaattttgcgaggctcattatgaagaaaagggatatgcttagttgtcaagttggaatcaacccatactccatggaatggactggtttggccaatatattattgtgtaagggcaacgatttttcgagctgctactatgctagttttgatggtttgattaccaaacaagttatgagcagaaggtacaaaatgataatagtcttgtggtggcgataaaaattg

SEQ ID NO: 38644 - DNA, 593 bp, Glycine max
  unsure (1)..(593): unsure at all n locations
  Clone ID: PAT_MRT3847_134897C.1
ggctcgagatttgataaatgctaaaataatgttggtacagcagtgtaatagttttgtacaagtctcttgaagttcatatctcacatacacccttgttcctcttatccgctttctctgccaattgggacagttccatttttgtttctagaaaaggatgtttgattgagacagtcttctctttgcctgatgtccttatttgctggttccatgttttctacttcccttggaatttccagttctattagaaccttggtggcaaggaagcttctgatttggcatttttgttgggatttctagaatccttttataaatacaattcctctctggtgcatgtccaataattatataaaaatcctctctacatgtaatcaagcctatatcccctttcttttggcaccacaaccacaatttcctcgtttggtgctaatatatatatgtttctcctccatataattccttctttttggattaaagctcatcatttaattttcttctccttaattacccatatatgtcatatttccttatgtttctggtgcgtcccaataccaggttcagctttactactncactttcttcaactacacataaat

SEQ ID NO: 38645 - DNA, 477 bp, Glycine max
  Clone ID: PAT_MRT3847_134898C.1
ccgggtaccagtgttgaagaggcttacatcaagctcatggttgaactagagaaacgtggtcctacattggatggcattgaatggcccaaggatgagaaacttcctcgccgcaaaatttttggcaaacctaagacgcgctgcttgactattctccctatggagtttaatcttgtgggccgtcagaagtttttaaattttgggaggttcattatgaagaaaagggacacgcttacttgttaagttggaatcaacccatactccatggaatggactggtttggccaatagattactgcgtaagggcaacgatattctgtgttgcgattatgctagcattgatggtttgattaccaagcgagttatgagctagatggcagaaatgatcaacagtctttgtggtggtgatgaaaaatcgatgcgtgaaaggacacacctgctgttggcttgttgctcacggatggcaatatgttaaaaagat

SEQ ID NO: 38646 - DNA, 418 bp, Glycine max
  Clone ID: PAT_MRT3847_134899C.1
ctctgtaatctcaaacaagattgtttttaatgataagcttgtgttggctaacacacaagaattctttgatggaaattttccagtggattcttggttaccaatttttgtgaattgtctttatcctgtaagtcaattaccttcagaagctgtcgttgtaaatgttacatgtggtagcggacgtggtggtttacccaccactgcttggattagctctgcagttaacaatcgctcctcagacatcaacaaaaagattcgcacagcacttgtgataaggtagaacattgtttttcttactagagccgatccttttacagtagctttactggctgcactttttggagataagaatgaaaatctgagttttaacgccactaaccctatgtttgcgcgactttctgagaactgtaagagctttaaa

SEQ ID NO: 38647 - DNA, 427 bp, Glycine max
  Clone ID: PAT_MRT3847_13489C.1
attggttgaaacaatatccctacggaggtttcattcattgcctaaaaattatctagaaaataatgtaaccaactgtatgacccaagcaagtttgctgaaaaggtttgaaccataaatttttaaaccacgggaagggttatcgcacataactcttaaaaattgacccaagttatcaatgtcacataactagaaactacaaattttaggcatcctagttcctcagagtaccacctaaatcttgtgtaaaggggggggtcgaaaagattctaatcgcgctgagtgatcgcgattaacacagctgaaacaagcttccttgtcatagtgaccgaactggatacctacaccttccttgtttggattaacccattttaaatgctagcccccccattgttagcgagctccttacttttttctaagtatataaaaa

SEQ ID NO: 38648 - DNA, 355 bp, Glycine max
  Clone ID: PAT_MRT3847_1348C.1
gtgtagtataggattctcttctttattccttttgtaatttcattcattcttaatctttgtgataaaatcatgttcatccataattttaaggttaaatgtcctaaagtgaagtacaccgatactgatcattcagtccgtgtataactactaaaccaccgagacttgttcacgagtaacacgaatggcaccgtatcagtggattagtcaaattaaatctgtcagatacgaatttaaaacgaacatccatgttcctaaattaagggtaatgcatgtcggttggggtggtaacaacggctcagtactcaccagtagtgttagtgcgaaccgagagggcatttcatgggctacaaaggac

SEQ ID NO: 38649 - DNA, 246 bp, Glycine max
  Clone ID: PAT_MRT3847_134900C.1
gattagcctttgattctttccctcaacgctgtcgccgatctcgcccaccatgaatgcaacaccactcaactcggtcttccccctaccttgctcagaatgaaacgaacccagaatcaacaattccgtgaccttcagcacatacattctcagatcgaatggggacagagcggagcagctacactcgtcagagaccaagcaagctggggcgcatgttgcgcgttctcaggtactggtgctattgtaggc

SEQ ID NO: 38650 - DNA, 467 bp, Glycine max
  Clone ID: PAT_MRT3847_134901C.1
agtcaattccttcaaagctgtcgttgtaaatgttacatgtggtagtggacgtggtggtttacccaccactgcttggattagttctgcagttaacaatcgctcctcagatatcaactaaaggattcgcacagcacttgggaaaggtaacaaaattgtttttcttactaaagatgatccttttccaatagctttactggctgttctttttggcggtaagaatgaaattctgagttctaacgccactaatcctatgctgacgcgacttcttgaaaactgtaagagtcttaaatatctgggtggtgagtgaccttttgcatttgtgaactagcatgtagtattttattgcacttaaataaagcgcattactatgtgcaatgagtgtgtttcaatgttccaaaaaaaaaaaaaaccggagcccacgctgataaactgataacacgccaacggtgttaaaactaaaactaaaa

SEQ ID NO: 38651 - DNA, 484 bp, Glycine max
  unsure (1)..(484): unsure at all n locations
  Clone ID: PAT_MRT3847_134902C.1
aagtcaattaccttcagaagctgacgttgtaaatgttacatgtggtagtggacgtggtggtttacccaccactgcttggattacttctgcagttaacaatcgctcctgagatatcaacataaggattcgcccagcacttgggaaaggtaagaaaattgtgtttcttactagagaggatccttttccagtagctttactggctgttctttttggcgctaagaatgaaattctgagttctgacgccactaatcctatgctgacgcgacttcttgagaacctgaagagactcaaatatctggttgatgagtgccctttcgcatttgtgaactaggaatgagtattttattcacttaaataaagcgcattactatgtgcagtgagtgtgtgttcttntctatgaatagatcttttaaggggcgcgccagttctgatatttacaccatctgctctcaagactgtgaattgtggaatcctgcttgcacaa

SEQ ID NO: 38652 - DNA, 467 bp, Glycine max
  Clone ID: PAT_MRT3847_134903C.1
ttattttgagaaaagtgttcctacattgggtggcattgagtgtcccaaggatgagaaacttcctcggcgcaaaaattgtgataaacctaagacgcgctgcttcactattctccctatggagttaaatcttggggatcggcagaagtttttaaattttgagaggttcattatgaacaaaagggacaagcttagttgacaagttggaatcaacccatactccatggaatggactggtttggccaatagattactgattaaggcgcaacgacattctgtgttgcgattatgctagttgtgatggtttgattaccaagcaggttatgagcaagatggcagaaatgatgaacagtctttgcggtggtgatggaaaattgacgcgtgaaaggacacacctgctgttggctggttgctcaaggatggaatctggtaagaaagatattcggagagttgaatgcggaatccctttt

SEQ ID NO: 38653 - DNA, 525 bp, Glycine max
  Clone ID: PAT_MRT3847_134904C.1
ttgccctctcgtccgcggacgcgtggggtcataatagcaccattactgatggtattgataaaactagagcaactttgcaatttagaaagttagcagattgtgatcttctcaagagaaattttaagcagatgtttaatgttttgtgggtggctcctgaggacaaggcgagtttatggtcacaacttcattatgtttcgtgtaataatctggaaatgcaagaagcttatcttgtcaatctcgtaaatgtgttacgagaattgtatttgcacagtgcaaaggaagctcgccaattgagaaggaaagctctctctcgtattgaatggctgtaaaaagctgatgtgcctaccatagcacagattgtagagttccatttgatgcagaggatgatgaatgctcctgattcaaatgataatattgatctactgtagagcattgatttgatgggtccacaaggagcacgttaagcttttcaaacaagatttgttttgatgataggcttgtgtcggcttacacacaagaattttt

SEQ ID NO: 38654 - DNA, 480 bp, Glycine max
  Clone ID: PAT_MRT3847_134905C.1
tcggttttttttacaaggagcaggtaaagcttttccaaacaagattgtttttgatgataagcttgtgttctaacacacaagaattctttgatggaaattttccagtggattcttggttaccaatttttgtgaattgtctttatcctgtaagtcaattaccttcagaagctgtcgttgtaaatgttacatgtggtagtggacgtggtggtttacccaccactgtttggattagttttgccgttaccaatcgattctcagatatgatcatgtggattcctacagcacttgggataggatagaaaattgtttttcttactagagctgatccttttccagtagctgtactggctgttctttttggcgttaagaatgaaattttgagttctaacgccactaatactatgctgacgcgacttcttgagactgttagagtttgaaatatttggttgatgagtgccctttgcatttgaaacttgtatg

SEQ ID NO: 38655 - DNA, 257 bp, Glycine max
  Clone ID: PAT_MRT3847_134906C.1
aaaaaccctgataaataaacccatgaggccaaattaaaatttttttggtccccacccaaaattttttaaaaggaaacttcggggattttggcccgcccaaattcttaaattagggaaattctaccccatcgataattaaattgggggggaattttgatgtagcagtagcacccgtttcacctttaaaataaaaatcccgggtcaaagtttcaagtaacttaggccagagcggaaaaaaaaacttgttaaaagggggg

SEQ ID NO: 38656 - DNA, 174 bp, Glycine max
  Clone ID: PAT_MRT3847_134907C.1
ttggtgatgctgatacgaagaagtgaagagggaagatataagggatttggggctgaaaagacaagatggggggaggaatggaatctaacattaacaagttcataaaggattggggcactgccatagaaaatctggagttcaattatccgttggacttctcctaaccttgctctt

SEQ ID NO: 38657 - DNA, 524 bp, Glycine max
  Clone ID: PAT_MRT3847_134908C.1
gcatctgcgcgcatattgccaagtcagtgtagcttcaattatcatgtgtctactgcacgggagtgctacctgcgaggaaccaatctgctagccgattccgatgtggcgactagtctacctcgaattggaaattcgaaaactgaagaacaggactacatcgggttactcggtagacaacaaaccaaaaaggacgggggaccaaagaactcagacactaacatatcactcttaacaggtacggtaagaacgttaacaaaacattcagagatcctgctctcatgctacttaaccatcgaggctttgacactaaaaaggggtacgtgattgttaataaggatggccctactgatgctgcttactgaatatgaggaggcagagctgaattacccatgtacctgctcaagtctataaagggcttgcagctagctatgtgcatagggctgaccttgttgtaatgagccctgccgccaaggaagagcttgaatggacgaactacagcgatgagactggaaggtaggcaggag

SEQ ID NO: 38658 - DNA, 274 bp, Glycine max
  unsure (1)..(274): unsure at all n locations
  Clone ID: PAT_MRT3847_134909C.1
caccccaggcttctcttcttgtggcatcgtacaataattcaatgtccaccccttgctaaagcaattacacatatctcactaccaaacctctaataaagcagttgcttacagaaaacatataaagatactttgcttaattaacgacactantatgtgcgagctggatattgaaggactgatcaacagaatacaagattgcttggatagccgaatcatgcttcagctccacaattacttgcctggccaccaaatcctgtaagtacgagaagaacac

SEQ ID NO: 38659 - DNA, 506 bp, Glycine max
  Clone ID: PAT_MRT3847_13490C.1
aaggggaaaaatttttaccttattccccatcaatccctgggtaaacctttaaacggggaaccccaaatgaccaaaccaagggggttggtttaataaccatttagtccatgggggaccttttaaaacaaaaacctttcctccttccccaacgtccatttccgaccttaaaaggtaaaaggaaccaggaaaccctaattgggaacaaatcctacttgagggatgggggacccaaaccggggcttcctttttttgggtttttgaggttccgggttaaggttaattggcaatggccttcccagcaccaaaaaaaccagcggaggcagccccagggaccataaggtccctccttcaatggttataatggtggtaaaaacggaccttttccccttaagtttgggcggacctacttacaagtaatttcttttgggcagccacggccaaccgttgggggacagcgggccacccaaaaataaaacctgccatggggaaggaggcctttttggcaa

SEQ ID NO: 38660 - DNA, 414 bp, Glycine max
  Clone ID: PAT_MRT3847_134910C.1
ggtactctttttttttttttttttttttttgctttaactagattagatggcaacagaaagttgtccagtacaattcccaaagtggctgcacaaccagaaataaaacgagaaataaaggatccaaaaaaatcaaattcatgccaaatttttaacaaccataccttcacagtgtcttaggcaggatttgccaatgacaattaatatggctcccaggtaaacacctatttttccctaataaccaataggcttctacagaattaaaacttggtaacaaaacaccatccgtagccaccaacaatccattttcacaaacacagaacgcaccaacttaagctcgctcaccacgaatcctttttgccagctttatattcttgggcataataaccacacccttcgcttgtatggcacacaagg

SEQ ID NO: 38661 - DNA, 333 bp, Glycine max
  Clone ID: PAT_MRT3847_134911C.1
acgcagacagtataggcatttcctacgcatgcgttttgatcagatgtataaatgaaacatatgctgtcacgtttatacggacacgttgaccatgtgacacatcttacacatcacaagattaaactggataccttactgttttatagacatgatgaactgacttccctgaaagatcactttgtatcagaattcttccctctaaaaaataactactataacatttcacccttaagcgcgccagcaatatatgctatctgattataactcatggttctgcacataattccacttgaaaaactgctacatacaatgtacacttttctttattaatat

SEQ ID NO: 38662 - DNA, 280 bp, Glycine max
  Clone ID: PAT_MRT3847_134912C.1
ggttgaacaaaccgagaaagcttttctgaagcaaccaaaagtgtttctcaacacaaagaagactgggaagggaaagagacctgtaaaaggtgggaaccgcttttggaatcccattgggcttggatttaaaactcccagggaagccctcgaatgaacctatgttgacaagaggtgccccttaactggcaatgtttctatcccgggccgtatcttgactggaacatgtcacagtgctaagataaacgggactttatgttgttggaaggaattatttcctttt

SEQ ID NO: 38663 - DNA, 496 bp, Glycine max
  Clone ID: PAT_MRT3847_134913C.1
ctgcctggtcggcgtatgtagtacttggtcggcagagctcactgggcggcggacgccctagtcggtggtcgtccttttttttttttttttttttttttttttttgtcgtgaaaaggcttaaaactttatgtttgattgcataaagcccattatttgcatgtaacaccgcgcttcaaataaccgaattaaataagacgggttaacaataggaacgtacaacgaaacctccatgcccggggataaaggcagatcggaattacaatggcaccagttggctgaggggaccgcggccataagtaaacaatggaagcaaccaacttcatccgagaacaaagcaggatgctttggtcttggacaaaaacctgaatagcacccctgaaaatttgcgcaaactcagagtccatgggataaactttaggtaactgatatatactatcctctttgggaaaccaaccccaggctcacttacaatggcatgtgccacctgaagccgatc

SEQ ID NO: 38664 - DNA, 656 bp, Glycine max
  Clone ID: PAT_MRT3847_134914C.1
aaaacaactatagttccacatcaataaaccaaacaggatacataaaaagaacattaaaacttttctgtaaccagagctacagataatgacagacatcggaaaagcatatgtaaactttcccctccgcatccattcagacacaataccgcctgcatgccatatttaatggttcaatagacaatcactggtttacaggctgtgctggttgtctccccttacatttgttgatcatgttcctctattctcctccactttaataattgattccataataggtgaggtgctagtggttccactttaatgtcagacccttcactgttatatatgggttctggtatatatattacttaaatgaacctctgttattatgataattagatacagacacacattccttgaggaaagatatttagctgacagaagatattgacccaaataatataaagatacagacacacatccctgtatttgaatgtaaagatatttagctagtgtgcaaataatataacagcaattttcagagggtttcatggccatggaatctatgtcaaaaggcataggcttttgttgaggatgtcaatcaaaactaaagccttcagcaactcaaggatgaagttattcctcaaaggaaagacatttatcctccacaatcccac

SEQ ID NO: 38665 - DNA, 369 bp, Glycine max
  Clone ID: PAT_MRT3847_134915C.1
aattctttttcttggcacgcgctgttagcgcgctgctagtggaaaaagttttcacaggccaaaatcgacagtaagtgtagctgtgggcctgacgggaccttaacaactgccacaagaaagggatttagagagttgacctttcttctcgctgcttgctccccacgacactgagcttcgcgagctcttgatatcgccttttggcccttccccctttgtggtgcttccggctcctctgagcctcgacttttctggcctcgcgagcctccgacatcctcttgggcgtcgcgccctcccccgaacctcccgtccgaccgacttctgcagccctggctgcccagatgacacgcgcagcgccctgctgctcgacac

SEQ ID NO: 38666 - DNA, 127 bp, Glycine max
  Clone ID: PAT_MRT3847_134916C.1
gatactgaatatttcgactatcacacaaggagtttccaccgtatatccggctgcgctcgacgttctaagcttacgttcgcgtgcctgcgacttcatacctcttccatcgtttcacctactctcaatt

SEQ ID NO: 38667 - DNA, 392 bp, Glycine max
  Clone ID: PAT_MRT3847_134917C.1
acggacgcgtccgaccacgcgtacgtgaaaaaaacgcgatggaagagagaaacttgagcagcgtgtgcaacaagagagaaaaaaatggtggtagtagaaaggttgataataataataataacaaaaatatggcacaggtgaataggaaccggaaccccagtttttcacctgacggtttaaagacaccaagcattggtttcccttgacgaaacttttcaaaaatgtttgaatgccaaatggctttggcttaaaaccaacaaggggccaaaatattggccaaaccccattaattttcccaatggcaacattcccaaattggaagattccaaaacccgtgaactttaaactttggcttttgaatttaatctatttgaaactttgggttcattgga

SEQ ID NO: 38668 - DNA, 236 bp, Glycine max
  Clone ID: PAT_MRT3847_134918C.1
gtgatgatgatgcttttgagtattatggcaattttgctaggaagaatgggttctctattaggaaggcaagatctagaattagccctcagttggggatttacaagcgtgattttgtatgttaccgtctgagctttgcccccgtcaagaagaagcttaatggatcacaccatagagataggaaatcggtcaggtgtggatgcgatgcaaagatgtatctctccaaggcagttgtagaa

SEQ ID NO: 38669 - DNA, 326 bp, Glycine max
  Clone ID: PAT_MRT3847_134919C.1
atcacatacagcagaaaacagttgacatgaatggcatacagctgcatgttgcagagtaaggagatggtccaatggtgttgttcctctacggcctctctgatctctggtactcagggcgccatcaaattctcatctctcagctccctcggataccgcgccgtctctcgcgatctccgtggctactgtgataccgattcaccacgttcaatcttcagctacaggagcttccacatagtggatgatcacgttgagcttaatgactcactggtggtcgactaaatgttccttgaggatcaggactgcagaagcatcataggttggtatct

SEQ ID NO: 38670 - DNA, 237 bp, Glycine max
  Clone ID: PAT_MRT3847_13491C.1
aaaaataaaaatctagacgaaataaaagaaccaagcaaaaaaaaaacaagcatacaaaaaaaataaataaaaaaggggggccgccttaataggaaattaactgtacctacgctttacaagcgacgtgactggtatatactatgtgcgacctacaacttaaatcacggggcggcacatttaaaagttcggcagttggagaaaccccggcggaggccaacatatttttttcttggcaac

SEQ ID NO: 38671 - DNA, 399 bp, Glycine max
  Clone ID: PAT_MRT3847_134920C.1
aagctaagcttggggttcgagcacgcccagagagagagagagagagttgtggaaatggaagaaggtgttggcgccatctttctcgactccaattcagagactgtcggacttggaggtacaaaagcaaagaaagtgaaagtgctgaagggagattccgttcctgttggaacggaagtgagagcgaacgtgggagcttcccagaacaaaattcttgctgacataagcaactttccccaacaaccaaagcaacacatctctgttgaccaccttctcaaggaaaaggaaattttgatcaagcatcttgctactagagatgccgttatagaatcgtgtaaagctgagctacacagtgtcaaaccaactttcagaaactaaggaagcaaaatgcagaacttgcct

SEQ ID NO: 38672 - DNA, 197 bp, Glycine max
  Clone ID: PAT_MRT3847_134921C.1
gcatagaattttttgttttttgggctggatatcactctttcaaaatatcttggttcagcttcagtaaaatagggtggttttaatgtttgacagaaaacgtctacaccactgtagtctcagattattccaaatacacagttttcccagtgcttattggctactgtcttcattcatgcccatgaatatacttatttcca

SEQ ID NO: 38673 - DNA, 394 bp, Glycine max
  Clone ID: PAT_MRT3847_134922C.1
cttcttgtttgtatcaacacggcaccaaagtgcgctggcagaccctgacttctggaaggctgggacccgcacatgagaaaagtgagtgctcaatgatccacagaacccttccacgtcctacgcagtctcatacttaccaggggggtgagagtagctgataaagcagggatacaacattgctgggatcattggagaccaatggagcgatctcctcggaggccacataggcgaaagcaagacctttaatctggtgatcccctgactacattcactagttcctctcgcctctcaacaatctagcttgctctctatctgtctatctgtaataagatgcgtgcagataggagcactagcttcacttgatgttcgttgagctgagtgtcaacaagtcatg

SEQ ID NO: 38674 - DNA, 320 bp, Glycine max
  unsure (1)..(320): unsure at all n locations
  Clone ID: PAT_MRT3847_134923C.1
cacgcgtacgtaagctcggaattcnngctcgtgnngntngagntccnttaaatcatataggcgttttatnnantttaagannnntatnattntcgttctgtttccggttngtggctnctnaatatgggnttctcgnnttgagcangcgnttcnnattgtngttggnttgggcgggtntgtgntntncngaatggngtggtgtantcngtgntgncnngtncgagncctcatntgtggngnggtaggantgnngngtctgnnanactnnctggccnanngntgntgtagantcnnnnnatcgncngcganggggttgnncn

SEQ ID NO: 38675 - DNA, 244 bp, Glycine max
  unsure (1)..(244): unsure at all n locations
  Clone ID: PAT_MRT3847_134924C.1
cnntcgcctcnngcgnncgcgtgtgcgtncntcgnnngtcggccnnggntggccnntgcnggnngtngcgcgtncgnngggntgnnntgntgcccngtggtccgtncgtggnctgcntgnngnggncngtntngtgtnnttnccnnnggngncccgnngngtnnttgnnnttnggnctgngggggntcngcgggnccnggggcnggnggngnncgnggtcgnnggnnggcggtgggggggnnnc

SEQ ID NO: 38676 - DNA, 631 bp, Glycine max
  unsure (1)..(631): unsure at all n locations
  Clone ID: PAT_MRT3847_134925C.1
cctacacccgtagacaaaagtaaaaaaccaaattatacatatctatttatctgtaacacaatctctgatatttctataatagtgctaaattctatcaagacaatgtcatatagttgctatatgaatcaaacagtcataacaaaccttcacagaacgccagtgtgaatttggccagcggactggatctaaatcactaataccagttatggtacccatgtatctggacaagaacatgatacagtgagtataggttcaaatgtttaaaaaaagaaaaagaaaaaggaaaacaaaaaaaaaacttggaaaagaccactgttatgaaggacaaacaaatattgttgtggctaaatcattcaaagcttttaaaattttggctttttatcttttggaagcacataagttatgcatcaacagtcatgaacaggagtgcacagcagagagtggcattaaatggcatacagaaaactattaatacaataataatggttagaaaccaacanatcagtaacataaaatggcaggaaccaaaatcgaggaaagctaaagggaactaaaatcgatttgctacagacacaactgttgaagtcacagtcacatatagataaagatttaaaggggtccaactaatact

SEQ ID NO: 38677 - DNA, 1640 bp, Glycine max
  Clone ID: PAT_MRT3847_134926C.1
tcataaaatctcccatgaccgcagaaaaagcaaaaacatccataatactgaaaaagctagaaggccatctgggagagacgcgccacagacctacgcaccacagcacaatcgcagcgcgtgcgtctccgtagcccttttcctttccctctctctctctctagaccttgtcgaagcaccaccatgaccacaacatctctctgaaaatcactcacacgcaaaagagagagagaatcgaaacaccccgtaagcagcacggcacaatcgcaacgcaagagattaataatcaatttgcatcgatcgatcgatcgttggttaggtttttgttttgggggaatatgggcgagttgactcaggcggaggtgtactcgcctcggactcagcaagtgtggagggcactgttgagttggttggccttcttctttcagatcttcttccagattataagagccttaggtcactaccctctactctctttctcttctaattcttcttcttcttcaaacgcttcttcctcttcctcttccttcaaacctcttccctccgttgagattgctgaacacgattcgcctcctccctccgccctcgaaatctcaccacttgattattcccccgccgatcatcccgtcccaaaactcacggttgtgctggacttagatgaaacactggtatgtgcatatgagacatcaagtttgccagctgctctacggactcaagcaatcgaaggtggtttgaattggtttgagctggaatgtgtatcgatagacaaggaaggagaaggcaaaaaaaatcaattatgttacagtatttgaacgccctgggttgaaggaatttttaaagcaactcagtgaatttgctgacatggtgctgtttacagctggtcttgaaggctatgctagaccccttgttgacagaatagatgtggaaaatcgattcagtctacgactttatcggccctcaacaattagcacggaatatcgggagcatgtcaaggatcttacctgcatctcaaaggatctttgtcgcattgttattgtagacaataatcctttcagctttgtattgcaaccggtgaatggaattccgtgcattccattttctgctgggcaaccacatgacacccagcttctagatgtcattcttccacttctcaagcaactttctgagcagaatgatgtaagacctttcctctatgaaaagttccacatgcctgattggttccagaaacaagggattccagcttccagttggactttgtaggattaaactagtttgccattaagctctctgttttctttttggtgaaattcttagttgttttgctggaagggcagctgctgattggttgaaatagattttttgtatagcatcaatttgtttttggattgcctaagggtttcaaatgctctgcttcttggatgtcaaatcagttcaccacttgtgtatgtagattgccagaattctgattcttgtttataggcttgcagtctgttggaaagtatctcgttagtccattgtaaaattatcaattatcaataattaaagtttaagcattcataaagttgcaaagtttgttatgaccagctagtgaagcatgtaaaataaattaaagctaactaactgcataaatgattcgctttttt

SEQ ID NO: 38678 - DNA, 232 bp, Glycine max
  Clone ID: PAT_MRT3847_134927C.1
cgaagacacccctgactattgaaagcttatactacaatgaagtggaaagacttggaatcatgatcataggatgcgccttcaccataaagacactggaggctatctacatagccatgactagaaatacagtcgtaatgctgggggtcaataagaggcctgtagagttcgtgaaaagcgtgctgacaatgcgtggtaagcatacgaacgtgtctacctgcccgttacggaaagc

SEQ ID NO: 38679 - DNA, 255 bp, Glycine max
  Clone ID: PAT_MRT3847_134928C.1
atatcaaatccatctactatcaatttcttacaaccaacaaacccattcggagacggtgttaaaacttcctaaatacaacacaaatcttcccatacacctaataacaactacttttattttgatttctccacggaagaagtggtctattcaatatacttatttacattattattattcttgaattctccacggaattacacaatacaacattttaccaccaaccccttttgatcaacccttgattcttcattgcct

SEQ ID NO: 38680 - DNA, 379 bp, Glycine max
  Clone ID: PAT_MRT3847_134929C.1
catcattttgaactattcccccttggtggtggtaaaagagggttgtcctggaatttcttttagccctcaattggttcatttcactcttgccaatctttttcattcttttgaattcttaaatccatcaaatgaacccatttatatgactgaaacccttggattaaccaacactaaatcccctccccttgagattcttattaaacctcgattatctcctagttgttatgtatgaaagcatgtgattcttgtgtgttagcggtgtgtttaaagtccattgttaaattaaatgtgatcttctttacttaaataaggtttgggtaatagaccattatcttctttaattgtctcttacatttatttcaaccatgcattgttgagg

SEQ ID NO: 38681 - DNA, 190 bp, Glycine max
  Clone ID: PAT_MRT3847_13492C.1
gagattcaggaagtctggtcccatagggccattggatatattgcgagatggattactcaattttttacttattatcagcagactgcttgaaagcgatcttatcttacttaatcgcgcaccatacgatataggcgcatatctccaatgagtctgggggctccaatgtcttgttatgctccatatcctgagc

SEQ ID NO: 38682 - DNA, 218 bp, Glycine max
  Clone ID: PAT_MRT3847_134930C.1
gtggtacgcggacgtggggttttacccaccactgctgggattagatctgccgttaacaatcggtcctcagacatcagcagaaagcttcacgcagaacttgggaacaggaagaaagtggtcctacttactagagttgagcctgttccaggggcgatactggctgttgtttcagacgttaagaaagaaatatgagggtctaacgccccataccctatgct

SEQ ID NO: 38683 - DNA, 138 bp, Glycine max
  Clone ID: PAT_MRT3847_134931C.1
gggtcgcgtacgaaaaaacacaaggggggccaaaaaaggattttggaaatgaggtccatccgttaattacttgctagccgtaaaagacgaagcccgagcacatggaccaaagagtccaacaactggttaggggggccc

SEQ ID NO: 38684 - DNA, 250 bp, Glycine max
  Clone ID: PAT_MRT3847_134932C.1
tttttggtcgacccaggcgttctctctcactactacagctaacatagcaaacttttataccctttcatattgaaacttagggcgacttacaaccacttgtacatcatactgctacatgtcgactaattcagcaaaaacaaaagatctactaaaacgttagaatgtgcataatgttcctaacttcagcttctacatgaacaagtataacattcacaattaataatgtattagtaccgacattcttttaaat

SEQ ID NO: 38685 - DNA, 220 bp, Glycine max
  Clone ID: PAT_MRT3847_134933C.1
tgtggttaaccctacttgatttcaattatggatattcaattcttgagttggacttggtacaataatattgaattccatctcagctaagaaagctgctactacttgcctctaacctgtgaccactcatcatctcataccttcactccattagttaaaaaaagccaaactatctttctctttccatctctctctctttctctctcattgattacagccaccg

SEQ ID NO: 38686 - DNA, 147 bp, Glycine max
  Clone ID: PAT_MRT3847_134934C.1
ggctcgagcccaaacgcaagccacaacgaacctttcaatacccaacaaagaccaccgcaacagacagcacagcgcatactcaagaaccaccccccagcagacgcagccacgacccagccaacacggctcaacaacagctaggaaagc

SEQ ID NO: 38687 - DNA, 357 bp, Glycine max
  Clone ID: PAT_MRT3847_134935C.1
attaactaactgttttgcttgcttagcttgagaacaccttgaaagccgaaaactcgccgctgatgttaaagacaaccggctcttgtatatcaaagaattacggaccgcgtgatgctaaatcacacctggaccacccgggacttttaacaggaaaaaaggaagggttcttcatctggatctagggacctgtaccaaaacacgactgagttccgatggatgccaccaacccccgtgaaactcaactcatacggagcctcaaactacgcccctatggatcaagagcgcaaagttcttaaactagtccatcttcagaagtttaaaacggagcatgctttgtatggcctaggaattaaccca

SEQ ID NO: 38688 - DNA, 1341 bp, Glycine max
  unsure (1)..(1341): unsure at all n locations
  Clone ID: PAT_MRT3847_134936C.1
ctcggaaaaaggatgactaaaggcagcgagaagaggacagaagggggtgaaagcacgtagattagagccatgataaaggaattcaacacccaaaccgaggttagtgtgagattggaagccctctgggcagttctgtccaaggatttcgtcaccgtagctccaaaggtactccccaatattgtgaaggatgtgcaagtgattgaaggtgatggaggggttggtacaatcctcatctttaattttttgtctgatgtgtccccaagttaccaaagggagaagatcacagagtttgatgaaatttcacatgaaattgggctgcaagtgattgaaggaggttatctgagtcaaggattgtcatactacaagacaacttttcagttatctgcaataggagaggataagactttggtcaacgtgaaaatttcttatgaccatgaatccgagatagaagaaagggtcaaacctacgaagacatcagagtcaactttattatatcttaggcgtctagaaacatatctgtccaatggcgcttgaagaaaaatgtagtatttataaaaatagtatattatatatgttttattttatattttaaatagaataatgtatggatgcttttactatttcccaataaatatttagaaataaaaataaatatactattatccttgaagtgaagttcaaaaaggccctttcacgggtgaagtccatggttcagtatccagaggcacgggctcaatatcggcgggtgctaaatgtagttgaggacttccgtcaaaccaagggaggtaatttgaatttgataaattcggaagagacagtcgacggtgtggaggatttgattgatattgacatgcttttagatgatgaaaatttcttacctatagctttcgattgattctctgctgttgctccacccacctccccggtaaatagatggccagttggttttatttggcattggagagatcctaacatcgtgtgctgctgtatatatatttatatttatatataatatacaatcagaactacttggatcataggtcttcctgttttcaagcaaaaaactaattagatccaagggtgggtttataaatagattatgaaacctagaatgcgttaaggtttgatagttcaaatacatgatagacatggtttaattttatatatgatgatttgtatatgacatgattatttttatttagatcggcatatgcttgttatttcttannncctacttgctaaaatattaatctgcaatgtgtacaaaaggcgactgtggcgagagaaactatatactaagtgctaattatgatttatgatatcaagcttgtttcatcgctt

SEQ ID NO: 38689 - DNA, 453 bp, Glycine max
  Clone ID: PAT_MRT3847_134937C.1
acaatgtagcccgaacacgctaactatatatgtgtggatacctacatcattcacactcttattgttaactgagcatactcgcattcacagacatctcgtcatctatcgttcttctctcatgccttcatagcatacattttatacaccctgaagcatgctccttctacccaactatccacctagtagcgcagtacttatgggccttagaaccataaacaatcctcctaacactcagaagtgacctcctataactaactaacaaagcgcaattaatcctcggatccccatgaaccttgtgtgggctcgatcgggtcattgagccaatcaacagaccctttaatgaataaaccgcaattatttcttgcataatatcgcacagggttcttgcacctatggaacgcgctgaaatttcaaggcccaaactgaacggaacggaattaacgctcctaaggg

SEQ ID NO: 38690 - DNA, 227 bp, Glycine max
  Clone ID: PAT_MRT3847_134938C.1
cacttgtccccggcgagaaaatcgacataatgctgtagatgcatagcagcttgtctggcaccctcatcaaagccaagatcttggtcgtgatctgcggtgagcagaggatcttctacaccgaaaagatatattccatactccggagtcacaatgagaggagtggcatatgtcgttctcggacacgccgtgaagaacgctggtgtaactgtccctgcgtagctcaacga

SEQ ID NO: 38691 - DNA, 234 bp, Glycine max
  Clone ID: PAT_MRT3847_134939C.1
acctagaagtattccaccaaagcgaggaactttttacaaaggggtggtgctacaatttataactttttcacttccttttacactctttatgaggaaaactttaaccaaaaaattggtattaaacattttccctattattatctaagtagataaattctttaataatatgtatcctattatacattttcaataacaatatatatcttttcaccaatctcgggggtatttaacctc

SEQ ID NO: 38692 - DNA, 598 bp, Glycine max
  Clone ID: PAT_MRT3847_13493C.1
tcgatctatcgctaggaatgtaccagagtgccgtacacccaccacgttaacgcgcgcccacataaacacacatagcctgaacgccgcgagcggccgcggccggtggcctgtgcctgcgcctgataacgcttacacagcggtttaagtttaaccagctgccgtgtaagcattacaacaatggtagtactgagccgccacggccgcctgaggtgccaaggccaactaagccatgattggggccaccgcgtccaagaccgccgccgaggcctccgccgccatggccgcctccttgtcctcctattattcccagaccgcccggcccaccaggtccaccgtttaggccgcctccgccgcggccgccgccgactagattgtagctgattttggcagagcaatagctagctagagccaagggtggtgtcgggtgggccaggatttgacgtaatcattggcgcgtaccaaagaaggcgccgggagcggtcgcgtcgggagtggataattaggcgacacgggaaggcaggagtcttgaggcaaaagaactaaaacaaagacgacgagagtgggcgaagcgagcagcgtagggttcgtcagtgggctg

SEQ ID NO: 38693 - DNA, 256 bp, Glycine max
  Clone ID: PAT_MRT3847_134940C.1
ttcggctcgagcttgcatttgcgggcctccctttactcgcacatggtcgaacagagacccctgttcgtgtgtctcaatctctccgacgacaccgtttcggggctcttcctggccatcggcgttgtctgattgtgcccaatgggccctctgggactccacgacgtccagacgtagatgagcgctttaatgagtaccttgaactcgtggcatgtccagccagcgtcatccaggcagctgtacctcagcatgttgagca

SEQ ID NO: 38694 - DNA, 359 bp, Glycine max
  Clone ID: PAT_MRT3847_134941C.1
gggttgtttaacaaacataatttcatcacccttaatggcgaccgggaacatatgacccaaaaaacaaggccgtcaccagctgcttatcaactgcgtgttgtgggagcagataaacctaacggctttttataccgatcgacatatttttttgcaggggtttttcaaacttaaacgtggcagggttttagtttacatagagaggggactccgaagggatttttttttttcttgcgatttccatttttgtgcttcttggatttgaaaacgaacacatgaaaactatcggtttatcctgggtaatccacctcgcgaaaaaatttttttgggaaagaattgttcctgcaccccaccattttttt

SEQ ID NO: 38695 - DNA, 300 bp, Glycine max
  Clone ID: PAT_MRT3847_134942C.1
ggggggctaaaaatcagttttcttaattaaaagcttttcattttttgggtcccatccatccatgaacggggaacattaacatgtggtttcacaaaagtacaaagtcgtaacacttacaattcacaagtgatttttaataaaattgctgaagattttcattttctagcctagcaggggtcttttttttaaagcatgcccacctttgctcggtgttttccctttttgaaaagacccccttcccccccccccggtttttcaaacgtttaagatcttcatactaaggtttattaccccccgggg

SEQ ID NO: 38696 - DNA, 497 bp, Glycine max
  Clone ID: PAT_MRT3847_134943C.1
ccacgcgtccggagaaaatatattttgcaaccaaaaaaaaaaaaaaaaaaaaaaaaaaaaaaaaaaaaaaaaaaaaaaaaaaaaaaaaaaaaaaaaaaaaaaaaggaaggcaggcctggagtaaaggagccatgctttcttttcgccggccgggcgccgttttccgtttttttgtactgcgacgttcatttcttttggctggcgtgtcgcttctcccctgtctgggctgggtagtgccgtttcctttcccaccttggtttgcctggcaggaccgtcccgtttggcgggtggttctcttgaggggccggcccgaccggccctgccgttccctgcccttgcgcgtctggtttggcgaatgggccgtgcttgggcggggcactttccccgctcgtgggggggtggctccgcgcggcgtgccctttgttcttgtccttgccttacccctcgctccgtttggtttctttcctttcttttctcgccccgggggtttggttttt

SEQ ID NO: 38697 - DNA, 421 bp, Glycine max
  Clone ID: PAT_MRT3847_134944C.1
tttcgccatttttagcattggggagcgtcaaggctcagaaatcgaaggcctacgttatgagatatcaagtcaactccaggagatcaagatcggggaaaaccaattaccgtgccctgattcggtcgatcaatctggtcaagaacaaagattttactcccaaagaccgatatgtggtccgacttttcatcaaggacaatgttgcagcaaataatatctgctagtattgacggcgacatatggcttgctacagcatatttacatgagccgtcacgatatggtcttgtattgggacttacatattatgcaattacctattgctctgctctcctgttcgcccggagagtccttaattcacttgccatggatgttgagtatttaggaaatgttgcggattctgtggaggattatttcatagtaaccc

SEQ ID NO: 38698 - DNA, 291 bp, Glycine max
  Clone ID: PAT_MRT3847_134945C.1
agaccatcaaaaaagatatcgctccttttaattgcggcattcaaaaggatgcggctacgctaaacacctctgatcggatttatggctccaagggatgggtaaccgttccacttactctagccaaaacatgggctctaactggcaagcctatgttcctgggatacattgtcatgaaaaatccctaatacacattcctggcaaacgcctccccatgttttcaaaattcttgacatgggtaagacgtatgtaccacacatggcgcatctaactttgagacacaagttaaccttg

SEQ ID NO: 38699 - DNA, 243 bp, Glycine max
  Clone ID: PAT_MRT3847_134946C.1
gaaagattccattatgctgggcccaaaatcaagattccaagagttcattaatgcacagactgaagatcagggcgaggaccaagggcatatttctatgccaagaaatagagagaaaacagtatctaattctcttgttacaaaggcaacttccttgctggaaaagaaatttggtcccttcgttgagtgggataatgttgaagtgttgaagaagcaaaatagaaaggcccgaacaactaatgatga

SEQ ID NO: 38700 - DNA, 493 bp, Glycine max
  Clone ID: PAT_MRT3847_134947C.1
tagtgcgctcgagctccagccccattggtacaagaacaacccgctacacacataattgatgtgcattgctacctgcgagattctcattcttccgaggagggggggatgcccccacagccaacgacaaccccaattcatcaccatcaaaagatgggggaaacgaactcactgttgtgcaacccacactgaagcttggcacggctaggcaggtctacctgaccatctaccctatgattgcgaccatccacatctgcaacccactacatgggtacatcgatctgatggaatgactcggtttctatatcaagcgcatcggtacattggacactacttatctcggcacgcaaaagctgatgcccggctagaaacaacaatatatatgtggtgccaacagcactacctagctttttttctccatcttacaatggttcaaacattccctatttgtactatattaaaaaggcattaacctggaggcggataatatattaaa

SEQ ID NO: 38701 - DNA, 288 bp, Glycine max
  Clone ID: PAT_MRT3847_134948C.1
ggctgatacggacccgcgctatccccgctcttccatcgaggatgacttcaactatggcagctgcgtggcgtcggccagcgtgcacattcgcatggcctttctcaggaaagtctacagcatcctgtctctgcaagttctcctaacgacagtgacctctgccctgttcctgtatttcgaaaccttgcgtacttttgtccatgacagccctgccttaattgtggtgtttgctctcggatctctgggcttgatctttgcgttgactctgcacagacacacgcatcctctgaa

SEQ ID NO: 38702 - DNA, 271 bp, Glycine max
  Clone ID: PAT_MRT3847_134949C.1
tgactctctctcacttattattacatcaaggataaggctcattcatcattgattggtgctcagaaaaaaaaataaaaaaaaacaaccggcaatcatgagatctttctttaactcctctctccggggaaagccagagcttctaaccgagggtcagggcccacctctttttggatgtgaatggcgaaaccaagttcagctgatggggggacctgaaattctgtgcacatctttataggagagaggctgtgctgcttcttctatattctaggtg

SEQ ID NO: 38703 - DNA, 687 bp, Glycine max
  unsure (1)..(687): unsure at all n locations
  Clone ID: PAT_MRT3847_13494C.1
cttgctcataaaaattttggtaaattataaatggttttatactttttttgaattccataacaatagtatgcaatataatagtaggtcttacgcaaatggcaatggatcctgacatatttgcacacgtaagaacaatataagattatggcgagtacctgttttgattgtgttgattgtttaatgattcatgcgttagtactttgagaactatctcccctgaaaatggaactcaccaaagtggatgttctagttgaagccattagggttggatttagaaagctcgtacgaaacacaaaggagatgagaacagacttcttcagtgtcaatttatcaaaacctatcaaaattttgagactagtcagcacagaatctacatgttaatccaacaagaagcacataacaatcaattgttcttgtcggggattgtttgatgtggattgtaacagaagaatcttttgactgagagaagggcaatgaatgctatcttgagaggatgcacaattggaagatatggttgaaaaagtgaataattatttcatataggcttaaataatggaagagattattgcagatcctgatcagttnntggaagggacttatcacttatacgagtgctttttgctggctgntcttaccattttctttttgtctgcacagatgtgaagtcattgcaattctatatttgag

SEQ ID NO: 38704 - DNA, 319 bp, Glycine max
  Clone ID: PAT_MRT3847_134950C.1
cactgattgaagagttccattcgatgcagaggatgatgaatgctcctgattcaaatgataatattgatctactgtggagcattgatttgttgggtttacaaggagcaggttaagctttttcaaacaagatttgttgttgatgataagcttgtgatggctaacacacaaagaattttttgatggcaatttttcagtggaatcttggttaccaatttctgtgaatagtcttatatactggaagtcaattacctttagaagctgtctgatgcaaaagttacatgttggtgtggacgtagtgggttacccaccactgatttgg

SEQ ID NO: 38705 - DNA, 258 bp, Glycine max
  Clone ID: PAT_MRT3847_134951C.1
aggacaaatttacattatttcaacaagaaccataccatggtgggttttatcatacatggcaactttcattaaaaaatacgaacaatgcactgagatgactaagatacccaaaccactgcacctcaataaaatgtctaaagcaaagaccaggacactgcgctggaatgcctagatcacgaatcccgaagaaatctatatagagaaaaaccccacatcccacgcatctcagacctcacacttactacttgtatacatgca

SEQ ID NO: 38706 - DNA, 689 bp, Glycine max
  unsure (1)..(689): unsure at all n locations
  Clone ID: PAT_MRT3847_134952C.1
aatataagnnntaggcgagtgcgaaatacttacnnaggattatgcaatcaccacaaaatatcnnnaaataaaactttttaactatcaaagaattaatgtgaaattttttttttatcagaaatcaaatgataaatttaaacataatagatcaaaatatatttaagtctttatttaataaaatataacttactattattaatacttaattagtatttataatttaagtttaaaacatttaattcaatgattagttaaaaacttttatcatgatcttagaattagaccgcttttttctttaaattattagtatttggttccttctaacccctgaagaattttatatggggactaatccacaaaattcagaacttcatctttccatctctatcaagtatcaggtgtcatttatctgtttattgattttttttaataaacatatccaaggtttatattaactggtacgcaacgaggaacttattaattattgtatgttataagcaccttcataanntctatcacttccaagacatgacatcatctttgaacaaactgagnnaatactatattggtattggccaaataactccacaaagattnnnctacacagnatgagtannntcaattgatggcaanntgcgtgccacgacttaaggaaacattgnnactttttaacannngantagacacca

SEQ ID NO: 38707 - DNA, 508 bp, Glycine max
  Clone ID: PAT_MRT3847_134953C.1
tttgccgctgctacatgtgtaggagtggcacctgcttggggggggggggggggggggggggggggggggggggggggacccaagaggtacaagggctatgatggcagaagaagtggcagcaacgcgaggtattaaaataaaagagggggaagagtaaagagaaggcgcggagggcaaaggtagaagtcaagataagtgtgaccgtggtgccggcaataacacaaagctcgaacacagggtgttaggaggaaaatagcatggtaaggcagggagtatccaagatagagtgcgtgagattagaattgtagcaggggttgggggcagcgtggaggtaatcggggtggtaaatgccagacatggaggttatggagttaagctagtaggcattatagcagtaccgccgcagacgctgctgaacatcaacgacaattgcgctaaagcctttaacgggagcggattgccgaggtatttagcgagcgtattgggccgccacaggggtagtataagg

SEQ ID NO: 38708 - DNA, 661 bp, Glycine max
  Clone ID: PAT_MRT3847_134954C.1
ttcctttttttgttttttttttttccaaattaacataattgagcttcaatacaatgtataattgatagttgatgctctttaatttgaattgttttggcccaaatcttcttctacaactccatctttagcccaagtagttcaaaaacatgatgggggatgctgggcaatcctggctggttagaattatgtttagcccaaatgtcttaaacaagtccatttagtctttcttgaatctcttggtcattgctcttgtaataggtccactagaatttgcaaatgatcccttaaggtgcttgagtgtgcttgttccagcctttgattctcatcatctcctttttcctccaaaggattcatccttaaatcttcacctacatcatatggagacaaatcaacaacattgaatgtagaactaatattgtactcgctaggaagatctatcttgtatgcattgtcttttatcctttcaaggacttgaaatggtccttctcccctttgagccaatttagatttttgttgacctggaaacctctctttcctcgtatgcctccacacttaatcacctggttcaaagataacacgccttcttcctttgttggcgtgtgatgcatattggtcatttttcttttgaaatgccttacattttcatgaagcctcttcacca

SEQ ID NO: 38709 - DNA, 249 bp, Glycine max
  Clone ID: PAT_MRT3847_134955C.1
atcaactggtcctcaataattgtaatatatgtccatataatgtcacatggtagaaactgtacacaattattgagcatatattacaatgtgttcaattcagaaaattgaatatatacactggatgttgaaattttttgaattcacatataagtgaagtgtattggaatttgccaatctcattgtcattgaagatactatggggaaacatattttatgattgtctgatgcacgtcctttttctttcaactg

SEQ ID NO: 38710 - DNA, 439 bp, Glycine max
  unsure (1)..(439): unsure at all n locations
  Clone ID: PAT_MRT3847_134956C.1
gtaacttttttctgttggatataacatcttaagcctttaattcttttgtcatagtaagtcactaaaatttcaactgcttatctatactcttggaaactggaaacacatacatgtgttttgttttatatatgtttatagtgatattctacttttctgaaggtggaaaacacactggttagcagaaagctctacatatgccaattgaatagttatcattgttacttgttattccatcattacttaaaacatgtcctatttatttattcattcattcagtttttagcatattcttttgcccttagccccttacacccttttcagttttcttttcatttcacatggagaaaagaaagtgttgcttaagcattaaatncttatgtttgctattgtgattatcaggttcaggaaaggctttctaaacttcccagtggcagtgcat

SEQ ID NO: 38711 - DNA, 2297 bp, Glycine max
  Clone ID: PAT_MRT3847_134957C.1
aattcggctcgagctttgaaaagcatttttggtgtttcaacccactttttcttttctttccccctctgactttgccgcgacttcaacttttttcttcttctctaagtacacaaactgtttgataaattaactcaacggattttatttcatttcaagagtgatgcctttgaagttttaagcatatttgtttttttcttcttcttttttctcagcgtgtcttctgaaactggataattttggaacagggagtagaatgtcttgcgccaccttcaatgttgcagcttctttgaatcttcatggacgtactaagcaagcagtttctaagccatttgggtcaagaaatcactgtactttccctaagttttcttttctctattctgagaccttgaatttgagctccacttattatagttgtggccgggatacaccctcacgctcattccatagtgtttttaaatgtcttgctcagaattcagaatcatcaccttctgttagcgttgacacaaacaacaattctcaaaaggtgactgttctggttattggtggagggggacgtgaacacgctctttgccatgccttgcaacgatcaccatcctgtgagactgtactttgtgccccgggcaatgcagggattgctagctcaggaaatgctacttgcatctctgaccttgaagtttatgatggagcagcagtaatctccttttgccggaaaatgggggtgggacttgttgttgtgggacctgaggctccacttgttgcaggtcttacaaatgagttagttaaggctggaatcccaacttttggtccatctgcagaggctgctgctttggaaggttctaaaaatttcatgaagcatttgtgtgacaagtatgatattccaactgccaagtacaaaacatttattgacccatctgctgcaaacgaatatatacaagaacaaggagcaccaattgtcatcaaagcagatggactggctgctggaaaaggagttactgttgccatgacactggaagaggcaaatgaagctgtcgactcaatgctggtgaagggtgattttggttctgcaggttgtcgtgtcattgttgaggaatttctacaaggagaagaagcatccttttttgcattggttgatggagaaaatgcaattccactagaatctgcacaggaccataaacgagttggtgatggtgacacagggccaaatactggtggcatgggtgcatattctccagctcctataataactaaggaacttcaatctatagtaatccattcaattatcatcccgacagtaaaaggaatgtcagcggaaggttgcaagtttgttggggttttatatgctgggcttatgattgagaagaagtctggcatgcctaagttaattgagtataatgtgcgatttggtgatcctgagtgccaggtcttaatggttcggttggagtctgatttggtacaagttctactttcagcatgtagaggagagttgagtgggttatcactgaactggtctcctgggtctgccatggttgtggtaatggcaagtaacggatatcctggatcatatgagaagggaactgtgattgaaaaccttcaagaagctgagcttgctgctccaggtatcaagatatttcatgcaggaactgcttttgactctgaaggaaaatttattgcaaatggggggcgtgttcttggggttacagccaagggaaatgatcttgaagaggcacgtgatcgagcttatcaagctgttgagaaagttaactggtctggaggcttctatcgtcgggatattggttggagagcccttcctcagaaacaatatgttacaaagggataaactacagctgagtcctagaacagtaatagacattggtcaacactcattagtggtaaatcgttttacaaacattagaaagtccccagtgtaagaggatggatcttgtcttttgtacttttcgggtgtaacgggattaggtaatgtggttacatcaagagctatggtgggaaacctcgtaagaataaacaatactaccgcccctcccataaaaatatggtgtatttcttcaataaaagttaacttatgtattaagatgtatgaagcaaatccttactcatgactttcttataggttgaaactcaaatgcagagttaaaacttgcttactatatctattgacccatgacccatccattttcagtgtacttccattgcttctttaagattagattactcagttagtctctgtatcatttagaaaatattaaacaaaaaagtaaaaagtctttattaccatttca

SEQ ID NO: 38712 - DNA, 321 bp, Glycine max
  unsure (1)..(321): unsure at all n locations
  Clone ID: PAT_MRT3847_134958C.1
agntcangcacacgtacgtaagctcggaantcggcgcgagtntncagtttcnaggctgantcatnaggagataaagagaaggannaaangntattatgggaggngtggntngctntaggtaaannagtatggntcncanagtcnanatngagcnanatngancngttacnaaatattntgtagtgnagtactagcgcnccgcnatggcctgagngcntacttgcttgantgnaagattgtcgngtgattnttagcaganntgtgttattnccatgnggtnnngcttggagatgggttgtggcantaatgnngangattcnn

SEQ ID NO: 38713 - DNA, 390 bp, Glycine max
  Clone ID: PAT_MRT3847_134959C.1
gggaaaacccccacaacggttggaaaaatccccctggcccggggcccaaacagggtcccaaaccacctccgggaaacccaaccagaaagaaagggaaaccccaaccaagctgattccccccccccttaaaaaaaaaaaaaaaccatcgaaccttttaaaaaccccacccatttaaaggccccctccccccaccagaccaaaaacagggcccacgggaaaaaaaaaaccccggaattgggcccggggcctttggggaaaaaccggcccgaacagggaaaggggaaacctcttgggccggggcccctggggggggggaaacagcgccaaggccctgggccgccacccaaggccccggggaaaaaaagcccttttgggggccccggggggcct

SEQ ID NO: 38714 - DNA, 1354 bp, Glycine max
  Clone ID: PAT_MRT3847_13495C.1
cagcaatagactgaaagtcaccaccttgagcaccttgcaacttgcaagcacgaacctccttgcagtgaccacctggtctagttaaacttttttattttggttttgactatcttttttatttttggataggttcttgtgcaaaatgttgactgattgagaggttgtggtaatgctgatgtagtttctttattttagatatgcataccgtggagaagtatttcaaatggattatggtggaacattttaaatatccttaatgaatggtctatttttttattatggattctcaacaccatatcatctctcctttcgccggtacatcctctctgccgtgcgcctccggcagaggcgatttccgacggctgtgccgccacttttatttttcctccctccacaattttttttctacgatcccctatttctcctccttccttgacttgatttttcaattccaatcaaacaaacgcaattgccattgttcccaatgatctctcagaccatagtggctttggctcctgcaagttctacggcaccaacctccgtcaccgtcggatctacatcgacgttaagtttaatgaccatcgtgccgacccaccacctgctcctccctcaacaaaaacatcgcggatctggatgtcggttgaatgagtaacagatctggatttcgtccgcatgtacgatagatttggatcccgattatgagagcagcggatctggaatccaatggcatacacggcagatctggatgccaccgaggttcctcgacccccaaacgaaatatctctggatggcaatttctaattttttcttctttctggttggctatttcagaggagtttgttaagagaaagaagaagaagaataaggaaacagaaaaagataggaaaagaaaactgagagagaagaagggagagtcgctgccgccggaagtcatctccggcaacggtgagcggtggcacatcgaaaaacagaggtggttaccgtttgtaattggccggattggaggaaagagaaagaagaaaaaagtatggtgcaacaggtcccccatataagtgtgtacatgagatgtatctcatggtgaaaaaaaatggttctcggtaaaccatttgaaacacttcaccccggtagaagccgtcctgatttgggcttacatttcaggattgaatggagataattttaaaaccaaaattatttatgaaggatatggtcaagtctatcgtttttcagtttttttttttttgttcttatttttgctttatgaagagttttataaagtggaagaaagtatactttaggttgattgacatataaaattttgattcaggtatatatatcatgttttctgattgtttct

SEQ ID NO: 38715 - DNA, 181 bp, Glycine max
  Clone ID: PAT_MRT3847_134960C.1
catatacaagcaaatttctggatatatcatatacatattagtatatgatatataaagaaatttgcttgtatatcatatactaatatgtatgacggccgccgtcaagaaagcatgacgtcctggaggcagaccaaggaccggaagcacaaagcaaactaaattagacaaaacaagccagctt

SEQ ID NO: 38716 - DNA, 439 bp, Glycine max
  Clone ID: PAT_MRT3847_134961C.1
cggctcgagctcctaccctacttaagagctcttggtgaatgtccacacttcaaagtcaagattgttgggcactcacttggtggtggtactgctgcactgttaacatatattcttagagagcagaaagagttctcttcaagcacgtgcgtctcatttgccccaggcatgtagttttactacttaatgaattcgattatttattagtttttgcatttttataactccatctcattgtcttggatggattgagtgaatgtgcatgcaagttcactgaactttcttggtggtgatatgagatttccaattactctacttcagcatattattattgtcaaggatgtactatatcaatgtaacttgtaccttggtatttgtttgatggcaaaagtaataattttctggtataggttcagcactcaattgaagcatggcttggttg

SEQ ID NO: 38717 - DNA, 368 bp, Glycine max
  Clone ID: PAT_MRT3847_134962C.1
gttatggcaacgtttttttgtgctgcgacattggttgtcgtgccggttagcctaccacacaagctatgagcactagggtccaagtgattatcagtctctgcggagtgtattgaaactagatgcttagaagggacacacctgctgtttgtggtgtgccaaggatggcagaatgataaaaagatgcattggtgagttaaatgtggaacaccttctggattgacgttcaaagttattggcagatgcaaacttaatgagatgcttattagatattgtgttgaaaaacaactgcacgctgctgaaactccaagtttgtgcttacactcccctataaagtatgggactttgtgggtggacggtgatgataactt

SEQ ID NO: 38718 - DNA, 269 bp, Glycine max
  Clone ID: PAT_MRT3847_134963C.1
acacagtaagacaatttgcatgtgatgtatatttaattagccaagattcaccaacttattgtattcgccaattggatacaataatttgaaaagtcaaatccatcaaatttaattagaatacactctagatgaatacacagaaggaatacaagtgatattttttttgcctaaaccatattaaagttttccattttaaatatattcgacttccaaaaactactctatggatagatatgtattttctatacaaataaactgaaggggggggg

SEQ ID NO: 38719 - DNA, 362 bp, Glycine max
  Clone ID: PAT_MRT3847_134964C.1
ccggcccggaaaacccggaactaccacagttcgaacgtgaaaaccccgcggacgcaagggggaaccggggaaagaaaagacgcgaaaccccaaagacccccgcaaaagcaaagaaggagaggaacgacgacaaggcaagaagcaaaaacgaagcaagccaccaaccggcacaagagcaaggagccaagacaagagcagaaacggacccaacagaagaaagcacacaaggaagaaccgacaggggagcaccaaggcaaaccacaacgaaaaacgacgacgaaaagaaagccgacgaaaaaacagaaaaagaacagcacgacaacggcgaacacccgaacagaccaaagccggaaccaaacgag

SEQ ID NO: 38720 - DNA, 2736 bp, Glycine max
  Clone ID: PAT_MRT3847_134965C.1
tgtttccaatgggttcttggtcgtgggttgggattgccttatttttcttagctttcacagcctcatgctttgcaacagaggttacttatgatgcacgttctctcattattaatggagaaagacgtgttattttttctggtgcggtccattatcctcgaagcacagtgcagatgtggcctgacatcatacaaaaggcaaaggatggagggcttgatgccattgaaagttatgtattttgggaccgtcatgaacccgttcgacgtgaatatgatttctcaggaaatttagattttatcaaattttttcagataatccaagaggctgggttgtatgccattctaaggattggtccatatgtttgtgccgaatggaactttggaggcttcccattgtggctacacaatatgccagggattgagctgagaacagataacccaatttacaagaacgaaatgcaaattttcactacaaagattgtgaacatggctaaagaagcaaagttgtttgcatcacaaggaggacccattattcttgctcaaattgaaaatgaatatggaaacattatgacggattacggagaggcagggaagacatatatcaaatggtgtgcacaaatggctttggcacaaaatatcggtgtcccttggatcatgtgtcagcaacacgatgctccccaacctatgatcaacacttgcaatgggcactattgtgacagttttcaacccaataaccctaaaagtcccaaaatgttcactgaaaattggattggatggttccaaaaatggggcgagagggtgcctcacagaagtgctgaagattcagctttctcagttgcacgttttttccaaaatggagggatattgaataattattacatgtaccatggaggaactaactttggtcgcacggcaggaggcccgtatatgacaacatcttacgagtatgatgcgccacttgatgagtatggcaatttgaatcaacccaaatggggacatcttaagcaacttcatgcagcaataaaattaggggaaaaaatcatcaccaacgggacaaggacggacaaggattttggcaatgaagtcacattaacaacatatacccacacaaatggggaaaggttttgtttcttgagcaatacaaacgatagcaaggatgcaaatgttgacttgcaacaagatggaaactactttctccctgcttggtctgtgaccattcttgatggttgcaacaaagaagttttcaacactgcaaaggttaatagtcaaacctcgataatggtgaagaagagtgatgatgcttctaataagctcacttgggcatggataccagagaaaaagaaagacaccatgcatggaaagggcaacttcaaggtaaatcaacttcttgagcagaaggagctaactttcgatgtcagtgactacttgtggtacatgactagtgttgatatcaatgacacttccatttggagcaatgcaactcttcgtgtgaacactagggggcatacccttcgtgcttatgttaatggaaggcatgtaggatacaaatttagccaatggggaggcaatttcacatatgagaaatacgtttctttgaagaagggactaaacgtcataactttgcttagtgccactgttgggcttccaaactatggtgcaaagttcgataagattaaaactggtatagcaggtggccctgttcaattaattggaaacaataatgagaccatagatttgtcaaccaacctttggtcttacaagattggtttgaatggcgaaaaaaagcgtctatatgatccgcaaccacgcattggtgtatcatggcgcactaattcaccttatcctattgggagatccttgacttggtataaggctgactttgtagctccttccggaaatgaccctgtggttgtggacttgctaggcttgggtaaaggagaagcttgggtgaatggacaaagcattggtcgttattggacttcttggattactgctaccaatgggtgcagtgacacttgtgactaccgtggaaaatacgtaccggctcaaaaatgcaacaccaattgtggcaatccatcacaaaggtggtaccatgtaccaaggtcattcttgaaaaatgacaagaacacattggttttgttcgaagaaataggtggaaatcctcaaaatgtttcctttcaaaccgtgataactggaactatttgtgcccaagtccaggaaggtgcattgttagagctatcatgccaaggtgggaaaacaatctcacagatccaattttctagctttggaaatccaacaggtaactgtggttcattcaaaaaaggtacatgggaagctactgatggccaatctgtggtggaagctgcatgcgtagggaggaatagttgtggatttatggtgacaaaagaagcatttggtgtagcaattggtccaatgaatgttgacgagcgtgtagcaagattagctgtccaagcaacttgttaagtcagcatttcattcaaatcaaagttaaagagaagaaagttgttaaaggattcaattcagtggcggagcattgatggagcaaagaggggccatgccccccaaacttttctacaatttttataatgtgttgctttaaataatattaatacttttatatatgaattgtttttatataccctaaacattctgtacgactatgatcaatgacaaaacattgaagaatactatcaataaaatttatattctgcattacttt

SEQ ID NO: 38721 - DNA, 428 bp, Glycine max
  Clone ID: PAT_MRT3847_134966C.1
ctagccactatttaggttttagtgaagcctgttcattttcttcataaattcagctggttgacaaggcttgttctaaatccttattcatgctagttacttgattacagcctaaaaagaagttttatgaactctaggatcccatcttgactactcaaaattgtctctacttgagattcgatttgtggaccattgaaaaatcaaccataatctctccagtcttatacttctatccaacatcgtcatttctatcgtatgaatttaggaattactgtcatgatagcaggcatggccctatgctccaatggagcagcgagattttgagtggtttaatctctcattcgggtatcttataaattataatgagcattctaggggtaaccactatattagtttctgacagagactgatgatgtctgtatgatactggt

SEQ ID NO: 38722 - DNA, 398 bp, Glycine max
  Clone ID: PAT_MRT3847_134967C.1
cccatttctgtgagctatgggaccgtagctggttacctggtggcattggttgcatcattgggctttgttcgggcttgtggtagatcataacataggaaaagagaatgaagtgctagtagaagcatctgattatactaattggtaagttactttaccaatagctgttttctttttttactcagttgaaatcaaatggaaaagataattaaggaggaagagaaaaataagacggttaacaatagtcttagatatttcagctgtacatagtggtttttttttacaactgtcaaatcttaattttaaagtgcatcacattattttttttcttttgtattgtgctgctagtgggtgagatgtagaagcataatatcttgatgaactagacatggaagctgtct

SEQ ID NO: 38723 - DNA, 575 bp, Glycine max
  unsure (1)..(575): unsure at all n locations
  Clone ID: PAT_MRT3847_134968C.1
ctttttttttttttttttttttttttttttttttttgtaatagctgctgagctgcttaattgtggcctcatcatcacaaattttaaaaaatgcggggggcccgaccaccccctgggtgaattccccccccaccatggggggggcccgccgacacgccggggggggtgaacctccttcaccgctcaggggggggcagtttttgcccccatgctggctgctacaagcagccttttggcggaattccaaaacgctgcgccgccgggttttctacctaagccaacacggtggcccctcccacgccaacatcccttgtttgccaaacgggcggtcagccgccttgggtgttttgggggaccaccaggtagctgctgaacaacacaggggggtgggccaaagaagccaccgagggatctgctgtttttgttgggggtgttcaactcctctacttcctggtggccggccgttggtgggggctccctaaaaccccccccataaagcatcgggcgcaccgccggaattcttntaatcgccaaaatgctggcgaagatgcccccccccctgccgcctccccgcgg

SEQ ID NO: 38724 - DNA, 404 bp, Glycine max
  Clone ID: PAT_MRT3847_134969C.1
tccacgcgtacgaggaataatagcggtcaaaggtgcaggtgggaacacactcatacaaagcaagccaattaataactggatgggagaggctgcttggcagacaggatgcttctgggataagagtgggatgtctggaaatgcagcaggcaagaggcgtgagtgctccttattgcatcaagggttcattacaaacagcaacagctcagaacacctagacgcatgatagaggacataatatgtaccacattcctgggaaaggatgcttgcaatataggagggtgacactaacaatggccatggaacggggagaaccaagcgggcataccaggcttcagggcacgtgaaccacctcaaatgcagacccagacaaaggacaagatctgacattgtcttgggaatatgcc

SEQ ID NO: 38725 - DNA, 501 bp, Glycine max
  Clone ID: PAT_MRT3847_13496C.1
gtcaatccaatcctccaatcaccatttgccacgttaaccccattcactcctccaatcacactttcacgttttatttttttattcctcaacagagaccacacactccaatgcccaccaaatttccaaagctccatctacatcattcaatacccactttctcatgcctttggatcccactttgttagcacgttgcacatgcacttgcaagtgccttttcatctctcttgcacctttaaaaacaaaaaagtccaagtctcacatagcctacaataattccccagcccaattctcaaactttatccttttaaatttgctctccaattactttcgatacccttttttcttgctatggatccagatcctacttttgaagcctccttgaaaccatggtttgaagtccctctacaaccttgaggacaaggttgattttggacggggatagtattgttacaaatagttttatgtggcccaatagagtattaatagtgttgtgcactctta

SEQ ID NO: 38726 - DNA, 320 bp, Glycine max
  Clone ID: PAT_MRT3847_134970C.1
aaaaaacacacatgtttgcaagctttttttgaccatgaagcagttaattcgccgggaagcttaggtaaaggacaacccgatctctggctactccgtaacggaattaatatcactacctactatcgctcgaagttcgcactaataatatcatgctggaataccaaagcagaaagcgtccagatgctattcacaagaagattgactactccatgcagcttaatgattatagaattaaagttcttcaagttctagatgccgtgatcagtactatgaaagatgctgcacttcaagaattgcagaatgtgtgttatcattggcat

SEQ ID NO: 38727 - DNA, 589 bp, Glycine max
  Clone ID: PAT_MRT3847_134971C.1
ggctcgagatcccctcctcctccttactattataaatcatctataccaccttcaccatcctgaccaccaccttatgattatgattccccacctccagctaacgagcatgtacacccttcctactactaccactcaccaccaccagcatgtgcatcggcaccacctggctattactataaaggtgctccaccaccatcactctctacttctcacgcgtactactaccgactaacagcaccaccatctagctctcctcctactccctactactgccattgtccaccaccaccatctgcatgaccaccacctacatactattacaaattcgctccacctacatgtccatctccaccaccttgttactactatcaaggtgctactccaccatctcccactcctcatgcttcctactactacagattccctccaccaccaacgtcgtatcctccaccttaccactatgtgagccctccaccaccttatccatgtgcaacgacaccataccagtacacagcagcaccttctccttgcacagctactgctcccaagttcatttacaaatcacctacacctgcagttaacatatatg

SEQ ID NO: 38728 - DNA, 373 bp, Glycine max
  Clone ID: PAT_MRT3847_134972C.1
ttccaatatcaagaatgatttcgatttttgtttaccacgatcgtctttttttcttttcaccaaaccgatgtggctgaacctgtttaagcatgtggaggcccatttcactgtatgcccaaatctttgcctagaaaaaaaaactttgtcgttcaaattagggccaagactctctgtttgggccccctacaacgaaatacgggtcctgggtataatataaacgattcaactaaaccgcccaatagaccgcattgaaccgacacataccaccttggcccctattgctcccccaccttattcatagccacaggggggcctgtgaaccttgtcatctggcaggaagattccttggatggcttctccctttccgtaggtg

SEQ ID NO: 38729 - DNA, 163 bp, Glycine max
  Clone ID: PAT_MRT3847_134973C.1
aagcaccgacaacaaagattcaaacttattagaagtcatttgaatcacgacctccaatctaaaacactttctttacaaggaattatttacaaatttttttatctaacaaggtgttaaaatttcttctaaaaggtctttagaaaaaaactgaaagaagactgct

SEQ ID NO: 38730 - DNA, 205 bp, Glycine max
  Clone ID: PAT_MRT3847_134974C.1
gttttgattgtttttttttttttttttttttttttgtgggggggagtttctggggttttttttttttgggattacctgggttgcggaaagacccaaggaaagaccggtttaaggtaaggaaacaaaaaatgttatcccttcgacaagccgggtcggcaaacttgactccggtggctagaaaaaaaagagggttttccccgcgggg

SEQ ID NO: 38731 - DNA, 258 bp, Glycine max
  Clone ID: PAT_MRT3847_134975C.1
ctaatttcatggttgctgttctaccttttttgtgacaggctgtttgtggattgggctcagagaatttgggagaggagattggagaaacatttcaaggaattgttgtggggacaagaacaccaactcaagtagctagccttgcccagaaatactttttcggcagaattccgtgaagaaagaaaggaagagatcaatccttcattacattaccactttggacaggaacttaatttctgggcccattgattaaaaacgggt

SEQ ID NO: 38732 - DNA, 488 bp, Glycine max
  Clone ID: PAT_MRT3847_134976C.1
ggctccgaacctttgggctgattgatgtgcttggtgagaagatgatagaagggtataaggacggggatataagcgctttcgccgagaaagccgaggccgccgaaatagtatacgtcgaggaaaagaaggggccttctgataagaccaaggagaagtcattagggtataagaagatagaggaggttatagtcatcatcttcttcttattattcgccgtactaccggagtacggcgaaggcgtctactacgaaggagaggttaaggagaagaaaggcacaccagaaaagacaaaagagaagtccttcggccactatcttaagatagaggaggaaaaggaaaaggaaaaggagagcggcgtctaccgacacccaagaccgagataaggtccccccgccggccggagacgtacgaccgcggcgcgtccccgccctaccctactacacgatagttccgcgggccctcccggcgccctccgacgtacatccaac

SEQ ID NO: 38733 - DNA, 490 bp, Glycine max
  Clone ID: PAT_MRT3847_134977C.1
ggggggagttgtgattactctctcttctctatgataaattgacgctctctctacaattgactctatactccagctgaggtgttcctgtccctggaagtacccgaacctagtcccctcttctgaggctcaacagtcttttaccttctgttggaagctcacattcgcgcggcggcgggggtgctacattttccccttctttctaggaactttttttattatattaagggcgagtctctcacggtctcaaacaggagctagagagcaacgaaaaaataggtcctagtgagtcttatatttaatcacagtctctgtgctcttgtgatgtacgttccctacagactagaatttgacatcttaagccaccctacatccctcgcgatatttctcaagatggaatcttttaaaccgcgggccgcgcccccaccaaagaagttgggacgcacttttgcgaaggaccttcatgtcgaagcactgagtggacttgcttcag

SEQ ID NO: 38734 - DNA, 325 bp, Glycine max
  Clone ID: PAT_MRT3847_134978C.1
gagagagagagagagagaactagtctcgagttttttttttttttttttactaggaaacactatttctatgatacaacagtcaaatcagttacagattgttggccttagaacttagaagtgtgtcatactatacatatcaccaatcaatccaccaatgataataatatcaccatcatcatcataagaatacaaaccttttctctcaaaattattactagttgactctaattttttttatgtgtgagaatcaaaaacatattaaaagacttataataatttatatatatttttaatcaactgagtcgcacttttttgttactaattc

SEQ ID NO: 38735 - DNA, 1964 bp, Glycine max
  Clone ID: PAT_MRT3847_134979C.1
acgctgcgagaaatcgcaagaaaggggaatgtcagcttttcttcttttatatggcaccccttgctttttctttttcatctcccaacttagaaattgaattcaacccaacactactaatacactgtgcctgactcacttggaaacctaacctagggctttttttttttttgtttatatattttttggattgttgtgtccatccatcaagtggtgtttgtgtataaattttgtgtggtttgttttctggattaggatttggtttctgtgtgctgtgttaaaaatagtatcaatcaatcagaaaggaaaaagagagagttagggaagatgagctggcgcagggtattgaattcagcacaggccttggctgcacacactttccttttgtgcttcactctcttcctcgttctcaagctcgatcacaatctctcttcttcttggtgggtaatattttcacctctttggatgttccatggtgttgtggctcgaggaaggttttcattacctatcgtggctatgctgcagttggtctaaagatagtgtttcttcccttactaacatttgaaatcattattctcattgacaatttcaggatgtgtaaggctctaatgccaggggatggagaaaatatgagtgatgaggctatatgggaaactcttcctcatttttgggttgctatctctatggtgttcttcattgctgctacagtcttcacactcctaaaacttagtggtgatgtaggtgctctgggctggtgggacttgtttattaattttgctattgccgagtgctttgctttccttgtatgtacaaagtggtccaatccagtcattcatagaaattcaagagaagccagtagttcatcttcaactacgattacatatcttgactggaacagtggtttagtggtttctacagacgaaaatcaacaccaggggagaatgtgtagccttcaagacataggaggtcatttcatgaaagtaccaattattgtattccaggttcttctttgtatgcatctagagggaacacctgcttgtgctgtacatatacctcttccagttattttctctccccttttcctactgcaaggagctggggtaatgttatctgcatctaaattaggggagaaacttgtgcttctgctacgaagtggagctggtggaggaatatattttagattttcttcaagagctcatgattgcttggggttcttgcatcatggttctagattattaggttggtggtcaattgatgaagggagtcgggaagaacaagcacgactataccatgagggagcaattgggtataatacattttgtggttatcctcctgagattgttaagaaaatgccaaaaaaggaacttgctgaggaggtttggagactccaggcagctcttggcgaacaaactgaaattacaaagttcagccaacaggagtatgaaagacttcaaaatgagaaagtgttatgcagagtttgtttcgagggagagattaacgttgtactgctcccatgtaggcatcgtgttctttgcagcacttgctcagagaagtgtaagaagtgcccgatttgccgtgactccattgctgagcgtctgcctgtatatgatgtttagatgttaacttggtcaacttttttcgtgttaaaagatcatagaagaaagggactagacaacatgttttaacagggtgaatatacttagtacagtgttggcagtgacattaattcgacaccaacttgactgtctaatacagcatcaaaggataggaagaaaaatagagcatccacttgatatactttggattttgagtttgatttgttttgttttgcattcagtctcttctgtaatttgtatatatatactatctttttacaggctctacaattgagtgatgagtgttgaatttgagtctcttttcggttccttggccttcactctcatctgtaagttgtatatattctagct

SEQ ID NO: 38736 - DNA, 2015 bp, Glycine max
  Clone ID: PAT_MRT3847_13497C.1
tcggcggccgcccttttttttttttttttgaaaacaactaatatatgttttcccatatttataagcacaataatgttttgttgtaaggtccatataagggctaacaaagtgtagtaatgtgacaaatatttgaattctgttatgcttatctgaggaaaacaaaatgacagtaactataagaggacttgcagtgatttgaaacacaatattatataaaattaatcgcgtttgattggagtagcttgaactcgaagaggctgaaccttctttaatgttatcgcatattgctcctccatgttcatgtgttctggaattaacccatcagctagcttccattcaaagttgtgtacaagggatgctactattaaatgcattgtcctgtgagctaatggcaatcctgggcatatccttttaccagctccaaagggtatgagcttaaaatcgtgacctttaaaatcaatctcacatttcaaaaatctttcgggcataaaaattgttggattctcccaaatggttggatctcgtcccatggcccacacattgaccaagatttgtgcatttttaggcacattgaagccagatatgtttaccatttcatcacacttatggggtactaaaagtggacctggtggatgcaagcgaagagtttcctttaccactgcttgtaaataccttaacacataatataatattgatttttaaatatatattaccaaagattcgattattggtaattaatcatcacttacaaattgtagccatatgatcaagcaacatactctcttattataataataatttattgtgatagggtaggcataacaatttcaagacacatataactacaacacatactctagctttaagtagtgtacttcaagtaagatttagctatgcgaccacatgctccgttagggtagaaaccaccaggaacatgttcatcacctcctccatatattatcctcaatatttcctctggagttctaggatatgatagtgaatctttgtcaccagcgagaatgttgtctgtgacactaccctcagcaccttgcactctaggcaccacaagaccctcgtctttcacacctgcatttcctagcttgttcctaagcattgaaatgcgatctgtaaactctgccacagtcactttgtatggttgcaccaatgatgcttggcgttcatacaacaatgttcgaataaccgcatcttgcccggactctactcctagaagtcctgcaacaagcctcttggaagtagcattttgcagcagtggattggcaccaacataaccagtgagaccaacatagggaatcacataagatgctaacagatagttgatcgaattagcataggggtcaaagggaggaacaagaggtctcccaaatgcactattcattacttttgcaaaagatgctgtgcttagatcaagtaacggccttgggaaccctctcactgtgctctttatggccctcaagtgtccaacttcctgcaaaccaaactgcaagatgatatccctgatgaggttctcaagtctggccaatctggcaccaatgggagggggtcctccctcacttaaatttggagcaaccacatccaatccatgacccaaggaaccaaataagaaaaactcagcctccaagtattctaaatttaagggaaattctaacagatcaacatctgattctgaagctgatgcacttgcaatgaacacagaagaagaagaatattcttgaaaaaggagggggaggactagagaggctagcaaaacaacaatagggactctgcctctagaaatttgaggtgccatgttttgttttaggttcttttttccaaagtgagggaatcgtgggttgtaccagtctttggtggcaacattctctcttattataataatgattgattgtaatagggtaggatgcccatgccactcttggatgtactcacaaaggtaatcagtatcataagtagtgtacttcaagtaagatttagctatgcgaccacatgctccgttaggg

SEQ ID NO: 38737 - DNA, 888 bp, Glycine max
  Clone ID: PAT_MRT3847_134980C.1
ccacgcgtccgtttcagatgtcgccccttggtttttctttttcatctcccaacttagaaattgaattcagcccactactattacactcactgtgcctgactcactcagaaacctaacctagggcttctttttatatatattttttggactgttctgtccatccatcaagtgggtccgctgtataaattttgtgtggtttgttttttgttggttttaggattaggatttggtttctgtgtgctgtgttaaaatagtatcaatcaatcaaaaaggaaaagaaagagagagttagggaaggaagatgagctggcgcagggtattgaattcagcacaggccttggctgcacacactttccttttgtgcttcactctcttcctcgttctcaagctcgatcacaatctctcttcttcttggtgggtaatatttttacctctttggatgttccatggtgttgtggctcgaggaaggttttcattacctgcgccatctgctccacgtaatcgaaatatcgtggctatgctgcagttggtctaaagatagtgtttcttcccttactaacatttgaaatcattattctcattgacaatttcaggatgtgtaaggctctaatgccaggggatggagaaaacatgagtgatgaggctatatgggaaactcttcctcatttttgggttgctatctctatggtgttcttcgttgctgctacagtcttcacactcctaaagcttagtggtgatgtaggtgctctgggctggtgggacttgtttattaattttattattgccgagtgctttgctttccttgtatgtacaaagtgggccaatcccggcattcatagaaattcaagagaagctagtggttcatcttccactacgattggatatctt

SEQ ID NO: 38738 - DNA, 834 bp, Glycine max
  Clone ID: PAT_MRT3847_134981C.1
tccacgcgtccgcccacgcgtccgaaaaatagtatcaatcaatcagaaaggaaaaagagagagttagggaagatgagctggcgcagggtattgaattcagcacaggccttggctgcacacactttccttttgtgcttcactctcttcctcgttctcaagctcgatcacaacctctcttgttcttggtgggtaatattttcacctctttggatgttccatggtgttgtggctcgaggaaggttttcattacctgcgccatctgctccacgtaatcgaaattgggcaccatgccatgccgtcattgcaacaccattgcttattgcatttgaattgctcctttgtatataccttgagagcttatatgatcttggctatgctgcagttgatctaaagatagtgtttcttcccttactaacatttgaaatcattattctcattgacaatttcaggatgtgtaaggctctaatgccaggggatgaagaaaatatgagtgatgaggctatatgggaaactctccctcatttttgggttgctatctctatggtgttcttcattgctgctacagtcttcacactcctaaaacttagtggtgatgtaggtgctctgggctggtgggacttgtttattaattttgctattgccgagtgctttgctttccttgtatgtacaaagtggtccaatccagtcattcatagaaattcaagagaagccagtagttcatcttcaactacgattacatatcttgactggaacagtggtttagtggtttctacagacgaaaatcaacaccaggggagaatgtgtagccttcaagacataggaggtcatttcatg

SEQ ID NO: 38739 - DNA, 192 bp, Glycine max
  unsure (1)..(192): unsure at all n locations
  Clone ID: PAT_MRT3847_134982C.1
gggggggggggccgncgtccaggaatgttcgctcctcacatatacctgctctcaagttcttgctctatgggggaacagggtggattgggggtttgctggggaagttgggtgcaatacatgatattccctaccaatcttgaaaaggacgacgggggggggggtcatcacttatggctgatatgcggaatgtgg

SEQ ID NO: 38740 - DNA, 503 bp, Glycine max
  Clone ID: PAT_MRT3847_134983C.1
ggctcgagctcgagccgaatcgtgttgagatttgaccaattttttgttcatatcttgtggtatcaggagaaagtgttatgcagagtctgtttcgagggagagattaacgttgtactgctcccatgtaggcatcgagttctttgcagcacttgctcagagaagtgtaagaagtgcccgatttgccgtgactccattgctgagcgtctgcctgtatatgatgcttagatgttaactagggcaacttttttcgtgttacaagatcatagaagaaagggactagacaacatgttttaacagggtgaatatacttagtacagtgttggcagtgacattaattcgacaccaacttgactgtctaatacagcatcaaaggataggaagaaaaatagagcatccacttgatatactttggattttgagttcgatctgttctgatttgcattcagactcttctgtatttgcatatatatactatctttgtacaggctctacaattgagtgat

SEQ ID NO: 38741 - DNA, 413 bp, Glycine max
  Clone ID: PAT_MRT3847_134984C.1
ggggcccaatctcctgggtgaatttcaacattccattctattttttctcggacccaaaggggaaaatgttttgcaacttaattttctttccctacctcccaacaacaacaagaagaaacacccaaggaaggggccctactgacaaaacccctttttttcaacatacaataaaagttaccctgcccagctccaaaaaaaatcattcaaaaattcttccatctgaccttaattttttttttccctaactaaactaagggtttttggaatcccaactcaacaaaacattccctttctttttttctccaaagcaaacatgggaacttggttaaccaatcccaaatttccaaacctgggggggcccatgggggcgttttcattggtcccatcatcaaattttggtccctcaaggggga

SEQ ID NO: 38742 - DNA, 360 bp, Glycine max
  unsure (1)..(360): unsure at all n locations
  Clone ID: PAT_MRT3847_134985C.1
ggttgctactagattgtgacaaactttagtagctctacctgttattctcttaaatttacactgtttctgcatgtttaagccacatcctttccctgaggaagatcacgaccctgttggctcttcggtattcgtatttctaaatatatgtcattatgtaagtatgcttctatgttcttccaatttgcatcctctggcatctcaagcctccgtacatatccatattcccaccaatggccacacctncagtcatgtgcctttgagtctctttgctgcttccactgtccactaatttccacaaccttccctttatcaacatggacttgaatgttatttttaccagttcctgttttgacaaaccac

SEQ ID NO: 38743 - DNA, 762 bp, Glycine max
  Clone ID: PAT_MRT3847_134986C.1
cgaattcggctcgatattgatgtgcagcatcagtgagaaagccaaaaggaagcgccaatctgcattccgcggagtgcgcaaacgcagctggggacgctacgtctctgagataaggctcccgggccagaaaacacgcatatggctcggctccttcggctcgcctgagatggcggctcgcgcttatgactccgctgctttcttcctcaaaggaacatctgccactcttaatttccccgacctcgtacactccctgcctcgacctctctcatcttcccggagggacatacagtccgccgcagctgaagccgctctccactctccgcctcccaaagaagaacaagaatctattttcacttccaccaccacctcgtcctttcacgatgtcatggaagctcctcttatgagtccccttagggtggactccactttcggagatttctcatgggaccaactcttcgatttcaacgatgacattctcatcgtgggatcaacttctgccactcttgtcccttaacgctgcttttgcaattcgccacccactgcttctagaaactagctggattttctttcactttctgttaataactcttctctgcttttctaagacttgcttctgaactcttgtacaaaggagctctccaagacaaatatatatatatatatatatatatatatatatatatatatatatatatatatatatatatgtttactgagagactgatttcactaagcaccttaattaaataagtgtttctgaat

SEQ ID NO: 38744 - DNA, 352 bp, Glycine max
  Clone ID: PAT_MRT3847_134987C.1
cggttcgggcctggatgtcctgacaccggacctaagaacctgaggggaaatcaatcacgacttggtgtcaagacttgctcaaagaagtcctactcatgtgggtacgagtcgttaagggaacgaaaagcactctgtgagctgagcacagacttgagggataagtgtaatggagcactcctaatctatttgctgaacactgtcctatttgaaataagacttgcagacagataacaactttccctgccaaattctcagggctgtatttaattgcaaggtcaggctgaccaatatttggattagtgctcccactcttctatctggtataagactgcgccgatagacttttctacct

SEQ ID NO: 38745 - DNA, 306 bp, Glycine max
  Clone ID: PAT_MRT3847_134988C.1
tttgtgggggcgtttttttttttttacaatacaagaagagcttatgagcaaattatttaagcttgaattacaaaaccttgtttacataaaactagggcttattactttgaatttttcaaagttgtgcaaattttaaacaagaactttctgcacagtgaaaggtttgctataaacttttggtggatatcccaacaccgtcttcacccatataaatatgctaacccaggtctttgagagtccatttctttcatgtccaggtgcaaggtacacattttacagtttttccaaaggtgggttggggggctt

SEQ ID NO: 38746 - DNA, 552 bp, Glycine max
  Clone ID: PAT_MRT3847_134989C.1
ggctcgagtttttatattaaatattttaatttatattcttaattaacgaaggcattatgacaactaattttgtgtgtgtgaatttatagatacgttacccaagcatatgctatcaggttcaagtcatatgttaatatttaaaattaagatattaagacggttaagaaagaaagcaattactactaggaattaaaataactcaaaatcaagacaagtaaaacttgtggactgcatgcaggttttttttcgtatatatagattgcatattatttatgtacttgtacaccaaaagcataattatctagactttatattattaaaaaaagtaatagtatgcaaggaagaatttaattttaaatgaattgaagagatattttcctgacaagattaaaaagattaaattaaaaatatttttttggcaaaaatttctaatcattttaaatttttttctttctttcttactctcaagtttataggtgagaatggattacgtgatcgttgtacattccattgttcaagtaagtgtggttttttatttaagtgtcgaaattt

SEQ ID NO: 38747 - DNA, 403 bp, Glycine max
  Clone ID: PAT_MRT3847_13498C.1
tcctcatagagcggctgtcctttttctttaataattaaaccaaaaggagaggggaccaactggatcttaaaacgggaggaatgcgtgttaactataccatgcatggctacataacctgagagaaagcagacacactctaacttataatagatcctctaaccctaacaagatatgaacaatggggatcacacaaaaggcacaaacgtctgacatgaggcacacaaagtttcataatacattgggagactgacttggcctaaccagaaattaaagtggagaagactcggtgttgctggatccaaagaattaaaaggtgtcactaagtttaggcgagggaagcaagatgacaaaggaaggcctttaattagtcaaaagagaaagaagcatgaattaatcaatggac

SEQ ID NO: 38748 - DNA, 353 bp, Glycine max
  Clone ID: PAT_MRT3847_134990C.1
gtccgaacttcttgaaggttaacacgtataggctactcaggcagcagagtgctatatataactacgttgaatacggagacattgacccaacgcctttgggctgttttcaagaaaaagtgattagatatctcaggtcttgataccacaacggaaaaacggtccttctcccatcacactctcgctaggacacacacaagtgaagccaggatcatcccactgactacttttggcaaggctagtccaagtgccgcacacatcaccaacgttctgcaacactcaggatcgcgcatcattcctgattggacaaaatctaatgtgtacagcccagacaacaccagcacgtcgagtgtttc

SEQ ID NO: 38749 - DNA, 483 bp, Glycine max
  Clone ID: PAT_MRT3847_134991C.1
ggctcgagtggaggacaaaggtaacctacatgtcacaaaaagaggagaggttgatagacgaattcaagaaagagtggcttcacaagcttcctcagccacttcatgtcagcagcaagattcttcaagtacaaggggtgctttagttggtaataatcatttagatgatgttgacattggtaatatgcaggttggaagatccaaccaatcttctgttgctggcccaaataactgggccggttttgctggtgctaatgaggcttcaaagggacctcctcaggtctctgctattcaacatgagttgcctatagaaagaagagagaatattcctagtcagtttcaaaatgttggtaacaattgtggttcacggaatcaaaattctgttaatcacttgtctttttctttaaaagagcaatggaaacctgttccagggatggacagtgatcctcatggagcaaccatgatgaaggatggaaatgttatgat

SEQ ID NO: 38750 - DNA, 372 bp, Glycine max
  Clone ID: PAT_MRT3847_134992C.1
tatcagggccagacacagcaagtgcatagaggggactagtatagaaggatatccaaggagcttgcagactatgagaaccaatctatgatcaaacagaacgcaggagaggggtaagaacatgctgaggtattaactaggctcgctgacgacaatgcgggaaccatccaagctgaaaaaaggcgtaataaagagggcgatcgccccaatgggcatatcaagagtcctgctccagagggatgtgtgcctttaactaaaggaggaattggtaatgggacaagtgagaatgtgacgctgagagtcgctcttgcaagatcagaatctgtaattgatgcatactaggctggacaagaggcatacgggctaaatgacact

SEQ ID NO: 38751 - DNA, 393 bp, Glycine max
  Clone ID: PAT_MRT3847_134993C.1
tatcaacaaaattcttatttctcataacgactactgctaaaaacgccattgacatttgtaacattgccaaccagaaccttatgcacaaatggcttaaatgtggcaatatatttctcaaatgaccgtggtgcttaaaagaattttcatttataaaaactaaaaatgtcattggtgttgaaaataaaggaagcaaaaatctttaatcaaataagggtcttttataaaatagttaagcacaatgctgccatgattctttctataagccaccaacaatccaacatgaacatatggctactgtatcctctcattggatcttcatttcaaaaaaccctcttcctgtttgcttggcactaactttgatctctggttttccccacccacaaaaattaccct

SEQ ID NO: 38752 - DNA, 307 bp, Glycine max
  Clone ID: PAT_MRT3847_134994C.1
acaacgaccaatccacctacctcgccttcatattctacaattactactagaactgctactacaccttcgactacttctaacattaccttttaatcgaaatcatcaatacttatactctcataccccaaacattctattcctaaagcattctgcatccatatcttcacattctctacaaactctttctcttcgacttacacaacctttaacctaactaccttacataattctatctaatccatctcctccaattacttatctctgacattcacgcaatctcatccctttcatatggttaattctattt

SEQ ID NO: 38753 - DNA, 661 bp, Glycine max
  Clone ID: PAT_MRT3847_134995C.1
ctttatatcacacattaagctacctgaactttttgtgtctatcatcgaagctgaccgaccactgattttgttgctttgtatactatattactcaatattcacatatgccttttgggacatggccactgccttgcaaagaccagcgagctttgctggaagaatcctcagcaaatgcatattatataaccctctttacagagactacaaaatggaactctaagaactgaagatgcttacgacttacaagatatcatactacaaagcgacaagggtctctttttgttggtgaacaaaaaaacaataatggattctggggcccccttgacagcatttaccgtaggagagtgtgcttgtggcgaaacacgggcttacattatggagaaaacctggcctgtccgaccactgatgaaccatggagcaagggcctatcggaagccggaagataaactttgactatatgccgcaggatggagcactgtgattgcatacaacttgaaagtgcctgagaaactcaaagaggtaccttaatgcttggcagatgactgtgcctcctggatagcaatgagcatcgtgagataataaagaaaggcgtcatgagagacattgtctgcttcagagaatagattatacatgcacctagcatgcaatggtacgactgact

SEQ ID NO: 38754 - DNA, 282 bp, Glycine max
  unsure (1)..(282): unsure at all n locations
  Clone ID: PAT_MRT3847_134996C.1
tcgcatggcacttcgatcttcgaagcttctctctcgccttatncanncgtctttctgttcagttgcagatgcagatgcagccctcttctcttcaatnactcganagatgagcatggangcaccagagtgttgcttcnncanttacatagttctggattgttgaggantcangggcttgttggagggnaatggagngcatgcntatganggncaaaacccataaaggtttatcnatcccagcaantggtgaacnattgtagatgttgcatgcatgggnggaag

SEQ ID NO: 38755 - DNA, 656 bp, Glycine max
  Clone ID: PAT_MRT3847_134997C.1
tttaacgcttgagtaaaaaaattcctgggtgttttcatttctgaaagcgtacatgtttcccccgtttttgctgcaaaatataactaagctattgtctcagatgctcgcaatgtcttcctaaaagctttgcctattttcctatagagcgttgaatcttttgaaggagctggagggcctggaactcttatgatgtctattcttgctgaaggtttaggtttttgtgaagccctctgtaaatgcctattgcactgaaactcttgtgtactacttttagtgtgatttgaaggccagtgcctattgtcggaagctctttggaagaagattatgtttttgaagttctaacttggtggcaaccctcgatggaggatcctttgtgaagtcctcaagcaaatcttttccaaaggtgatgagcctcttgccgaaaaatttgtgaagcttgcaggagagatcttgaagtttcaccaaggcttttgaagattttcattcaggcttatccttgtttccacttatttagtcaccaattttaatttagtcttaattttataaataatggtaattttgtgtttttttttccctcttgacgtgtgttgctttattttccaataaaaatttttgtttgacttttctttattggaaaaagttttgagatttattac

SEQ ID NO: 38756 - DNA, 357 bp, Glycine max
  Clone ID: PAT_MRT3847_134998C.1
aaccccggattcggctcgagatcaccattgctagctttcccattccttatgacatcatttataccaacctatccgacctctctccagttcttgcgctttattcaaactatatacctccattgatctatgcaatgatgccaagctcaagggatttggcactgagaactgtcactgttggatcgcttcttatagcctccatgttcggtcgagctatcaatcacaactagaacccaactccttaactccactatgcttttactgataacgaatttgctcgagttttgcaagcatcactcggtctcttcacgttaccatttatcggggattttctgtcacatgcaaccatactatggttca

SEQ ID NO: 38757 - DNA, 332 bp, Glycine max
  unsure (1)..(332): unsure at all n locations
  Clone ID: PAT_MRT3847_134999C.1
ccccccctttttttttttttttttttataatattaatttatacagtgctttttttacacattgtttcctcactttccttttcctcatcatcaacatttttcttaaccaaatctaaacaatcatcacaaaactactatcaataaccaactcatcccttctctctcacttctaaaaaaaatcattctcccctcaaaatcaacccanntaccaacattttttccaaacctttccctccctttaaactccttctattccaaaacacaatcccactccacaacatccacccccaaattctctttttcatactacaactaacactcttttaacataac

SEQ ID NO: 38758 - DNA, 1573 bp, Glycine max
  Clone ID: PAT_MRT3847_13499C.1
cccacgcgtccgctggcgcgcaacaaaacgtacttcacttcgtgccttcagaaaccctaattcccaaatctcaaacgaaccatggaattcaccaagaagcgcaaaaccgaagagaacggcgacaccaccgattatccgccgcagcaatccaccgaagaatccccaatcgccgccgtagcccccgcccccctcgccgccgaagacatccgcaagatcctacaaccgttctcccaggagcagctcctcgacctccttcaatcggcatcgctccgccaccccgacgtcctcgatgccgtgcgcgccgttgcggacctcgattccaccctccggaagctcttcgtgcgcggtctcgccggcgagaccacgacggagaccctccgcggcgtgttctcggcgttcggcgaattggacgaggccatcgtgatcattgacaaggccacggggaggtccaagggctacggcttcgtcgtattcagccacgtggacggcgcaattctcgccctcaaggagcccagcaagaagatcgacggccgcatgaccgtcacacagctcgccgccgccggaggccccggcggcggcgacgtgtccctccgtaaggtcttcgttgggaacgtccccttcgagatttcctcggagaggctcctcgacgagttcctcaagttcggagaagtcgaggaagggcctctggggtttgacaaatcgagtggcaaaagcagaggtttcgccttcttcgtttacaagaccgaggaaggtgcaagggcttcgttggttgaaccattgaaaacaattgaggggcaccaagtgatttgcaaattggctgtggataacaaaaagacgaaaccttttgttgcggatcagcatcagcagcaacatcatcagcaacatccgcagcaacagatgcagcagcaaggttcaatgatggtgcctcagtatggtggatatggtggtaatggttatgggatgcagcagcaacagcagcagcatcaggtgccaccgtataataatcaaattccggttgccggtgctggcgggtatggccatggatatggtaattcacagatgggcgggccggtttctggtgattatggtgcgagggtgcctcccagtactggtggggggtaccctgatggctcgcagtatggcttccctccttcatcgggccatccgccgcagccgcagattccgatggcgagacctcctggtggaatgtaccaaggcatgccaccctattattgagataatgaaatctttggttttggttacatggactgctgtaatttgttgctgcttcactacctctgcatctatgtgttatggttccatttgtgatgggtgttagttgaagcttacatgacttggcgtagtacttgaatgtagtacttatgtagaatttatgtagaatttttggttcatagtttttacctagtttagtttcataagttattgactaaatgccaaggtggttacattaaattttgaaatgtctcttattgtgctctttcgtgcatatatgtactctgtggttgtcgtgaaaaccttaattttgttcttttaacttccgctagttgcaagt

SEQ ID NO: 38759 - DNA, 373 bp, Glycine max
  Clone ID: PAT_MRT3847_1349C.1
ttctctttgacgatacatctcttcgctccttgaaccggtgacatcatatccaacatggccaaagacccaaatggggagctggtcactggaactgcagggccaattgtgcatgctctggtccctatgatggctaagggagagatggtgaacactgaccaggccgtgatcctccacatgcttgacattcctccgacagaagagtcattgaatggggctaaaatggaataggcggatgctgcattacatctacttaaaggtgttgctgacgcagctgatgagtgtgacgcatgcactgctgacaatatagccatgatggatgctgaatacacatgaagagaatgtgtggagagggatgatgctatgactaataacg

SEQ ID NO: 38760 - DNA, 193 bp, Glycine max
  Clone ID: PAT_MRT3847_134C.1
cccacgcgtccgaagggaatgatggattttgatttttagaatcaaaattttgattagtatatgcccgaggtaaggatgtaaggaatggaaaatatagttggacattttctcgaacagattacgttcaagctttagattttgattgttttgatttttcagtggaaatagacaaacacaggatgtactggttctt

SEQ ID NO: 38761 - DNA, 195 bp, Glycine max
  Clone ID: PAT_MRT3847_135000C.1
gtttggattcagatggcaacatcgagaacacctttgcattggcatgctgccaggcactgaagaggatgtcccctgatgggatacaatggctctggttggtcttgaccacataactgcacagaaggccacactgacacatgagatgtgagtgcgtgcccacgctatcctacctatgaagcagactgtctcacctgc

SEQ ID NO: 38762 - DNA, 1182 bp, Glycine max
  Clone ID: PAT_MRT3847_135001C.1
atgtttgggttttctcagcaacataacaatgttgataataatggtgggaccagcagtttgagtgatgatgaggatgatttgactcggttctttgattatgacactgcgccggggcagaatctagatgagctattcgcgccgagcattgtcactcagcttcctcccatgttgccggcggaggccacccaacaccaccatacattgcctcagcacgtgaatcagattgtgtcgtcgtctccggtcgatttgcccagccacgtcccaattgaggcactggtgcagcagaatggtggttcatcggttcagcgtcagagaggaaaagggttgcaatggactgtagaagaacacatgaaatttttagttgcacttgacgaagttggcaagggagactggataaccatctcaaaacatattggaacaaaatcttctactcaagttgctagtcatgctcaaaaatactaccttcgccaaaaagccaaaaagaaaataagaaaaagcattcatgacattactttaaatacaatttctcaccaggatgacacacaaaattcaactcctcatccagatcctgaaattcaaccagttcatgaaattcaccaaatgcaagaaatgccaccaaacagcatgactcatcaaatgagtggattcgaatattttgccaatcaacaagtccatgaaatacaacaaatgcaagacatattgtcggtgtatccatcaaacaacataactcatcaaatgggtggatttgaacattttgtcaatcaacaagttcatgaaatgccggtgtatccaccaaacaacatgactcatcaaatgagtggatttgaacattttgcgaatcaacaagtccatgaaatgcaacaaatgcaagacatattgtcgatgtatccatcaaacaacatgattcatcaaatgaatggatctgaatattttgtcaatcaacaagtccatgaaatgccggtgcatccaccaaacaacatgactcatcaaatgagtggatttcaatatcttgctaatcaacaagtccataaaatacaacaaatgcaagacatattgccggcgtatccatcaaataacatgactcaccaaatgagcggatttgaatgttctaataaagactttggaagaggttgctacaagccggagtatccaccaaacaacactagttcatccaacaattaa

SEQ ID NO: 38763 - DNA, 493 bp, Glycine max
  Clone ID: PAT_MRT3847_135002C.1
gccggcagcgatgacaaggctagctgtgcggaatcctgggcttctgcattgatttcagaattggagcactttagaagcggaaaggagaaggaaccattgtcatgcaaaagtgttggagcttcagacatagatcttatggatgactttgttgaaatggaaaatttagcagtggtctctgttgaaaaagccactgaaatctcgtctgcttctctgaaagccattagtgagatcaatggcttctcagggattgagacaaaggaaaccactcctgaagtagaaggtaaggagatcattccagtgtctgatcacatttcgactgcgacaaatgagaccacttctgaagtagtaggtatggagatcattccagtgtctgatcagatttcagacctctcaaagtcaaataagaaaacctgttccattgacatatttactggcaatattcctggttggcttcaagatgtagtaaaaatggtattggaacaaaaccatgtca

SEQ ID NO: 38764 - DNA, 714 bp, Glycine max
  unsure (1)..(714): unsure at all n locations
  Clone ID: PAT_MRT3847_135003C.1
aaattcattgatgccaagattgtggggtgctgcatgaaatgctgttttcccggttgatgagaaaaagcgtaagaagaatgttgtagaaacatatgaggctctgcagtttcttgagaatgagatcaaggacaagaaattctttggaggaaaagaggttgggttggtagatatagctggtgtctacatagcattttgggtccctttgattcaagaaattgcagggttggagctattaagcagtgagaaatttcctaagctttacaagtggagccaagaatttgtgaaccatccaattgtcaaagaaggtcttccccctagagacccagtttttgcctttttcaaaggacgctatgaaagcctttctgcttcaagatagatttgatgtagtgtgagactctcagaatttctaaaggaaaattatgtgcactacttgtttgacattgagttgttgctgttaggatttcgtttcaaaaggatatgcttgtaagttgtaatccaggatttctccatgtcaaagaaatccaaggttgttcctgacatttcgctgtttcgataaataaattatgtggcatctttctattactcaaagttcttactcctgatgatttagatacttgttttgcaagttggtgtttttcaatgattggaattttttaggcaggggcactcaccnggttgtcacaaaaacccaccgattctctttcttgccatgaa

SEQ ID NO: 38765 - DNA, 681 bp, Glycine max
  Clone ID: PAT_MRT3847_135004C.1
tacacattgcattattttacaataataaattgtcattcgtcataaatttaatatagaaaacaaaattagcgagaatttaataaccatttgtggctggtaatgcataagcagctatcgatgagttaggatgcttgctcttcgtatgcgaatgcagttcctgtggcccagaaacgatctgcttgcaatgatagcaagccaatatatttttatattgcttgtgttgtaatggtgttgaagcttcgggtggccctgcgacgtcggaaaaacgcttatttaaatcgttcggtctagcataggtcctggtctgtcttggaatttgaggactagcaactggaattccggttggtaaggatgatcgtccatctcgagtcctcaaaaattgattagcgatcgtgtaataatcgctaatgaggaaacttttgatgaaattttccaaaccagctattggtttgaaaatgaaaaattccttcaccaactcaactagatttggagtatagccatgataatcgcgtagatgtttcaacgctgcctcaccaatcgaagggaaccgcaccgatatgctaggttcaccttgattacacagaaagcactcgtatggcttgtaattgagatgatggttaatgtgggatcggacaacatcaatatgtggcacaagtggcttatcgtgaggaggaatggtat

SEQ ID NO: 38766 - DNA, 889 bp, Glycine max
  Clone ID: PAT_MRT3847_135005C.1
tgtacggctgcgagaagacgacagaaggggatttaagtaaatttccttccttgcttctttagaagaaatctagattcttttttctctgaattttttgagagtagagacatggttctgagtgggaaagtggagactgaagtagagattcaagcacctgcagctaagttctaccacgtctttagaaagcaaattcatcatgttcctaacatgtctacagaaagagtacatggagctaaagtgcatgaaggtgactgggaaaatattggttcagtcaaacactgggactttaccatagaaggtagaaaaacaagtgctaaggagaaaattgaagctatagatgatgataacaagataatatcatacagcctctttgatggggaaatcagtgaaggttacaagagtttaaggggcacattacaagtgattaataaggaaaatggaggaattgtgaaatggaccttcgaatatgaaaagctgcaggagaatatcactgctgcatctcctgattcttttttggactttgctgctaaggtcactaaagatattgatgatcatcttgtcaaggcatagcaagaaaaaaaaagagtgtgtgattggtgatgaagtgggtttggctagagttttaatccttattatctaaataaaagcatcatttagtaaactttggaatgccggatgtgtaataatgatatatatgcttcttagtgttccttgtttgtgatagaatgcatggatatgatgtttgttcgttatattgcactactatatatatgcatgtcaactgaatgcttgtatatagctcatttgtgtagttttttgggttttgatgggtgtcctttgtaaaatatgcctgttttaaatataaatacaagaaaatgaataattgagt

SEQ ID NO: 38767 - DNA, 663 bp, Glycine max
  Clone ID: PAT_MRT3847_135006C.1
cccacgcgtccgcccacgcgtccgcccacgcgtccgcccacgcgttcgcccacgcgtccgcatcaaccgactctgacccttggattggagtgtagcttcgtttgggcgccaaaggcgtttctagtcacacagaagaaaaagacttactcaagaagcttcgagaaaatgtctggaaaagcgaagaggagagatgacgacggtgcttccgacgccgactctgaaggccacgcgccgcccaagaagtccctcaagaaggattccgatgacgatcccgactctattaccgtttgcgagatttcgaagaacaggagggttgccgtgaggaactggaaaggcagcattatggttgacattcgcgagttttacgtcaaagatggcaagcaattgcctggcagaaaaggtatctctttgaccatggatcagtggaatgtgcttcgtaatcatgttgaagaaattgacaaggcaattaatgagaattcttaggaagtgggcattctagtcaattttatagtttactatggtagcatgttatatactctttttggattacttaaagtacagttaagggctacagtattttgtctaatcaaaccctttgaggttgctattgtaggatttcgattttaacctctggttgctaatgcatgtaaagtgtcctctatt

SEQ ID NO: 38768 - DNA, 917 bp, Glycine max
  Clone ID: PAT_MRT3847_135007C.1
tgtgcacgcgtccgcccacgcgtccggggagaagacgacagaaggggcgagctggagtgaactttcgcatcaacccccgagtgtcgtttcgtttgggcgccaaaagcgtttctagatttcaatttttcggtctgttttctttctcactcgcatcaaccgactcgctcccgtcttttggagtcccctctcgttcgggccccacaggcctcactcgacagaaactgaaaagaaaaacttactcgagaaaatgtctggaaaggcgaagaggagagacgacgacgatgcttccgacgccgactccgaaggccacgcgccgcccatgaagtccctcaagaaggattccgacgacgatcccgactctgttaccatttgcgaaatttcgaagaacaggagggttgccgtgaggaactggaaaggcagcattatggttgacattcgcgagttttacgtcaaagatggcaagcaattgcctggcaggaaaggtatctcgttgaccatggatcagtggaatgtgcttcgtaatcatgttgaagaaattgacaaggcagttaatgagaattcttaggaagtgggcatctagtcaatttaatagtttactatgatagcaggttatatatatagtctttttggatgatttgaagtacagttaagggctacagtattttgtctgatcaaacccttcgaggttgctattgtaggatttctgatttcagcctctgggtactaatgcatgtaaagtgacctctattatatatgctagtagttggttatccactatatatactgctaccacatccatgttatttaccccttgtttggaacagtaaagattgtggagaaataattgggaagccgaaactacaaatttcaagaaaaaaaaaaaaaaaaaaaaaaaaaaaaaaaaaaaaaaaaaaaaa

SEQ ID NO: 38769 - DNA, 378 bp, Glycine max
  Clone ID: PAT_MRT3847_135008C.1
aggaccggaccggaaaccttggacgacccacgcgaacctcaaaaacagaaggaagaaacccagggggggtttacagaggaaacgcggctaccaccagccaaacggtggaggaacaggaccagggaaccatgaaagtaggagagacggccgaacaacagagcagctcccagtgacggaaccgaggagggcggaacagagcaacgccctcagcaccaacatccgccacgaaacgaagaaacgagaacgaacaagcatggacggacagcaagacagagaaaatccgctgaaaagagcgccaggagacataaaagaggaaggggatagacacaaccggaggccggacacgccagggaaacgaaatggacaattccgagagga

SEQ ID NO: 38770 - DNA, 842 bp, Glycine max
  Clone ID: PAT_MRT3847_135009C.1
ggacaaaccgaatgaagtcattgcaattataaaccaatgaaaaacaaataatataaggcatggaatttttcgtttgttcaaatgttaaaatcatagccttttggcttatctagtacaagccctgaagtaaatttctcccgtttagcaatcacatctcttgcacattgtagatgctcctgcattatttgtcacagaacaaaacacattatctaaaaaagggagaatgaaatcagtcaatctaaaaggttaccaataattcgaacatagtgccttttacaaaccccaccaattggagaactctttctctgatatcaggtaactaagcatacttctataaaatattcataatagaggtaacatagcactttgctcctgggattagatgttgctacaaagaaaaattactagttagtatagtgggtagcattcatgctattagcaacagaaaaaatgattgctatagtttgcatcaagttcatcaacttctcaggcctcagccaatattgtttctggctacttagaacaaaaaaaataaacaaccttaaaaacaatgggaagacaattgatttgaatcaattgaagggggggttcaataatcttctaccaaatcacaaaaaaaaacctcaagttggggaccaggaacaaaaaaggaaattaaaaacggtggcaagaacttcggggagaagaaatattcaccacattaaattgaataacacgatatgtgttcaaagcccatacaagctcctaagaaagttccataccaaagttcatcaagagttgcatgcatgagttaggaaatactggtcactgatggctttttttttaaaggaaaaagccaacaa

SEQ ID NO: 38771 - DNA, 152 bp, Glycine max
  unsure (1)..(152): unsure at all n locations
  Clone ID: PAT_MRT3847_13500C.1
gactatcggccataaancaaatgaactaattatacatcgttctagggaagaacagtacaaaccctgctccaagatttaaaactctctcccaaaagcgggggtggagaacccccccgagggacgaaagaaaaaaagacccccaagaggggggg

SEQ ID NO: 38772 - DNA, 320 bp, Glycine max
  Clone ID: PAT_MRT3847_135010C.1
ttcaagtcaccctatacgcatttaaaacgaaagaatatgagtgtgagggcgagaaatcaattactacaaaacttttgtgatttactaatgttgcgaagatttaattaacttagtcaaatgacattgaatacaccaaaaaggaaaaaaaatataatctcatcgacgcttgtacaaacaaggtttaagcattggccattcaatttccttctgttgaaaaattggtttttccttttttggggaagtaaaccaaattaaccttttttttgaaaaagccctgtttcacaaatttaaaacttagtttgggaaatagcatttgaaaa

SEQ ID NO: 38773 - DNA, 233 bp, Glycine max
  Clone ID: PAT_MRT3847_135011C.1
ctttgggctgatttatgtgcttgattatgtgcttggacagtgccgtgacggtccctccggcgcactcatcagagatcacctccggtgattccacttcgacgtaactagcgattcatctgtcatcatacccttagtaaaagattacgttgggctcacggaatgatccgtttattaatacctactatatggctcttccacaccgtactagtattatctcaacgtctggaattact

SEQ ID NO: 38774 - DNA, 458 bp, Glycine max
  Clone ID: PAT_MRT3847_135012C.1
gggaaaaaaaacggaatttccctggccataatggggccaaaaaaatgggccaagccccgggccctcgggataattttttttttaacaaaaaattctggggggggaaaaaccagggccttataaaattggaccccactttttcggtttaaccgattcatagatggacgttccccaagcccccttggggggtttcagcaagccccccctggagggaaactttggggggccaccccaaactggcaaggggggagctttccatcagctccctgggagccccatggggctccgtagaaccccaaacaagaccaccctaaattcccaccacttccttctttaactgggccaattccttaataggaacctgctttccaccccctacattcaaaggccaaaggccgctttacttttcccctctgaaaacaacggcctcggccaaatgggggacgggcaaaaatccc

SEQ ID NO: 38775 - DNA, 342 bp, Glycine max
  Clone ID: PAT_MRT3847_135013C.1
ccctcgagccgaatcggttcgagggctcgagattttttgtgtttaccttcaccaaccacgcgttcaccacgtttagaaatgaagcatcttttcatcgttccgtgtttttcctttcttttttctctcactcgcagaaaattaacgcaattccacaaaagcggagaagctcgatggtttgaaagtgaaataaataaattgcactggattgggtttgcatgatgggcatgttcccttttgagccaagtttgtgaattgaagagaaggaagcaccgtagcagcgaaaaaaggatgagcgcacgggatgatgatgacccagaaaggagaagattgaatagtgggttg

SEQ ID NO: 38776 - DNA, 329 bp, Glycine max
  Clone ID: PAT_MRT3847_135014C.1
atcatccctccgttgttaggtattgtatcactcacggttttactctcacgcacagacattccaatgttagtatgacaaagtcaggaaggacatgcctacccttgttttatccatgtagattgagggaaagggccatattggagagatagagcagatcgcctaccttgaatgctacatgaattcaggcagagaggggactgcaggagtggttaaagatggaagaggtgaagaggaaaagggcaagtgatagagatgggggagcacaaggcacaagagtttacggacaaaggtcaaccaagaggaagaggaacatataggatgcatgatgg

SEQ ID NO: 38777 - DNA, 338 bp, Glycine max
  Clone ID: PAT_MRT3847_135015C.1
tgcgcttcgagcaatggagcgccagtaaaatgcttctatgctcctcctgctctgtcgccggctccgccgtctccggcgagatcatgctcttctgcgtgagagtcgcagagtactccatgaggaagagcgtgagtatgaacaacctttcgcattacgagctcactcgcgacaccgcttacatcaaagacgacatggttaccgtctactcctacacttacgatgccgctccgattatctctggccagaaccgtgacagctagcgcgggctcacatgaaccgtggacgagcgcatgctcttcttcgcggtgttgcactacgccatgtaaggtcatttgagt

SEQ ID NO: 38778 - DNA, 549 bp, Glycine max
  Clone ID: PAT_MRT3847_135016C.1
cttacaacttatagctataaatccattaagtaggaaatcaatggttaaaccccaaccgagcaaggaaaaataaaaaaaaatcctttttttttttttaaaaaatccccgagtctatccaaaattgggaaaaaggagcttctaatggccctttttctttttaaaaaaaagggaaagggatttttagtgggagccaacccctcaggaccaaaaaataccccgaaaaaaggggggcggatagtggatatatgttcaaagggggaggcccaacagttttgccgaaaagaaaaacatggggggaaaggtcatattcattagcagggtttttttgggcatcccacactttgaaaaaaaacgggggcccaaaatattgcctttcccatatggcaaacctaaagtcccacaggccttgggttttccaaagaccccaattatagtagcccaggatttgggaaacccctggggaggggggtttagccggggcatccactaaataatatggtttcccggcgggaattggcccacgggccgaacccttgaccaaggccccaa

SEQ ID NO: 38779 - DNA, 542 bp, Glycine max
  Clone ID: PAT_MRT3847_135017C.1
acaaacaaacaattgaataatcttagatcgggttgaatttagtcgctcaccgtttgtcattgttctataattttaatgttaacccctgcgcttgcgtcttcgtcgtggttatctgtagcgtccaatttcatagttatctcttcgtcggttgctgttactctttcttctgttgctacgtccttgtcttatgtggtaactactcagtcgccgtcttccatcttggttctcagcacctcgcctgttcctctaaccccaatgctaacaattcttctactaacactcgtattcagcaccatcgccatcactgtaaacttgctagtcacggccctggtccaggtcaggttgtttttcacaatcactgtcagtaatcttgtgttcagatgggctttctgtgtccttgtgatgatcttcgtaataactctgataataatgtttgtcgtattaaaattatcttcgttgttgttggtcgtcgtgatcaggctcatactacgttggttttttatcctacgttgtatgttcgtagtggtattattccgcagaat

SEQ ID NO: 38780 - DNA, 217 bp, Glycine max
  unsure (1)..(217): unsure at all n locations
  Clone ID: PAT_MRT3847_135018C.1
caagaactaaacacccttctgtttctgtattcaaagtctcaaacttttccacctgaaccaagaaaaaacaaactttgcagcaaggtttaaaaaaaaaaaaaaaaaaaaaaaaaaaaaaaaaaaaacaaacaaaaaataaacnggcgagcgtcgtaaaaaaaaaaaaaatatcggcctctactttttaaacaactaaactatcattttatatctaacc

SEQ ID NO: 38781 - DNA, 606 bp, Glycine max
  Clone ID: PAT_MRT3847_135019C.1
aaaaaaaaacaaaccgggaaattccaagttttaacataggggcgggagggggaaacccccaacaatatgggggaaaaggggtcactttacagggggggaaaaccccccccaggattatcctaggggggcaggaaaaaaaaaaaacagagttcaatttcaacatttcctatataaaaaaacaatttcctgggggggacccccaattttatccctacaaaaaccaggggctccagggatcgggccctttttgcaaaaagggcttcatcaatgggaattgaatttttttaaaaaacccaaattacagggcttcccccgaaggaaaaaaatccaaactcatctcccttttaaaaaaaggcgccctttttttttggaaaaggaaggcccccaaccatgggggccccaatgggaacaaaggccccctttccaaaatttacgggggaaactttggaaacaccttttttgttccccgggaaaacattgcagtccttgctttttaccggggggggatgggcaggttacaaccctccgggggtatctacagatgggccaataatccccgaacctggaaaagggaaacggggaaaatccgggggggccaaacggaaa

SEQ ID NO: 38782 - DNA, 252 bp, Glycine max
  Clone ID: PAT_MRT3847_13501C.1
ggatccccaacatcactagctagctccttttgtacacactctacaaccccacgtagctacatcacttaattagttttcccatatctataaccaatttcaaattctcacccttaactagctagctatatttcataactgattattaccaactcactacatattatgggctaggattcaccattggacttaaaagtagtggattaataatatatataagatgtctagcaggaggtcacggtcaaggcaaacaag

SEQ ID NO: 38783 - DNA, 724 bp, Glycine max
  Clone ID: PAT_MRT3847_135020C.1
cccggacacgttttcgatcactatttccatgcaggccctgcactattagttgatgttccaagagatacaaacatcagcgctcatgctatgaagtcattgaatattccaaggggcgtacgtcgtgtgctctgccgaacattaaatacttacatgcggttgtatcagaaggaatttgacacaagctatgtgggattcacagaagatggagcaaattggctagtggagaacactgacattaaacttgtgggaatagattaactatcagttgctgctttcgaccacttgattacagctcaccttgtttttctgaaagacagggaaatcattctcgtggaaggcctgaagcttgatgatgtggcagcaggaatatatacagtccattgcttacccataagatgcattctcatcaattagacaatggcacatagaattttgaaactggttcaggaaacagctaggatatgctgacatgcaacagtggtctgtgcttggaaatggatcttaagagcataaggttgaatgtagttttcttaaatacgaataggggcatctataagaataacgctccagaatagttactcacttatccgggattctcattgctgtaaactcgtagatctcagtcatcaaaatgtcatctctgttctttccctagccaatattttggttcaaaacaggaaggaaaagtagtaatttattttttaagtaaactttgagagaagaa

SEQ ID NO: 38784 - DNA, 253 bp, Glycine max
  Clone ID: PAT_MRT3847_135021C.1
tgtactcgtgcgtccacgcgtccgactttacgtttgtggacgcgtggcacaagagaggacgtgggcaaggagaggaaaagagtgtttcacattatggaccaataatggcaacaccaaaacagttatatgagctgcaacaacaaccaaatgtgcaatgagtgaggaactcgactatgattaacagcaaccagagaccaatgtgggatgacaaggaagatatgatttcaagatcaattctggcattggttcgtgc

SEQ ID NO: 38785 - DNA, 377 bp, Glycine max
  unsure (1)..(377): unsure at all n locations
  Clone ID: PAT_MRT3847_135022C.1
cagaccggccggaanctgggcgcccgaaggggacggaagganaaacacagaggggaaggggaccaaganggaggagaccnggancacagagagngnngcngccaagcgnngagccgccagaccgaaaagngccacagcnaangccggatcttttttatggacgttgaganggcgcnnnncngggaaagncaaaaaaaaaggcaccnacgggggggaaacgggcacaaaaaaangggngaaaaccccggcaacaaaacccnaagcgcaaagangacgcngaaaagccaaancanaaaagggaaggcnccgcagagaaagcggngggcaaaacaccncnnncancagcgaaagacgggagccaccnnncaaaangcacc

SEQ ID NO: 38786 - DNA, 373 bp, Glycine max
  Clone ID: PAT_MRT3847_135023C.1
ggacgccccccccaacctatttcaatttttttccctttaaatggggcccaagtttcatggacctttttttggcccttgggggcattcaactaaaatccttactaaaattttggggggccttcaaaagtttccttccccttaagggggaacccgcctgggcagggggcctggtaaaaaaaaccccccgggggaaacatccctgttgaatttggcccggttgcatggacattgtgtcccaaattttttttccctttcccccgttttaaccgtttaaaagggaagggtttttttttttggccaaagaaaagaaaaggccccaagagcctccttttatttccccgatgaaaagcttttgatttattggggccctttt

SEQ ID NO: 38787 - DNA, 859 bp, Glycine max
  Clone ID: PAT_MRT3847_135024C.1
cacgcgtccgacccccacttcgtggtaagtaactcttgatcgacatgcactctctctctcccaaaacgccatgagaaaaagacgaaaaagaagccacaagacccacactcgtctctgctgaagaacaaaatactaggagaagaagctgtaccaaaaaggaaatttcgagtacaaaaccccacaccttcatcttcaaatttcagaaaatgtgctacgtggggaaagcaacaaagatcttcatcttcattgtgacggtgctcgttgttctgggtctagttttgggattggggctccttcgccgccgccaccaccacaacactgcaaataaatgctcagacgaatcttgcattccttcaccaaccacatttccaaaccccaatttcaacacaccaaccccaccttctccaattgacaacaaccccactaccccacaaactcctcagcttccaaatccaattcctcctcctccttactccaataacccatctttgccgccgccgccgccgattctgcagtctccgccgccgccggaggaaacaacccctccgactcctcctagtgtggcggcgccgcctatgaacactcccacaccagggtcggcgctgttgaccccaggtcctgtgcatgctatggcctaatgagctatctatttgagtggttcttcttcttcttcttctttactttctttcatatttttactgatggggttatttaatttgtgaatgttttaattgatgagagagagagagagagtattgagataattagagcatttgtaaggtgggatagtgaatttacagagccgtccctggcatctatattgattttcaaggatgacactttcttatattgtctgcat

SEQ ID NO: 38788 - DNA, 368 bp, Glycine max
  Clone ID: PAT_MRT3847_135025C.1
gggggcactaaaagttcataatttttccataaaaatttaacaagggatttatcctgtggttgttgggagggcccatgctctccatacaaaaaaagctggcctgatattggaaaccttaagctcaacccggcggggaggcatccatttttttttatagaaccaaaaaaccccgggtaaataacatttttttacaaaggcctccattgcatacaataacaaagtttcctggaaatttatttacttccccttacaattccggtttagccggggcaaaatgctgtattttaaccaaacttaagggatgaagcccctgttcctttttttttttttttttgaaacttaaattggaacaatacaacctaactttt

SEQ ID NO: 38789 - DNA, 540 bp, Glycine max
  Clone ID: PAT_MRT3847_135026C.1
ttagtgagattataaaatattataacatgataatttcaaactttttccacatacaaaataaatcgttggttctgaattatttttcattgttaaagataaatcatattttgaaatcaatccctacttaaatttgaattattcttgatcctcagtcctcaataccttttttttttaaatttttgttttttaagaaaagaaaagaaaacttatataaagattaaaacaaattcataatcttaggaatgaaaaacatttaatcttaaaattctttcttactttaaatatctaactgttcagacgcagaatacttcacctcttccacgaaaccaggaacttgtgcctttctcttaagacgagatatacgttttcggtgccctcgaccttgtctgtgttgctcccattcatgaaatcctctaagcacacgatctccgcaggccttgcatatgtattgagtccagaggtccctttggattattttcatccccgtgtcatttgacgtcccaaagatggttccatcctcgtgccgaattcggcacgagg

SEQ ID NO: 38790 - DNA, 270 bp, Glycine max
  unsure (1)..(270): unsure at all n locations
  Clone ID: PAT_MRT3847_135027C.1
tgatggctcttattgctgtcacgtttatctcttgagaaggacaggtgcaatttaatgagtagttttgtgtatttaagatattcatttacttttggtagtaaaagtgtgcatcttctccaaatgcccacacttgtttgtccgagacactagtttcgtcaatcttggagtatatgccatcagctgttttgtccaaattttgatttatgggatatcacggaattatcctgttggagaaaaaaaaaaaaaaaaannannnnnnnnnnnnanana

SEQ ID NO: 38791 - DNA, 660 bp, Glycine max
  Clone ID: PAT_MRT3847_135028C.1
gttatgcttcagctagagccaaaaatatattctgaaaagttgatgatcaggtgctacaaattacaaagactgcataattccattcttattacaaataaaattgagaaccctctttccccatgatgagatgtagcaaattaagatgagtataataaccaaaaaagtaattctgttttctgtgaaattacaaaatgcaacagtagctcctttctataggccggaaaaaaaattcgtaactccggataagaatcaaccaaatcattcatttacagatagatgttccaacttgagcagcagttgcctatgtgtaatagaaccattgtatcctagtacggcttcaatagtataatatatttgaacataaactatcaaaacccaaaatggtcagattggaatctagaaatcacagaagggaaaaatgcttggttaattatcatctcatgtaatgcagtattaggaattttgttagacattttcagcactgtagtgtccattttgggaagttccattttctttgcttagtttagattttggtaaaagggtggccctgtcgaggaaatatcttgtttgattgctgcttcagattaaggtaagtgtaaacggacataccagcatagctgtaaatgccccacagatactgattatgcctggattggatcc

SEQ ID NO: 38792 - DNA, 473 bp, Glycine max
  unsure (1)..(473): unsure at all n locations
  Clone ID: PAT_MRT3847_135029C.1
gtttgggacatagccaaaatagtcgctggtcctaagtagtctttttttttaaagctttcttaaccatgacggaggtggcattttacaggccagggtccttgttaaatgatacgaaccttaggtgccctctccttggcgttctacctctgaagcacagtccgtaccatagtcttattttgacctttcctccctctactgagtctggtcttaataagcctgagggtaacacctctctgtttcagattgcttacctttttgcttgcttgaacgagagtcaggatgctgaaccaacgaggtgtgaccctcaggcttnttaagtccatactcatatcttgccggatggtacaatgaatgcctatgttacgttgtcttcttgtgtgatgcctttgggggaggtaacaagaggggccttatctaatttgggctctttgttctggcaaaggtaacccttgctcggaactattgaggttttt

SEQ ID NO: 38793 - DNA, 561 bp, Glycine max
  Clone ID: PAT_MRT3847_13502C.1
ccacgcgtccgcttttcttgcagaagacgcagctccaaggggggggtgagtcatatttgaatactgacttgttgaacgggtgttggatgggtactgcgactcactaccaactagccaaaccaaaatcaccgtgaattgcgccaattgtgttcattctacaatgcgtgacactatcaccgcttcttctaaacgcgcgtgaatcttcgcattccacagcgacacttcatcactctcttcattcttgtgccttctctcaccggcgccatggtgcgctctctctggggagccatcgatcggttctccggtcaacacttccaatacgtaatcaatgaactgcggaagatcaaaggtgtgggtgaacataacagggaacttgtgatgaatttgttgcgatctgttgtggagattgtgacttatggcgagagacaagatccgcacatttttgagtgtttcatggaacggcaagtgctggcagactttgttcgcatacttaagatcagtcaagagtcgaaaattgacggacctctgcttcaatatttgagcataatgagtcaaaacatg

SEQ ID NO: 38794 - DNA, 394 bp, Glycine max
  Clone ID: PAT_MRT3847_135030C.1
agcatgaatatgaacttcatgatgaatagatactgtgggaatgccctgattgtgagcaggggactcttgtccttgtacgtgaacataagacgttatgtatatgccttcaataacaataatggaagaattatcattgtatttagaatcaggtaccaagctgatctgattgaatgagaatccaatgttaacctcagacgaccatgtgtacttaacacatatattgtacatggatctatgactaactggtatcaatataagctacgtatctccgtacattcttatgacagctacaacatcaacatcgacattgccatctaaacggtcttacttgcatacatctactgcatgtgatggccgaaaatgttgacgatcatggacgacaagtctatcactc

SEQ ID NO: 38795 - DNA, 362 bp, Glycine max
  Clone ID: PAT_MRT3847_135031C.1
ttgcattcgtggttgcagatactcaaaaacttgcagatatggccgcaaactcagctgttgttgattatgattatcaaaagcttgaaccacctattttatctgttgaagatgctgttgaaagatctagcttttttgaagttcctccttttctctatccaaaacatgttggtgatatatcaaaaggaatggctgaagcagatcacaagattctttctgctgagatgaaacttgggtctcaatactatttttatatggagacacaaactgcacttgctgtaccagatgaagacaattgcattacagtttattcctccagccaatgccccgagtttacacattctattatagcgagatgtctagga

SEQ ID NO: 38796 - DNA, 302 bp, Glycine max
  unsure (1)..(302): unsure at all n locations
  Clone ID: PAT_MRT3847_135032C.1
gacgcgnagnacgtagtaanctnggantncngntcngggggtngntggcacgagggcnatggntnagnanntgtgaaannttnngncccnacagtctggaanntggtcgcatgggntccnanaggtttnncngncnnnnnnntggaancngaggcnntgggtctctcgangagngngantttgatgnggaatnnttcttcganggaggtggntgttgtgagnggtncagntgatatcagnanattttncgtagggangnttttcttgccagnggnanatgtgtgtnaggcttgaacccangg

SEQ ID NO: 38797 - DNA, 278 bp, Glycine max
  Clone ID: PAT_MRT3847_135033C.1
gttcaggttcagccaaaggcggcactaccaaaactcatttttcttcttcttcttctttagcctagttattcctcgatgacgatttcacgctctcaagcctcaagcttaagcgaccctctgattcagctggtaagtcagccaagaaacctgattctgaggaaattgatggggcaaagaagtttgaagaaatgtcaaatctatcatggttgtcaagtgaatctcaaaacaatatattactgcaacggaaagagcaatctcgtaaaaagaaacaaaaatgt

SEQ ID NO: 38798 - DNA, 1499 bp, Glycine max
  Clone ID: PAT_MRT3847_135034C.1
caaccaccgcccgagcggacacagatacgctactacgacaggtgatctggacagagagctgtatacactactggtataggggcttctgccgtgggtctgacagctgccgttcactgggatccggtcacaagggactggactcttgaccggggatcacttgttctcgctgctgcgagaagacgacagaagggggggggcgcttgttctagctgacagaggaatttgtcttattgatgagtttgacaagatgaatgaccaggatagggtgagcatccatgaagccatggagcagcagagtataagcatatcaaaagctggaattgttacatctcttcaggcacgctgttctgttattgctgcggcaaatcctgttggtggaagatatgattcctcaaaaacattctctcaaaatgttgaattgacagatccaattatttctcgttttgacatcctctgtgtagtgaaggatgttgttgatcaggtcactgatgaaatgcttgcaacgtttgtcgttgtcagtcatttcaagtgacaacccaagggtgctaatcaagatgataagtcctttagtgagtcccaagatgcacatgcatctgccatgccagctgatccagagatacttcctcaacagctactgaagaagtacattacatatgccaagttaaatatttttccaaggttacaagatgctgatatggataaactgtcacatgtctatgccgaactacggagggaatcttcacacggacaaggagtccctattgctgtaaggcacattgaatcaatgataaggatgtctgaagctcatgcgagaatgcatctcaggcaacatgttacacaagaggatgtggacatggcaattcgtgttcttcttgaatcattcatttcaactcaaaaatttggggtgcagaaggctcttcaaaagagctttagaaagtatatgactttcaagaaggactacaatgaactgctcctttatattcttcgcgagcttgtaaagaatgctttgcattttgaagaaattgtcaccggatctgcttctggtttaacgcacatagatgtcaaagtagatgatctctacaacaaggctcaagagcatgatatttatgatctgaaaccattcttcaatagcagccacttttcaagggccaattttgtattggatgaagaacggagagtgatcagacatccccttaccagatgagagtagacagtatctgggttttatcatccgtcagtttaggttgaatatttgatgtttaaggttttaaccatcgactccagcagttacttatgttgctaaatgtaggtatctcttttgagttttattgcatatattttatctgtatttaaaaacgtattccttcaatccccccaaaaaacaagaagtattccttcaatgctttgaatatttctcattagttaggttaaattactgctgatacggccttgacttcccaacaaatatgcaatttgaattgatccccttcatttggagc

SEQ ID NO: 38799 - DNA, 316 bp, Glycine max
  Clone ID: PAT_MRT3847_135035C.1
ctcccggttgaaaacaccaagctgcttggcgattcggggataaatattttcggcaaaactttggacgaggcagacaaaatttattctaaaaacctaatatgcaacttcccttttttacgttaaactgacccccccacaaaccaggctattccaaaccggagttgctcccctaggccaaatgttgctccttgtgtggatgcccctggccaactccgctaatgacgaactaacccagggagcaaatcttcattgcccaattgtatgccatactgccattgaacagctccacccttaaacgggggagggcccttttcct

SEQ ID NO: 38800 - DNA, 1054 bp, Glycine max
  Clone ID: PAT_MRT3847_135036C.1
acgaggagtttggtagaaaagcagcagaggggcagtttggggctccgacgggaaactaggaatttcttctttataaatttcgccgacaattaaacgctctttctcctttcttttccttttcaatgctcagagaagagagaaaagaaaaagaaaaatcccagtgagagagagaaaagaaaagaacgaaaaaccaagaagcttcgaaacgatcgtgtgagatgaacaagtgcgaactgtgcaaagttccggcgaggatcttctgcgagtcggaccaggcgagcttatgctgggactgcgacgctaaggttcacagcgccaacttcttggtcgcgagacacgcgcgaaccttactctgccgcacgtgccgctctcccacgccgtggaaggcctccggcgcctcactcgccagcgccgtctccgtctgcgaccgctgcgccgcctccgaagaaccggaagagagtgaagccggcaatgacgacgaaccagacacggaggacgacgacaacgacgacgaggacggcgacaatcaggtcgtgccgtggtcctcctccccgccgccgcctccgccgtcgagctcctccggcagcgaatggtcggagtgcaaaaacgacgacgcttctatttccgcctcggaacaggaaacgacaacatgctcgttgaaacgacagcgcgaggacgatgatgatgcttcttccgatcgtgatcccagggtgttgagaagggttgggcgtctcaacggaggttgcgtgtgacggagaatcgtcgttgaaaggaaggagggagtggtctggcacacgacgtcgtttcctgattggggaaagtaagattttcacagccgtacgatcgaccaagatattttttaagctctttcatcattaacttctaatctaaccgcttagaagttacaatggtttttgacatataggtttagtgttgtgtattaactattaatgtggaattttctgttttcctttatcggttttttaagataaacattgcgatgtcatcttgatgtaacctttttttttatatataaaagaatctctattttttt

SEQ ID NO: 38801 - DNA, 265 bp, Glycine max
  Clone ID: PAT_MRT3847_135037C.1
actcgagccgaatcggctcgagaaacaccaaaaggacctagttctgtcgaagacattaaagcaaccatgcaagcaagtatagaacaagcgcattgaacagtcctgggcactacatgtaaattaagcccaaagatggggagaaaggaaaaggagagacaaatatagtccatactgagtgtcatcaacaatccagactgaagtcttctattttcatctcaatccccttttctgatttgccacccatgcctcttcaggctggaaacaa

SEQ ID NO: 38802 - DNA, 271 bp, Glycine max
  unsure (1)..(271): unsure at all n locations
  Clone ID: PAT_MRT3847_135038C.1
gttgtntaatttgctatgnagttgtgnagtgtaattatgttgtttgcttantgcttanngtagacnanaanccatgtanatacagantnttgtcttngcagaagagnagtggttgtatgnttccatanatttntgttgtcttacatattgaaagcacacattacatgtccacatattttacattagtgacaagcctagtttcanacntanctgttttagntgtcccatattgctntttgcaancatcggtattgatatgncnaaagggtac

SEQ ID NO: 38803 - DNA, 483 bp, Glycine max
  Clone ID: PAT_MRT3847_135039C.1
aattcggctcgagctcgagccgaagaatcaaagtatcaaactaaataatgttattttagtctaaattgaatatgataatatttttcttttattaaatattttttaatgtatgtgcataaaccttaaagaaattgaaaataataattttgtggatttcattttatatttaataatttactctcttaaatatttccttgtaaaggagattggtataaatattaaaaaataaagagaatttgtgttatttcatgaaatgttaagatagtaaatataatttgctctattatttatacaaaaattattgttaattcgagtagaactcaactcaaattctataaataaaattttaaatttaaactttatatatgaaaaaaaatatgattgagaaagaaagatcttatccaagataattagtaagatttttttgataaaaattaatcattcacaaaattaataaatattttaaatgatgtttaaaaaata

SEQ ID NO: 38804 - DNA, 172 bp, Glycine max
  Clone ID: PAT_MRT3847_13503C.1
tcggctcgggcttaggaggagaggagggaagggattagaatgggaggatgccggctgaggtcttgcaaagcaagctcatgattttgaaaaacaggtcggctcatgaaagcctcaaggttcaagttcctgctgctgacaagtagctttctactaaggttaataagtttgcaaa

SEQ ID NO: 38805 - DNA, 710 bp, Glycine max
  Clone ID: PAT_MRT3847_135040C.1
acggagactccgtcgccggcgtccccgccggctccctcctcgtgctcaaccgcgacgacaagaaaatcttcgacgcattcgagaacgccggaactccgatgagcgactccgacgcggcggggttctgctcgcagagcagcgtgtaccgtccggggatggatgtaacgaaagcagagctcgtcggaagaaccaattggagaagacaagaaaagatggaaaatgttggagaatggaaagctagggttttcgaagtgcataacgtggttttcagtttccggtcacggaaagttgctgcaggcgaatccgacgtggcagggagtgagcaggttttgccgttggagcttgatgaagacgaagacggttttctcgttgcggaaaatccgagttttggaatgcctctgagtagtaacaacaatgctgataagagaagacatagtagttttgtgagagaagaacgagagtgggtcccaatggggagaaaaagcgtggatttgccttccgtttccgtcgcaccgccgaggaggtcatcggcggcggctgtggcgccgcctccggcggccccaccaacgaaagaaaaggaatatttgagaagcttgcgaccagcggtgtggttgacggagcagtttccgttgaagacggaggagctgttgccgttgttggacattctggccaacaaggtgaaggcggtgcggcggctccgggagcttctg

SEQ ID NO: 38806 - DNA, 140 bp, Glycine max
  unsure (1)..(140): unsure at all n locations
  Clone ID: PAT_MRT3847_135041C.1
tttgaaaanacagaaccgagcagaaccanncaaacgagagcntccggttttagcttcggcgaaagctttggtcggggttnggggtcccgngccactgctccaacggattccctctcttctgtctttcttcattcctcggg

SEQ ID NO: 38807 - DNA, 499 bp, Glycine max
  Clone ID: PAT_MRT3847_135042C.1
ctgcaggtcgactctagaaacaatacaaaaagaaaaggttaaggaaagatggatgaaatatgtgttttgattcccttctcgtagctggtttcaggcagaatataatgaagttcaaacaaatatacgttactcactagattatcaagttcccctataagttattttctacaaaaaaccaaaagatcattcttacaattgaaatagaaaacagatcagtttgcgaatagatagatgacaaaccttcaaaataaaattataaagcaatattcatattatcaaatagtttttaaatttttcatatacttagtaataatgcatagttgacaaatcactttttatgcgtacaaggtaaaatcctaataaccacagtcataaacctcttgggtgaaaacaagaaaaacagttaactatttattcctccaccaatcagaaaaaggctttcttataaattattatatcaaagaaatacatttctccttctcctcaatcacatgggtac

SEQ ID NO: 38808 - DNA, 1213 bp, Glycine max
  unsure (1)..(1213): unsure at all n locations
  Clone ID: PAT_MRT3847_135043C.1
gtaaattgctaggatctctcgctcgagtgggttccgagcatggaatgtgcgttttgggctgcccatgccctggctgcctggatcgcttattgtatgggagatctgatgggccatcaattgattggaatacaagaatgaaaattgctatatgtgctgcacaaggtctaaccttcttgcacgaagaggggccttttcaggctatgtataatgagttctcaacagccaacatacagattgacaaagatttcagcgcaaagctttcaggatatggttgtgttggacatattcccgaagaagagatttcaagcagctcatctgctgttggaaacctatcaatggaaacactggagaaaggaatgctcactccaaagagcaacgtatggagttttggaatttttcttctggagctacttactggaagaaagaatcttgatagccgtcaccccaaggaagagaggaatttagtcaagtggagccggcctttcttagccgataactaccgtctgtcgttgatcatggatcctcaactcaaaggccgctttccttctaaagcagcaagaacaatagctgatattgcacaaagatgccttcaaaaggagccatcagacagacctaccatgaggactgttgttgagcatctcaagataatacaggatttgaaatattcgtgccggttccctctgcaagaaccagcatcaaactctggaaaacatatgtcaagatcaccaagtctcaatggcatcatctgccctgcaccaaggttgagtttctcaccatcaccaccatcaggagttccggtatctgtttcgcctccaagatggtctggtggagggcccattctcctcccgccgccacgtgcttgtgcttcgagcctctctttggaggagcttgataggcaggaaagccgcaagtcatcatcctcagcctctagaagggctagtgttgaaggattttgagtgtctataatgttcattttttatttattatattttttttttttggtgtgattcaacacataatttataggagataaatgatgtggttcctccacctttaatccctcagtgtgatgccgagaggatgttcttttgtagatagtgcaaaggttggttgactgggttcaattagttacacccatttatatgaaaaattatatggtctttagcatcaacccctttctcggcannnnnnacaatgaaaaactctnnnntaa

SEQ ID NO: 38809 - DNA, 552 bp, Glycine max
  Clone ID: PAT_MRT3847_135044C.1
agttcggattcggtggctcgggcttgatcctgcccttatgcgttctggtcgattggatcgaaaaattgagttcccacacccaactgaagaagcaagagcccgaattctacagatccattctcggaaaatgaatgttcaccccgatgtcaactttgaagaattagctcggtccacagatgatttcaatgcagcacaacttaaagctgtctgtgttgaggctggcatgttggcccttcgccgtgatgcaactgaggtgaaccatgaggactttaatgaaggcatcatccaagtccaagcaaagaagaaagcaagcttgaattattatgcataggcactcaacgcaaggaaaaacgagcattgaagtttgacttgtttgctagattgatcttactcgaatcatatgtaacatacagcttgctaatttaagatcatcttttaaaacagtattctggttgcaaatttcttagatgcagctttatatatgttttatttgcttatgttttgaaattcatcgtgttagaaattttttaatattaaaaaaaaaccaaaaaa

SEQ ID NO: 38810 - DNA, 174 bp, Glycine max
  unsure (1)..(174): unsure at all n locations
  Clone ID: PAT_MRT3847_135045C.1
ctttgatctaccactactcccacttntcttcaagatccctttaaaccatgtaaaaaaacctctgtgatgaaaactaaggaattttagaaggccaagggagcactcttacagcgacgggatccctctggagggttgcctgacaacctagctggggttatttgtgggcgagtcaag

SEQ ID NO: 38811 - DNA, 1451 bp, Glycine max
  unsure (1)..(1451): unsure at all n locations
  Clone ID: PAT_MRT3847_135046C.1
cccgcgtccgctcttcgcccgctctcattcttctccctaaaatcaaatcatggccaccgccacatcccaaacccttcgattccaatctccgtcactctctctctcctcgaagctccccctctcctccgcgttctccgtctcgctccgccctcgccaccgcggctcccgccctctcgtgctagtcgtctccgccgggctcgacgcgaagcccacggtgctcgtcgccgagaagctcggagacgcggggctgaagctgctcaaggacttcgccaacgtcgactgttcctacaacctcagcaccgaggagctctgcaccaagatctcgctctgcgacgccctcatcgtgcgcagcggcaccaaggtctcgcgcgaggtctttgagtcctccgctggcaggttgaaagtcgtcggaagagccggtgtcggaatcgataatgtggatctggccgccgccaccgagcacggctgcttggtcgtcaatgcgcccaccgccaacaccgtcgccgccgccgagcacgggatcgcactccttgccgccatggccaggaacatcgctcaggccgatgcgtccgtcaaagccgggaaatggcagagaaataaatatgtgggagtttccttggttgggaaaacacttgccatcttgggatttgggaaggtgggctctgaagttgctcgccgtgccaaggggcttggtatgactgtcattgcgcatgacccgtatgctcctgctgaccgtgcgagggcggtcggtgtggagcttgtgacctttgaggaggccattgccactgcggatttcatctctctacatatgcctctcacggctgctacatcaaagatgctcaatgatgagactnttgcgaagatgaagaaaggagttcgcattgtcaatgttgctcgtggaggggtcattgatgaggatgcacttgttaaggcactggattctggaattgtagctcaggcggctcttgatgttttcactgaggagccaccacccaaagacagacacagatttcctgccatacaatggagatggattcaaactatcgattccctcaaagtggaacccaagcaaagaggttgagtacacaggtcaggttgttagatatgaggataactttgattcaaccaccaacgtggttgtcaccatcactccgactgataagaagtctatcactgactatggttcacccgaagagttcctctctaaggtggattatttactaggaaaacaggccttcttcggcgaaacacaagccgagggtggttttgatccaaatgcggtggccacggctaacatcttagagacggcaacacctgtgattgatgggaagccgtactattttctgtctgtgttgacaaggactgctgatggagatgaaggtggcaagcaccacataattagagcaactgtaaaagatggaaaactgttcatttgcaaggctcaagctgga

SEQ ID NO: 38812 - DNA, 442 bp, Glycine max
  Clone ID: PAT_MRT3847_135047C.1
gaaggctttcccgatcatcagctgtatgacgttcctcctgtctttggggggggggggggggtaaaggatgggataagtggaggagctaagagacattagatagacctagattaggagacgagagtctaaacgagacgagagccaaccgtaatagtatagaccgatgagaatggcaaagtactggtggataacatgtcgtatacgagagggacggtaacacccatatagtgaccaagagcctacagcgaatatcaacgcagatgggccgaatggcaagaggaaggagagagcaagagggagtagcggtacttaaataaaccgccccatggtgggttagcagtggttgtagtggtgggtggaatggttgggggagtaccgccggtaggtaccataaaattattcatattaatacgagtgctgctttaagtgttgtggtgattgg

SEQ ID NO: 38813 - DNA, 1208 bp, Glycine max
  Clone ID: PAT_MRT3847_135048C.1
cgtggcaccaatgagagcctcaattaccttatcccacatcgacaatctaatccaattttcccaatcatcctcttccaatatcctcgttgccacataacacacattgaaactaaactccaacaagttcctaccatagtctgaggaaagtgagtgagagaaagagatcgcagacacagagcagaatggcttctacccaatgtttcttgcaccaccatgctcttaccacccctgccagtgccagatccccatcactacgcatcttggttagcaccaagcctaaccagcttgtttgcaaggcacagaaacaacaaacaccacaagaggatattgatgtcagcccaatctctcgccgtttagctctaactgtgctcattggtgctgctgctgttggctccaaagtccaacctgctgatgcagcctatggtgaagctgccaatgtgtttggaaagccaaagacagacacagatttcctgccatacaatggagatggattcaaactatctattccctcaaagtggaacccaagcaaagaagttgagtacacgggtcaggttgttagatatgaggataactttgactcaaccaccaacgtggttgtcaccatcactccaactgataagaagtccatcactgactatggttcacccgaagagttcctctctaaggtggattatttactaggaaaacaggccttcttcggtgaaacacaagctgagggtggttttgatccaaatgcagtggccacggctaacatcttagagactgcaacacctgtgattgacgggaagccatactattttttgtctgtgttgacaagaactgctgatggagatgaaggtggcaagcaccacataattagagcaactgtaaaagatggaaaactgttcatttgcaaggctcaagctggagacaagaggtggtttaagggagcaagaagatttgtggagagcgcagcaagttctttcagtgttgcttaaaaaaacttcaacagcgggttatatatatatatgctatgtgtaaatcaacctttcagtgctatctatggtttcacgagtttcataatttaagggacttggttggattaagtatctgaatacttaatgtctccttcgttaagctgctacaaggagtatgcattttcgtaacaaggcttaaatttttattcaagagaaacaattatctcaaggaaaaaaaaaaaaaaaaaggac

SEQ ID NO: 38814 - DNA, 2271 bp, Glycine max
  Clone ID: PAT_MRT3847_135049C.1
cacgcgtccgccttcgcccactttcaatttttctctccctaaaaatcaaatcatggccaccgccacatcccaaacccttcgattccaatctccgtcactttctctctcctccaaaatccctctctccgcattctccgtctcgctccgcccgcaacgccgcgcctcccgccacctcgtgctggtcgtctccgccggcctcgacgcaaagcccacggtgctcgtcgcggagaagctcggcgacgcggggctgaagctgctcaaggacttcgccaacgtcgactgctcctacaacctcagcaccgaggagctctgcaccaagatctcgctctgcgacgccctcatcgtgcgcagcggcaccaaggtctcgcgcgaggtcttcgagtcctctgccggcaggttgaaggtcgtcggaagagccggcgtcggaatcgataatgtggatctggctgccgccaccgagcacgggtgcttggtcgtcaatgcgcccaccgccaacaccgtcgccgccgctgagcacggaatcgcgctccttgcagccatggccaggaacgtcgctcaggccgatgcgtccgtcaaagccgggaaatggcagaggaataaatatgttggagtttccttggttgggaaaacacttgcggtgttgggatttgggaaggttggttctgaagttgctcgtcgtgccaagggacttggtatgaatgtcattgcgcatgacccgtatgctcctgcagaccgtgctagggccattggtgtggagcttgtgaactttgatgaggccattgccactgcggatttcatctctctacatatgcctcttacggctgctacatcaaagatactcaatgacgagacatttgccaagatgaagaaaggagttcgcatagtcaatgttgctcgtggaggggtcattgatgaggatgcgcttgttagggcactggattctggaattgtagctcaggcggctcttgatgttttcactgaggagccaccacccaaagacagcaagttgattctgcatgagctcgttactgcaacacctcatcttggtgccagtaccatggaagctcaggaaggtgtggctattgaaatagcagaagctgttgttggggcattgaaaggggagcttgctgctactgcagtcaatgcaccaatggttccctcagaggtgttaacagaattgaaaccattcattgatcttgcagagaaattgggtaggctagctgtccagctggtagcaggaggaagcggtgtgaaaacagtgaaggtcacttatgccacctctaggggccctgatgatctggacactcgtcttctccgtgccatgataaccaagggtctgattgagcccatatctagtgtttttgtgaacttggttaatgctgatttcactgccaagcaaagagggatcaggataactgaggagaaggttattcttgatggttcacctgagaatccactggaattcgttcaggtgcagattgctaatgtggaatctcgatttgctagtgccatatcagattctggggagattaaagttgagggtcgggtgaaagatggcatcccccatctaacaaaggttgggtcttttgatgttgatgtgagtttggaaggtagtatcatactgtgtaggcaggtagatcaaccaggcatgatcggaaaggttgggagcgttttgggtgaggagaacgtgaatgtcagcttcatgagtgtgggaaggatcgctccacgcaagcaagctgttatggcaattggagtggacgaacaacctagcaaggaatctttgaagaagattggagacattcctgctgtggaagagttcgttttccttaaattgtaagatgaaatggttgctcctattattttttttcccttttgttttgtaatttggattgggcatggttgccagatgtgcccggttttgatgcattatcatccaacgtgtagcagtaatttggggggataataaaaggaataatgtgcctgttttattgagttcttgcttgttcaatttgcctttttatgatccataaaaaaaaaaaaaaaaaaaaaaaaaaaaaaaaaaaaaaaaaaaaaaaaaaaaaaaaaaaaaaaaaaaaaaaaaaaaaaaaaaaaaaaaaaaaaaaatggggcggcccccccttattgagctcgtcaccccggaatttaattccggcccggtccctgcaggcgtcccagttttccttatagggagtcgttttaaaccttggcgtaataatggccatagttgtttcctgtgtaaaattgttttcc

SEQ ID NO: 38815 - DNA, 601 bp, Glycine max
  Clone ID: PAT_MRT3847_13504C.1
tgtttccaaagagattctgtccgggattgctttgcaagaggattcccacctcgcactctcgtggttatcatcagaggatggattctctcatagtctcgtacgtctggtctatttcttgtgcacccaacaacaaatgatcagacctatgaacaaccgaggagcgtcctatcaagacgatgggcagccgttttctcgcattatccagcgtggggcgacggtcctccggaatctttccttaacttcgacagaagattataatttcgatggtctgttaggttcgatcgaatcgctgaatctactggacaccgaagcggatagccttaagagcatgttcttggccgggatggcatccaaaaaggaaatactatttggggcaatgatgaatcagagcgtcgatgcgaaggctctcagttatatgtgcgaatttagcggcttcgcaggcaacacaaacaatgacgaagtatattagacggtatttcgcttacttagaagaagcactttctcgggtactatttcaaccggcgatggtgagctagggaatatagtacttccgtatgccgtcggctcgtgatttcccaggttgtgttggcttcggtgacct

SEQ ID NO: 38816 - DNA, 355 bp, Glycine max
  Clone ID: PAT_MRT3847_135050C.1
ggctttagtccagctcatttaaggcattgttaggtgagtccatattaaatcataaatctctcttcaggcgttggccattccctttatgcgaaaaagacacggctaaccttatactaaatgaaattcttaacagaaaacattgaagatgttccttaccgtttactggaactcgttcgtaacaaagccattgagggctcccaggacctttccgagacggacgattctactatcaacgaggtcacgctctggtataggccgcaaaacggttctattcaccctgctgtggatcacagaaccccttaggtggtggctgccacttatggtgacatggaagctataagatggtgcttttgtg

SEQ ID NO: 38817 - DNA, 787 bp, Glycine max
  unsure (1)..(787): unsure at all n locations
  Clone ID: PAT_MRT3847_135051C.1
cttgcatgcctgcgtataattgcacaattgctgaggtgcttagaactttagccttcccaggagctgaagacgatctagctctgttgcaaggggtatccaaaggaggaccacagagaaaaggattattggaaaatgcagatgcaccaaaatgctgtatggttgcaacatcaggaatgcggccagagagattattgaatgagagatcaaaatgtgtcaagttatttaaatttccaagggaaggagggattgggccagaaagtgaattatgtgacagatctagatactggatccttgataggtttcctaggcttgggggaatgcttccattaagctggttatggtgtaggttaagggattccaggtttgtcaagttgtaaagggtctgaggaatttcaccttccaatttattacccgaaacatccctgcaacaacataaaagaatgaactcagattttattcagagggtttaagataatgtagagcaatttaagaaagttacaaaactcacaacccaagaagaaacttgcaattgcttatgtcatcaggaatttggccaacgaggtttagattgtgcaaatccagcaactcaagaagctcaacgttgccaaagccactgggaatcattccaccaatgaaattattacccaatttgataactattagtccacgcaattcctgaatatccactgggatattcccctccaacctattcaactccaatgccaagagctntaggctcttgcatttagttatgctgggaggaatctncccatccaaagaattccct

SEQ ID NO: 38818 - DNA, 161 bp, Glycine max
  Clone ID: PAT_MRT3847_135052C.1
gcagcaatgaaaaccatgcgtccctccttcctctgtcttataattcttgtgacccttatgcgctggtaccattgaaagtgtcataccaaacgtaggagacaagatcattatagctgcagccttcaataggtgagatgttccttctggctgcctattgtgaa

SEQ ID NO: 38819 - DNA, 531 bp, Glycine max
  unsure (1)..(531): unsure at all n locations
  Clone ID: PAT_MRT3847_135053C.1
ntcgaactcgagccgaatcggctcgagcttctgtacacttgactggcaccataggtttcttcctcgcctggctagcaaacttcaaactcttactctttgctttcgatatgggacctttgtcctctcacccattaatctctcttccacgttttgttgctgttgcgtgcttccctatcaagatccaacaaaatcaacctcgtcaaaatggtaaaaccccacatccaaatccatcttcaatgatacggtatgccatagagggtcttgctttgggcgttttgctgaaaatctatgactacagtgatcgtattcatccgaaagcgataatgtgtatgtactgtttccacatctactttttgttggaaataatcttagccatggttgcagccatggctcgaagcatgatggggttggagctggagccacagttcaatgatccactgagctcaacctcactgcaagacttctgggggagaagatggaacctcatggtcaccagcatcctgcgaccaacggtgtacgatcccacattga

SEQ ID NO: 38820 - DNA, 299 bp, Glycine max
  Clone ID: PAT_MRT3847_135054C.1
gtgttttttttttttttttttttttttttttttttttttttttttttttttttgggagggggaattacagaaggacaatatttttacccgggttttacaccgcaaaccgtaaaacaaaggcttaaataaaacaacttatccggtaaattagaaaaaattacattctgggggactaaaggactttggaaaaataattttaggaaacaagataattgttttttgttccacaaaactacttcaaactttgcaaaaagcaatggttgttcttcaaaaaatttattgcaaaagattcaggggtt

SEQ ID NO: 38821 - DNA, 457 bp, Glycine max
  Clone ID: PAT_MRT3847_135055C.1
atcataggagaacgagtttttagacccggaaatccaacaggacactgtgtgagagcccattctaaggctatagcgaggaggcacaacgcgccaaaaaaaactagctagattaaagctacgctaaaacgagtcctatcttcagcaacactcaataaacatagtaaaggatccttatggtgctcaaagcggggttatttatatatgctaaacccaagctggaagaaacaggccggatcaaagctagcacatacgagaaacatgcaaaccaaagaataaagattatggttgactgcgcgtgagaaagaggcacatctgtatagcatgccaacatacaaatgattttgaattaagtggcaaacacgagaacaggttttgccattagggacggaacaaagtcaatggctaggaaacacaaatgttgtaaaaaaaattactaataaaaaagacatatatggga

SEQ ID NO: 38822 - DNA, 219 bp, Glycine max
  Clone ID: PAT_MRT3847_135056C.1
tccgctcgagtactagatcgcgggcggacgctcgcgatctagaactagtcctcgagccggttcacacatctttaccctatcctaaaaagaatttccaaccccaggttcatatactcccgaactcccattgtgaccgccacgtctacaaatagcttcttccaacgttgaatattcaattcatgcatctgaaaaagaacagccttccatagcagcctaaga

SEQ ID NO: 38823 - DNA, 318 bp, Glycine max
  Clone ID: PAT_MRT3847_135057C.1
aaaaggggggggggttaaaaacccccaaacccacttacttttgtatagaacccataaagggttaagcctgccgcgccccggggggaccccccgaaaattgggggcggtgccctgagggccccctttttaccctaaaaggggggcgtaaaaactgggggaaagaatgggccaacgcgcggccagaggggaaaagagtatcgggcaccaatgtcaccaaaaaaaaaacccgggagacagaaaggagaagacgggggggccccaagggggcctgaaaccacattagcggggggggcaccctgggccgcctaaaaggggaaa

SEQ ID NO: 38824 - DNA, 510 bp, Glycine max
  Clone ID: PAT_MRT3847_135058C.1
aaaaagccggcccccaaggaatacccaaattaaacccaaacaaccacccgaaaaggaaaaaaagcagaaatccaccccctgcccataaggggaacaccacccaattttttccttttatgggaatgggggaaaagcccattttttttgggcaaacaaattgaaagagggacccctaaggagagccccccggaaacccatttaacaactaaaggggacccccggaaaccgggaaaacccgggcccaggaagggatacgggtaagggaaacccaccaggcccccaaagggttccggtccgtaaaaaaaaactttttccccgttgggggcccaacccaaacaaaaaaggggggggggccaataccaacaggggggaaaaaatccccccacaaatacttaactttggaaaacccccccgaaaaaaggggaaacactgggaccaggttgggtcaaccccccaaaaacccgggggagggggggggaccccagttgggggccccaacaacccaggaaa

SEQ ID NO: 38825 - DNA, 564 bp, Glycine max
  Clone ID: PAT_MRT3847_135059C.1
gctaaagaaacttttttttttttataagctaaaattaacatttatagacttgagttgaaccacacaagatgggcccaagtcagtcccgaaaagagttagatagaaaccaaaaagcacccataccaatagcaactaaacccctggtacctgaatacatatccatctaaagcacaactgacccccaatagttacatgagtatgaaacaccatcatgggggagagcaaaagaaacaccatgccaagcataaatagaaagaccaaagctgataaaattttgcgaaagaaaaaataagggatcggaattctccatcttttttttttccatccctttggataccatgaaaatcaatgatgcacttgaagctggggttgcaaatctataatttaaaaagaaccttggtggtcctgccaaaacaaaccataattcaacataaactcaaataataagcagatgcagggaagcttattttcaatatgggataacaaagctttgagcataatcataagacaaaaactgaaatctgcctttgtccaattctccataacattctattggatgggctc

SEQ ID NO: 38826 - DNA, 499 bp, Glycine max
  Clone ID: PAT_MRT3847_13505C.1
tttgggctgatttatgtgcttgcagatgatagaaggggcggataccgaaccaccgtatgacgttataggaagagaagtttggggtggccagcgctcctaccccgcgacgcactccacccacgagaacctgccgggtccatacaaggcggacgccaattccttcatcctagaaggaaatctcccctagacgccaaaggccacgcaatcgcacatgtcccctaccccgactctctcgcgcttcccgcttctccccaactgaaaaactccctctctctcctggggagtgagactaactagtcatagtccttttttataaaaattaaaaactagacaatttagacaaaaataatctttaaaaaaaaaaaaaaaaaaaaaaaaaaaaaagtggttgtctcagaggacttaagtccatgcatgtgcgtacgtgatgctacagtctcctcacagcgctattcaaacctaacctatcggttgctgccccataatgctgcgatcggga

SEQ ID NO: 38827 - DNA, 460 bp, Glycine max
  Clone ID: PAT_MRT3847_135060C.1
ggccgggccgggggtcttcaatctgcacaaaccctaacaccaaaaccagaagcgaaatcgcaatcgcaatccagcgaatatgaaggtcgtcgctgcatacttgctcgcagtgttgggagggaatccttccccttctgccgatgacatcaaacacatcctcggcgcaggtccttcctttatcctaactactctatctttttctcccttttttaatatattatgattatgattattattattgagcgttttttatttatgggttattggttgaatgctgaactgggttcgcaatagcatttctttatgtgttcaatgcaagaatgttggggggaaacggccttattttaatgttgatatagtttgggatttgtagagttggttagcagaaaactgaaatcatgccttgagaatgagatgcagtacagtatttttcttctcccagctactggcgattgaattc

SEQ ID NO: 38828 - DNA, 379 bp, Glycine max
  Clone ID: PAT_MRT3847_135061C.1
gggttcttatacctatcatgtctccatctttttataggacatcctttctcttattaaataaaagttattaataaaaataaaaaataattaatatgaaaattaaaatttaaaacaatcaaaagcatcaatatacttactaacaagaattgattgaagaaaaatgatcctgtgaattgttttcttcttatttcatctggatcttctataaatgactgtctttcatttcttcaattgcgcgattctcaccttctgcccccactccgtctactattcttccacacccttatctgaatattatacacttctcacctttatcaaaacctcttgtgtttatctttcaactgcatttattaaacttatatatctaactacttttttt

SEQ ID NO: 38829 - DNA, 380 bp, Glycine max
  Clone ID: PAT_MRT3847_135062C.1
actagctgacttcagcactctatgggacatcaaagccacaccaactttcttctttcttaaagatggaaaagaggttgacaaacttgtaggagccaacaaaccagaactggagaagaagatgttgtgattaatgatgcatgcctcataagcaatatgatcgtcgtgttgttgttgtgagatctatcatagaactctgctctctctctctctctctctctcatatgcatgcgtattctgcatgtctttcatcccggacatgcattgattttttttatgaaaaatatacgtttaatgatgtttgattaaatttaacatgtgcatggtacttgaaatatgatgtgtgctatctaaaaaaaaaaaagcggcgttaagatcaacta

SEQ ID NO: 38830 - DNA, 226 bp, Glycine max
  Clone ID: PAT_MRT3847_135063C.1
aagaaagcaagctcgtgaatatgaaattgttgttgaggcttccgattctgtagctgacgagaggatgatcaaagcactcctactgatgactcttacgcaaacgattctaatgccactgatagtggcgatgagaaagacaagcctgccaaaatggaatcaaagaaggatctgtcttctaaggcatttacttgtaaaaagaactcaccagattatgaagattgaaaga

SEQ ID NO: 38831 - DNA, 286 bp, Glycine max
  Clone ID: PAT_MRT3847_135064C.1
aaaatctcaatttcattaaaaacacatgctgatcactttaattcccttttttttattgcaaaaaactttggtatcccttttttggactaattgcaataacaaaagggtttccacctccgcaaccaatttttccgcataagttgcaaattttaaaagggttccctgagtccaccttttcagcatttttaacaaaccctttggttgatccatcgaaaccatgtgacccgtatcatggcccttaaggaaacttaaagggccatactttttaaataatccagcttcaaaa

SEQ ID NO: 38832 - DNA, 463 bp, Glycine max
  Clone ID: PAT_MRT3847_135065C.1
aaccctgttagtgtggatgaattagacgcttgatgggcaatactaagcagaaggctgaactacaggctttgggcactctcggctgtcagtatgtgccataagatatctcccttgacgttgcatcagagagattggctacatacctgctaataatgcagaagtatctaaaagttaaaatggaggttatgccactacttaacgctacagcttacctatgctatactatctctgcgagtggcacccaaacgacgaaaattgataagtgtgcttcatggctagattgttaaaaaattatcgccgatcgtctgtatatcagactgagactataaacgtgctatagatctagcttccgttaacaaggaactgcttgtattacatgatagacccacagagctgttgggttaggaaggataattctgagagaatttttcttcaaccatcttcactggcggccacctgctat

SEQ ID NO: 38833 - DNA, 526 bp, Glycine max
  Clone ID: PAT_MRT3847_135066C.1
aaagaacaagagaaagaaggctttcttggaacagagtcgcaattttcttcttgtgggtcatcctagttttttctctaataagcttgtttttctccatcaacaatgaaagcaaaaccagaaccagccattcaattcctccaaaacgacgtagtttcagcagggccttgtttcaaagaagcaccaccaccacttccaccactcaaaaaaccaagcttgttgtgagctcaaaaaatggtgatgctgatcatgatccacacactactaccctttatggagatgagaagagaataattcacacaggtccaaaccctcttcacaactagtgtagtagtggcaaattccaaccacggtagaaggttaatttaattttgtatgctagtagtgtttaaactttaatgcatgatagtgttattaagttctagtgcatatcaatgtaatccacccctatgttgtaaccattttggatttggaaaaagaatgagagcatagctttagccttttcagttagttgggagaaagaaaatga

SEQ ID NO: 38834 - DNA, 1159 bp, Glycine max
  Clone ID: PAT_MRT3847_135067C.1
ccacgcgtccggagaaaatagcgacgcggatacacactcgtcttcacgatccagcgattctactctccgatgagtctttgcagggtgaagaatcgcgagtccagccgccggtgaagaatcacgcgattcgtctggaaatcgcgattcatccctgatacagagattcaagcacgattcaggaacaaaaacgagacaacctccgattcgtatcggtagcagctggaatcgtatcgaatcctgtgatacgtatcgtgaattgtacaatactaactatcatgatttaggctagtgctggagcttatttgactaggttatataatgttgttaaatagctgccaagtgctactgcattgccgaatttcttgaattcgcaatcaccacttcgtcaactattgcggtcgctatgggtgtcgtgggtacagaaagcgtcctgcatcctcttgtcatctttggcgagtctccagccaattgaacttttgagctaatatctcaatatttacctattttattttcatttgcatacaacttaattcgttgtacatatataattgatatatatcatgtttgatgtttcaagttttcaactgctatgggacttttgctatttgtccgtgacgctatccgctatatgatatggcagatcattggctttccgccactttctgcaatccgcagttgataatactgggttatatgcatgtatttacaagtcgaagctcatttttctttgtttgatgtttgtttcctggctgcaatcatgattatgttctatgtatatcttcagttgtatattttggatttgagaaccttttgttttgttggaaagccaacacccaaaacattaaatcataatgccgatgtgtttttttttttttttacatatagaatttggatattactacatataagaacagaaaataaataaataccgccctgttttgcatggtgtatgtgagaggcattgcatagaagctgagttgtttccattccacactgtttatgacctgtgtggtgtaacaccatgttttgtatggtggtcatacattgttagtcaaaacttttagggagttttctcaagtttgagctgtactttttcttgtcacagataacactagtgatactccattttatttgaatcctacaatttatgttgccctgt

SEQ ID NO: 38835 - DNA, 1197 bp, Glycine max
  Clone ID: PAT_MRT3847_135068C.1
cgtaagctcggaattccgctcgaccagtcatctccttgacaggaaccctaaatctgaaacgaccttgactccgctcagccacggctgagaaaatagctcgtcttcacgatccagcgattccgctctccaacgggactgcgcagggtgaagaatcgagaggccagccgccggtgaagaatcgcgcgattcgtctggaaatcgcgattccagcacgattcatgcccgatacagagatttaaccacgattcaggaacaaaaacgagacaacctccgattcgtattggtagcatctggaatcgtatcgaatcgtgcgatacgtatcctgaatcggttttggtttttctgtgagtatccctgttgatcaagaatgcaattctttggggtgtctgagattagtccttcacctcctgctccgacagcatcaggaaacaatggccatatgatgtatgtgttcaataggaatggtgtgtgcctgctctatagggagtggaatcgtcccttgcggacattggatgcccagcaagaccataagttaatgtttggtctacttttctctctgaagtcattaactgccaagatggaccccactagtgctgttgagaaaggaaaccttggtatgcttcagttacctggccgaggttgttcatttcacagtttctgcactaatacgtacaaacttagtttcatggaaagtccttctggaataaagatcatcttggtgactcatcctagaactggtgatctacgggaatccttaaagtatatctacaatttgtatgtcgaatatgttgtcaagaatccgctctatacacctggatcacctattaggtgcgagctgttcaatacaacgttggaccagtatgtgagaggcattgcatagatgctgagttgtttccaatcaacactgttgatgacttgtgtggttttaacgccttgttttgcatggtgtatgtgagaggcattgcatagaagctgagttgtttccattcaacactgttgatgacctgtgtggtgtaacaccatgttttgtatggtggtcatacattgttagtcaaaacttttagggagttttctcaagtttgagctgtactttttcttgtcacagataacactagtgatactccattttatttgaatcctacaatttatgttgccctgtatttctcttcccaatatatataataaactgaagatgct

SEQ ID NO: 38836 - DNA, 1190 bp, Glycine max
  unsure (1)..(1190): unsure at all n locations
  Clone ID: PAT_MRT3847_135069C.1
aatttattcaaaaagaaaagatgaaccctaatttcctctgtctctgaacttggaagatctggtttccattatctcctccatcttcacgttccgaaattgtagatagaagatcacacttgctcaattcccttgtcttagatctcgtttctctcttcgactcgtccacactttgtcgtcgttcccaatcgcaggccatatcgccgggggcattcccgccatatcatccttgcctcttaccgaacactgaaacggggaattactcaggagagcttcgcaatcccactaacagctgctacccgcggttttggttttttcgctagtatcaatctattcttcatccctgttgatcaagaatgcaattctttggggggtctgagattagtccttcacctcctgctccgacagcttcaggaaacaatggccatatgatgtatgtgttcaataggaatggtgtgtgcctgctctatagggagtggaatcgtcccttgcggacattggatgcccagcaagaccaaaagttaatgtttggtctacttttctctctgaagtcattaactgccaagatggaccccactagtgctgttgagaaaggaaaccttggtatgccacagttacctggccaaggttgttcatttcacagtttccgcactaatacgtacaaacttagtttcatggaaagtccttctggaataaagatcatcttggtgactcatcctagaactggtgatctacgggaatccttaaagtatatctacaatttgtatgttgaatatgttgtcaagaatccgctctatacacctggatctcctattaggtgtgagctgttcaatacaacgttggaccagtatgtgagaggcatttcatagatgctgagttgtttccaatcaatagtgtggtttttacgccttgttttgcatggtgtatgtgagaggcattgcatagaagccgagttgtttccattcaacactattgatgacttgtgtggtgtaacgccttgtttgtcatggtggtcactacattgttgttagtcagaaacttttagggagttttcttaagcttgagctgtaccttttttgttacagataacactagtgatactccattttaattgaatcctacaatttatgttgccctgcatttctcttccaatnatatataataaactgaagatgcttaaagttaagattcaa

SEQ ID NO: 38837 - DNA, 732 bp, Glycine max
  Clone ID: PAT_MRT3847_13506C.1
cgtccgttacggctgcaaaaagacgacagaagggggggggaggggacaggtttaaattctgggaagacgagtggatacaaggagaggcctcattaatcacaaagtatccaagactgtttgtagtctcccaacaacagaaccagacaatccagcagttgggagattttaaggacaatgaatgggagtggaacttgtcatggaggaggccattgtttgacaatgagataataatggcttcaaatttcctaagggacattgagaggaacacaatacagtgaaacagaagggatgagtgggtgtggaaggcatatcaaagcggacaatacacagtacaatcagcttataaattaatgacaagggaagcagttgagggggaaagggatcgagcatttgaggagctgtggaatctaaaggtgccaatcaaagttgcggtttttgcttggaggcttcttagagataggctgcctactaaagtaaatttgtacagaagacaaatagaggttgcagataggagttgaccatttttcactgcagcaaaatcctccctatttggtgggaatcattatcctggctgaatatttcaggagctttaccgaatgacccaaggcaacactttctccaacatggttccatattggctggtggtataaggattaatagatggaagtgttgctggctggcggtaacttggacaatttggcagaagagaaataagataatcttcaccaatga

SEQ ID NO: 38838 - DNA, 1990 bp, Glycine max
  Clone ID: PAT_MRT3847_135070C.1
gttttgctactaataatgacaacaacagtgacgacggcgacaaggacagtaacaacgttggtgccgccggagaggaaagtggtggcgacgattcgaaatccaacgttacgacgacgatgcccgaagaagagagaggattcacttcgcagaaatcgacgcctccttccacttctcagaggtcgtctttgtcatcgcttggaccagcatacaacacttttcaagttgattctttcaaacttattgagctccttgggcctgagaaggttgatcctgctgatgtaaagctgattaaggataagctttttgggtattcgaccttctgggtgacgaaagaggagccttttggagacttgggagaaggcattcttttcattgggaatttaagggggaagagagaggatgtttttgccaaactccagaatcagctagttgaagtcacgggtgataagtacaacctttttatggtggaggaacccaatgcggacagtcctgatccacgcggtgggccacgtgtgagctttggtttgctgcggaaggaggtttctgagccggggccgatgacgctttggcaatatgtcattgcattgctgttatttctcctaactattggttcctcagtggagctaggaattgcatctcagatcaacagacttcctccagaagttgtgaaatatttcacagatccggatgctgttgaagctccagatatggagctgctatttccatttgttgactcggctttacctttaagcatatggtgtcttgggggttcttctgtttcatgaggttggacactttctagcagcatttcctaaacaagtaaaattaagcatacctttcttcattccaaacatcacacttggcagctttggtgctattacacagtttaaatccatccttccagatagaagtacacaagtagacatatcacttgcaggtccctttgctggtgctgtattatcattttcgatgtttgctgttggccttcttctctcatcaaatccagatataacaggagatttggtgcaagtacctagcttgttgtttcaaggttccttgcttcttggattgatcagtagagcaacccttggttatgcagcaatgcatgctgaaacagttccaattcaccctcttgtgattgcaggctggtgtggcttaaccatacaagcttttaacatgcttccagtggggtgccttgatggtggaagagcagtgcagggtgcttttggaaaaaatgcgctagtgggctttggtttaacaacgtatacattgcttggattaggagtggtatatctgaattaaacaaagcatatatatagttgttcaataacattgttaaagttcaaccattatataatttagtttcagagttatcatgtgtatttattatcagttgctagcacttagaccgctttaacaagatgatccctttatgcagaaaaaatcagattatatgcagataatgaccttttaacgctacaaaatgcaaacctgttgaataaccaaacggtaagcatgaaatgaacatgtaaaaaatcttggcaaatcatcttccttgtgcattatgtgaatctcaacttcattttatactactatccatctatatgaactttacctgttgtcataggtagagctgtggtaaccttaaggtgaatgaaggggtagtcctacgcccccattcatggtagtcaatagcactctatagcaggataacggagcgcagcagccctgagttactatggaagtcgaaatcgctgagcgattttcaataaccgctgtagcggctgcaatagtggtctaaatacagcttttcgggtgctacagcgcactgccataatattagacttcaaattctatatttactccagaaacatcattgtttgggtaaaaatttacaaaaaagttacccctgttttgaccctttattcctttacacattacaaaattataaaatatcctaaaaaaaaaaaaaaaacaaaaagcggccgcc

SEQ ID NO: 38839 - DNA, 250 bp, Glycine max
  unsure (1)..(250): unsure at all n locations
  Clone ID: PAT_MRT3847_135071C.1
anganacacaccttcagcancagcagccatggttgtcaaaaccgaactatgccgattcagcggtgccaanatctaccccaggganaggcatcagatttgttcgtggtnattctcaggttttcctgtttgntaatcgaaatntaanaggtanttccacaanangttnaagccatnaaagctcactgnactgcaannnacaganagcaacacaagnaggacattgtcaanaagctgtnaagaaaagaanacg

SEQ ID NO: 38840 - DNA, 231 bp, Glycine max
  Clone ID: PAT_MRT3847_135072C.1
agctgtacttacccttatttattactaaaattttgacgtatccgcgtgttatacattaaactgactttgaccgcattatctagcttatcactgttttcaagaccatggtattgactgatcgttacatgcacgacattctgaccacttgacaaaagacacgctttagtataacacggttggactggaactcgctatgaaaccatcaaatgcgctgaccgcgcgcaacaaggc

SEQ ID NO: 38841 - DNA, 432 bp, Glycine max
  Clone ID: PAT_MRT3847_135073C.1
ggggaaaatttcttacaaacatttcattcgaccgactataaacccaactagaattggggggcaaaaacgaaaaccccgggaacccgaaacgaaacccacccagaacccgaaacttaaaccccccccagacaaccccttaaaaaaatggaacttaaacaaaaaccctaatttacaggggcaaaggccaaaattccccagtttccatgggaaccccccccttcccccccgggggaggggggaaaaccaccatcccccccggaaccccgggctttaccaccgccggatcccccccccccccccccaccattacggggggatccacctttacaaaaaccaccggattcggcggcgccaccaccaccaccaaatccaccggtaccgggggtggatccaccaccactttcgaaaccaccggcttcaccaccaccacgg

SEQ ID NO: 38842 - DNA, 330 bp, Glycine max
  Clone ID: PAT_MRT3847_135074C.1
ggcaagctatagcttgcaccaattcgcaacgctctgtgtacaaaaaattgccttgctgcagcgccttgcagctgtatgacgccaactcagccatcaacgacgtttacctgaccactgaacattacaatacttttacccaatttactaaccatgacccatctgtcaagcactgaaaggccggcctaacagataaaattctcattacttctagcaaggcttgcgctgccatacttgtcgggcatgtgctggaacacatcgatgcaaagcagactcgtctcgttttgaaccgtgatatcgaagataactccgtagcagaacttacccggtttc

SEQ ID NO: 38843 - DNA, 440 bp, Glycine max
  Clone ID: PAT_MRT3847_135075C.1
ttagttttccctcttttttattctgtaggacagtaaaactaaagacctatttccatttttgttgtgttgtttggatgaaccagtaataccttaccatgacttatcgtgcatgtgtatagtttgataacatttgtattttcagtgcctctttaggaattttaagggtataactttggaaagaattctacactctttttttccatattaatgaaatgctctgtgtcatctgttttctttctattgagtgcttttactttattgtcaagctaattttggattctgtttcaattatctttcaaatgtaatcaacatgctactgtcttatttcaagcattatgttgagttgtatttgtgtaagcacctgaccaaacaatgtactatctgattcagaatcaggatatttgattccctgctattaaatttgacacaaacattgcaag

SEQ ID NO: 38844 - DNA, 2371 bp, Glycine max
  Clone ID: PAT_MRT3847_135076C.1
cccacgcgtccgcccacgcgtccagcattgcgtccggccacgtacggctgcgagaagacgttctttcggcacaccccattctcccaaactaacaaacaaatcccagggagccaccaaccatggcttccaagctctgcgactcatgcaaatcagccactgctaccttgtactgccgccccgacgcggccttcctctgcggcgcctgtgactctaaggttcatgccgccaacaagctcgcatcgcgccacccgcgcgtcgtgctctgcgaggtgtgcgagcaggcgcccgcgcatgtgacctgtaaagccgacgccgccgcgctctgccttgcctgcgatcgcgatatccactccgccaaccccctcgccagccgccacgagcgcatccccgtcacgccgttcttcgagtccgtacattcagtcaaggcctcctcgccgatcaacttccaccaccgcttcttctccgacgccgacgctgatgctgacgtcagcaccgaggaggccgaggccgcgtcatggctgctacctaatccaaagacagatctaaattcgtctcagtacttgttctccgaaaccgaaccggttccttacatagatctggattacgcggccatggatccgaagacggagcagaaaagttccgccaccgccgacggcgtcgttccggtgcagagcaacttcgagccgttcacctacggttacaagtacaacactactctctcacagtcacagtctcatatgagccagagtgtatcttctccgtcgtcgatggaagttggagttgtgccggacgggaacacgatgtcggagatatcgaactgcagctacagcaaagtggcaccggtgacggtgacggcgcagttctcggcggcggatagggaggctagagtgttgaggtacagggagaagaggaagaaccgaaagttcgagaagaccattcgttacgcatcgagaaaagcgtatgccgaaacgaggccaagaatcaaaggaaggttcgcgaaacgcactgatgcggaccctctggctggatacggcgtcgttccgtcgtgttgatgattatcatatatatcatatatgaatatgaatgcttacttttttgttttcttatgtttgcttttgctgctgtatatatggactacgccttcttttgtttgaattatgcaatgtaaagttgcataaaagctcgtgttgtggatcgattttgtagtttgttgattgtttttggatgaattttgacagctttttggtaaaggaggattctttggtggttttggtggaagtggaggctcaacctttggtggttttggtggatgtggaggcttaacctttggtgggcttggtggtttctttggtggttgtggtggatgaggaggcttaacctttggtggttttggtggatgaggaggctcaacctttggtgggcatggtggcttaactggtggttttggtggaggcttaaccggtggtggttttggtggaggcacaacctttggagggcatggtggaggtttctcaggtacaggtggagggggtttcttctcaggtacaggtggaggagtataaacaggtacaggtggaggagtatagacaggaggaggtggtttatggaaaatcagtggtggaagtggtggaaatgttataggagggatggtgataggtggatgagggggaaagagagggtgcttccagaagaaggctgaagcacatgtttgtgatgaaaacttgagtttcccagcaggaccaagggtgtgtttctcattattagtttttgactttatcactattttgtggctcaatgggccatcatgggtaggacaaggtgcagctgatgcactaagtagctgagcatagcattcttctatcagtttatcgtcttttacagtgtcatgaggaagggaaactttgaagtttccatattcatcaagctcaccgacccctctcctttcaaagtttccacttgctgccttgcagtctactgtcacacgtaaacctgagaaagcctggctagtttgaatgtttttctccttgcaatctgcgcattctcccaaccctactacctcgactgtactatggtcaccatagcaaaagtctactaccacaaaaagcacagacaaccagaagcacaaaaatgctccttggcgccgcgttaaaatctgcattaggaactgcaatcacagttcctaatgagtagtatatatatatataagcaaatactatatatataacgggagagaaaagaataaaagcagacttagcttagaactcagaagctgtggacgcgacggcgggggacgggagggcctgcgatcgcgatatacactccggcaaccccctcgtcaggcgccacgagcgcatacccgtcacgccgtttt

SEQ ID NO: 38845 - DNA, 610 bp, Glycine max
  Clone ID: PAT_MRT3847_135077C.1
acttattcagctatcttcataggttgcataagtttcacataattcagctatcgccataggttgcatgaaaaattatgtgaaacttattcacttttcttgaacggttctgctctggcggtgcttctgttctacaactggatctcaaattctcattatctagtctctcatgtcttaactcctttttcttgttcatcgtaccgtgtctggtctctcacaaaatttgctgattaagatgtacatgtaattacaatactctttcgaggtcaagtaaacgatgaaaagaagcctagtcaagaataaaagcgggtgaaacacgataagaacacctttaggtcctttactttataaccacggtccttggggagtttgtagttgtagattcgcgtgttgattgagtgctacggcttacttcaatgcttaaaaacttgggatactcaggagcttcataaggaggtaaagaattaccttctgtagcaaagaaagaatggaaaaatttaaaaagtaaaaaataatccagcatcaacatatataagaaatgtaagatttgccttgatcttgtgggcataaatttttccataaatatttataaagaaaagaacataagccagtt

SEQ ID NO: 38846 - DNA, 348 bp, Glycine max
  Clone ID: PAT_MRT3847_135078C.1
gtgatcttgccactatgtacaaggatgagcggcgtgcaaagttgaagatctatccaatattgcaggcggagtgtttggaccgaactctaagaaaaccctagatggatgctcccgcacaagaattactaccacaccatcatgctcattttgcacacaatgctactgttactggaccgagacgcagactgagcagtaggctgaggagaccgatccataccctagacgaatgataaggctgataagctaggcacactcatgttgatccaagctgacatggctgctcagactgactcgaaaatggcttataaggctaagaagaaggtcaaggaaggcgaattggaggcttac

SEQ ID NO: 38847 - DNA, 463 bp, Glycine max
  Clone ID: PAT_MRT3847_135079C.1
ctaattttcacctaacaccttgaatggaaacattacattattgttctgatttttttaatcaacgtgaaccaattcctagcaatttttttaagttccattacatcaatgttttaggtgcatatagtttctctttcaaatactttaacaaaagtgtgtaatttatgaagcattgagataaccaaattagcagaaattaatagatatgtatgtgaattggttgctgtgggagtttatgtcacatgtttactatgttttgtcaagatttatgtggctatctgtcataggaatgcagataattatgcacatattggtatcactctctgctactagttcttaaattttttgcttaccaagtgtatggtggaatgtgtgttacaattttcatagattgtagtcagtttatgtgggcattgctttgtgtctttgcgaaccttaaatttaaatgaattggctcatggatgaa

SEQ ID NO: 38848 - DNA, 241 bp, Glycine max
  unsure (1)..(241): unsure at all n locations
  Clone ID: PAT_MRT3847_13507C.1
ccatcaactcaaacatancaaagganggttttaatttaaatttttccccacatacatttaatataaatatcattatttcactttctcaaaatgttatcaaatattattacaaataataatactttattaacaaaattcctcttctcctccaaataaacccatttcacaataatattccatttctcatccacaatttcatacccatttataaatccctcattactattcattacatttatta

SEQ ID NO: 38849 - DNA, 469 bp, Glycine max
  Clone ID: PAT_MRT3847_135080C.1
ggggggggcggggaggaaccgctgggactaacgacgcggcggaataaaacaccgcaagaggaaaaaagggggagggcggcataaaaaaagaagaaggggcgtacaccccccaccacaaaggagagagacaggaaaaagcggcaaagaaagagacgcaagaggaaaaagagacagcgaggaaaacacaggggagaccagcaacaacacaggcggcggaagggagaacagaaaagaacgagaaggcgcaagaaagggcagcggcaacaacaccaggcgagaaaggcacaggcgcaaaggggacaaccaaaaacaagacgagcgcagaagggcaaaaaaccaggaaaaacaggggcacagaccagcgggcagcagaaccaaagcaaggccacagaaaacagtccggaagcaaaaggcaacagggagaacacaaaggaaccaagacccaagcaagcaaagaccagaagaaaaa

SEQ ID NO: 38850 - DNA, 259 bp, Glycine max
  Clone ID: PAT_MRT3847_135081C.1
tgtatactggctagtcactctccatgccgactacatacggatgccttaacggcgggacactgactacaatctagttatgaagccaccaggatcctaccctccagcgaacagtccaccacagtataaaccaacgattaatgagctaaaaccaccgttttacaactcaccaccaccattatacaaacctccatatatgaatccaccctacaagaaaccaccttatggaaacttcccgtcatttgtaaacaacacccattcc

SEQ ID NO: 38851 - DNA, 445 bp, Glycine max
  Clone ID: PAT_MRT3847_135082C.1
acgagttgaccttcttgagttggcagattgctgcaaagccaagagattacacctgatttatgataagagggaacatcctcgccaatccttgctgcagcacaatttaggtgaattccaagggcctgcccttgtagcaatctttgaatgtgcctgtttgagtcgagaggaatttagtaatttccagctccgtcctccatggcgattacgtggcaacacaattaactaatggtttgggattggtttgctgctattccatatgtgaccttctttcagtcatttctggtggttacttttatatgtttgatcctcgtggttaggtacttggtgcgccttcaactaatcccccatcagcaaagatgttttctttgataggtatactgtgtattcctcaaccaaattaatgcaagagtttcttattttatgtcactgtactgtaagtattcta

SEQ ID NO: 38852 - DNA, 506 bp, Glycine max
  Clone ID: PAT_MRT3847_135083C.1
agtttccgtcatcactgtatgacgtcctccttctttgggggggggggggggcaaaagaagccgggtatccgggtaagggctaggtaggggctagatagtaaagtcatggtgttaagtttaatgtgtgtatgcgaacacgcgaggatacagaaacaaagaaaaagagtaacgattagaggctgctatgaatattagggcagagtatggaaaagtaggagaggttgagcatcacggcgaaataaagcttattaaaatattttacgatacaaattgggttaacgagcgtcgagcaaggccagacgaagcgacagcaacggaaacaatgcataatgttcagcagtaaggcaggggttagaacgtagcacaagtaaaacccgatgaaaaaccacggcgaaaagcaagataaaaattgggggttgggttaggggttgggcaagaaaagcaggagcataaggtgagattagtacaaggtacacggaccgtgttagagcacacgaggggtggga

SEQ ID NO: 38853 - DNA, 718 bp, Glycine max
  Clone ID: PAT_MRT3847_135084C.1
gtccgcccacgcgtccgtacggctgcgagaagacgacagaaggggaaggcacccacgtagagaacctctaaaaacaaaaataaaaacattctctcccattcctcccccccttagcccttccttccttcattttttttctctttcttttgttggtttgtttgttccttttgttgtacgttctcctttgttctcttcttccgcatttggtacatgcggtgttctacttctctcttggtttgataacaggatttgacacaagtgttgtggtctcccatttcaggagaatcactcactggcataatatagagcttgttaaaagcaaaaaaaaaaaagtgaagtgttttgagatctggcatgttatccttttctctctagctttaatttctttgtgggggtgtgtatgtgctagagtaactgacattccagctctgcttcctttgttttgcgtggcccagaagcaaaataacaatcaccaaaagaaaaaatacatatatattccacccaagtgattcttttaaacccttttcgatccaccattctcaccttgttgagcttggcctagctagctttgcttcccactcctcactagttaactctcttttattatttttctgacaccaagcttgatcaaaacgtacggttccaatggatcgcttttcttccagtaccattctccccgaagcgtttcaaggtgccaaagatgacttcaccatgcagc

SEQ ID NO: 38854 - DNA, 440 bp, Glycine max
  Clone ID: PAT_MRT3847_135085C.1
gcctccctttttttttttttttttttttttttttgtttttttttttttttttttttttttttttttttttttttttttttttttttttggaggggcccgccaaataaaaattggctctttttatttttaactttgggagggcaaacacacaaaaacaattttggggttggcccacaaaagtttagagaaaaagggggactcaaatttattttatggcgcaacttttttttatctaccaaaaaaggggcttattcctttacggggccaaaaaaaaggggaaaattggagactcaaaaaaagggggcttgtgccctccctttttggcaaaattacaccattggtttccgggggaataaaaaaaaattcccccacccccctgtttttcaataatggaataaccaacaagagttggcccaaaaaatcctagaaaaaaattttgg

SEQ ID NO: 38855 - DNA, 923 bp, Glycine max
  Clone ID: PAT_MRT3847_135086C.1
atttgtagcgcgaggtctatatattagcaaactcacgaaatctataagtgaagatcacttcaacgtgcttcccctttatcctttattacttctgtaaaattacatttctccaacatgcatccttgggtgttcatgattttagctttattctcactttctactttatcctctagagaagcccgtgaaggcctaaggggcttcagcgttgaccttatccaccgtgactcaccttcatcacccttttacaatccttcactcaccccatcagaacgcatcataaacgctgccttgcgctccatgtctcgattacaacgagtatcccattttctagatgaaaacaaactacccgaatctcttctaatcccagacaaaggtgaatacctaatgagattttacatcggttcccctcccgtggaaaggcttgctatggtagacacagggagtagtctcatttggctgcaatgttccccctgtcataattgcttcccccaagaaacccctttgtttgaacccctcaaatcttccacttacaagtatgcgacatgtgactcacaaccttgcacattactccaacctagccaacgtgattgtggaaaactaggtcagtgcatatatggatgcatgtacgatgacaaatcattctccgttggaatactgggcaccgaaaccctaagttttggttccacgggtggtgcacaaactgtttcatttcctaacactattttcgggtgtggagtggacaataatttcacaatttatactagcaataaagtcatgggtatagcgggtcttggtgcaggaccactgtcgctagtgtcacaactaggagctcaaattggtcacaaattctcctattgtttgcttccttacgattcaacctccaccagcaaattgacatttgtgagcgaagcaataataactac

SEQ ID NO: 38856 - DNA, 444 bp, Glycine max
  Clone ID: PAT_MRT3847_135087C.1
gcgtgctgcttgaacgcttgacgttattctctttcttcttacttggtcacccctctctagaaaaatctagatctcgttcttccttgatctacgttacgctcatagggaccgcatctgtatggactcagaaccagatctacactcgcttggcggatgaggactggacagataaagacttccatcggaggtatgctctgtagaggttctgagccatgcgagctagcgaatttgaaaaagatagttgttaatggaagataagggtttcatagatctgatgcgtggaggctcatatctactgtgcagaggtgtgcgattcatgtacgaatctctttcggaatctggttcgtaaaaagacgcttggtcttgcatgtcacatggctcttgaggtatatatttttgcagatactgtaaataatcgatgagaagaacgcagatccagccgct

SEQ ID NO: 38857 - DNA, 273 bp, Glycine max
  Clone ID: PAT_MRT3847_135088C.1
tttatcttttttttccacacaaacttcaaacaaacactaagaattactttttgaaactacttaaaaaaatccatccaaaggaaacaccgaatgaaatccaaactaagttatctaatacaactaaaataaatatgaagcataagataaaacccataccaaaccataacaaaaattaaacaaacaaaactctcctctagacataatttaggaatatcgtgcctaaaacaaccaagttgacattatatgaccaagcgccacttctaaaagcttggg

SEQ ID NO: 38858 - DNA, 532 bp, Glycine max
  Clone ID: PAT_MRT3847_135089C.1
ctgcttgggggggggggggggatgaaacacgaagaagttagaaagtatggggtaggcaaaatagggtataaatagtgtgtaggggggggagagagtgtgtgggtggggataggagaaagttgaggagatgggggtggggtggggggtgggtgtgtgacaccgaccaagcgaccagaatagagcaaagcggcagtaaataggggttaggagacagtcatactcaacaataaacgatggtagaaattgggaacagcgggcacctgggcgtactgcaacgtaacgaataggtatagtgagcaataaactaaatataacccgagagagaacctgacctttaagactgggggctatgcaagagcgagccgaatttagctttacgatcggttatatttgtgggaggggcatatatgtcgctaggagaagtggagctgaaggagatagaggagtagctataaagctaactggagaggagagagtgaaggcctaggcaccgactcataagttgggtgccaggtgttggtagtgttgcgga

SEQ ID NO: 38859 - DNA, 169 bp, Glycine max
  unsure (1)..(169): unsure at all n locations
  Clone ID: PAT_MRT3847_13508C.1
gacttcacatgacagattgtcccgtgaacaatacaagaatctcttgcaatctaagtgcacggttgaatttttggattgctgatatgtgatcatggatatcaagagtgtggagttctggtgcttgcaagctataaatatgtatnagcacatatacgatgaatcccgttgt

SEQ ID NO: 38860 - DNA, 181 bp, Glycine max
  Clone ID: PAT_MRT3847_135090C.1
cagacgcgtttttgttattaccaaatgggtcacagtaactatcaccaccgccatatatgttaacaataagacggatcgcttgggtcttaaagctaacgctatagacgaacgtagtaaaggcctagacaatgaatgttttggaggtgaacacatagcacacacacagattgcaatgcaattg

SEQ ID NO: 38861 - DNA, 390 bp, Glycine max
  Clone ID: PAT_MRT3847_135091C.1
gagatttttgaggcagctattagagaagtaaaagaagagacaggaattgatacagaatttgtggaattactagcattcaggtaagaattttctaatttgtgacacataaaacatgagagataccctttagtttgagcttatattatataaagggaaaggctccaaggttcagtatacaaatgaaaaaaagaagtcatgctgatgcttttgaggagaaatttcatatttatatagatccatggatttagaaagaaaatttcaaccacaaggcccaatagaatttactgagttaaattacgtgtaagctcatggaaaacactgaagacacttgctttgtttttctcttctaataattaatatggcatcctaataaactagagttcataagag

SEQ ID NO: 38862 - DNA, 222 bp, Glycine max
  Clone ID: PAT_MRT3847_135092C.1
gaaataggagcaacgctgggttgctcttgcggggtgcttcgggttttttatgacaacggggcttctgaacccttgggttttcttcctcattggggggggttgggggcggggagacttttttcgctgccgccgagaggggttaaccctcaatgagcactgggcaagggctttaaaagttagaactacccccttctggggtcttctcccagccggacgcggggg

SEQ ID NO: 38863 - DNA, 2122 bp, Glycine max
  Clone ID: PAT_MRT3847_135093C.1
ggaagagaagagagtatccaacatagatggaaacactacaacaaaaaacgttaacacttaaaacacaaacttgtttaggggccacccctctctggggcgccattctcttttttcctttcaaaaagcaaagctaccatctttcttaccatattctctctctctctctctctctctttctcattgctaccctgttggtggataacaaaacttcagcaacccctttgcatctgatctaagaatcccaacttcaagtacccattttttgtcatttcatgatctaggtgatagatcgtgaaaatgacaaggatgacccatgattttggggatactatgcagaaagatgcagtgccggtggtgtcggccgatgtaatatttgcttctcttcggtttcctaattacaaaatcggagttaataatcagatcatggagacaaaggatgatccaaaagtgctatctatgaaggaggttgttgcgcgagagactgcacagctgttggaccagcagaaacgtatgtcggttcgcgatcttgccagcaaatttgagaagggtttggcagctgctgctaagttgtctgaagaggctagactcagagaagcagcttctctggaaaagcatgttcttttgaagaagcttcgagatgcactgcaatccttaaaagggagagtggcaggaagaaacaaggatgatgtagcggaagctattgctatggttgaagctctagcagttcaattgactcaaagggaaggggaattaatacaagagaagtctgaggtgaagaagctaacaaattttcttaagcaggcttctgaagatgctaagaaacttgtgaatgaggaaagagcttttgctcgttttgaaatagaaaatgccagagcagcagttcagagagtggaggaggcacttcaggagcatgagagaatgtctcaagcttcaggaaaacaggacctggaacagttaatgaaggaagttcaagaggctcggagaatcaaaatgctgcatcagccaagcaaggttatggatatggaacatgagcttcgtgcattgagggctcaacttgctgagaagtctagactatatcttcgtctacaaaaggagttagcaaggacaaagaaaggagaggaaaatgctccccatttatatgaattagaaggaactgaaacgttaggctcatatttgcaaattcaaccttgctctgataatggccctgaactttcagaatgttcaattcagtggtatcgtgtatcatctgaaggtgccaaaaaggaacttatttcaggagctaccaagtcagtttatgcccccgaaccttttgatgttggacgtgtattgcaagttgatattatttcagagggccagcagatcacattgtcaaccactggtccaattgatccagctgctggtttgggaacctatgtagaggcacttgtgcgaaaacatgacactgaattcaatgtggttgtaactcagactgtctcagaccatccaaatgaatctattcatgtacttcatgttggaaagatgaggatgaagctctgtaaaggaaatacaacaattgccaaagaatactattctagttcaatgcagctttgtggagttcgaggaggtgggaatgctgcagcacaggcagtcttttggcaaccgaagcaaggtctttcttttgtattagcttttgagtctgagcgagaaaggaatgcagctatcatgcttgcaaggagatttgcatttgactgtaatattattcttgctggacctgatcacaaagctccattagaaacataatgggaccttggatattattttttctcaaatgtaattatttaagttttccttgtattataagtgtgtgacagtgaaatatgcctttggattgtgctaaggattcatactttgaggtctgaattcctttattcaatttttttttcaccaacaccagggcatgtttttgtttgcctttgtgagtgacattagataaaagttttagagcttacattatggaattggtggaagctatgtccagtgtttgaggtgctaattgattgtattttgattgatccaattactgtcaaaattctctattggatttgtcttcggaaacttccatcgtgggcaagaaattttgtgg

SEQ ID NO: 38864 - DNA, 677 bp, Glycine max
  Clone ID: PAT_MRT3847_135094C.1
tggcttggaacctttgggctgatttatgtgcttgcatggtcgtgagaagatgatagaagggcatggtcgtgagaagatgatagaagggcatggtcgtgagaagatgatagaagggcatggtcgtgagaagatgatagaaggggacctatataatcaatcaagaaagctccttacagttttttaaaaacgaagagtattactcctcccgtctctccctctccccgcgttcctattattctacattcattcctagttactgtcgaccctgcgtctgacaacgaaggcaatttctccgaaaacggcggtatacaccacactccgctagatacaatagtacccggcggaacaagagtagttttaatgggaaacgaaagacgtttctctatcgcggcgtaactctgtaacgagtctgataaagggaccggaataactactctgcttttacactgaacttgccccactgttgaaggttacttcccgagttccaagcctgacctacccgtagccacaacgtcgcgcgccggaaccttcattgagcggctcgccgcggaggactcattagaaggattcgtcgccaaaaccggcgagaataaagacgtaacgcacggccgccccagatccgagagagctctcgacgactaacctaacactcacaagtccgcgcctccgttatagta

SEQ ID NO: 38865 - DNA, 757 bp, Glycine max
  Clone ID: PAT_MRT3847_135095C.1
catcatttgcccacataattttgatattctctgcactcatcctatgtttgggccagagagtggaaaaaatgggtggaatggtcttgcttttgtttatgataaagttagactaggagtggatgaatcaagaacatcacggtgtgatcagtttcttgacatttttgctagtgaagggtgccgaatggttgaaatgtcatgtgctgaacatgattggcatgcagctggatcacaatttatcacgcatactaccggaagatttttagaaaaactggagttggagggaacgccaattgacacaaagggctatgagactttgttgagtttggtggaaaatactgctggagatagttttgatctatactatggtttgttcttgtataatataaatgccatggagcaactagaaagatttgatctggcttttgagtctgtgaagaaggagctttttgatcgtctgcatggcttctaccgacagcaagtatttaaacatgaagaaaaactccatgatttgccagagaggcctatgttgtctaagatatctgaagataaataaatgtagggtcatctttttctaatactgtggtctgtggacactaaatgaaattgatttcgcagattttcctctcattgacaattattgtggatcttgcttattttattagttggtttaaatgaattttttatttctaaaaattcatactagatttcttaaagttattttgatctgcttgattgagatgaaacaaaaatgattttg

SEQ ID NO: 38866 - DNA, 395 bp, Glycine max
  unsure (1)..(395): unsure at all n locations
  Clone ID: PAT_MRT3847_135096C.1
caacaaaaaggacggaggttttatggaacaatcccgttttttcggcaggggaaaaaccaaattaaattccccccaattttcaaggggcccttccccaaaaaagggggggatttttgggtttattttatacgggttaaaactttggaacccggggtttgtttaatttaacttgccaattagtaagcatttaatcccttacataacccagcttgtttaataaaaatagggccccgagcgggggaccttcccccaccccgttttttttcttgcctttaaaacgaggaaattgccggacaaatgatccaaacccagaaaataaaatggctgttttacccttttttaaataaactccctttttgncnttttccgaaccctaacgaacccgtgggcggacc

SEQ ID NO: 38867 - DNA, 1291 bp, Glycine max
  Clone ID: PAT_MRT3847_135097C.1
agggtccttgcacttcagagatcttaccatggtgacacattgggtgctatggaagcacaggcaccgtcttcttatacaggcttcttgcagcaaccatggtacactgggagaggtctttttctggatcctccttctgtctttatgcacaacagtacatggaatgtttccatacctgaagggtatcatttggaaagtctgaaagggaaaagtatcacctttgcctcacctgatgaaatatttcacaagggcagagataagtctgagcttgctacagtttattcatcttacatatcaaaagtattatctggattttgagggtcggataatgttggagcattaattatggaaccagttatccaaggtgctggtggaatgcatatggttgatccactttttcagcgtgtgcttgttaatgagtgtcggagtagaaaaattccagtaatctttgatgaggtttttactggcttttggcgtttgggagtagagactgcagtggagctaatccattgtgtaccagatatagcttgctttggtaagctgttgactggcggaattataccattggctgtcaccttggcaacaaatgctgtttttgattcatttattggagactcaaagctcaaagcccttttgcatggacattcttactctgcacatgctatgggctgcgctgctgctgttaaatcaatccaatggtttaaagatccttgttccaaccctaacataacttctgaaggaagattacttagggagttatgggatgataaaatggttcaccggatttcatcacaccctgcaattcaaagagtagttgctttgggaactttgtgtgccttggaattaaaagcagaaggcaataatgccgggtatggatcgttgtatgcaagaccacttcttgagaagcttagggaagatggtgtatacatgaggcctctgggtaatgtcatttatctgttgtgtggaccctgcacatctccagaagtttgcaatcaactactcgtcaaacttcttaggcggcttgaagaatttgacgtaggtaagaattgaagtggatgaagtggataagtctaatattcctgctatggattttggctaagtttatcgctactattattttttgtgggggaggaggaaggggcatgaattgtaaatccaagggttgcaattagcttggttttttttcaattcagttgatgtattttatttataaataaaaaatgtatcttatttcaattcccaccctccccccatttttaagatgttattaataaaaatgttaaagtatttaatc

SEQ ID NO: 38868 - DNA, 549 bp, Glycine max
  unsure (1)..(549): unsure at all n locations
  Clone ID: PAT_MRT3847_135098C.1
ggttggtttaggcctnnttnnctttgaagaaacaaaaaaattcatccagctatgtgaatggatgtggaccgagggttcaaggggaagaattatgcaccaaaagtacttagcaggagacaggaatgacgacgtttgcagatatgactttattaaaaaaaataaaggtgacaagtataggtcttggatggtgagtgtcaaatcatttgagaaatgattttttccttcaatcttcaaaaggtaaaagtctttggaaatttcaaacctcaatagttttcctcttcaaaaatggggttgaggacttctgattgtcactgctgtcaatagaatggtcattctttgatgttgtaataccccatttgtccatgctttggccagagcttactagggagtttgtttctttttggtgtaaagcagttgttagaaccctgttagctccaaagctccttgaagtttttaagcttgaaagggcaggagtgatcttgcaatttttaaaagaagaaagtttatttccttctatggaagaaatccttgatctgagagaactccttg

SEQ ID NO: 38869 - DNA, 1452 bp, Glycine max
  unsure (1)..(1452): unsure at all n locations
  Clone ID: PAT_MRT3847_135099C.1
ggcctcattcgggactttcactacccgcagcagcctcaggaggagaataaggatgtctcacaggaagttcgagcacccaaggcacgggtcactggggatttctccccaggaagcgtgctgctcgtcacaggggaaaagtgaaggcattccccaaggatgacccatccaaggcacccaagctcactgcattcttgggttacaaggctggtatgactcacattgttagagaggtcgagaagcctgttacaattattgagacccctccaatggttattgttggtgttgtgggttatgtgaaaactccccgtggtctccgaacattgaacactgtatgggctcagcacttgagtgaggaactgaaacgtaggttttataagaactggtgcaagtccaagaagaaggccttcaccaagtactcaaagcagtatgaaactgaggagggaaagaaaaacattgaggcacagctggagaaactgaagaagtatgctactgtggttcgtgttttggctcacacccagatcaggaaaatgaaagggttgaagcagaagaaagcccatatcatggaaattcaggttaatnggtggtactattgcacagaaggtggactttgcatacagtttctttgagaaacaggttcctattgatgccgtgttccagaaggatgagatgattgacatcattggtgtgaccaagggtaagggttatgagggtgttgtcactcgttggggtgttacccgccttccccgtaagactcacagaggcttgaggaaggttgcttgtattggtgccctggcatcctgcaagagtttcattcactgttgccagggctggtcagaatggataccaccaccgaacagagttgaacaagaaggtttacaagcttggcaaagctggagatgaatctcactctgctcttactgagtttgataggaccgagaaagacattaccccaataggtggtttccctcactatggtgttgttaaggatgattatatcatggtcaagggatgctgcgttggtcccaagaaaagggttattacattgcgccaatccctccttaagcagacttctcgtgttgctctggaggagatcaagctcaagtttatcgacacctcttcaaagtttgggcatggtcgcttccagaccacacaggagaagcagaagttctttggacgcctcaaagcataattttgttaattggatggaaatgctggatttctattcggttaccatatcttataaacatattgtagtgttttctgttttgacattatggatccccgagtgagtagtgagttttttccccccttaagttggccaaacttttgttgagactgatcttttaaaaaattccaaattgtttgattttatctatattttcagtgttgaaggaatttgcgaaattatttaatcttttgaaacaaaattcatgatcgacaaaaaaataaaaa

SEQ ID NO: 38870 - DNA, 290 bp, Glycine max
  Clone ID: PAT_MRT3847_13509C.1
ttttgtgtttttttctggctttttgccaattctaccatccatatcaacaacaaacataaccaacgtcggagggggacctgagcacctgtatttatgggacacaaactgagcatcaaaacacaacacaggttattttcaggggacattgttactgacccttgaaacataagggacattaaaatgcactgggaacacctagcacattataccgaattctgagattccttccaggggcgtgctacaataatgcactttgatctagttacctgacatcaatgtgcgggacgaac

SEQ ID NO: 38871 - DNA, 478 bp, Glycine max
  Clone ID: PAT_MRT3847_1350C.1
aactcgagccgaatcggctcgagtacggctgcgagaagacgaccgaagggcccgccttttagatgtataataataaataaataaataactggaaagaaaaatacatttatgaaaatagtcaaaggtcaacattatcggtgggcaaggtgctgtcgttttattcaaagaccttccgcgtggaaacagaaacatacaaacttttatccaattctcaaggttgttggcacagtcagcataatcattaatggcaattttcttttaaaaaaacatgtatatttatattctaaagacattaactaattaaatattcagtcaaaaaagctaataaaataatataaagattttaaacaatcaactaattaatagtcactatatatataatttttaaagtaataattataaaaagtcaacaattttaattaatatctcaatttaagatttaataataatataaaaaaatattttgaatgcatttaac

SEQ ID NO: 38872 - DNA, 122 bp, Glycine max
  unsure (1)..(122): unsure at all n locations
  Clone ID: PAT_MRT3847_135100C.1
gtggagctccacgtccaccttcaccaccccttcgtgcatcaagtggagctccagctcgttcatcttagccaatgtatggagtaacacgtgcacaancatcacctcctagtgggagaggatca

SEQ ID NO: 38873 - DNA, 1498 bp, Glycine max
  Clone ID: PAT_MRT3847_135101C.1
cccacgcgtccgcccacgcgtccgtacggctgcgagaagacgacagaaggggggccttcattcgggactttcactagccgcagcagcctcaggaggagaataaggatgtctcacaggaagttcgagcacccaaggcacgggtcactgggatttctccccaggaagcgtgctgctcgtcacaggggaaaagtgaaggcattccccaaggatgacccatccaaggcacccaagctcactgcattcttgggttacaaggctggtatgactcacattgttagagaggtcgagaagccaggatcaaagcttcacaagaaggaaacatgtgagcctgttacaattattgagacccctccaatggttattgttggtgttgtgggttatgtgaaaactccccgtggtctccgaacattgaacactgtatgggctcagcacttgagtgaggaactgaaacgtaggttttataagaactggtgcaagtccaagaagaaggccttcaccaagtactcaaagcagtatgaaactgaggagggaaagaaaaacattgaggcacagctggagaaactgaagaagtatgctactgtggttcgtgttttggctcacacccagatcaggaaaatgaaagggttgaagcagaagaaagcccatatcatggaaattcaggttaatggtggtactattgcacagaaggtggactttgcatacagtttctttgagaaacaggttcctattgatgccgtgttccagaaggatgagatgattgacatcattggtgtgaccaagggtaagggttatgagggtgttgtcactcgttggggtgttacccgccttccccgtaagactcacagaggcttgaggaaggttgcttgtattggtgcctggcatcctgcaagagtttcattcactgttgccagggctggtcagaatggataccaccaccgaactgagttgaacaagaaggtttacaagcttggcaaagctggagatgaatctcactctgctcttactgagtttgataggaccgagaaagacattaccccaataggtggtttccctcactatggtgttgttaaggatgattatatcatggtcaagggatgctgcgttggtcccaagaaaagggttattacattgcgccaatccctccttaagcagacttctcgtgttgctctggaggagatcaagctcaagtttatcgacacctcttcaaagtttgggcatggtcgcttccagaccacacaggagaagcagaagttctttggacgcctcaaagcataattttgttaattggatggaaatgctggatttctattcggttaccatatcttataaacatattgtagtgttttctgttttgacattatggatccccgagtagtgagttttttccccccttaagttggccaaacttttgttgagactgatcttttaaaaaattccaaattgtttgattttatatatattttcagtgttgaaggaatttgcgaaattatttaatctt

SEQ ID NO: 38874 - DNA, 1916 bp, Glycine max
  unsure (1)..(1916): unsure at all n locations
  Clone ID: PAT_MRT3847_135102C.1
acttgttgtgtgttgtgggttatgtggtaaacttccacgtaggtcttccgtacacattgaacatctgtctggtgctcagcatttgagtgaggaattgaaacgtaggttctacaagaactggtgcaagtccaagaagaaggccttcaccaagtactctaagcagtatgaaactgaggagggaaagaaaaacattgaggcgcagctggagaaactgaagaagtatgctactgtggttcgtgttttggctcacactcaggtactaaccccacattaatgtgattgcataccttttctttgtttccctgatttcattttatataatggttgttacatatataatgatagtttagcactttcttttcaagcatttatccattttatgggtttattttgccttgtgtcctgagaatgatgaaattcttgttcttgtgcaaatgcagcaccatgaattaggtgctatgagcggcactttccacacgagatttctgactcccatttgtctttttttgtccactattttggaatgaaattttatagaaatttaatatctgttccttctattttatgttcttttaattccaaattaagagtcacttccaattatcacaaattatcatgattgagatttattcctaatagtctgtctgccttgaatcttacagatcaggaaaatgaaagggttgaagcagaagaaagcccatatcatggaaattcaggtttatggtggtagtattgcacaaaaggtggactttgcatacagtttctttgagaaacaggttcctattgatgcagtgttccagaaggatgagatgattgacatcattggtgtgaccaagggtaaaggttatgagggtgttgtcactcgttggggtgttacccgccttccccgtaagactcacagaggtttgaggaaggttgcttgtattggtgcctggcatcctgcaagagtttcattcactgttgccagggctggtcagaatggataccaccaccgaactgagttgaacaagaaggtttacaagcttggcaaagctggagatgaatctcactctgctcttactgagtttgataggaccgagaaagacattaccccaatgggtggtttccctcactatggtgttgttaaggatgattttatcatggtcaagggatgctgtgttggtcccaagaagagggtcattacattgcgtcaatccctccttaagcagacttctcgtgttgctcttgaggagatcaaactcaagtttatcgatacctcttcaaagtttggtgcatggtcgcttccagaccacacaggagaagcagaagttctttggacgcctcaaagcataattatgttaattggatggaaatgctggaattctatttggttgccatcacttataaactttgtagtgtttctgttttgatattatggattctcgggtagtgagtttttttttctccttaagttggccaaacttttgtttcagggaagactgatcgtttatttcaaattttgtttatgagtttatctatattatccgtgtttaatgaatttcaaagttatttaatcttttgttgaaacaaaattcatgatcgacatgatagttggttttgagattgggtactgttggttgcattctgaatgatcagacatattttggattgtgatctctatttgactgaaggattaagaaaatgctatagttttttcgttggtgagaaaaaggggccggcccctggaaaatgctatagttcattccatgctttaaaggatggttcatgccatgaagctggagaaatatgaaaaggagaattgagtcngtagtatcgattcattattagttcaaatttctttattagcgtattatgaggaaattacattttttaataacttacgcaacaaaatttaaatatgcaaaaattattccatt

SEQ ID NO: 38875 - DNA, 384 bp, Glycine max
  Clone ID: PAT_MRT3847_135103C.1
ctcgagtcttaactcttctttgtgataagtaattatcaactaagcaatgaccagtctccatacatgcctgcaatagaatttgaaagtgaagaatgcatcatcaatccagatctccattacatctccccacaaggaatctctctggttgaagatcataactctgatattcatgacaatcaacccgatggtgacactgacactgctgtctcattacctaatgtggttactcataaagaccttgattgccttggtgtagagtttaaagatgataatattatcctcgatgactgcagtagtaatgaatttacaactggtgctgaggatcaggtagaatgtagctctactatggaacatgactgcagtaatgatgaaattacaagctgg

SEQ ID NO: 38876 - DNA, 279 bp, Glycine max
  unsure (1)..(279): unsure at all n locations
  Clone ID: PAT_MRT3847_135104C.1
cccacgcgtncgcgcttactccttctctgtttctctcgcacactctgaccctacgtcgttgtttctttttgttttccaaacacacacacaccgcgtactacaactaacacaacggcggggctaatgcttaaaaaaaaccaaccacagccaaccatgttgcattgtcttaacacttcggggaatctaagagccaccttgtcggacatgacagtgttgggaagacaacgggaagcaaccatgaagtggcagctacaccttcagaacaaccaaacaccctta

SEQ ID NO: 38877 - DNA, 212 bp, Glycine max
  Clone ID: PAT_MRT3847_135105C.1
atctccaaattccaatgcttattcttacttattatttcagattaaatcactagtgttgttactcgggtacgctcttgattgtccactcttaaacactaaatgtatctatctgcctaatacataagatagggcagactcacaacaaaccaaaataaaaccctttccaaagaaagaccttgttaagcaatcagcgcattacagagagaggctta

SEQ ID NO: 38878 - DNA, 443 bp, Glycine max
  Clone ID: PAT_MRT3847_135106C.1
gggttgttttttttttttttttttttttttttttttgggaaaaaaaattctttggcccttccaaacttggccttttcaaatttttccctctttcctaaccaaaaccggttaaaagggaaccttaaaccacctttttggccaattggaaagggaaatctattttttcttcaacctcggccttggaaccaaaagggtagtggccacccacctcctctttttggttccaggcaaagtccccctccattccagtggcccaaccaaatccctttgtttcaaaacgttcattggctggccgtccctaaggggggactgcccctgttggcggattggccctacctacctgccccagtattttcccctcccccccttcaacgggttctttatttaggcaaaggaagccacctggttgctcttgaatcaatcgcataaaatgaggattttgt

SEQ ID NO: 38879 - DNA, 565 bp, Glycine max
  unsure (1)..(565): unsure at all n locations
  Clone ID: PAT_MRT3847_135107C.1
ctgcaactattttaaagccgggggtctattaatgaataaagctgaccagcccatccatctgaaagtttctgcttctatgccttcttttgctatgacagaaaattgatgttggattttgctggaccagcaggaacctgttaatattttatacgcctctgagcatcatctacatgagataaatgccatttatcttttgtctttttgtttacatttgttgaataaaggaagtgctgctttgtgttccacgggaacaatggagaggtacaagttaattaaggaaattggtgatgggacgtttgggactgtctggagagctattaataagcaaactggtgaaagttgttgctatcaagaaaatgaatcacccaaataactcgaagctgaaagaagttaacctgataagtgacaagtcatactgaaaatttaatcacatgaatattgtgaagctgaaagtagtgaaagacaagagtgatatgttttacgaagctgaggtagacatggaatttaacctttaccaactcatgaaagacagggaaaaactatnttctgaagctgaagatagaaa

SEQ ID NO: 38880 - DNA, 346 bp, Glycine max
  unsure (1)..(346): unsure at all n locations
  Clone ID: PAT_MRT3847_135108C.1
angtcgcangcatgngtacgtaagctcggaattcggctcgagnncnnnngnnnnctnannncnnaaannnnggcntngntngncanagccnaccnagacctngnangcatagntacaaggtacaagggacttnacccaaggncttatttcgggcgngnattcntngaatcagatctggagcgagagttgganatgcacntggnctanatgngtccnnacngcgntngngttgcgagccgccnctnnatgcctcnngcaagnactgatgcntgantcatgcgnttcacnngcccatatntaccantgcnnnncgnngntncncattgtactactnncncngnnnttg

SEQ ID NO: 38881 - DNA, 695 bp, Glycine max
  Clone ID: PAT_MRT3847_135109C.1
gagcagcccatccatctgaaagtttctgcttccatgccttcttttgctatgacagaaaattgatggtggattttgctggaccagcaggaacctgttaatattttatacgcctctgagcatcatctacatgagataaatgccatttatccttagtgtttttgttttcatttgttgaataaaggaagtgctgctttgtgttccacgggaacaatggagaggtacaagttaattaaggaagttggtgatgggacttttgggagtgtctggagagctattaataagcaaaccggtgaagttgttgctatcaagaaaatgaagaagaaatattactcttgggaggagtgtgtaaacctgagagaagtcaagtcattacgtaaaatgaatcacccaaatattgtgaagctgaaggaagttattcgagaaagtgatatttcgtactttgtttttgagtacatggaatgcaacctataccaacttatgaaagacagggaaaaactgttttctgaaggtgaagttagaaattggtgttttcaagttttccaaggccttgcttacatgcaccagcgtggatacttccatcgcgaactgaagcctgaaaactagcttgttaccacagattttatcaacaatcgctgattttggccttacccgagagatcagttaacaaccaccctacactgagtatgtttcacacg

SEQ ID NO: 38882 - DNA, 526 bp, Glycine max
  unsure (1)..(526): unsure at all n locations
  Clone ID: PAT_MRT3847_13510C.1
tcatccacccacacatccggcttctctctttctttcctaattaatccttccatgcaaacaaacaaacgctctctctcatactcatagtgacacacacagcttagtttcgttgtattgtatgtgtcctttctcaattctcatcatatatctgttcaagtaccattatctttctatgttgagtgtcggcattttttgaagttttncttcaancctttaancncnancntttgtnngtttttttttttatacatcatatatatactcaaatcatcattactcaaattcattacaatttcaaatttttcgcctattcacaccatcaattttacttatttgaacccctttaattcaatatatattgcacaaattaatgattaaactactcatttacttaagtaccaaacccctgttactattcaaatccttaagggattccatgatggggacaagtcatcttcaatgcaggcaactccaatatcaaacagtcctatggagtctccctcacatccttcgtttgggcgtcact

SEQ ID NO: 38883 - DNA, 281 bp, Glycine max
  Clone ID: PAT_MRT3847_135110C.1
agaaggtatcacagcagcctatgacacgctcagcattggctcgaaatatcttgaatacggtacaacccgtgctgactatcacgtccatagggattctaccctgaagttggagttgcagcttcgtagtggcatgcattctttgtcagaactttgagatggattctccatcactttagttgttgatagttcagatatcaatgaaaagctcaatgcaaatatccaaagacaggagggtattccatcagatcagcagaagcgtatttttgctgggatgcatatgc

SEQ ID NO: 38884 - DNA, 493 bp, Glycine max
  Clone ID: PAT_MRT3847_135111C.1
agattacatctattcacttgataaacattttaattgactaatttttcttgtttaagcatgaaaaaaaccattttttacccatggtttatagagatatacacagaatactattattaacaaagacagacaccccccttttaaaaactccatcacaaaagcagccacactgataagacactaggagctaaactagaccatacgtgctgaagatcaatgggggttcataacaacataggacactaaaaaaacacggcctcacagaaaatcccaatagagctcataaaaagggcccccccggagataaaaattatccgaatggccgccccactcccccctcgtgacctcccccaaagacagaacctatagcggcgaaaaacctggggaagaggaggaggcccccccaaacaaacaagaattgttgtcaaaaatgttgtcgggccccggctgtaaaaccaataaagaccccctttatctgggaggcttctcggccttc

SEQ ID NO: 38885 - DNA, 329 bp, Glycine max
  Clone ID: PAT_MRT3847_135112C.1
tgaatcaaataggtacgcggaatttgggcatcatagcaaaacgcgtccactgagctttatatgcatcacaaggtcggaacatgtaccaacatagtaattacacacacaagctaagtccactctgaacagctgacctgtacgacttctggcaaagagcattaaccatttatcgtttataccacacatttcatatttctatttctttgactacacattcacacaacaaatgtgctacactacacatctatctcccacatttctattaacttgcaaacgtcaacaatgcctataagtaggtctcagatgcaacacaccggtgttcccgtcct

SEQ ID NO: 38886 - DNA, 520 bp, Glycine max
  unsure (1)..(520): unsure at all n locations
  Clone ID: PAT_MRT3847_135113C.1
accacgccgtccgcccgacatgggtgccccttaagtcttcatctcccacacccccctctgggaattcccttactggggaccccttccctctcaacttgggtaacctttccagttggttgatgttgactctctagtacgaattttctgtcggggtcgttgccaggtggttcatcttcttctggccttttggcacttcaaggttctcacttctcagaagggaatttgtttgatggtgttcttccggctgatttgtggccaatgcccagattgcactttcttgatgtgtccagtaacaacctcactgggacgctgccgaatttcacgagttggaatgttagctctgttggttnttgtgttcaatctgtcaaacaatttgttctatggacttttgaatacttcactggacaggtttgaaattattgatttatcaagtaattatttggnaaggtgaggtgcaggtgggnggntgttaaataatgnttagtctagaatagaaattgcctacagaggattccaaacc

SEQ ID NO: 38887 - DNA, 226 bp, Glycine max
  Clone ID: PAT_MRT3847_135114C.1
cgaggcgaacagcaccactctctgacttaatgaactaaggcttccttatgacctgggccaagcactgaaaaacgtctacaatctggaaatcgcgccgattatagaatactactccacacccactccccttctccacagaagacacatactgagactgccgctcaagcgatgtacaaagtccggcggacggcacgggggccctcccaccaagcctaagggttgcaga

SEQ ID NO: 38888 - DNA, 252 bp, Glycine max
  unsure (1)..(252): unsure at all n locations
  Clone ID: PAT_MRT3847_135115C.1
gaganacggaggttccgatcctgcgatgtganatatngnagntcngtgaggaanttgaactggaaaaaaaaaatggcgacgtnggaggtntccatcaagggaaatncggngaacggnaaaggagataatagttcgggtggctanaccaangatgttaggaanggttctggtggaggcnaggctcggaattcttnttcttcgtnttnntccgngatngangnggtaattttcgtttannggganctttggcac

SEQ ID NO: 38889 - DNA, 431 bp, Glycine max
  Clone ID: PAT_MRT3847_135116C.1
ggggaaaacccaaacaaacccttacattaaaataaaagggcaaacaaggggaaaaaaaaaaaagggcggcccccaaaaaagaaaaggtttctgggggatttttccggggggaaaggaaaaaaaaacggggaaaaaaggtcagggcccaaaccaggggcccggaatctaaaaaggggaaaagcccccccgggggggggggccttaagaaattcgggggaaaaaaaatcggaacctttccccaaaacctctcaacaaaggaatatccaaaaatccggaaagaaaccgaaaggaaaaaaacccaccacaaggtcagggaaacccaaaacccccaaaagggttaaaaattgggggccccgggaacttgccaaggggggacccaaaaaggggtattaggccccaaaaacccccctaagctaaccaaaaaaaaaaca

SEQ ID NO: 38890 - DNA, 278 bp, Glycine max
  unsure (1)..(278): unsure at all n locations
  Clone ID: PAT_MRT3847_135117C.1
gactttngtntggnagagttngttgagttngataggagaaaaaaanganagnangaataaaccaaaacgggntgagtcgggatcagtnncaacaccanctgctgctgctccttcacanggtcgtngagatgntgaggacngaacatgttnntgaggntccaaaggatntggctgaggagnaatctgtaattgcagtgcattcttntgatganaaacctgatgagtcnaaggccnttntcttagttgagaagantcaagaagttgccgaagtgaaacna

SEQ ID NO: 38891 - DNA, 270 bp, Glycine max
  Clone ID: PAT_MRT3847_135118C.1
cagaatagtaagtgcacacactcaacaaacctcctgaactacacactcatgtgcaatccaaaagttagtataagtaaataaatactaataatataatacatcatattaatgtatatatttcccaatattaccatcccattaactgagcacgtattcctaacaataattttagagattccattgtatgaaagcatgataaaagatgtataattccattgtagggaatagcaaaacgattggtgagagctgcactagaagaggttgcaaaga

SEQ ID NO: 38892 - DNA, 358 bp, Glycine max
  Clone ID: PAT_MRT3847_135119C.1
ggacaaggtcaagatcaaaatcaacaaatttaaaagaattaaccatttagtagccagaatggctctacagagagacaatattaaactcattaccattaacaaccctttcatcaccaccaattacataacatacatatttaaatacgacaatgttcataaacactgaaagcatcacaatatcaccattaaagacgagaagacccttctcttgcataacaagccagtcactatttttaaacacagaaaccctaaagagatcccataaaaatcaacgtaaactaacatcattattaagtcccacgaagttttcaccaataagagacaaaccaccacacatttgaaaataagtacaaaaaag

SEQ ID NO: 38893 - DNA, 538 bp, Glycine max
  unsure (1)..(538): unsure at all n locations
  Clone ID: PAT_MRT3847_13511C.1
gttgggtgtaaatttgagatagttgttgcaccacaaaaatgaaatcttcttctccacctccgttcgttacttccttcaacattccgcaaaaagttacctctattttgacctttttcttcatactttacatacctttgtaactgtgttccatttttatttagactttccagtttacattctgctaatttttatatctaatttgttccattcttttattattattttcaccatcatcctccatttctgacttcttaactatgttcttattgctcctagagtcctaggcactgattatttacataaaccgtgacttatcatgaatttatttaattatgggttctttttcatttttgagtattatatgtgtagtataaattattttttggttctttttttaaatgacaaaaagactttgtctctagttctacttcttgaccatgttctttccttgctgtatttgagcttttatacgtagataatgttattccttcccccccgctaaatagagattacacatctnctagaatgacaatggact

SEQ ID NO: 38894 - DNA, 484 bp, Glycine max
  Clone ID: PAT_MRT3847_135120C.1
tttcatttctgttttctctcacactcactctctcctccttccccttttctgttttctctcacgctccccgacgcaccaccatctactccctccggcgcgaaccccaccccactcccactctctcctccctccgatgcgatcccccacactctccttcctccccttcgttctcatcaacaacatgcagagacagatttggtgctcagcaacccaaatctgtcttcttcttcgtttgtttaattttgatttcatttttactgggttctgttctccatctcctctcatccctttccttgcagttttttgttttttgcttcccgcgggtgagagacgaaaaatattattttattgaaaaacagtgtggatgttgatggatcttgtggaagaatcaaatctctgcaatagtagatcagaacttgaagtcaaggtctccttccaaaaattgatttttaagtgtttaaaactttaaaaaaatattttttta

SEQ ID NO: 38895 - DNA, 274 bp, Glycine max
  unsure (1)..(274): unsure at all n locations
  Clone ID: PAT_MRT3847_135121C.1
ctctggaactggtttttngttctcgtttaagccatcataggnaggnccgggcttttcaggtcaaagaagtgcaacanagtgagatctgactcataaatttggcgacactcttgaaaaaacgaggtactggnatttntnnaggtgtcntgtaatttgagtcatggccggtgnaggtttggaatttcgatggttccaggaacaattgagaattgtacttaaggaaggaaacntgtttgnattanaangagatggccagcngggaaaaagatgtngg

SEQ ID NO: 38896 - DNA, 250 bp, Glycine max
  Clone ID: PAT_MRT3847_135122C.1
cctcgccgaattcggcacgaggcctcgtgccgagtttagctatttagataattctatagagctgtgttggtggaacaactgttttggacatgtcagctcgtttaccccttgttcagacgcatgaactgaggtaaaataatgttgataataacgataattcgtagtagtcactagtcaatccttgaaacagttaacagattggattttttttcctggataatacttgtaaatgggagtttttagggcaaaa

SEQ ID NO: 38897 - DNA, 1037 bp, Glycine max
  Clone ID: PAT_MRT3847_135123C.1
agcgtaaatttttcagctggttgcttgtgaacaactcaaatttagaagaagtggatttatttcataattctttcagtggaccttttgaactaccctttgatctaaatcatcacatggacaaaataaaaaccttgtccttatcaaacaaccagatgcaaggcaagctccccgataacattggatcctttttccctcatttagtgaattttgatgtctcaaacaataactttgatgggcatattccagcttcaattggagagatgtcaagcttgcagggattgtatatggggaataataatttttctggcaatgtacctaatcatattcttgacggatgcttctcattaaaaacattgatgatggatagcaaccaactcaatggaacactgctgagtgtgatcagaaagcttagacttgtcaccttaaccgcatcaaggaacaactttgaaggtgcaataacagatgaatggtgccaacataatcttgttatgttagacctatctcacaataaattctctggtacaataccctcttgcttcgaaatgccagcgtacttgttcttgcagggaaacagtcttaccggcacgatacctgaagcattaataagcaactactcccgaccaacggccatagattttagtgacaacaagtttattggaactattccagatagcataatataagctttggtctttaagatttcttttattggcaggtaatcagttgcaaggccaactttccagtcaggtatgccaactagagcaaatcaatatcttggacctttcgcgaaataacttcactggctctatacctccttgcttcagtagcatgtcatttggaaattttactatacccttgtatagtcttgataggcttaaaccatttagccctagacctgatgttgcagaaatgcaactcacaacaaaaaatttatatctttcattcaaaagtgacaaatttcaaatgatgtcaggattagatttgtcatctaatcaattgacaggagagattccacaccaaataggagatttgcatta

SEQ ID NO: 38898 - DNA, 403 bp, Glycine max
  Clone ID: PAT_MRT3847_135124C.1
ggagaaaacacaatcgagaaaaactcccgatgtctctgtcccctcgcgttccctctgtttcgattctgtcaccaccgttcagagacatccacgttctcatctgtttctgaatctcttcttagtcgatacactcgctcccaatctcacctgaataagaagaacatggcgattatggtgatggtgggattgggcctattggacttcctcgtcgctggggtttctttaatcattggtttgggcttcattgccttcattgcttccattctctgcgccactgcgttcttcaacaacgccaaggacgtctcctgagattgaagcctccattaaatgcgactatgtggccacagttgtcagcaatttacccccacaacatcaaggattgcaacgaaacagcgaccatata

SEQ ID NO: 38899 - DNA, 1007 bp, Glycine max
  Clone ID: PAT_MRT3847_135125C.1
tacggctgctagaagacgacagaggaccgagaaaacacaatcgagaaaactccgatgtctctgtctcctcgcgttccctctgtttcgattctgtcaccaccgttcagagacatccacgttctcatctgtttctgaatctcttcttagtcgatacactccctcccaatctcacctgaataagaagaacatggcgattatggtgatggtgggattgggcctattggacttcctcgtcgctggggtttctttaatcattggtttgggcttcattgccttcattgcttccattctctgcgccactgcgttcttcaacaacgccaaggacgtctcctgagattgaagcctccattaaatggaatcaaagacagataacagtgttttgttttttgggaccgcaattttggatgcagcgactatgtggccacagttgtcagcaatttacccccacaacatcaaggattgcaacgaaacagcgaccatatagcaacttaaacccttggtttgttctttattcggtttctcgttttgttgggttaggttagaaacttagaatctactgtgtttatgacttcaggacaaaaattgcgtcttgaggttgttctataattagaattagagttttgtctcgataattcgtgtaacaaatgtttaaattaaaggttagcatagattcctgaggtgaaactataattctgattaaagaacaacattgaaaacatatggggaatttgttctaaatttttcccttatatttttatttgtgtggaataagaatgcttttgtatcctagattgtgattatggagctgtaagcttaattattagatcaggatttgttgctaattaggaatttgtatcctagattgtgattatggagctgtaaacttaactattagattaggaatttgttcctaattggggttttgccctcgttgtctcttaacattgatctgtcctgtcatggaattttgccatttatgattattcaatatttatttctctgccccc

SEQ ID NO: 38900 - DNA, 350 bp, Glycine max
  Clone ID: PAT_MRT3847_135126C.1
tgactgccatgcacgcgagcttgaaccctgtataggggccgggctacatttttttattttttttaaaggtaggggataacgcggcggtctacatttattattggtcccagtctagaaaaaactgcatagaacacaaacgtagtgcttgctcatatagattgtctcgctaatgctgaacatataccaatgtactggctggaccgcagcctatttatctatggaatcatagactacttgccatcgattaaagatgccgtaagcgtgaatgatgtctaacctcaaattctacattctcccgctatctataccacacactgagtcattcccactgtgtttataattggaacatt

SEQ ID NO: 38901 - DNA, 501 bp, Glycine max
  unsure (1)..(501): unsure at all n locations
  Clone ID: PAT_MRT3847_135127C.1
ggtggatcgtatcgagctctttaannttagnggccaactcctagccggctgccgccctttttttgtttttttttcatcacaaatttttctctattcatgttacacttgagactgagactaggggatttagatgaaatttttataaaaaaacaatatatttacatccctcctgatttgaatgtcatattataccttgtatgaacataaaacagtgataaataattcaaccacccaatttgtaatctgtaccatttaccaattcccctaccgtttgtataatttaaaacctttttcaattttatgtgtggccaaatccattgtacgtatcccaataaaatgaaagcctatttatgtctttacccaaacaatccctttcttattacttgatagctaaagtctttgtatttccgttctacctacaacacataacataggaagtgcgttcctttacagtactgactatatcacctttaaattttgaccaaaaattgacagatccat

SEQ ID NO: 38902 - DNA, 1349 bp, Glycine max
  Clone ID: PAT_MRT3847_135128C.1
cggagcatattcagagaaacccgaggcaaactggctcattcatgtcaggcatatcctgcttttgagactgaattcaagaaatgcgttcatgaacgtgagactattgatgagtttgagtcttattggcactcactcttggaaagattctacgtcatggacaatgagtggcttcagtcaatatacaactcacgacaacattgggttcctgtgtacttgcgggagactttctttggagagatatctttgaatgagggaaatgaatatttgatttctttctttgatggatatgtgttctcatccaccactctacaggtctcgcttagacattacgagaaagccgggtcaagttggcacgaaaaagaattaaaagcagattatgacactactaatagtagtccagttttaaaaacaccatctcctatggaaaaacaagctgcgagtctttacacgagaaagatattcatgaaattccaagaggagttagtagagactcttgcaaatcctgctataaaaattgatgattcaggaacaatcactacatatcgagttgccaaatttggggaaaaccaaaaatctcatgttgtgacttttaattcttttgagatgaaagctagttgcagctgtcagatgtttgaattttcaggaattatttgtaggcatatactgtcagtcttcagagctaaaaatgttctcactcttccatctcagtatgtgttgacatgctggacaaggaatgctaaaaccggtacattgttagatgaacatgcatctgaattgccaagtacttctcgtgaatctgtaccagtttgttataacaatttacgacaagaagcaatcaaatatgttgaagaaggtgcaaaatcaatccaaatctatcatgttgccatgagagctctgaaagaagctgctaagaaggtttgcaccataaaaaatcagagttctggaacagcagagggagctacagcaaccaatggaagcaggggtgaattgcttgtagcagatgaagatgttccaagcaatcaatctgtggcggagaagcaaaagaaaataggagagttgactgctgagttagaggccacaaatcaacgatgtgaagtttatagagcaaacttgctggctgtgctaaaggatatggaagaacagaagttaaagctatcagtaaaggttcaaaatgcaagacttagtttgaaagagtgattccctgattgcaaagggttttaatgcatgcctgtcttgccattttgattcctcttagggtatgttaataacctttgcgtagtttatcgtggtccgtgtctgcaatctgattgaatatttgaatttctcgataagttattaattttattatt

SEQ ID NO: 38903 - DNA, 917 bp, Glycine max
  Clone ID: PAT_MRT3847_135129C.1
aattcggctcgagaaaaatgttctcactcttccatctcattatgtgttgacacgctggacaaggaatgctaaaaccagtacattgttggatgaacatgcatctgaattgccaagtacttcttgtgagtctgtaatagttcgttacaacaatttacgccaagaagcaatcaaatatgttgaagaaggtgcaaaatcaatccaagtctatcatgttgccatgagagctctgcaagaagctgctaagaaggtttgcgccattaaaaatcatagttctggaacagcagagggagctacagtaaccaatggaagcaggggtgaattgcttgtagcagatgaagatgctccaagcaatcaatctgtggcggagaaggaaaagaaaatccgagagttgactgctgagttagaggtcacaaatcaacgatgtgaagtttatagagcaaacttgctgactgtgctaaaggatatggaagaacagaagttaaagctatcagtaaaggttcaaaatgcaagatttagtttgaaagagtgactgtcccgattgcaaagggtttatttaatgtatgcctatctgtccatttggattcctcttaggatatgttaataacctttgcgtagtttatcgtggtccgtgtttaaatataatgattgtgcttctgtgttttctaatcctgtaatctgattgaatatttcaatttctcgataagttattaattgtattattaatttctcgcgcctgttaacgaatagaagaaaaaatcagggatcttcagatgaatgtgtatgttttcttctattcttaagttacaatatattttggtgggtctcccatctcattgattcattattctgatttagatgtgagtaggggtagaaataagataggtcaaactttggtgaatctgagtctgacttacatt

SEQ ID NO: 38904 - DNA, 566 bp, Glycine max
  Clone ID: PAT_MRT3847_13512C.1
gaaaaggtgaattgagtttagttcacggaaaaacccgacccgaatagaaggatccgaaatggagtcaatactgggtcgggctctggagtacactctcaagtactggctcaagtccttctcccgcgaacagttcaagctccaaggccgcaccgttcacctctccaatttagatatcgatggagacgccttgcattccagcgtcggattgccgccggcgctcaacgtcgccaccgccaaagtcggcaagctagagattacacttccgtcggtgagcaatgtgcaaacggagcctatcgtggtgcatattgatagactcgatctggttctcgaggagaattctgattctgatgaatctcttagttcgaactgctcagcatgacgccgtctgcctcgccaagggaagctttatgctcttgctgataagattgcagatggcatgactatacaaattcaaacagccaatcttttacttgaaactcgtggtggttctcgtcgccaagcgggagcaacatgggctccacctatggcatctatcaccatacgcaacgctttgttgtatactacaa

SEQ ID NO: 38905 - DNA, 451 bp, Glycine max
  Clone ID: PAT_MRT3847_135130C.1
ggctcgaggcaagccactggagggggagtgcgtaatgttcgtgccagagagacgatgggtcgaggggtaagggatgacactgggtctgatcactgccatccctgccgtgaacccacagatagaacggatccatcggtgcgtggagactgacccaaaccacacgcactagccgctcgacactcataatctcgtgaggggtattatggcacgctaacagacctattggtaggagcagctgaaactaaccttggaggacattatctcggaagctgagacattatgtgggttcctgatatctctatcgctcccggctctgaaacgaacgatggccacggatatgggcatgcgtctgcgagttgagctgcatcacaacgtatatactcattacaaaggggacatgagggtgtcgcgcgaaacctgtgcctacaaataattacgcacttgggctgtt

SEQ ID NO: 38906 - DNA, 629 bp, Glycine max
  Clone ID: PAT_MRT3847_135131C.1
gtacttttggttgctctgaagaagcctgaatgctgctgtatatccgggtgtctgagacaacattcgtcgcattgttgaggggtatcttcaacattggttttggatgcttattgcatgagtgttcaggagtgttactcattgcgttttgaatgagaacttgaggtggcacttgttgttggacactgcattgggtagtggagatgccaccatccctatcatttagaagctctcccgttagagagccaagatcagacagtcacaagcgtgggcgcagtcttgaaagcggattgccctcaagagagaaagatgatgatcttgctttgttcagtgaaatgcagtccagagaagaagagagttttttgcttcaaccatctgatgacttggaagactcattttcgtcaaagttgagagattttcctgatatcaagcttgggatatccattcctggtcgaggagaaaccagtgaattgcttaatgcagatggtgacgagaatgactatgactggttattgacacctccggaccaccactgtttccttctttagatgatgaaccacgagaattaaatggtgtaagcagaggaaggccaaggagtaaacctatttccatatcaagatcatctacgacag

SEQ ID NO: 38907 - DNA, 920 bp, Glycine max
  Clone ID: PAT_MRT3847_135132C.1
aattcggctcgaggaaaggatcaacttccaaaggctggaattaactgcggtccttgacaggtaagtaaaactagaaagagaatgttctagcaaaggtaatagagggtggagaatgagtctgatgagtcttctacctcctcttgctgctgcttcttacacaaacacagttcctaaactgaaaactcacagtccaaaccttgtacttggacaaagggtcctacctaatctcctctcattggcccttgctgtaaccttagcctctcctttaccttcatatgcaatcccatcccttaattctcaatcccctccaatctctttcaccactcctttttctcaatccaagaacttggagcttggactagaaaatggaaaaattagaccttgcccatcaatcaatccaggttgtatatcaacaaatcccaagtcatcatcttttgcgtttccttggcttattccctcaaattccttggacgatgcaattcagaaactacgtgaagcaatcctaaagacccagaaaaatgtgaaatttcagcctgtggaagatagcccagatggtcaatatctacaagctgaagttgatggaggatttggtagagatgttattgagtttctggtgaaaggtgatgtggttgcatacaggtgtgtggcaatgaaagtgacttatgtgtaccctttcactactgcattaggagattcaaagggtcaagaagcaagactgaagcaaattaatgaccacttgggatggtatgctccaagttttgattccatggaggaatagtgttgtttcgtttcattcttttgttggttcagttctttgattggtgcctatctgaatccttaatgcctttaatgttgaattttgcctcattatgttcaattttatggattttgcaatttaaatgctcaaaagttttagactc

SEQ ID NO: 38908 - DNA, 363 bp, Glycine max
  Clone ID: PAT_MRT3847_135133C.1
ggtgaaattcaacgtactcgagaggccatctccgacaacaatgggtgttcacgacaatctggctacctctcaaagtcgctatcatccccgcactttttgacatcccagtcctgattacattcactactgcagttaaggcatcagtgcgtactccatatagacacatgagcgatatggaagtggatgagtcgagacttagcaactggacagacactgctataggagcattagccagacccacttgcacaacagatcattgtggttctgtgaaagagagcatagcgacatgcgatgctcattggccaagtctattaccatggtctagctgtgcacaactgactccacaactgcacgaccgatcat

SEQ ID NO: 38909 - DNA, 418 bp, Glycine max
  Clone ID: PAT_MRT3847_135134C.1
gttgaagaagaaaattatgaacttgcacctttttttggttaccggggttggtgttcaaaactggacaaaggatacttgtttttcaaaaatgggaaaagggaaacagaaatcgcatttaaggggtgctcttcttttcactggggtgggctcttttcaataaaagcttttaacttcagggatcaatgccgttaattttgggttccacttttgaatacaactgcctgggcttttgaatttttttttctgaaatttcccaataaccacgtccattgggttccaaaaatgtttgcaccggtttcctgaaggagtttggattaccgctcacgagcttgttcaggctttgtctatcttgaaatgaaaaatgggttggcctttttaacccccccggtataaacttggcccgaagtgccactccccc

SEQ ID NO: 38910 - DNA, 387 bp, Glycine max
  Clone ID: PAT_MRT3847_135135C.1
gcgttcggtgatggactcgtgaaatccatatttctttgctttacgtggtgcagatgactctgcacgggtacatgaccagcgataatggcggtgggatttagcatgactttcacatcaccctgttaacacatatatgcctagacactgaattgcgccatatcatgtacatattactggatgggcttactcaagctttggcgaactacatgcgccttatcaagatgagctcacatatgcgtcttgaaagaatctgcactcttattcttcatctccatctgctacatatgaggatttgaagaatattcatgaggcacaggtttactcatgccacatgaatgcacagacaatgtccggagtgaataggtctggccgccatgatgaatatgt

SEQ ID NO: 38911 - DNA, 678 bp, Glycine max
  Clone ID: PAT_MRT3847_135136C.1
aaagtgttggtgttgacatcaagccatatgcaaatatgttggtgagattgttgtttccagttgttaaggaggaaagaagtactgctgcaaaacgtgcctttgcaagtgcctgtgcaaaagtcttaaagcatataccagcctctcaagcacaaaaacttattgaagatactacagctttgcatgctggtgacaagaattctcaaattgcatgtgcatttctcttgaagagctattcatccatggcagcagatgttgttggtggatatcatgctgttatcattccagttgttttcctttcaagatttgaagatgataaaaatgtctccagcctatttgaggaactatgggaagaatacacaagtggggaacgaatcactctccacttgtacttgggagaaattgtttcacttatttgtgagggcatgtcatcatcatcatgggcaagtaaaagaaaatctgccgaggctatatgcaggcttagtgaagttttgggtgaatctctttcttctcaccatgaggttttgcttcagtctctcatgaaggaaattcctggtcgcctatgggagggtaaagagatgctattgctagcagtaggtgctctatgtacatcctgccataaagcaattttgactcaaggttcctcatcttccattgccattctgaatttggtatcatctg

SEQ ID NO: 38912 - DNA, 1284 bp, Glycine max
  Clone ID: PAT_MRT3847_135137C.1
cttcgctgatcagtccatcctcgagccgttcgagtccagtcggcccgagcttttttttactcgaattttctacggctgcgagaagccgacagggggggactacaaatcacttttctacttgaatcttctttatccttcttttttctccttgaactcgaacattcactatggcagatgaggtggttctgctagatttctggccaagtccatttgggatgagggtcaggattgcacttgctgaaaagggtatcaaatatgagtacaaagaagaggacttgaggaacaagagtcctcttctcctccaaatgaacccggttcacaagaagattccggttctcatccacaatggcaaacccatttgtgaatctctcattgctgttcagtacattgaggaggtttggaatgacagaaatcccttgttgccttctgacccttaccagagagctcaggctagattctgggctgattatgttgacaataagatatatgatcttggaagaaagatttggacatcaaagggagaagaaaaagaagctgccaaaaaggagttcatagaggcccttaaattattggaggaacagctgggagacaagacttattttggaggagacgatctaggttttgtggatatagcacttattccattcgacacttggttcaagacttttggcagcctcaacatagagagtgagtgccccaagtttgttgcttgggccaagaggtgcctgcagaaagacagtgttgccaagtctcttcctgatcaacacaaggtctatgagttcattatggacataagaaagaagttcgacattgagtaggttcatgttggattttaatagccatagtgacgtattgatcattcttggcctttcaactaaatagtatttgtgtagtaaattaaaggcacttggatgtaccaaacttcatgctttttgtaggagtgcgtaggttttaaaaattttctgatgtatctttcatgtgtttgttggttttgtaacagaatatttcctatattatacatatatttgagtcactagtacataatgtatctataatgtgtttgttttttttggtaaaaaaaaaaaaaaaaaaaaaaaaaaaaaaaaaaaaaaaaaaaaaaaaaaaaaaaaaaaaaaaaaaaaaaaaaaaaaacaaaaaaaaaaaaaaaaaaaaaaacaaaaaaaaaaaaaaaaaataacaaaaaaacataacatctaacttaaataaggggcgctctttttaagggccccattttttggacacgtttgtttaaactataaattt

SEQ ID NO: 38913 - DNA, 692 bp, Glycine max
  unsure (1)..(692): unsure at all n locations
  Clone ID: PAT_MRT3847_135138C.1
cccgcgtccggggtctgcttcgttttgaggcggagacccggcctgagaagttatgggttggtcctgggagtaaggcagctgaagagaaagagttttttgatagccaccttgctccattctacagaattgaacagctcataatagcgacaatccctgaatctaagcatggcaaaccgccaagtattataacagaagaaaatattgaattgcttttcgaaatacaggaaaaggttgatggaattcgtgcaaattattctggtttgttagtatcactgagtgacatttgcttgaagcctttaggcgacgactgtgcctctcaaagcattttgcagtattttcaaatggaccctgacaattatgacaanctacggaggtgttgaacatgctgagtattggtttcagcattacacttctactgaaacatgctttagtgcattcaaggctccccttgagccaactactgccttggnaggggttntctggaaataattattctgaggcttctgcatttgttatcacgtaccctgtgaataatgcgattacaaaagtcggagatgagaatgggaaggcaatagcttgaggaaaagcattcatccagttggctaaggaggaattgctgccaatggtgcaatctaacaatcttaccttgtcattttcaactgagagttcaattgaggaagaactaaagagag

SEQ ID NO: 38914 - DNA, 1033 bp, Glycine max
  Clone ID: PAT_MRT3847_135139C.1
cgcgtccgcttttctactttgagtcttcttgatccttctttatctccttgaactcaaacatggcacatgaggcggatctgctatatctctggccaagtccatttgggatgagggtcaggattgcacttgctgaaaagggtatcaaatatgagtacaaagaagaggacttgaggaacaagagtcctcttctcctccaaatgaacccggttcacaagaagattccggttctcatccacaatggcaaacccatttgtgaatccctcattgctgttcagtacattgaggaggtttggaatgacagaaatcccttgttgccttctgacccttaccagagagctcaggctagattctgggctgattatgttgataagaagatatatgatcttggaaggaagatttggacatcaaaaggagaagaaaaagaagctgccaagaaggagttcatagaagcccttaaattgttggaggaacagctgggagacaagacttattttggaggagacaatctaggttttgtggatatagcgcttgttccattctacacttggttcaaagcctatgagacttttggcaccctcaacatagagagtgagtgccccaagtttattgcttgggccaagaggtgccttcagaaagaaagcgttgccaagtctcttcctgatcagcaaaaggtttatgagttcattatggatctaagaaagaagttaggcattgagtaggttggagcttaatggccattgtgaagtagtggttttccattggtcgttcttagcctttcaaataagtaatatttgtgtaataaaaggcacttagatgtgccaaacttcgtgctttctgtaggaatgtgtgggttttggaaaatctctgatgtatctttcatgtgtttgttggttttgtaatttttttttggtattgtcttatacttgaataatttgagactactataatctcaattaatcttcacatgatactctgtcgattattactaattaattcttttttgtaaaaaaaaaaaaaaaaacttaaccaccaa

SEQ ID NO: 38915 - DNA, 1078 bp, Glycine max
  Clone ID: PAT_MRT3847_13513C.1
ataacatccccaaaggccatcttaatagagcaacgatctattaagaagttgttagataaacttggacccaatgacctcccaaagaagaagatactgagatatcttctgtatctactgaaaaagcatggaaagctcatggtgggggaacatgtggaggaggtctattctcgttctgaggaacaagctgcaacagagaactcgaatcacgattccctacgaagccatcatgttgattcagacacaatcttgaagtatggtcagtataaaactcacaccaatgagttaagtggagttgcaccacttgaggaatataagtgcccaatatcctcaaggttgatgtatgatcctgttatcattgattcaggagtaacatatgaaagaatgtggataaaaaagtggtttgatgagggtaatgacatatgtcccaaaaccagaaagaaactagtccatatgggattaactccaaacatggccatgaaagacttaatatcaaagtggtgcagaaataatggagtctccattccagaccctagtaggcatgcagaagatatttgtgcatgggaagcttcaaacacttccattagcagcttaagaagttatttcaatgatttcaccgcaccagtggatcttagtagcatgtcaattgggccattggatactagtttcagtttagatgcctcacatggtaagaccactcgtggctcaaatttgatgcagaccaagagccgtgacaattctcacaaacatcaggctcatacagagatacatgatactgatttgatgctcttgcctcaactctgtgatcttcaatgggattctcaatgcaaggtcattcaagatttgaaagataatttgaaaagcaatagccaagcttttgtttctgtatcagcagagaatttcatcgaaccactcgtcaggtttctgagcaatgcatatgatctgcgtgatattaaagcactgagagctggaactcagcttatgttggagtttgtgaacaactgcagaaatggtacgactaatttgaatgaagatactttcattatgttggcaagttttctgaattcaaatgtgattggag

SEQ ID NO: 38916 - DNA, 512 bp, Glycine max
  Clone ID: PAT_MRT3847_135140C.1
cggatccttgggctgcatcatcatccttcctataataccgtctcttcccttttgctttttcctctccatcattgacttctgccaagtctttcaaaaagctgatctaaggaataataacctacacgaggtcttcgtggaagaagataccattgccacttgccacatgccaagcgatcaggtgaatgttacttatgatgttaattactctacgtccatctcactcttaatttcttaacacgagtcctttagtcaattgctttttagtttttaccccttttgaaattccaatctcattccaactttgcacaaacatttttcctagcggtggaaaattggattttttttttttttggatatatagaaatattggtgaagtggtctttattaagagttgatggaacccaatgcactaggtggtggaatattttctaacataagtagtggtttgctaggagtagaaaaccctttacagccgcaacaacaacaacaccaacaccaaacctttaaaacca

SEQ ID NO: 38917 - DNA, 379 bp, Glycine max
  Clone ID: PAT_MRT3847_135141C.1
gactacaaatcagttttttacttgaattttcttcatccttctctgttctcctagaacttgattacttgaacattccctatgacagatgaggtggttcttctggatttctggccaagtccatttgggatgagggtcaggattgcacttgctgaaaagggtatcgaatatgagtacaaagatgaggacttgaggaacaagagtcctcttctcttacaaatgaacccggttcacaagaagattccggttctcatccacaatggcaaacccatttccgaatccctcattgctgttcagtacattgacgaggtttggcatgacagaaatcccttgttgccttcagacccttaccagagagctcacgctaaattctgggctgatt

SEQ ID NO: 38918 - DNA, 608 bp, Glycine max
  unsure (1)..(608): unsure at all n locations
  Clone ID: PAT_MRT3847_135142C.1
cggtttctctggttaaagtcacatttccataaggcagtgtctaatactcatcacaatatataagcaggccataacctaatgcttttgcactacaaatcagctttctacttgaatcttcgttatccttctttttttctccttgaactcgaatattcactatggcagatgaggtggttctgctagatttctggccaagtccatttgggatgagggtcaggattgcacttgctgaaaagggtatcaaatatgagtccaaagaagaggacttgcagaacaagagccctttgctcctcaaaatgaacccggttcacaagaaaatcccggttctcatccacaatggcaaacccatttgtgaatctctcgttgctgttcagtacattgaggaggtctggaatgacagaaatcccttgttgccttctgacccttaccagagagctcaggctagattctgggctgactatgttgacaataagatatttgatcttggaagaaagatttggacatcaaagggagaagaaaaagaaactgccaaaaaagatttcatangaacccttaaattattaggaaaacagctaggaaacgagacttatgttaagaaaaacgatctg

SEQ ID NO: 38919 - DNA, 308 bp, Glycine max
  unsure (1)..(308): unsure at all n locations
  Clone ID: PAT_MRT3847_135143C.1
ttnnngnnnnnntgattgcaaaataatcaaatatcagaaaggcgagggataaaaaaaggtgaacaacaaagaaaatttcaagagaaaaggcaaaaaccaaaaaaggtagctagccagctaatgctgcttgcatgctcctattgggcaaacccctccatttaggacacaacacatttccgttcccattcctaatccaagccgaaaaacacaattttaaatgaagtttgtactcacccaacctcctttattattattttcctaacccaaaatcagaaaaatggttcccaattcccatgatacccccctta

SEQ ID NO: 38920 - DNA, 432 bp, Glycine max
  Clone ID: PAT_MRT3847_135144C.1
gccaggctctactccttcaccaatggtgaccacaagaatttctgacgtgttggccatctaatgtgccatcctgtgacaactatcaatggatggtgggtcatcatagtgtttgcggtggcacttgatagttaagtagcctacaataccaggttgagttttgaacatttatgcaatggtgacatccattgacatcttgggaaccatatgggctcttacctttgctttcttgatttcactctttcaagcgcatcagctcagagcatatgaccacaggctgcatgtactcaaatgccaacctggagaacgccatataatctatattgtatcaggcagatctggcttcaactgactatggacctggtgggaccttgaatcttattagacatgactgcacaccggatcgcacttataccatactctgctataaagaac

SEQ ID NO: 38921 - DNA, 683 bp, Glycine max
  unsure (1)..(683): unsure at all n locations
  Clone ID: PAT_MRT3847_135145C.1
agtaagccaagcgagnaatcgtgccggtgccccaccaagagaaatatgtgtggtcgaagaaagtgagtacctgtagagcgtgcgtgaaaacatattcaaacattttgtcaacaagatttactctcactgaagaatgatctctgtaggcttgtggcatctcctccaaatatttacatgttttctgcttttgactcaatcattttctaaagatgatcgaaagacttacatcgtctacatgggcgattatccgaagggtgtgggattcgcagaatcacttcacactagtatggttgagagtgtcctcggcagaaattttccaccagatgctttgctgcatagctacaagagtttgaatggatttgtggcgaggctaacaaaagaagaagcaaacagaatgagaggaatggatagtgtggtctctgttataccagacagaatccataagccacaaacaacaaggtcttgggactttcttggcttccccgaaaatgttcaaagaaacattatagcagagagcaacacaatcgttggagtgatcgatagcggaatttggcctgaatctgatagctttaatgatgctggatttggtccaccaccaaagaaatggaagggcatttgccagaacttcacttgcaataacaaaataattgnagcacaatattttcgcactaagggtttttttg

SEQ ID NO: 38922 - DNA, 401 bp, Glycine max
  Clone ID: PAT_MRT3847_135146C.1
ttttttttttttttttttttttttttttggttgtttttaaaataatttttttttttttattaaaatttttttatttaaaaaaaaaaattgggaattaaataaaaaaaacacctttctcaaaaaaagaatttcttaattgtatgaaaagaacctccaacaaaaaataaagggagatttattacaattgatatccaccaaacaaatggaagggtggtgggggaaaatccattcctgccaaaaaattaaaaaacatcgacacaaaaaaataaagccgaaggcctttaataactaaggaggcaactaagggacaataaccgtgtttcactaaaaatccgctttccaatcgggaaacctttgttataaaaaaaatgaatggatcatcaaacccccattgagagacc

SEQ ID NO: 38923 - DNA, 440 bp, Glycine max
  unsure (1)..(440): unsure at all n locations
  Clone ID: PAT_MRT3847_135147C.1
attatttcaataactgagttgggactagacggttctccagattccttggattttcctaagatatttntgagagcgtaaatcatgaatccaatgtctcagattatattattggtggttttgttgattggtgtggtgtttggacagaagtcgttaccagttgtcaaaggttcacctgaactggtagaacaatctccttatgcttctgacaaagaagtaatcaacaaagttcaacaacaacttttcaatgctatggaattacttcaagcatatgaagaagacgcccccatgaaaatcgccgagaagagaagaaacaagttcgaattcatccgttttggacgcagacgttaacttgttatatatcttttttaaatatgctagtgaaatgggtgctactcttctttatgtattacattttttcttaataaaatattagttattcc

SEQ ID NO: 38924 - DNA, 243 bp, Glycine max
  Clone ID: PAT_MRT3847_135148C.1
ctttaggcctttgtggggggcctttttaaaaccctaccgggggatcagcctcaggcctaaaggttttgaagtccgcaggaccaagaacaagagattcgtgacagcgaaaacatgtatggagtacgaaggcgaacgcctgctccacacagaccggctcctgggttgctaggtgagtcagctcataaaatccgttctggcccatcacattctgttccagctgattccatcgaggagaaagaggcc

SEQ ID NO: 38925 - DNA, 742 bp, Glycine max
  Clone ID: PAT_MRT3847_135149C.1
gaaagcattctcagaatgcaacatgctgtgactcatagtaatgacccatatgtagatgactattaccaccaagcttgtctggcaaaaaaaacttctgtggctaagttaaaacatccattttgcccaagccaaataagggaatatcctccacgatcccgtgctaatactgagccacattcatttgttcagattgatgccctagggagagtttcattttcttctattcgtcgtcctcgccctcttcttgaggttgaccctccaaacacttctgctagctctgatcaaaagatttcagagaagccccttgagcaggaacctaggtttgctgcaagagtcacaattgaggatggtctttgtcttcttcttgatgtggatgatattgatcgttacctacagttgaatcagccacaagatagtggaacacatttaagacgaagaaggcaagtcctgttggaaggactagcaacttcacttcaacttgttgatccactgggaaagaatggacacaaagttgggcttgctgctaaggatgatcttgttttcttaaggttggtatctcttcccaagggacgtaagctccttgcaaagtatcttcagttgcttcctcctggcagtgagcttatgaggatagtctgcatgaccatatttcgtcatttaagattcttatttggtggtcttccctcagatcccgcagcttcagagactacaaataaccttgccaaggttgtttgccaatgtgtcc

SEQ ID NO: 38926 - DNA, 377 bp, Glycine max
  unsure (1)..(377): unsure at all n locations
  Clone ID: PAT_MRT3847_13514C.1
cagaagaagaaaaaatggtccacaacacacttaaaagttattataataaagttttctctgccccaaaattcacccgnnncctaatattgctccatagaggaatgagggataacaagatnntaaaaacatgnnggggaaaatctactaagataagaaggaaaaaaaantacaagctnagaatnntggttctntaataatgaaatagactaaaatgtcaaatgaaaagatgcatgnnaataggggctgggactggagaagaatgagtgtagtgcaaaactaaatgattgatgaatctcatgagggtatccaatgacccatgtcaggagcacccagctctagtatgaggttttacactagcgccttgggttattctagga

SEQ ID NO: 38927 - DNA, 295 bp, Glycine max
  Clone ID: PAT_MRT3847_135150C.1
gacacgcgtacgctgctgccgtagacgacagcatggtcccggtgcgacatgaccacagaagggttcgggtgctaccagacgacagaacgcgtcggttcgcaattcatctagcaatggctcactccatgccctccgttctcaaaacatctcaagcttcatgtactcgagcattccatacaatagcattggtgtagggttccctcgactcgcttgccctagcgttggcttacaacttcaacgacggggaaatccctggacttccctatcttagtcaccttgctctacatgccctttt

SEQ ID NO: 38928 - DNA, 143 bp, Glycine max
  unsure (1)..(143): unsure at all n locations
  Clone ID: PAT_MRT3847_135151C.1
actanttgcangcncgangtgacgtgaagctcggnaattcgtgctcncanngttcaanatccgagtataccttagatagnatgangtttgaagnntgantatggatggangaggcanggntccccantgantggntggtgngg

SEQ ID NO: 38929 - DNA, 148 bp, Glycine max
  Clone ID: PAT_MRT3847_135152C.1
agctgaagttaaagtcagtgatgtcaaacaccagtgcaagcgcctgcgtagaaagtgtcccgcctcatacttcactgggtgctctggtctttacgatgctcgatgggactggctgaacaagcttataacttatgagcgtgataagcgg

SEQ ID NO: 38930 - DNA, 234 bp, Glycine max
  Clone ID: PAT_MRT3847_135153C.1
atcctgaatccttccttcatttcatcagtgaattatcaagtgtcaagtgttaactaacccccatcggtcatggggtgcaaaaagcagagccagaacaagttaattcgaatcatggcatcgccaatcagagcactgggaaaagcgcgtgacatgtacctgcggagcattaccaactgggggcaggacgtgagctactaccgggggggggaccccaccggaggggccggaagggtc

SEQ ID NO: 38931 - DNA, 270 bp, Glycine max
  Clone ID: PAT_MRT3847_135154C.1
gggagtggatttaaagtaattttttagagacaaaaatcccaacaaaaacaattttgtctttaaaaaacattgcttacgatttttaaaatggaattaacaggaatttcttttcaatatttttggcccctgaaaaaatgtatattacagttaaaaccttttttttaaaggaaaaaattccttttgctaataaaaaaaagtttaaaggtgaggaccccggctattaatttccttttggttttcatcttcttaattcaaaatatttggaaaatt

SEQ ID NO: 38932 - DNA, 262 bp, Glycine max
  Clone ID: PAT_MRT3847_135155C.1
cgagagagatcgacttagactgatagcaaatgctcaaggtgaagttgtggagagtttgttgcctgtattggatattttcgaccgagcaaaatcccatattaacgtggagactgagggagaggagagcatatactacagctgtcagagcatattttatccagttattgaaattctaaattcacttggaggtgaaccagtggagacatttggagcaccctttgatccattggtacgtgtatcctttatgcgccaggattctgct

SEQ ID NO: 38933 - DNA, 1115 bp, Glycine max
  Clone ID: PAT_MRT3847_135156C.1
atggaattcaaaccacccaagttctataaagaggagcttaattgccttaagttatggagatctgtacacagattgggcggctatgacaaggttacctcatgtaaattctggcggcaagtgggagagtctttcaaacctccaaagacatgcacaacagtttcatggacttttcgggttttttatgagaaggtgattctagattaataaggcacttcttgactacgaaagcatacaacaaaaggtggtgagctgaatgtgcctattactcctcttgcagagccaataaatattgaaaatcagtctgtccagggttcagcatcatcaggtagggcacggagagatgctgcagcaagggctatgcagggttggcactcacaacgtctccttagcaatggtgaatttagtgatcctattattaagatttacttaaacgcaagaaatcatcggacaccgttaatgttgtcaaagtggcacacagtcaaccatctagaccacagttaagacacatatcggacacatctgtggttgacattggacctcctgctgattgggtaaaaatcaatgtgcaaaaaactaaagattgttttgaggtctatgctttagttcctggccttctgcgcgaagaggtgcgtgttcaatcagacccagctggacgcttggtcataagtggtgagcccgagcattctgacaatccatggggggtgacacctttcaagaaggttgtcagcttgccttcaagaattgatactcagcagacgtcggctgtggtgaccttgcatggacaattgtttgttcgagttccatttgagagcaatcaaaatagagaaggctgatagattcatgccgaactaatttaccaaggtttataggatagttgacccctaagccaaattcatgccgtgttctattatctctgaattatgtcaataattttttatttaaaattttcatttgatgttctgtcaaaagttttacaatttcaagcattgtttaaaatcacaccttagtaatagtatagtggcagcgttggttgctattctattatttaaaccccatgctaccaaaactaatatttccccaaaatgaaagaagtattctaaaaagcactgtaaaaa

SEQ ID NO: 38934 - DNA, 2002 bp, Glycine max
  Clone ID: PAT_MRT3847_135157C.1
cacgcgtccggggtttttcaaattcaacatttcttcggttaccaattttcggttgttttctctcacccttcaattgcaattcgtacaggaggttgttctattctcatgcacaattgaaattggcaaatgagtgatgcaaaagaaaacgaggaagctggccagggcatgccctcggtcgtggaagaaaaccaacagttggttgatgctgaggttcaagatcaacctgaaactgcctcttagtagaggaaacttcaaatcatgttgaaaattactcatgttgaaaaggaagaacctcgtgccaggataaaaatgcagaacttgaggctgtttcagagggaattccacaagaagatgttcaaaatactcttctatgtcccagtagagtctgatgctcagattttggataggactgagtctgaagaagatctgttgcgaaggtggaagctgatgaattaccacagaataataaggaggctgagaataatgatgatattcatcaaaaaagtaatggcaatgttgagatggctttggaggtgaagcctgaagcctgtggaatggctgatagtaaagcatgtgataatggtgaccctgtgcttgcaagtcataatgagcctgctacgcccctacctgctcctgcagatacaaacactgaaattatgaatgtattagaagttgagaataaggttgatgaaaagcaagtggctgaacctgcagataacgggaattcaaactcaaagcacatgcttttcttggatgccgaccattcctatgatggtaatgagtcaggaacagaggaggagcagtcagcatttatgaaggagcttgaaaacttctttagggagaggagcatggaattcaaacctcccaaattctatggagaaggattaaattgccttaagctgtggagagctgtaacgagattgggtggctatgataaggtgacttcatgtaaattatggcggcaagtgggagagtctttcaagcctccgaagacatgtaccactgtctcatggacttttcggggattttatgagaaggcacttcttgattatgaaagacataaaataaaaggtggtgagctgaatgttcctgttgcttctcatccagagcctataaatattgaaaatcaggcctctgtatcaggtagagcacggagagatgctgcagcacgagctatgcaggggtggcactcacaacgcctcctaggcaatggtgaagttagtgaccctattattaaggataggaattctgtgtctgtgcaaaagcgtgaaaagcagcttaaaagcatcaatatacacaaacgtaagaagccatcttcaccttacatggataatgcagtcaaagctgcacgcagtaaaccgtctaaaccacaattggacacaactgtgattgatattggacctcctgctgattgggtaaaagtgaatgtacaaaaaactaaagattgttttgaggtatatgctttagttcctggcctgctgagggaagaggtccgtgtacagtcagaccctgcaggacgcctagtcataagtggggagcctgaacatcccaacaatccttggggtgtgacacctttcaaaaaggttgtcagcttgccctcaagaattgatcctcatcagacatccgcggtggtgacactgcatgggcagttgtttgttcgtgtcccgtttgaacatttagaatagtggtcgcttatgctttcaatgcctctctctttgaccatgatatgtatgtaggatagttgacccggaaaccatgtagaaaaatatttctgcctgtaaaacatgccaatttctagcttagcgtagcatttattttaatgttttagttcacttataaattctcgtacatgattttctcaaagaatattttaaccttgttaatatgagttaggtaggattctgtaattgctgaggatcaatgttgtaatattgcaacttggttagtgagattacattaaacttttgacctttttatgttgaaaaaaaaaaaaaaaaaccac

SEQ ID NO: 38935 - DNA, 2085 bp, Glycine max
  Clone ID: PAT_MRT3847_135158C.1
aatacggctgcgagaagccaacacaacctgacttagaatttgcgctcttacaatttagaggaaaaggaaattaattaaggttttccttcaaattcaaccattgttgagttttcttttgcaatacgattgaatttcaatatagggttggtgtagaaggttgttctgtgttctcgtgcgtggttaaattttggagatgagtgatgcaaaagagaatgatgaagcagggcagaatgtacccttggctgtggaggaaactcaggagttagttgaagcacagagtcaaccagaagatttggctgctcctgtgtccaaaggggatacttcaaatcatgttgaaaacgggaaagaagaggggcacgtgtgggtaggataaaattgtgaaaccagaagcggattctgagtgcattccacaaaaagatgttctaaaaatactcttcatgcagtccccgtaatggacaatgctcaagttttaaataaaaccaaagaaggtgaatatgtttcagatgtgaagagcaaagctgaagaaactccacagtgtgataagagaatcgagaatgatgctaatgtttggcaaatcaacatggatactgctgaaacgactgtggcggtgaatcccaaagcttttgaagtggctgatagtaaaacttgccttaatggtgactccaactccatatgccctagtcataatgagcctaatacaccacatgcaattcctactgaaatcaatagtggattagacaatgagaatagggataatgaaaagcaggctgttgttgcacatgcagataatggacattcgatctcaaagaacttgtactttttggaccctgatgattcatataatggtaatgagtcaggaacagaagaggagcaatcagcttttatgaaggagcttgaaaatttctttagggagaggagcatggaattcaaaccacccaagttctataaagaggagcttaattgccttaagttatggagatctgtacacagattgggcggctatgacaaggttacctcatataaattctggcggcaagtgggagagtctttcaaacctccaaagacatgcacaacagtttcatggacttttcgggttttttatgagaaggcacttcttgactatgaaagacataaaataaaaggtggtgagctgaatgtgcctgttgcttctcatccagagcctataaatattgaaaatcaggcctctgtatcaggtagagcacggagagatgctgcagcacgagctatgcagggttggcactcacaacgtctcctaggcaatggtgaagttagtgaccctattattaaggataggaattctgtgtctgtgcaaaagcgtgaaaagcagcttaaaagcatcaatatacacaaacgtaagaagccatcttcaccttacatggataatgcagtcaaagctgcacgcagtaaaccgtctaaaccacaattggacacaactgtgattgatattggacctcctgctgattgggtaaaagtgaatgtacaaaaaactaaagattgttttgaggtatatgctttagttcctggcctgctgcgggaagaggtgcgtgttcaatcagaccctgcaggacgcttagtcataagtggggagcctgaacattccaacaatccttggggggtgacacctttcaaaaaggttgtcagcttgccctcaagaattgatcctcatcagacatcggctgtggtgaccctgcatggacaattgtttgttcgagttccatttgagcattcagaatagagaaggctgatagattcatgacgaactaatttaccatggtttataggatagttgacccctaagccaaattccgtattctattaacattatgttaatattttttatttaaatttttgtgtagaaaactatttctgcctgtaaaacatgccaatttctagcttagcgtagcatttactttaatgtttgagttcacttataaattctcgtacatgattttctcaaacaatactttaaccttgttaatatgagttaggtaggttctgtaattgccgaggatcaatgttgtaatattgtaactttgttagtgatattgcatttaacttttaccc

SEQ ID NO: 38936 - DNA, 622 bp, Glycine max
  Clone ID: PAT_MRT3847_135159C.1
tacggctgcgagaagacgacagaagggggctgggaaattcctgtcaaactgcagagaagagggcaaacaattagggtttttcaaattcaacatttcttcgtttaccaattttaggtttttttctctcctcactctgttgccttacctttcaattgcaattcgtacaggaggttgttgtattctcatgcacaattgaaactggcaaatgagtgatgcaaaagaaaacgaggaagctggccagggggtgccctcggtcgtggaagaaaaccagcagttggttgatgcagaggttcaagatcaacctgaagctgcctctgctcctgttccagtagaggaaacttcaaatcatgttgaaattgggtcagatcatgttgaaaatacgaaggaagagccacctgctgaggataaaaatgtagaattagaggttgtttcagagggaattccacaagatgttcaaaatactcttctctctgtcccagtagaggctgatgctcaaattttggataggactgagtctgaagaagctgaagcttctgtgcgaaggtggaggctgatgaattaccacagaataataaggaggctgagaaatatgatgatattcatcaaaaaagtaatggcgatg

SEQ ID NO: 38937 - DNA, 234 bp, Glycine max
  Clone ID: PAT_MRT3847_13515C.1
tcctcagtctcatcatcaacaccttctactccaacaaggagattttccttcgtgaactcatcagcaactcctccgatgctttggacaagattcgatttgaaaatttgacatataagagcaaactcgattctcagccagagttgttcattcatattattccagacaagactaaccatacacttaccattttttacaattgtatttgcattaccaaaacttatttggtgaacaact

SEQ ID NO: 38938 - DNA, 199 bp, Glycine max
  Clone ID: PAT_MRT3847_135160C.1
atgataaggaggggtcaaatatcaattaacgataaatcgatataggaatatcatatactggtatcagtagtatatactatagaatgtaaacttatgtaatatattaaaacttgcttttaacttaaaaaagaacaaaatgtacctagaaagattagacagaaacctaactgcaagttggttgtatcccatccatagatat

SEQ ID NO: 38939 - DNA, 265 bp, Glycine max
  Clone ID: PAT_MRT3847_135161C.1
aaaaagagattgttataaaaaaagggacaagtgaaaatggttttatatacatggacggtagtagtgattaagagtacagcattcaatttcatccttaattagttaacaataacatacaacagaccagtccttgatgggtttcaaccaatgccccagctcctgctgaagcaaaattgatttcgtcgatgtatcgttgattaccaggaaatagaaatggtgggatcagaggcacaaggtattgcttgctgctaatcggacgcgtggg

SEQ ID NO: 38940 - DNA, 512 bp, Glycine max
  Clone ID: PAT_MRT3847_135162C.1
cgctccgtaagctcgaattcggctcgggctgaatgtgcctattactcctcttgcagagccaataaatattgaaaatcagtctgtccagggttcagcatcatcaggtagggcacggagagatgctgcagcaagggctatgcagggttggcactcacaacgtctccttagcaatggtgaatttagtgatcctattattaaggataggaattctttgtctatgcaaaagcgtgaaaaacaacttaaaaacatcaatttacttaaacgcaagaaatcatcggacaccgttaatgttgtcaaagtggcacacagtcaaccatctagaccacagttaagacacatatcggacacatctgtggttgacattggacctcctgctgattgggtaaaaatcaatgtgcaaaaaactaaagattgttttgaggtctatgctttagttcctggccttctgcgcgaaaggggtgctgttcaatcagacccagcttgacgcctggccataagtgggagcccgagca

SEQ ID NO: 38941 - DNA, 798 bp, Glycine max
  Clone ID: PAT_MRT3847_135163C.1
ccctcattcattcaatttctttcttcgcttcacgcattacatcatatcatataaccctttttcgatccttcttcttcttcttcttcttttctctacaatgccacaaccactcaccttttccttctctccttgaatgctgttttcccttttctgcgccatgcccttcctcttcctcttccttctgcttctctgtacacttgaatcccatagcagtaatcatcttcaaggtcctgtaagactggatagccatgtgggtactatgttccccaaaccctcacctcttggttctccacaaccctttcttcctcttgcaccttcacctttggctccattcaccaataccactatcccaaagttatcaggactttgcactttgaactttactactgcggaaagtttgataagtgtggcagcaattgattgctgggaagtttttgcgccatttctggctaatgtaatatgttgtccccaattggaagccactctcacaattcttattggtcaatccagtaaacataccaatgtacttgccttaaacgggaccgatgctaaacattgccttgcagatgtggaacaaattttgatgggccagggtgccactaataatctgaagcagatatgttcaattcattcttcaaatctcaccgaggcatcttgcccagtaaaaaatgtgaatgatttttatgacatggtggatactactaaactccttactgcatgtgagaaaattgatcccgtgaaagaatgctgctaccaaatctgtcagaatgctatattagaagcagctaaagcattgca

SEQ ID NO: 38942 - DNA, 2488 bp, Glycine max
  Clone ID: PAT_MRT3847_135164C.1
aatccctccaagctatggaaaaatgtggcagctcaactttctgtctcttgcagggaatgatttgagaggcttcataccaagtgagcttgggaatctcactaacctgactcatctttacttgggatactacaatcagtttgatggtggaatccctcctcagtttggtaagctgaccaatttggttcatctagacattgcaaactgtggcttgacaggtccaattcctattgagttgggaaacctctacaagttagacactcttttcttgcaaaccaatcagctaagtggttcaatccctccccagttaggaaacttgactatgttaaaagcccttgatctatcattcaacatgctcacaggaggcatcccttatgagttctcagcccttcatgagcttactctcttgaacttgtttataaacaagttgcatggagaaattcctcacttcattgctgagctacctaaattggagactctgaagctgtggcagaacaacttcactggagtgattccttcaaatcttggccagaatggaaggttgattgagcttgatttgtcaacaaataagctcactggtttggtgccaaaatctctatgcgtcggaaagaggctgaaaatcttgatcctgctgaagaactttctgtttggatctttgcctgatgatcttggtcaatgccacacactccaaagagtccgtttgggccagaactatttaactgggccactgccacatgagtttctttatttgcctgagctattacttgtggagctacagaacaattatcttagtggtggctttccacaatcaacaagcaacacatcctccaaactagcacagttgaacctatcaaacaaccggttttcggggactcttccagcctcaatttcaaattttccaaacttgcaaatccttctgctcagtggaaacagattcacaggtgaaatcccaccagatatagggagattgaaaagtatcctcaagttggatattagtgctaacagcttttcaggtactattccccctgggataggtaactgtgtcttactcacctatttagatttgagccaaaaccaactatcaggccctattccggtccaagttgctcaaattcacatattaaattatctcaatgtctcatggaaccacctaaaccaaagcctgcccaaggaacttagggccatgaagggtttaacttcagcagatttctcttacaataacttctcaggctcaatacctgaggggggccaattctcactctttaattccacatcctttgttggtaaccctcagctatgtggatatgactccaagccatgcaatctttcttcaacagctgtgttggaatctcaacaaaaaagcagtgcaaaacctggggtccctgggaagttcaagttcctctttgctttggcattgttggggtgttcattgatttttgcaacattggcaatcatcaagagtagaaagacaaggaggcactccaattcatggaagttaacagcattccagaagctggaatatgggagtgaggacatcacagggtgcataaaggaaagcaatgtcataggaagaggaggatcaggtgttgtatacagaggaaccatgcctaagggagaggaagtggcagtgaagaagctcttaggaatcaacaaaggctcttcccatgacaatggcctctctgcagaaataaaaacattggggagaatcaggcacaggtacattgtgaggctactagcattttgttcaaacagagagaccaatttgcttgtttatgattatatgccaaatggaagcttgggagaagtcttgcatgggaagaggggtgagtttctcaagtgggacactaggctcaaaatagccatagaagctgcaaaaggactttgctatttgcaccatgattgttcccctttgatcatccatagggatgtcaagtcaaacaacatattgttgaactctgattttgaggctcatgttgctgattttggacttgccaagttcatgcaagataatggggcatcagagtgcatgtcttccattgctggctcttatggctatattgctccagaatatgcatacacattgaaagtggatgagaaaagtgatgtttatagctttggagtggtgctgctagaactgataacgggacgaaggccagtgggggattttggtgaagaaggattagacattgttcaatggaccaagatgcaaaccaattggaacaaagagatggtgatgaagatccttgatgagaggctagatcacattcctttagctgaagcaatgcaggtgttttttgtggcaatgttgtgtgttcatgaacacagtgtggagcgaccaaccatgagggaagtggttgaaatgcttgctcaagcaaagcaaccaaacacattttaaatgtagtgatctagaaaagtataagataacaagttaaagaacaaaggacgaccgctagggcggctgctagattacgaacgagtgcatgggacgtga

SEQ ID NO: 38943 - DNA, 166 bp, Glycine max
  Clone ID: PAT_MRT3847_135165C.1
ggctcaagcaatggcatcaatggctggcttgcgtggttcctctcaggctgcgggggaaggtagccttcatgtgagtggctccacacgcttgaatgtgtggagttcaagcacgcttgcctcagtcatacttgcaattttcacagttagatgcacatcaacggctctt

SEQ ID NO: 38944 - DNA, 513 bp, Glycine max
  unsure (1)..(513): unsure at all n locations
  Clone ID: PAT_MRT3847_135166C.1
tacgagaaacgggccgtgtgataaccttgtgtcaacaacctctcccaagttctaaccaatacttctgtgatggctattcgtttgcctagtgttttgagtgctaattccattcttcgccgatcaaatctgtttgcaaatcatgcagctacaacgtcactggatgtgcctaaagggcactttgctgtgtatgtaggagagggtgaaaagaggagatatgtgataccagtgtcatatttgaatcagccttcatttcaagaactgctaagtatagcggaggaagaatttggcttcagtcatccaatgggaggcctcataattccctgcacagaagaaaatttccttaacatcacctctggtttacataggctatgacatgatacaaccaaagtaaatctgaagaaagtttntgtttcatgttttttgcctttcaacatgtggtgttgagaaaagtttgcccgtgcagaaagggttactatgcaaagaacatcagttcaaaatgaatgggataaaaac

SEQ ID NO: 38945 - DNA, 429 bp, Glycine max
  Clone ID: PAT_MRT3847_135167C.1
aggaaaaagcaattcatttattattgattagaaacttaaatgaatttgattgccaaaacaaaattttatatctaaatattaattaaacccctcactacaaactacaatatcttaaatcaaaggattacctcttcttgctatatacatgaactccacataatataaaaaaacccaccatctttgtatattttactacatccaaaacataggctccttgtatctatcttttatatacacttgctccaaaagtactaacaaaaattttctcttataaacataaacttctatatacaatttttctttacttaacttgtaattgaaaaaccccatatacatgtcaaaccctaaatgattttaaataacctccctagccataccttatcaactttcaaaactattgtctcattattaaaatttcacttaacatta

SEQ ID NO: 38946 - DNA, 368 bp, Glycine max
  Clone ID: PAT_MRT3847_135168C.1
tctgaccggtaaacccaaccgtgggcatggtgtgtctccacgcctcttactacgacgaagaagaagatggcgaagactacccacaggcgtaaccaccaccaaccaccgacgccgattcactggaagccctttccgccaccaccagcaccgcattcgacacctcaaccgaacccccgaacgacgcccgatcggagcccgacccctctgacgacctctccgaagatgaggccgactccgacggctccaagaagtccccgaaatccggccgtcaagaaggcgacggttccgacgaggacccgccgccgaagaagctgaagcagctttgctctctcacggtggatacaaaggaagaggatggaaccaacaat

SEQ ID NO: 38947 - DNA, 166 bp, Glycine max
  Clone ID: PAT_MRT3847_135169C.1
tggaacagagacttccgctgtggaatttgagtgggcaatgtccaatttactgtacagtccacaagtgttggacaaagcaagggttgaattggacacttaagttggacaagaggggggggtagaggaagcacatgtttctaaattacactcccttcataacattata

SEQ ID NO: 38948 - DNA, 662 bp, Glycine max
  unsure (1)..(662): unsure at all n locations
  Clone ID: PAT_MRT3847_13516C.1
tgatttgcaaagttttattttaactcattttgcccataaatgactaaaaaaagccagtgtgcaggaggctgtctgctgtctgctgaaggcagcgccaggcaccgggtctgtctccgagaaaagaggctctgctcagaaccccccaggctgggaaccagatgggagggaggtatgggatggagaaacaagccaggtaccccaaggtctaccaaactctgttgggctgacaacttagggtgctcaaggcatcatggaggggaggggcagtgtgtggggttttggaagggtccacgtgctgacccaaggaactcctggccagcaagtgggggctggcctgtcactgccagacaccctcctaagagaacctctgggtgtcactgtctaatgtagtgtttaggggcacagaccaggccatagcctaaggcagtaggtggttaggtgacaggcatggttcctaggactgtagataactgtttacctttcatttccttactacacattgcggtccatggtaacgggtagacatggtactaacagctctctgactcctctctctctgtctctgtctgtctctatgtctgtatctgtctctctgtctatctctgtctatctctgtctctcctcgagccgaattccgagcttacgtacgcgtgcatgcgtnn

SEQ ID NO: 38949 - DNA, 429 bp, Glycine max
  Clone ID: PAT_MRT3847_135170C.1
taggaatcatcaattctttgtaactttgtattaacgctgattttttcttcaaagtcaccgtttaagccttgcacaatttctgtcttcctgatgtcatcttcattcttgtttttaactacaggaaggtgtacaacaacttgttcttggtttatacatcatcaggggtgacaacatgtatgtcccttactctatcatttttaaatttgtgcatcatttagatttcattttgtggcactatttatatacactaaaaaatgtatggtttccgtttggtcattgcagaagtgttgttggtgaactagatgaagaactggattctagtctggatttgtcaaaactcagagctcatcccttgaaacctgttatccattgaggtgaaatactatgtgatggatttaatgaatgcatgcctactgggtggaaagagtc

SEQ ID NO: 38950 - DNA, 392 bp, Glycine max
  unsure (1)..(392): unsure at all n locations
  Clone ID: PAT_MRT3847_135171C.1
ggaagcccaacatgtcaacttttggtgctgaccaattcgatgacttcagacccaaagaaaaagtgctaaaagtttcatacttcaactggtggtcgtttaacactgcatttggcactttagccgctacactgtttgttgtgtacattcaagagaggtttgggtggggattggggtatggaatatcagcgattggttttctagttgcctctgttaccttctttatgggtgttccaatatataggcataaatccagaaaggggaagagccatgcaaaggagtttttcagtgtccctgttgttgctttcagaaatangaagcttcaacttcctagtagcccttctgaactgcatgagtgtgagatgcaacattacattgatangggaagacgacaa

SEQ ID NO: 38951 - DNA, 518 bp, Glycine max
  Clone ID: PAT_MRT3847_135172C.1
ctcaaggtacatcaagattgtggggtgtgatcgccgagctagtccctgaactatgtcgatggatggtgaaactaattgtccaccgtcatatgttttgcccttattagatgacatatactgacggctctctagactatgcggtatcacccactatatgctagacctataggctatatctatgtacatggggtggtggaaccattttctacagatggggccgccgatagtcatatgtttatctgtttgcttaagggcaccaagacaaactgactcacttggtatgtttcactgtccactatagagcatacgatagataaggaaacatatcagcatctgtgtgcgttatgttctatgatgaacatggtaaactgcctgaggatattatgcatagttataagcacagcgtagggatactgtctaccgggggactagtgacggctcagttattaatacctaccgtaatgagtccacaagcagacctccaccagttgagcattcgtgtgatccttgacaaacac

SEQ ID NO: 38952 - DNA, 732 bp, Glycine max
  unsure (1)..(732): unsure at all n locations
  Clone ID: PAT_MRT3847_135173C.1
gtaacaagagagaggcaggctagagagagaaagacacggactgagaaagagagaatgctctgagtttcagagacactgtaatagagagagaaagagagtgtgagtttgcgatgatgagaaccagagaccgaaagagcaaaacgacattcacaaatctgcgcaaacctctcaatcttatttcctgagcattctcttgcgttttgtctccaccgtcgtcgtttttgtttcttgaagcatttcgcgcgcgagggagggtaagatgagtcgtttagggttcaagcacgaggtgtacgacggcgacaagcacatcggcgaactagatttgattcctccgtcgtcgttgacgacgacgacgccgtttcacaacaacttccgcttcccgaacaacgagattcgcatccaccacttcagcgcgaagagcgagcgctgccctccgctctcgatcctccaaaccgttgccgcattcaacgtccgctgcaagctcgattcctcagtcgccactgaacagaaggaactaatcgccatccacgccagttgcttctacgaaatgaagacggcggtggtnggtggtgaacgacgaggagattcacctcgtttcgatgccgagcagaggaagaagttcccgtgcttctggtgtttcgcgggtgccgttggngctctccgacgcgtgcttggnggatgctgacctggcggtgtctcgcgaatgtcttcgatttggacgagacgctcatc

SEQ ID NO: 38953 - DNA, 576 bp, Glycine max
  Clone ID: PAT_MRT3847_135174C.1
tttgttagtttgagctttggggtgctggtgtgggttcttcgatattgctcaaccaaggagatcgtatcggaagattagatggaggtcatggggggttcatcgtttggaatctgcacggcggcgtgcgttagagatcgtggcggagtatcggcgcaggataaagccgtaccgccgccggctgggggggggcggatgaatcgctacgaggaggtggatcgcaaatcgggcttgccagccgtatcgagttaagtatgagtaataaatcagcggaggaatcgtcggaggatagctcatggtggatcggagagatcagcgataaccacgaggaggacgaagacgacgccgtttcgtcacaaggagaaggatgagccctcgcttcgtttagttcctctttagaagactctctaccgactaagagagggttatcgaaccattacgtgggtaaaccaaaatcttaagggaatttaatggaatctagcaacattaaagcaaaggatctggaaaaatgtgaaaacccgctcattaaaaagaggacgctgcttattgcaaataagctgcggagaagaggaagatcta

SEQ ID NO: 38954 - DNA, 175 bp, Glycine max
  Clone ID: PAT_MRT3847_135175C.1
gtctatggtggcgaaccatgatttccagcacattctgcacgtgctgaacaccaacgtggatgggaagcagaagataatgtgcgctatgacctccatcaagggtatagaaacgagattcgccaacatcgcttgcaataaggccgatgttgacatgaacaaaagggctggtgagatt

SEQ ID NO: 38955 - DNA, 513 bp, Glycine max
  Clone ID: PAT_MRT3847_135176C.1
ggaattcggcacgaggattttgtttgaaataaaatgatggtggacatccagtgcatcacatagtagccgcactcagtacatcctttttgtttattacactaaatacataatgaaatttggatattaattaaaaaactagtgtacagacacataaagaaatatatataagtggaagttttatgtaaatgatgtaccttgacgacaatccacctagcaggagcctttgatttaggttgtggagcatcatcaagaccttttaaagcactgttccagatgagtaacaattaaaaactggtgttgtacgttgaggtatttcaatgcaaatatattgaaaagaacactaacctattaataatccccttaaggtacttgtttggcctgttatgcaatgaacaaaaccaaacaactaggtgttccttgggcaggatgaccaccatctaccagtgtccgctgcagtggagattaatatgggttagtacattagtaaaaattaattaaattcagttattttgt

SEQ ID NO: 38956 - DNA, 262 bp, Glycine max
  Clone ID: PAT_MRT3847_135177C.1
gtgcaagtatcatgaccctgtttcctttataacccttacgagtctaactctattcaggggattcattggaacaggaacatattcactttctgtttatcactagatgcgcttgacatgcacacctcatgacaaagttaacatctccttcgacagatagcaacagatatttagagatggacactgatcgtacaagaaccacacgtggctagaatgcaaccacaacagcagcaacgtcgatgaatgcgaaggatggtgcttgtcc

SEQ ID NO: 38957 - DNA, 676 bp, Glycine max
  Clone ID: PAT_MRT3847_135178C.1
agctcgaattcggctcgagtcgggattgactgcctcaattgctctagaaaaggcaggacagatggaatctggaaaagtggtccttgttactgctgcggcaggaggaacggggcaatttgctgttcaggtacttcataaatcccatgccacttttctcaaccatatgagcttgtgtatatgtttccaggaactatttgttgtaacaaattgattgtttcttgatattctgtagttgtaggctgaacctgggaaaactaaccaatattttacaaaaaaaataaaaaatcagcagaatttgtatcttttactatttttttcacactttctttattgatggacatttatcatcatactattttattctctccttttttccaagcattagttgttcttgagatcacacaaagaactcttgtatatttttccttgattccttaagaccaaagataactggccactattttaagacaaagattgcttgttctttttccatttcttattaaatgcttggagatgaggtcctattctatgaaacaaagaaagacaaaagaaagtagtcaagatagactatctcttgacttaaaacaatggactttacaagtggagtgtaataggaaagtattactttttgtaaaaaaagcggttgaaaaataataaacccaaaaatttaaaaagc

SEQ ID NO: 38958 - DNA, 223 bp, Glycine max
  Clone ID: PAT_MRT3847_135179C.1
gggtggaactcaacttgcatcccaatctgcttgcttgaatttacttggtgtgaagggtgcaagcaatgagtcaccaggatcaaactcaagactcttgaccaccattgttactagatctgttttagcagaagaactatctctaatatctaccattacagcagaacatctattaaacagccatataaaatacaacatatcaaacaaagatataaccaaaatatca

SEQ ID NO: 38959 - DNA, 389 bp, Glycine max
  Clone ID: PAT_MRT3847_13517C.1
cgtgattagggctatacactcagatcagaaacgccgggaatgtatgcgttacgtgttaagtgaagggactgctacgagcacttacactgttcttcgagatgataagtatggcttagacagctaggccacaccatgcatttcgaggacggcggtcggactctggtgaccgacacaaagctgagcggagctctttgcactatcacaggcagcgccaacgccttctattacttccgctttcgcacgaagaactttcgctctttccgctcgcccatccacgaagatcaagacactctcgcacactttatcatcgccgaaggggaagatgagctcgcccttgagttgccgaaagcgccaccgcatgtagaggaccgtctaatgatgcttggatt

SEQ ID NO: 38960 - DNA, 219 bp, Glycine max
  unsure (1)..(219): unsure at all n locations
  Clone ID: PAT_MRT3847_135180C.1
gcncacgttngggggcggcgctgggcnggtcatcggaggctttctcggtggtggtgctggcgtcggaacctcggcgtcgntgcacgacccttcctcgaancacgaaccaacagcngcnanntgaagagcttggcncgcctgttcccntgactctcccccgnacgnggacttctccgctctcgntcagttgccttcctccgcctccangctccgncacna

SEQ ID NO: 38961 - DNA, 289 bp, Glycine max
  unsure (1)..(289): unsure at all n locations
  Clone ID: PAT_MRT3847_135181C.1
gatcgagataactagaaacagtgtgatgaaaatgaaggtccttgttttcttcgttgctacaattttngnagcatggcaatgccatgcgtacgatatgttncctctccgaatgaacactggctatgggtgccngtactccggagtgaaatgcgnaatttggaggcttgctgtggaagcacanaacatctttgggctttgagaccattcccngaangagcgctttgaaggaancanaggtttacgtccatgggggaaaattntggancaggctccaanaccggttaccaac

SEQ ID NO: 38962 - DNA, 337 bp, Glycine max
  Clone ID: PAT_MRT3847_135182C.1
aacaaccatcaatcataaacccatgaattctaagagagaaacgtgagagggctttgaaaatgtgaaagtttatgtgaacttacagtacttctgattttgctcactttggagtactactatcctttttcttggttcacatttggtcttttcacttgcatggtgtgtctccatattatttttcctttctgtattatagggacccctttctttttttctttaaaccgcttatttttgatcgggtgtaattgatgattttcatgctttttactacttgattgattcatatatctatctttatgaggtttctatcatacttttttttatttgtgcttttttt

SEQ ID NO: 38963 - DNA, 459 bp, Glycine max
  Clone ID: PAT_MRT3847_135183C.1
ccacgcgtccgacggctgcgaaagacgacagaagggccctaatagggtatgcttacacccttggtggctgcttggtgagttggaaggcaacacttcaaccttctgttgctctctcaactattgaggctaaatatatggctcttattgaagctgcaaaggaaggaatttggctgagaggtctgataaatgatctcgaaattaatcaagaatatgctaacatctactgtgacagccttagtgctatatgcttggccaaggattaggttcatcatgatagaaccaagcatatagatgttagatatcacttcattcggtcagaaagaagaatcaaagttcataagattatcactctgcacaatcctgctaatatgtttacaaagccagttccaaagagcaagtttgatcactgcttaagcttgctcaatgtagattgttagggttaagatcatgtgtgttcag

SEQ ID NO: 38964 - DNA, 517 bp, Glycine max
  Clone ID: PAT_MRT3847_135184C.1
ctcgaccagctactagtatgcggccggacgcaatagccttatcctctttaactcagagagagcgaaacgacaaagaatagatgttaataatacgctctgttgcggaggcacaaaaactaccaccccctaacacaagttaatcccctaccgtaatatattagatggcaataacaccttttagtagtgcatctgatgaacaatgcgtaatacatactaaattgttctaaatcaatattcgggaaggtcgctggtccaaccaaaattttattgccacgcgaagcattatggctgtttcattaacaaactttttttctcaagattccacactacttaatgggggagcacttcaaggttttaatcttggccaggaaccaagggtaaacccctgagcaagtgcttattatgaaagggaactcgttgtttaaacatatgctatttaatctgaaattaagaccgcatatgagttgctagaccggacttttcatctacatgtgaacccttaatctggggccccaca

SEQ ID NO: 38965 - DNA, 357 bp, Glycine max
  Clone ID: PAT_MRT3847_135185C.1
aaaaacccaaaaaaaaaaaagggcccttattaaacacttaccccaaaagaatccaccggcctcaaaaagggaaaacctaacccccgggggtttaagggggggccccggattatttttcccggcaattagaataggttttaacaaattcccccaggccgggggggcctttttgggaccagggaacctagggggggcctaggggtaaaaatttcagggggggttccaaagggttggggggactgtttcccacaatgggggggggggttccctggacctttggggaaacttggtgggggacccccgggaaagggggggggggccccaccatggggggggggggaaaaatttgtttttttt

SEQ ID NO: 38966 - DNA, 265 bp, Glycine max
  unsure (1)..(265): unsure at all n locations
  Clone ID: PAT_MRT3847_135186C.1
gaattttgcacgaggggccagaancccnaacaggnngccggaggcancggaccggnnagaaaagaagcngancggnganccaaacaaacgcanaacggnngacgaggcacaaagncacccaaancnngcancacnccacaacatcaaggangagccagncngncccaggccaancagncccgaannagaccagccaacgagcgcattttttttttttaaggagctcatttggaaggaatcagtgaaggtcttttcagatccacca

SEQ ID NO: 38967 - DNA, 256 bp, Glycine max
  unsure (1)..(256): unsure at all n locations
  Clone ID: PAT_MRT3847_135187C.1
cggtcgcgtatttggacgcgngggcggacgcaagggcggactcgcggggagaaacacgacaaatctngctgttgggaggaactataagattgaaagttaccattgctgccaaaaggacaggcacaatataaacactgtctgccccatgcggatttactggagataataatgctacaacgttaaaagcgctatgggctacattacgatagaaatttcgagggttggtttttgtgacattagcgtcaccggaaggact

SEQ ID NO: 38968 - DNA, 367 bp, Glycine max
  Clone ID: PAT_MRT3847_135188C.1
ctcgagccgatcgagaccgacgaggagcgcaggagcggctcctccaccccggcatgcgtcgagatggagggtgaggacggcaggagatgtgccaggggccccggcggtctcccgctctgggtctggcactagacgagagtgttagaagacgatggtcgttttggcattgtgttaaagaggcgggtttttttttttttttttttgctttgatacgagataccacggtttccggcgtttcatgggatctcgaatgaataacagggggaaaaaaaaaggcgttagatgggacttattcagggataagggatattgattcccaagacagactttagagaagacaatttcctctaatggtttctagacaagc

SEQ ID NO: 38969 - DNA, 141 bp, Glycine max
  Clone ID: PAT_MRT3847_135189C.1
tacggatgcgagaagacgacagcacgggtacctcaacaacacgtatactcatcatgagatacacatgatgctctctaggggtgcggttcagctaagatgaccttcttctcctggagctagtgaagcgagctgatgtattgt

SEQ ID NO: 38970 - DNA, 423 bp, Glycine max
  Clone ID: PAT_MRT3847_13518C.1
gcgcaaaatcaaatctgcgtttcatcgaatataatctcagatctcgccaatctgagctgcatacaatggcgaagccaaggtactctcgtctgtcacctcgcaggtcatagatggataccacgctgcagctgactctgtagcaggtctggacattcctcgttcacacacggttctacttggcccctggtggcaacccctagaattgccgttgcaagccgcatggctgtatgctgattctgtgtcacacaaaatgcatgggctccatcactttgaccaccgaaagaccctctattggacatcagatctacaatgcttattaactggactgccacccccccaaagaagcactggctgcttcccagatactgccccattcaatgcatgaattgcttgctcaacatgctttatgtctgcaaattgaac

SEQ ID NO: 38971 - DNA, 382 bp, Glycine max
  Clone ID: PAT_MRT3847_135190C.1
attgcctgttgagaaggaatgtaatgactacctgttaaatttcccaattcttcagattaaaaataagatgtaacattgtcatagaatattattgaaagtagagatatttcttaaaaaaaaaaaaaaaaaaaaaaaaaaaaaaggaggacgatataaaaagaaaaaaaggggacgtactcttgcatgcaaaaaaaataactctctcttggtggcccactaaatagaattcaatgggccgcccctaaacttaaatacagtgtgggaattcttatgaggttcccaatttaaaaaccttgcagtacatcaaccttttggcatctgggaaaatcccgatttggcccgctttgatcgcctttaccaacacttccttttcctcattggc

SEQ ID NO: 38972 - DNA, 1803 bp, Glycine max
  Clone ID: PAT_MRT3847_135191C.1
gctctatcccaccaaagtcaattaattcatttttctgaatagccattcccagaatccaaacatggtcttttgaggttttggtccccgatcaccatgattcttttcagtttcacctccatcgttttaatcgcgtttggggcgacgctgttccagacggggcatgcgaagaagctatggagaagaatcgaagactggttccacgtgtaccagttcttcaaagtcccagaactcaacgacacgacgcagcacaaccacctatacaggaaggtctccctctacttacattccctaccttccatcgaagactctgacttcgccaacctcatcactggcaagaagcaaaacgacatcgtcctctgcctcggcccaaaccaaactatcgaggaccattttctcggagccacactcttctggttcaaccaaaccggaacctttcttctcaagatcagaaaggtggacaagcggagaatcctccgtccttaccttcagcacattcacgccgtcgccgacgaaatcgaccagcgagggaagcgcgacttgcttctcttcatgaacatcgccgacgacttccgacgctggagatccgttccgttcacgcatccttccacgttcgacaccgtcgccatggagccggatctcaaaagcaaagttaaatccgatctcgaatcgttcctcagagcgaagcagtactaccaccgcctcggccgcgtctggaaacggagcttcctcctctacggtccctccggcaccggaaaatcgagcttcgtcgccgccatggccaatttcctctcctacgacgtctacgacatcgacctctgcaaaatctccagcgattcggatctgaaatcgctcctcctccaatcgacgccgaagtcggtggtggtgatcgaggatctggaccggttcctcgcggacaaaacggcgagaataagcgcgtcgggaatactgaacttcatggacgggcttttaacctcgtgttgcgccgaagagagggttatggtgttcacgatgaacacgaaggagcatgttgacccgaacctgcttcgtccgggtcgggtcgacgtgcatattcattttccgctttgtgatttttcggcgtttaagacgcttgcgagtagttaccttggggtgaaggagcataagttgtttcctcaggtgcaggagatttttcaaaacggggcgagtttgagtcccgctgaaatcggtgagttgatgatagcaaaccggaactcaccgagtcgggctattaaatcggttatcaccgccttgcaaacggacggtgatgggagggggtgcggcttgatcggacggcagacggaggacgatgaaatggatgaacctgacggggttgtgtgcggtgagactttccatacggttaaggatttgcggaaactgtacggttttttcagtttcagggttactagaagatcttcgtcgtccaatgcttccttgccccccgcaagcccattggaaaaagaataagcaatgttctcgattgcacttcattccgggggatatgccctttcaaaagaaagcaatttgggggcaagcttcttcttcttcttcttcttttttgttcatagccgaattagtcacagcatttattcattggaaagtgttggtaattgtcgtttttggagcgatttgcatgggtttgtaagtgtaaatctttagaaatagattccatatatgaaaacaatttgcgcaaaacaaaattatcctgtagtgtttgtttccccattttggtgaattctgagtccactttcatgaatatacttcttctaatcaaaatccttcaagccc

SEQ ID NO: 38973 - DNA, 157 bp, Glycine max
  Clone ID: PAT_MRT3847_135192C.1
gttcgagagcaaattttgatgctactttttctggtggagtggcgagaaatggggtccagtgttgtgccctaccaaatggagacatagtggttccaggttctatacaagggtctctaagaaaatcaacaccaacattcaccctagttctagatcgcga

SEQ ID NO: 38974 - DNA, 611 bp, Glycine max
  Clone ID: PAT_MRT3847_135193C.1
gtttccgatcatcactgtatgacgtcctccttctttggggggggggggggggggggggggggggaggtaaagttggagtaagaaacattaggaaccttaaaggaaaagagggtgacgatatatttaaaaaggtggtaaaacagtatgacgtcagcctctattggggggagtagaaaggaagcaaaggtgaatttagtcagaaggaaagggcagccccaaggagcagcgactacgactatatggtgtattaggaaaagtaaaagattaccgtaaacgggtaacgaatggaccatccaatcgaaaaaaaaatgacagaaaagcacgacagcctgtccgataggaacgtatggactatggcattgttgggaacctagaggtaaacgataccaagcggccagtaataatcttcgttggcgacgacgtaaacattaagtacctagtagtatttagcgtgtgtattaataaaaaaggccaaagtgggaagtggacacacttccgagggacggcgtgtttgtcacacgtggtggaaataatgttgcggctgtgctagtcacttggcccacgtaaaggtggcagaaattgtggtagcaacggaataaatgcgtggtgga

SEQ ID NO: 38975 - DNA, 276 bp, Glycine max
  Clone ID: PAT_MRT3847_135194C.1
ccactcgtacataacctccgagaggactacagaggggagtcatggagccagtcattatgacaagtgaagtgctgcctgctctggaggatgctctatctaatgatcgacccgatctctatcaccaggatcaaagttactgtgtaaatgacctttagcactggcggcatgcataccgagcagaggtgctgcttttatgaacgacgtgacccgattgacaactattaactcataggtgactattaaattcatgccccatatatactgtgtgaatgacca

SEQ ID NO: 38976 - DNA, 1736 bp, Glycine max
  Clone ID: PAT_MRT3847_135195C.1
gagttcatgaaaggaaataattggacccttaattccaaaaatctaacatttaaagttgaataacaaaaacaaaatgcgaagttgcgaacagaaaaaaataaatatatcactattcacaaaataaaaaatctatcgacagcttactaaaaattaaatctgggtataggagcctagagaatagagatttaagtgtgtaactagcacagaaaagtggagctgaatccttaatgactcaagatttggcgtgtaatctgaaccaaagcatcagaagattcacaccaattcaccttttgatttcgggtcatttagaagcttcttcctgtttcaatttgatgaggtttttcagactcggaaagcacatcaaatctcagactcggaaaactttttctttcatttggtcaaatctcagacaaatctttacaaaagccgaggttcaatatatcagaagctatacacaatacagaatcatctaattttctgttttcccacaaaagatgaacttattttttatgtccacgtaaaacactgagcaggcgaccatataccaaaccaaacccttcagtgagagagaatacaatcaaagcatacacacagcaatcgccaacatttacaggtcggtgcaattgaatagtccagcatttcaagtcactgtgagatctccaaaaaggatgagagccaagacaactgcagtataatttgggatttacccagacttggttgaatgtgtttttcttcttgcaaagaacatcaaaacccttgggaaaattgacttcttcttcttctttccatgttttgattctggggatgatccaccttcatcattgtctgcatgctcattagcctttggacttgtcaagtaatgtgcgggattagctgcatcactagtgcggtcaaaattatttgctttcccctcaaaactacccctagggcttttactctggtttattactccttggccagactcgccggcctttcttcgttgttcactttcagctctccactttcttaattcttgttctacacctaatttaccttcctttgccttctcagctttctccattgccaatttcaaggattcccttctagcagctatctctctattcacttcgtccaacttttcaaaggctttcaattcagactccttgactttatcaatttcagaattagcagctgcaaccctcatattggctcgctcttctgcctcatgtgctcgcttgctaagctcatagtactcttccaaagacagtgttaccccattagatgggtccacttcatttttgcttctagttgattcactctcttgcaatgctttaattgctgctattgccaaattttcagaagcctttgcagcctctatctccttttgagctgcaagtaatctactttccaaggtacttactccagccttggcttgctctgcttccgcctttactttctgtagctcttcccgagctgcttgagcaagcaagttggcttgattagtctcttcagctgttagttgtagtttcttgggaagctcggtcattttctctttagcttctttctccttcatctgaaccaaagctatttctgatctggtcttttccaattcagcttccagagatgccactgcaacggaggccattccttctctttgcctaatggaggcaagagttgctttttcttgttcaagttccaatttcaatgatgtagcagctaccttcaagatactaatctcagcagttgctttctctatg

SEQ ID NO: 38977 - DNA, 490 bp, Glycine max
  Clone ID: PAT_MRT3847_135196C.1
ttttttttttttttttttttttttttttttttttttttttttttttttttttttttttattttttttttttaccaaaaaaaatgaaaaccggagggccaaattgggaggcaaaaggtcaacccgtcaaatttggaaaacaaaagggcccccaaaagggtttcaaaaggggggccctcaaaattgaaaagggaaattaccccgcccttcccagaaaatttaaaccaaaagggcaaaaaaggcccaaaaaacctaccccccggaacattttggggacccaatcaaaaagaaacccccctggctaaaaaggggctgggaaaaaacctttctaaccaccggggcaataagttaaaaaacccccggcaacttaataaatctaacaagaaacctccccggcggaaaaaaacggggaaacccccccaaaaagaaaatcaacggccaccccaaaggctttcgccggggtttaaatggccccacctctgggaagaaccc

SEQ ID NO: 38978 - DNA, 229 bp, Glycine max
  Clone ID: PAT_MRT3847_135198C.1
ggagcaccgggaagaataagctcaaattaattcattataatttttgtatgcaaaattctgattaattgactgggcggctaggacccccgttaactccaaatacacaacgtgagctgaagagttaaaagctggcattctgcatattcactttggtctatggataactcacccccccgaaaaatacagacccgcgcctattattgtgttgcggggcactgctttttatttc

SEQ ID NO: 38979 - DNA, 346 bp, Glycine max
  Clone ID: PAT_MRT3847_135199C.1
gacagacacaatttctctcgaacaacaaatatgagaataatgtattggttccttgttttgtttctcaatctcacatatggtagtgttttagatgctagccatggtaaaacacttccttctactgttgtggttggcactgtttactgtgacacgtgttttcaacacactttctccacaagaagccatttcatttcaggtgccctagtagctgtagaatgcaaagttggggattcagtgccaagtttcaataaagaagtgaagacaaatgagcatggtgaattcaaagtggaggtaccattaaaagtgtggatacatgcaaaaagaatcaagggatgcactttcaaat

SEQ ID NO: 38980 - DNA, 466 bp, Glycine max
  Clone ID: PAT_MRT3847_13519C.1
cattctttttttttttttttttttttttttttactcgtaaattatttttttttttcttttgggtgccagaaaacacaccagactctttgacggaacccatatcaaaacttggggtaatcccggcaaatccgtctcctgcctgcaagcgtaccccctttaccaatccacacaacattcaacacccgcccataaaatgcaaagtctctgatgactgaggaagaatctaactcgcacacatttcgacacactaactgccccctaaacaaaaaggaaacccccccagccccctacataaatgactcccccacatcacggggagaggccgggtgcctattttgcgccacggtacaccttttttgcaccatggatacaggcaacagctaactggcctaaacaggctggccccaaaagagatgcaaaaagcgccccaccctggataaacccaacaggcaaaaatcccccccga

SEQ ID NO: 38981 - DNA, 144 bp, Glycine max
  unsure (1)..(144): unsure at all n locations
  Clone ID: PAT_MRT3847_1351C.1
tggaaacanttcntatctatcttcancnccatcttttaacagttccccctcgaaannntctgangatgggtggcatngcattcngacgcttggatgattctttcagtttaaaccncaatcanngctatattgtgagtnccacac

SEQ ID NO: 38982 - DNA, 372 bp, Glycine max
  Clone ID: PAT_MRT3847_135200C.1
cttttttttttttttttttttttttttttttttttttttttttttttttttttttttttttttttttttttttttttttttttttttttgaaggggaaagggggttcatcaattaaattttaccttccccctgaaaaacctcccaaccgccaaaaggaatttggggggatcaacctttggggggcggggggaaaccaccctttcccttggcaaaccccttggagccaaacccccatcccaagggggggaaaatttttggccccccagacaaaaaaaaaaccaacaagcccaggtggcccttccatttaaaatcccccccctcccaaaaaaaaaaaaaccccggccaaaggaacccgatcttttttttttacc

SEQ ID NO: 38983 - DNA, 146 bp, Glycine max
  Clone ID: PAT_MRT3847_135201C.1
gactgcacacgcacgcgtgcttgagcttgggactcggatcgagcactaataagctgttgtattgatcccagacacgcacgccatcgtttctcatgggtttaagtgtgcactgccaactgctgatgggtatctaacaacacactgga

SEQ ID NO: 38984 - DNA, 242 bp, Glycine max
  Clone ID: PAT_MRT3847_135202C.1
cccactcgtgcgagtaggcattcgagtttgaactgcacaaaatctgctactttgtcttttgagtccaaccagcgtgctactgaatggtgatatttacatcttaagggagcacaacttccatgagtagtcacctgcgcgaataaatggattgcctctcatatgcaggaagatcaagtgtcattggatggggacatttccacttacgaacgtgtccccaggacctagtgagaggcgacgtcaca

SEQ ID NO: 38985 - DNA, 417 bp, Glycine max
  Clone ID: PAT_MRT3847_135203C.1
cttgacgtcgctgccgcgtcgtagcttgtttctctagagcggccgcccttttttttttttactttgcagtagactttatcttttgtgaaaaaaaaaaaaaaaaaaaaaaaaaagggaagagacgaaaaaaaaaaaaaaaaaaaaaaaaaggaggggggccagataaaaatggaacggccgcctgcgggcggtccaccctggtccctttcgggcggggggggggagccggcccttttttttggtcttggggtggtgtctgcgtcctgggggtgtccgtggccttttctgttcccttggggaatttgcttccctctctgtattccctgcggggttcgatgcgggcgctttctcgctttcgctggggtggcctccgtggcgggtttcccctcgttatttgggtcgccccccctgcccggt

SEQ ID NO: 38986 - DNA, 607 bp, Glycine max
  Clone ID: PAT_MRT3847_135204C.1
tctgcacgaggtaattttccttatcatatattaccacattttttgccaagaatgcctctaaatatatccttacagaataaaaaaattgtgtcttcgtcttgaagcatggaagatcatggacagaaccaaaggaagaggcacaatgtatttggtgcgtttgtggataaatcacttggttacccatcttctggtgcagatgaccatgaccccaagaagcttaaacccaattctgaagctcctttatcaaccatagaccaacaagtccctgcattaccccttcccaatatattggtttctgcatttaaggagaacaccacagatggtgtcaaatttcaactgtttgtgagcaaatcttatacacaatcaacttcaacttcccctccaccagtatacacattgaaagtcacaaatgcttcaacttcgaatgcagacgttgaacctgcagggaacatagttgatggtggagtagcaccagtgttgacagaaacgagactaatagctgagggccaatttatgctacgctctcggctctaatattattgtctttgaagcgtagcctagtagttaggcagtgctcatttcatttgtccttgaagtgtggtgttgt

SEQ ID NO: 38987 - DNA, 444 bp, Glycine max
  unsure (1)..(444): unsure at all n locations
  Clone ID: PAT_MRT3847_135205C.1
ctgaccacttactctgctttggttgtccctttgagccagtgacaaacagcaacaaaaattctaatgtgctcacaatgactacttttgattcttttaagatgctaagcatgatcaaagtctcattgtctttgtttaaggaggtaacaatttgctcatccttgattcctttcaaaattactaaggcttttcgaatttccttcttcatattctttctagatgccaagtattttccaccttcaattgtgaagccagtttcagcacctctcctgtgaataaatagctatactgtagaaatccaagagcttcagagacccttctagtagttcatcaatccatttgagtgcagtcatgcacatcctgcaatacaatgagtatttggcttattgaagacgatgacaaagaagaggaggattgagaantccttcatctattcaaatgatcctc

SEQ ID NO: 38988 - DNA, 443 bp, Glycine max
  Clone ID: PAT_MRT3847_135206C.1
tcggaaaaatataatctttcgttctatccgattatttccatgacggaaaacgtcttgggagacctggactgaagtaggctttcttatgcttgacattcgtattcacttctgcctcaaagtagggtgtacctgttatcttgtcacacatatttcaagtagttttatagttttcgttgtattagatatctttgaatgttatgcttcgtagtctttaatctactatattttccactttttattatggcatcatacttatatgtctttctccgtatatgatactcatgcatcgtcaaaagctagtatctatgcttatagtatcataatatgcctttttaatagtgaatttttttggggtcggaatgatgcagtttccaattcattgcactttaaccctcttgagtgatgaatcagtacaaaatatcctttccttaatttgttttatg

SEQ ID NO: 38989 - DNA, 262 bp, Glycine max
  Clone ID: PAT_MRT3847_135207C.1
atgaaattgacacgaccatgtcataattattcaccgacttgctcattttactatccctagtaatacgactatgcaattgcagggatacaacaacagacgaacaggcgcaaacgctaaacacaaacactcacttgaacccacaagtgccacccatgcgaacactatcttccataaatcggttctaaggatcctcatagttcgggaaactcagataccacatctgacctgcactatcaggtgagatcaacatctacctcatttg

SEQ ID NO: 38990 - DNA, 904 bp, Glycine max
  Clone ID: PAT_MRT3847_135208C.1
gtcctaagctgatgcgtaattaacaagacacgctggtgattgctcgagccgaatcggctcgagggagcatggagggagggaagagaaaagggtacgcgtgggcactatctgctggattcaacgccgctcttgcagccatttccgttaagctccctcttcaccagtttgttaggtatgggatggtgttattgttcaatgtgaccatgtgggcttgttatgtgaacagcctcaaagcgctctcctctcttcaggcaactgtcaccaatttcgccaccaatttcatctcttccggtttagccggtttcttcttctttcacgaatcactctctttccagtggtttgcaggtgccatacttataataattggtgtagtaatacttagcaactcaagtattgagaagaaggttagcactgattaggtgttacagttcaacacgatacctttaaggcttgcttgttcaagaaggaggcaagcatctgcagctgcatggaagcatattttggacaagaacttggaaataccaggaatagtaaagttagatagtttccagggcagttcaactgacatgaaaacaaacacaacaaaaatcacttcttgccttccccgatttaataactcttgttatgtatttgtcattctggttgaggaattgttattagccacaagcaacttttggttccatcattccatggctcctgttttaaatttctgtttgtattatgatctcaaggttcaatctgctatatttatgaatgttgttcaaaattatgttgcttctgcgggttttcctgctcatgcttaaacaattccggcaccaagtaatgtaagccattcaatacacactctcgcttttccaccaaagttgtgttactcatcatcatacttgtaacttgtgctaaatcg

SEQ ID NO: 38991 - DNA, 366 bp, Glycine max
  Clone ID: PAT_MRT3847_135209C.1
ttttttttttttttttttttttttttacttttttttttttttttttttttttttttttttttttttttttttttttttttttttttttttttttttttggactgcaatatttttcggaggggaaaaaaatcctttaagcaagaatgcgtcgataggcaaacactgctatagcttctaggaacctctcgtggtatggtattggctttctttccctcagctctcctgagattaaactcacatatgctcataacactaaaagttcacttacttttagattgcatgtacgagcaaagcacaacaaaaagataaggatcaacgatcagaaatagcaaaaggtgatttatgatcccggacgcgtgggtcgac

SEQ ID NO: 38992 - DNA, 459 bp, Glycine max
  unsure (1)..(459): unsure at all n locations
  Clone ID: PAT_MRT3847_13520C.1
cnnnngncactgaataatataaaatattattccacgatgtattaaccaacatatcaaatattcgacaagaaattcaggtaagaaggtattagaatgaagttgtaatctatgtatgtatgttccacgatgaattggggagcgattacaggaaagacgcgtgaaccttattgtggtgtgaacaaattagttttttaggcatacatacaattgaaagcttttatcttttagacaagtttaatagacccctatctttgttaaaagaaaaaagaatttatactggcgaagctaagcagcccctatgaagtttcttcatactcgtgaagccagaacattattgattcagaaaataaagaagttccaacaaacataatcaagatgccaagcaagcttcccagaaaagcctgtttttttccatcttatccacaaattcttgggcagaatcatcagacacacatgact

SEQ ID NO: 38993 - DNA, 292 bp, Glycine max
  unsure (1)..(292): unsure at all n locations
  Clone ID: PAT_MRT3847_135210C.1
ggcataaaaaatctgttgcacatggatttcattagaagggacattcttaatacaattgaccacagggattcgtgaaaatataaaataggaattgtctntatgcgagtaattggtaattttagcatgcatgaagcttatggatgaaacangttatttgtaaattctagaatattttatgagaactaccatatactaacagttttcagcaggcttcatgatggatacttcattcttgctttatctcatattctatcangttatgttcacccacctgtgccatagcttatcactc

SEQ ID NO: 38994 - DNA, 332 bp, Glycine max
  Clone ID: PAT_MRT3847_135211C.1
ctactacgcaaaccaattgttacagaggcagctcctcatcaggtggtaggggaactcttttaaaataccatttcccactaaaaaatatgcggggttttttttttatatcatttcctaaaaaaagaaaaagaacttcctccctttataaaaaaagccctcttccaatgtgtgccaaaaaacaactttttattttctccacaaacttgtttgcccccttcaaactcaaaaaacagaaacctctttaaaaaaagtcttatatataatctttgcaaatatttctacccttggaaaaggggtcccttggtaacttttctaatcccaacaaatttttt

SEQ ID NO: 38995 - DNA, 413 bp, Glycine max
  unsure (1)..(413): unsure at all n locations
  Clone ID: PAT_MRT3847_135212C.1
ttatacaattttatttattagagttttgnaaaaaagaattagtgtcatcgcacagatataagatattcataaaagagggggatttctttgcgagagaaaaaacttatacaactttttaccccccttcttaatttgcctacccttatacccccccccaaaaattcgccaatttttcccccccctgaaaaatttttgccacctttttttccaaaaaattttttttttaactttttacccacttttttccccaaccccctaaaatgggtttccaaacaaattcccccgccttttttcccaaaaagaaaaagggttgtgcacccctcccctcccccgggaaatttggtcccccttgggcaaatacccgcccacccccagatccaccccctttttaattggcccctttgggacacccc

SEQ ID NO: 38996 - DNA, 438 bp, Glycine max
  Clone ID: PAT_MRT3847_135213C.1
gcctttggttcggggcaaggttggatgcaacgcaggcttcatgccatgctccgtggagtgcactggattgcccaataagggactgaatatgggcagcggcaaccagggtagcgactatgctaggattgccggacaggttaccagccaggtggtgagcatgatggctgaactgatgaatggtcattgaggaggggagcaaaaatggacgcacgagcggacacacctgctgtcaggtaggggatcaagaatgacagatggtaagagagatgaatggagagtcccatgtggaatccctttcacagttacgctcacaggcatttgcaatgacatgctcattgagatgctcattaaatatagactggaccaagctctgagcccgggtatagctccacaattgttcaaacaatccgtcaatagtgtgtgtctggggatgagaac

SEQ ID NO: 38997 - DNA, 811 bp, Glycine max
  Clone ID: PAT_MRT3847_135214C.1
tcggaattcggctcgaggccttgctcattcatccatcaacttctcatcatttattaaacaggatttcctgggcattctgtgtatatctagaagctgtctcagtcctgccccaactgcgggtcatgcagaacaccaagattgttgaacctttcacagctcattatgtatttgcattgggtgttgcaagattcttggtctcctcttattgggtctttcttcaggtgttagatagccgtgggcatttgctggtggccttggggtatggtttatggccatcaatggttcttatctcggaaattgtccagaccttcatcttagcagatttctgttactattatgtcaaaagtgtcttcgggggacagcttgttctacgtcttccctctggagtggtgtgattgaagatctgctttggtgtgtactgtcacatttgattttaacttaatcaggcattatggttggttacccttgttcgagtacattgtgttgacacacttgtttggttccttggtggaatgtaaagttggggatgaaagaaactaaagatatttatgtttaggttactgttatatatggttggaagtgctttacacgtaaagtctctatttgcttggactcttggaatttagttattgttataactattccatgtgctcaagttctacagtaagtcttagattgaaccctgcctacgtaaaaatatgtggactgtgcgcggttttgatctattccatgcagttggaatactgtgagttttatgtatggtgcattgcacaaagcaaatctaaattgttgagtccagagatgttatctt

SEQ ID NO: 38998 - DNA, 302 bp, Glycine max
  Clone ID: PAT_MRT3847_135215C.1
cctccaccaggggcgaccacgcgcacgacccacggggccgtttgattgcgctgcctccgcttgcttccctatcacagaggaattaacatgcatacagcaagcatggtagtcacactctacgaccttagcttatactcagggctgaagaaactagaagagtaccttatcccacgcagatacatgacctgaaaccaagctccaaaggaggatcctaccgtatatgcatctttgccaactgctccatcagatgaaaatggaaatgtttacaggaggaacaagcacaattgatgctgagatgataa

SEQ ID NO: 38999 - DNA, 276 bp, Glycine max
  Clone ID: PAT_MRT3847_135216C.1
cgcccggtcttactcttatgccagctttttctgatccacaggctactgccagatctcttgaaaatgcggaatcctctgcatgatctggaatgtgagctgtctttcgcttgttcgatagtttaattcaataaaggaacccatgcatgaccctgttggtgagcatgcactggctatatgaaaactttccacagcctgtattaattatcgtaatgatgtgagaagtgcgcgttattttaaaaatctttctaagggtgcacaagacatggctgaagaatg

SEQ ID NO: 39000 - DNA, 320 bp, Glycine max
  Clone ID: PAT_MRT3847_135217C.1
tgttgtgctgcgagaagacgacagaaggggagggaggcattgaggtagagattcgggtttggcctcatccacatgagaggattggagtgaaagcgagaaaatggaggaatcaggatcagggggtgtgtggtggcgatgttccccattgaacacgatgggggaggcgctaatgattatgctctggaacacaacggcgttctcattcatcatgctaccgacccacctttctctatcgaccctggaaatgacacaatacatttacagccacttcgtcacctcccaaatacagtacctggaggccctcgcacacttcacctgca

SEQ ID NO: 39001 - DNA, 509 bp, Glycine max
  Clone ID: PAT_MRT3847_135218C.1
aagtgcaagaagagcaattcgacgggatcgtcgtcgtcgttgaagaaatggaagcttctggatttgcttcgccggagcaacagcgaggggaaggagtcgttgatgatcctgacgccggcgccggagaagaaaaatgtgaacgagcggtggagcattgaggtcgccggaaaatcgaaggggaatggtttcgccggcgagaaaaaggtggcggtgtcgccgcacgaggctttgtatcttagaaacagagaattgagaatggttgataagaaaaagtcgtttttgccctataagcctggcttggttgggttctgcactaatcgtttgggcaaggcattcccttcattctgaggactttgctaaatgaatttcctttctagttaaaaaaaaatactcaagaaaatgagtttggagatgttagattagattaaaaatggcttttctttgattctttttaaatttttcctctgacgctaactgtgttgaacttagtaaaatgtatttaacatcgt

SEQ ID NO: 39002 - DNA, 1374 bp, Glycine max
  Clone ID: PAT_MRT3847_135219C.1
gccgctgccagattacctacagacgggacggaagggggaaaggaccatggaatgaagtaactaacccaaacctagtccccttacttggctcgctggttggatttgcgattctcggagatgaagaagggcttgatgcatagctatggcgttgctgtgattgtgttggctttgagtttgtgttttgggttcatcatcggagcaattaagttcacgagaatgcgagaatctcggtttcaccggactcgccttgtgctccgactgcaacactctctccgagtacgtcaaggacaaagagttggtatcggattgtttcaagtgttgcaccgaagactccaacgatgccactaccaaggttacttactctggagctgtgttggaagtctgcatgaggaaacttgttttctatcctgaagttgtaagctttattgaagatgaaaaagatcaatttccatcagttaaagttcaatatgtttttaactctccaccaaagctaattatgctggatgatgcgggtcagcaaaaagaaacaatcaggattgataattggaaacgtgagcatatactgcagttcctccgagagaaggtgaagcctctggcttctgattgagagaatctttgacccattctctcgcatgctctggactcgttcccatttaacagaaaaagagtgggagtatatacagtgtgacttagacaagtgaattaaacttgccctgggttacaagtgacctgaaataacatcaaaatcatcatgatttggtcagttaagataattctgggttttgtgacaattgatttcaatacgacggtttcctttttccagattttatggtagctgtaagatgatgtataaactgcagtcttgtaatattgagttggagagcaagcatgtttcaagtgataatgctgggacatacgataatataactttctttttttttggaaaaaaaaaaaaaactgtgctcaagctgcctgatcacatcaggaagagtgatagcaacactgcaagagtgatagcaagactttacccagaatgagtgatttttgcacatgcacttatcatgcatgcatcttctgtggctgttgttgttttaataaaaaaacactgctaatcgcattttagaaaaaaaaaaaagctgaaagaatttgcttttagaaaaagaatgcaacatagactttttttttaatgcttttggagtggtagcctttagtccttgacataatagtttgattggaaatcattaacaaatccaaatcagaaattcttgcctataacttattgttgtttatttgtatcctatgatcatgaataaattcagcacagatccaaaccacagttgattatcaccgtagaattgggcataattcagatca

SEQ ID NO: 39003 - DNA, 304 bp, Glycine max
  unsure (1)..(304): unsure at all n locations
  Clone ID: PAT_MRT3847_13521C.1
gttagcacgcgtacgtaagctcggaattcggctcgaggtcggattatttcattttatgattcccaaggcattcattttaatntttgtgtagagaatataagaaagtatttgctgnnctgaagccagagaaaaaaatagacctgaatttcttcagggttggcagactgctgttacaagtgtattccacaacagaaaantgacagtgactgtggagtcttngtgctccagtactgcaagtgcctcgccctagagcagcctttccagttttctcaagaagacatgcctcgagtgcggaagagantcc

SEQ ID NO: 39004 - DNA, 317 bp, Glycine max
  unsure (1)..(317): unsure at all n locations
  Clone ID: PAT_MRT3847_135220C.1
attattggcaacagggaggacaccagcgaatagggaggcttgcaagcacagctcccgcgaacccaaaatagaccgagacggcggaggaanccaagcggacaacaccgaggangggagcacagcnaggcaaaacgccccaaccaggaacgaggagcgagccgccactcggaagaaaggccgacaaacggacaagacagggaggcccgggaacgcagcagacaaaaggagagagagggcctcaccggcacaagccccccgaacagacaggagcaagccagagcaccccgaggcaagcaagnggacaaaaccggagccac

SEQ ID NO: 39005 - DNA, 2282 bp, Glycine max
  Clone ID: PAT_MRT3847_135221C.1
attcccgggtcgacccacgcgtccgcttgacttggctcgctggttcgattcgattcgattcgattctcggagatgaagaagggcttgatggatagcgtccgcgttgctgtgattgtgttggctttgagtttgtgtttgggttcataatcggagcaattaaattcacgagaatgcgagaatctcggtttcatcggactcgccttgtgctccgactgcaacactctctccgagtacgtcaaggacaaagtgattatttgaatcgtctaaatcaatatcgccagagggtttggacttgtaaaattactggaaaatctggcttgacttatgaagaggctctggtgttagagaagcatgctgctgagaaagttcaacagattccggaagaattagtggcacctgctctaaggattatccattacaccgacagccacgcgtccgatgacaacgacaaaaaatgaaatgcgtgttaactaactgttaagaaagaaaacggccgcagaagacatttgaggtccgcctaaaacgcacagcaaaactgaaactgaaactcacccaacacaaaaaaaaaacacttgttttctctttcactcttaaactcttcccacacaaaaccgaaataattacccccataataattattctgggggcaatttggtttcttaatgcccatctgagttatacaaaaaaatggagactccaattgaagtgaaacctactcgtgttgcatccggattcttagatgatttgtctgagacttgcaagatgggtagtccgaatggaagagcaatgtataggacagacgatgaagttccttttgactccgaaataaattttcacccgtcagaatcgagtctgatggatgtacatggatcacattctggagaatctcggactgtccatcatgaaacgttggcgggtatgatttacaggagcatacaagttgtagtcttttctaacaaactcaacttgcttatgccttttgggcctcttgcaattcttgtacagaagttgactggtcatcttggttgggtctttggtctgagtttgttggggataatgcctctggcggagcggttaggttatgctaccgagcagctggcgttttacactggagatactgttgggggtcttttaaatgctacatttggaaatgcaacagaactgatcatctcaatatatgcactgaaaagtggaatgacacgcgttgtccagctctctttgctgggttcaattttgtccaatatgttactggtgcttgggtgtgcattcttatgtggtgggattgttaatcacgagaaggagcaagtgtttaactaggcagctacttccgtgaactcaggataaaaaaatagtccctaattaattattatcatgtactactaattaaagggcagcaactgggagttcaatgaacctggctagaacactgggtccagcaattgctgcacacaactacaagggcatgtggatctatctcacagctccaatacttggatctctatgtggggcaggtgcctacactgtgctcaagctgcctgatcacatcaggaagagtgatagcaacactgcaagagtgatagcaagactttacccagaatgagtgatttttgcacatgcacttatcatgcatgcatcttctgtggctgttgttgttttaataaaaaaacactgctaacgcattctagaaaaaaaaaaaagctgaaagaatttgcttttagaaaaagtatgcaacatagacttttttttttaatgcttttggagtggtagcctttagtccttgacataatagtttgattggaaatcattaacaaatccaaatcagaaattcttgcctataacttattgttgtttatttgtatcctatgatcatgaataaattcagcacagatccaaaccaaaaaaaaaaaaaaaaaaaaaaaaaaaaaaaaaaaaaaaaaaaaaaaaaaaaaaaaaaaaaaaaaaaaaaaaaaaaaaaaaaaaaaaaacaaaaaaaaaggggcgcacattaaaagaaaacaaattttttatacgggaacaaagaaacaaattcattgttttataatgaaacaaaaaataaaattggggggcccctgttttaacccaacttaattggccaactccgggggccccccaaatttttttggtgggcacaaaaaaaagctttttcccgaggggtttttaaaacaaaatggccaaaaaaaaccccctttgaaacactcttttaacctgaaggtaaaacgcgtctccccctgtgggaacacaaaaaaagacggcgccactgg

SEQ ID NO: 39006 - DNA, 302 bp, Glycine max
  Clone ID: PAT_MRT3847_135222C.1
tggaacctttgggctgatttatgtgcttgcatggtcgtgagaagatgatagaaggggacctatatagtcgatcaagtaagctcgttacagtttttgtaaaacgaggtgtatgactcatcccgtctctcgttcactccgcgttcctattactctacattcattcgctagttactgtcgatcttgcgtctagacgcggaagcgatttctccgaatacggtggtgtacaccacactccgttagatacagtagtacccggcggaacaatagtagttttagtgggattagtaagacgtttctctatc

SEQ ID NO: 39007 - DNA, 149 bp, Glycine max
  Clone ID: PAT_MRT3847_135223C.1
ggttataccggaatctccgattccggcaaacacattccctcctccaagaaaaaccagaagaagctccttctctctctattggccactctcctcatggcggcctccgtggtggccattggtgccggagtaaaaaacaagaccagaaactc

SEQ ID NO: 39008 - DNA, 1001 bp, Glycine max
  Clone ID: PAT_MRT3847_135224C.1
cccacgcgttctcccacgcgtccgatcagtttttgctatatgtggttgatgattggtgggtggtgatcaaattgagattttgcaaaatgttgtctgaattgggaagaagacctatgcttgggagtaacgagggttcttttggtgatgaattggagaaggagatcgggatgttgcttcgtgagcaacgcagacaagaggctgatgatcgtgaacgagagcttaatatttataggagtggatcagcgcctccaactgtggagggttctttgagtgctgttggagggttgtttggtggtgctgctggtgctcctgccgctggtgctcctgtcgccttttcggaatttcaatggactaaggatgtgaatgggattacttctgaggaagagcttaggtctgatccagcgtatctttcatactactactccaatgtgaatttgaaccctaggctgccacctcctttgctgtcaaaggaggattggaggtttcaacaaagacttaaaggtggagcttcggctcgaggtggaattggagataggaggaaagtgagcaggactgatgacaacagtggaagatcacctttttctaccccaccaggttttaatatgaggaaacaagagggtgaggtggataatgaagaaacaagaggttccgccgagtggggtggtgatggactgattggtttgcctggactagggctgagcaaacaaaagagctttgctgaaatttttcaggaagatttagggcatattacctatatcgcatgccttccttctgatccagccagtcgagatgcatttgatgacaatgatatcactagttctgctgaagcagagttggctcatgcatgccgcgagtccatggccactgatgcactaaggtctggatcaaatgttcaaggatcatctgcagcccaaaatgttgtcccaccagcttcatattcctatgctgctgcagtaggatcttccttgacaagaagcactactcctgatccacaacttgtt

SEQ ID NO: 39009 - DNA, 365 bp, Glycine max
  Clone ID: PAT_MRT3847_135225C.1
gtggggttaatcttttttttttttttttttttttttttttttttttttttttttttttaaaaacaagaacccaaaatatgcaaatgcccattttttttttccattgatatattcaaaggccatgtgcaaactcctgggcaaaatgagttcaaaaactggacgggcaagctaactttaggggtatcccaaggcctgatgattttttaactaagttcaaaaactgaacaaacaagctagctacgatttttgactggagcagtataccaaattctgaaaagacttaacgaattcaattaaaacatcctcttgggattgggatactggggtaaaaaaaaattatagttagcttggatgttcagtttttg

SEQ ID NO: 39010 - DNA, 396 bp, Glycine max
  Clone ID: PAT_MRT3847_135226C.1
cgtttagctagaattcggctcgagcctcatcctctacactccccattacatctttttatctgctcactacaaacccaacgagtcgtaacttttacactggcaacggctcaccttatctcatgttaaaacatctctataaagcatcatgttataaataacgtcacaagagcctaaagcttttttctatcataactttcttaccaatgaggaatgctaatatctaatcaatacccccacaccaaacattctaaactcactacttattaataatgaatatgaacaagaaatataaaccatttatagatcatgcacctaatattttgtataatgtcctaaatacaacactatttttactcttgccaatataataaccttctttcactttaataccccatt

SEQ ID NO: 39011 - DNA, 425 bp, Glycine max
  Clone ID: PAT_MRT3847_135227C.1
cacaagagactagagctttggtatacaaaatggaggttctgcatataatccatggtttgcacacatgacacttctttgctaccacaggatgtctattacctgtgctggtctttatagtagtactgaacaactcccaaccatacaggaaactataactagcatctatgcccagacttgcttataacatgttcttttaaaagctgatatcaagtaattacccattgtatccttcctttttttcaataagtggaaaatgatttattatgaataccggacttattggctacattgcttcaagatcttcaatcagctatggctaaccatgagaaagagattggagaaagagacacagaccttatgaacgtcaagcagcagataaggagctttgaaagaaagctccactcatcatatgctaaacacctcaa

SEQ ID NO: 39012 - DNA, 515 bp, Glycine max
  unsure (1)..(515): unsure at all n locations
  Clone ID: PAT_MRT3847_135228C.1
tccaggtccgtcactgcccggataggtaaaaaatgatacatgcagtctaggggtgggcttaataagatagagtggttaactcacatattactgttatggggcaacgatacacaacaacaaggcaacaagcgaacaccccagccaatgccacactctaaccaagcccagaccagtgagcaggagcagcgtgataagcatggccctaatttccagactccgcagaaagagctatcttttcggtggccgccggtacttggattggatttgtctacaccaacaattccaacaccaaaaatgacaaaacagtttaatacgcacaacttcactcaggggcgggattggttaacacagcaactagggccgtatggcaacgtagtacaggggtgtctggggccaagtaaagtgcgagtttaacagcgtggcttgcgtggcatgcagctaggtcagccaaagaggggcacttggcacgggcagaaggngctgcaacgctctaaatgtgagcaaacccacggata

SEQ ID NO: 39013 - DNA, 391 bp, Glycine max
  Clone ID: PAT_MRT3847_135229C.1
tacatgtgtgcacgtcctccttcttgggggggggggggggggggggggggggggggggggggggggggggggggggggggggggggggggggggggggggggggggcccccaaaaaagtaaggggggtttttgggcccaaaaaatttaaccccaaaaaaccttgtaaagggccatttgggattccattttaaataggccttaaacaaaaaaaaattgcccccaataaaaccccggcttatttcggcgggaaaaaaaccttttcccttagggagggagtaggcttttagggctttcaaaaacctttccccagcccgttttgccaaaagggttcccataaacccgggtaaaaggtacccgggggccaagggtacgctgtttagccccttttag

SEQ ID NO: 39014 - DNA, 438 bp, Glycine max
  unsure (1)..(438): unsure at all n locations
  Clone ID: PAT_MRT3847_13522C.1
caactgtagtagattntttttcctaattattaattttttattataagatagaagtcgagatgttattatagaaaattgagttgagtattattccgatccactacctgngttatatttgttttgcattttgaattttcatttacatttttttacataaacatatatacgcgcgggtaatgggtgaagctggaattgaaatccttgtgtagttgttgcagtggaagacaaagaagatcaaataaatgggtctagctttaaccgtcggattcctcggccttctcattctatttcacgccgcttattcaactattcagtgtatcctaaaactgattatcaaactagttttgctttttgagtgttggggatcttggatctcaaatttgggtctgattttttgtgcagacaggggcgtgttgaagatactgaagagagttttca

SEQ ID NO: 39015 - DNA, 303 bp, Glycine max
  Clone ID: PAT_MRT3847_135230C.1
gcttactaatactggtccttgaagtttgtcatgttcctttgctcttagccctttcatatcagttcttaattggaatgttatctatctaattatctatctaatgctgctggttaggacattgtttcatattatgcataagaaggggcaagtgccttttcaatgtctttcattattacaataattctaattgcttacccctatacttgtaaaaaattgtttagttcgaccccaaaaaatggttgaaaggaattttttcgtcaggcccagaatcccctttataatagccggtaaggggattttttg

SEQ ID NO: 39016 - DNA, 309 bp, Glycine max
  Clone ID: PAT_MRT3847_135231C.1
gtccgctgacgcgtgacttgcgggatgagagggacatgacagagggggtcctttccttagatgactctctgagcatcataagtactatttgagcttccctagaatataccctagctttattccctactagcattgttgcttagatgttattctagcttatgttctcacacactcacacgcgagacagccaggtggagtacaaatacactagccaaacgggcatgctttagagctctagatcgtttcctgcaaccgaaaaagaaaatataaaatccgcagaagaaaacgagaaggtctagaaggatccag

SEQ ID NO: 39017 - DNA, 429 bp, Glycine max
  Clone ID: PAT_MRT3847_135232C.1
ggctcgaggcttgatcaaatacaaccggtataaaggtcttccattgaatgatgctagagcggttggcttacgcgttttgactgcaagacactacttacattctgagcgagggcctggccccactgacctaaatactgaagacactcctttattatcaaccatcgatcctggcgacaaccctgtaagggcgggactgtgccccatcattgaacggtctgaggggaacaaacacagtggggcttctggtggtattagaaactggttgacaaggacagccaggacagcagatgccaatatctctggactaagagcgtcattgggcagaagaggacaggcggccataactggttaagcaccaccatgggttcttgggtgatgcgagataattaaaccaggagacgcttgtatgactgataagccgcaacttga

SEQ ID NO: 39018 - DNA, 281 bp, Glycine max
  unsure (1)..(281): unsure at all n locations
  Clone ID: PAT_MRT3847_135233C.1
ttttgcatagaagttcctggagggactagtaactagaaccactaagctttcctcccgcnngcgttctaagaattctaaagtttcatttggtaatacaaaggcaacgtgtgtataaataagaaagaaggttgaagcctcttgctgcaggaacacctagacctagaactggcgcagaactggccagcacctcaaaggatggatttttggagacagacaaggcattggtaggatgtacggaggaacctttgaggtgttaccaaaggaagaggaatagttggtta

SEQ ID NO: 39019 - DNA, 714 bp, Glycine max
  unsure (1)..(714): unsure at all n locations
  Clone ID: PAT_MRT3847_135234C.1
ccacgcgtccgaaaaataatccttaacattagtaaaacaatatagaaaatattaaataaaataatataaaaataaagaaaatattaaataaaaacaatatacaaaaatatagaaaatattaaataaaattataaattaaaactaatttaaattcgttaataattaatttttaaaaagtacgactttgaagttgtaaatatgtttataacttctaaataatatttaaataaaataaaatatttatgactttaaagttataattaaaaaaacaaaaagttatttacttttttacaactttagtaaaaaagaaaaaaaaagtcgtaaattaatttatgactttggcttcaaaagtgtaggatatcctacgacttacatcgttatggatattaatttgaaatttattcccatttgataaatttcaaaaataatggatctcttttgggtagtttcaccaataaaggagtttctgtttacatctccttgttttacttttcatgccccttttcccattctcttaataaatttaatataaatacccttattaacattggtcaagtataattttgatccccgcaaaggaaaacctttaatcctttctctagaaatacctgcttcaacttggtaagtattatactaaagtattgaatgcctctcanaatgtgtatactcttaaattttttccccaggcataagcatatatatttcagctacgtc

SEQ ID NO: 39020 - DNA, 377 bp, Glycine max
  Clone ID: PAT_MRT3847_135235C.1
aatggtaatgatatttatgcacattagatgactatgactcgttatttcggtaaagattggccacaaagacaattgggtttccaatgcaaagcaaaactaaattagccaaccccccatctttgtattaacaaacaccaacaccggtttaacaggacacttgccttccatcccaagtttacaaccttctgttaaacaggaaacacggtttttttttgaatacccatcgggggttgggcaatattgggtaaccatataactgtaaatcagtttttactaggcaccgtattacaagaggggttcataacggcacattcatatgggaacgaccctattgcagtgttgtttcatttttaacaatatcacaagccaagaaacgg

SEQ ID NO: 39021 - DNA, 224 bp, Glycine max
  Clone ID: PAT_MRT3847_135236C.1
gcaccagcccaactcatgtgttttggacggcagaaaccgtgctgtttaaagcgcaaactaaagaggaacgcctgactcagtataactagagcatgaaaaaaaataaattccggcagccataagcaattcacatttatatagggataatcggagcttggccactgtctctcatgtaacaagcactatgactgacaaaacaaatgaataaacccagatttattcta

SEQ ID NO: 39022 - DNA, 1073 bp, Glycine max
  unsure (1)..(1073): unsure at all n locations
  Clone ID: PAT_MRT3847_135237C.1
ggggacaaaagtgaaaactctgattccatttctggaatacaagatgatctgaataatcaacctgtaccaagcttcatttttttgtcttacttcaaagtttaagaatattagattacaaaaaaatatacaactttatctaaatactcagattaagctttccaattctaacaaatcccaagcttcaacagctcccaagttcaatcacaagcatagtgatcttgagaagcagacttaaaatgagacaattataatcagtataagttcttatctgccagcaataataagaattttcttcatataaagtttataatttataatagagattataaaataataataataacaacaaagatcctataaacatatccatcagctatcaaggtttgccatcaacatgtcatgactcaagtgttaagcacttaagagaccttggcaatagggcctttgagcctgcactgcagaaacagcattttttttcctattttgatagaaatgcagaaataattatttaaaaaaaaacttgggttcctagctgttaacaaaaacatttttgatatgctcagagactaaataccaccttcaaaatgttatttgcttcaaaggcctcctatagttgaatcctcaagccttaagcatccatattgatatcagtacctttttgcagacaaagacataagctgatgaacaacctgatccaggcactgattatctggagaagtttcctctatcatgctagattttggagttctattgcacaattttgtttgtcttccaccctcctctccactgtacgcttctcagaatcaatgttttggtctgcgtttcccaaggattccttttttcgcttcctttggaatgtgtacttcagaggcctactgtcatttacttgactggcagatctatcatttttttcaaaagcttttgcatcttccaaatcagtatccgtggatggaacatcgaaaccctcaactttcatatcagaactcggacctgttagattctgcgcagcctcgtcccctttcgctcgtgactcgctannnnnctcnnntgcntnctnnnnnnnctcnaattta

SEQ ID NO: 39023 - DNA, 172 bp, Glycine max
  Clone ID: PAT_MRT3847_135238C.1
atgatgcttgggcggacgcgtgggaaaacgcggggtttggttaggaagactcaaacatgggaggtgtgtactgtggttatgtaaggaaggaagaagcagagcgaagcggcgacagacagaataaaatgggaagcagaggatcacctgaattccatacaaataacggtgccat

SEQ ID NO: 39024 - DNA, 573 bp, Glycine max
  Clone ID: PAT_MRT3847_135239C.1
tctcgagccgaatcggctcgaggacatggagcaaaagtggcagtgccaggcaaattcatcaatggcagagttgatggcatcacgggcatactgctgctttaagtgccagaaccttgttgctttccatgatgatattgtttctaaagatttccaggtgagattttctcttccatttttggcatttttctctatgtttatgctagttttctaaattgaaatggatcatccatttatacctatcagaataggatctgttgaagctaaattttgactaatcaaatgtctgaaacgaccaattaccgacgaggtgattcccttgaagcgccaacaggatcataataaaaaacaagacttctacaacttgtcgagctaaagattaggattcatatacttaatattaatcatgtcaaaaacctttcaaacattgcctgaaattaatctgatctgcagtgaatttcttcaaattatattgtcaatttccttcaaacttgtatatgccaaggctatatatatagttcacagtttttttatgctgtttgtgtgaattaatttggtgcaaatctggataaaagg

SEQ ID NO: 39025 - DNA, 443 bp, Glycine max
  Clone ID: PAT_MRT3847_13523C.1
aaagggggcaaagggcaaagaaacaaaaacaaggcttttttaaaactgattttggaagggggggccccaaaccaaaacaatagggaactatgaaccatcaaaaaaggaccgtttttagggcggggaaccccccaattaaggccaaaaaaaccttaggggattaacaacaccttcaagcttattttaaacctccggcccccccaactaggagcaattttcaaaaaacaaaaccccttatttttaaacataattcaaaaaaacgggcataaaaaaaacccttaaaactttgaaacaagacaagggggtaccccccagggcccatattgttatgcaatttaccccccaatgggaaaaaaagcccaagttgcaaccccccacatgttcttccccaattcccttttgaagaagccattttcaccccagttttccccccaagaattttt

SEQ ID NO: 39026 - DNA, 332 bp, Glycine max
  Clone ID: PAT_MRT3847_135240C.1
aattcccgggccgacccacgcgtcagtccaggcgtcagacggctgcaaaaagagaaatgaaggggacaacacaaatcatcaacatcgaccaagagttaggcttatgcaccagatccatcatgggcacctctgctattcagctctcagcaatcactggtcaaactgcgctgaagcatctcaatgagttcgtccgcatcatcggtggcaccggcaagagtcgcactataatacgacggcaggtcaagagtgcgcctcatagcattcggtaaggctctgaccgtccgatgtacttgggtctattcgcggaacatattccatcacacctgatcgga

SEQ ID NO: 39027 - DNA, 626 bp, Glycine max
  Clone ID: PAT_MRT3847_135241C.1
acaacaaaaaaatcattcaagtaatcaatcgacttaatacattaactttgcactgtgaaaataataaatacctataaacaaggtgggtcaaaactgaaaagagttcaaagatttatttcttcttctcggtgttgcatcatctccaccccgaaaacgccttcccctttaataacatactcgcaagaagagtgcggcaaatgaggagcaaacacaactctcattttccttgtcttcaccggcggctcatcctcatccttcgacaaaaacagcctcgagttaacacaatgggcccaagccaggcccaacgcaggacaaacccttcggcccgaagaataaaggccattacccaaactcccaaagctcacgtcaccatcaccgatcaaatccacaacctggttcgtcccaccaccgaaatcccaaacctcttcgccaactgccgcaaatcccccgagattccgaaaaacagcgacgaccttcgccggagaatccgatccggagttttcgaaatcggagcggaaaagcgcggggattgaatccatcacgatgattttcacccggccgcacggtgaattctattggaagaggaaagtctctatggttgggattaggttgagaaattttatgcc

SEQ ID NO: 39028 - DNA, 586 bp, Glycine max
  Clone ID: PAT_MRT3847_135242C.1
atcaaacacttctatcaacaaccgcgtgggatctcttccccgcaattgtaacctcttattgacgcagactgcacccccattccctgatgttcaagttttctcatcatctgaatacacccttttcaatcttcatctctcttcacacacacatacatcaaacacttctatcaacaacaacaaaagagtgtgagatgttgtaaattctctaatatgtgtctttgatttttacatataaaaaaacaacacacacttctaccaaattttgctctaaaaaaatacagtaaaatatcttgcttatcaaatgtgccatgtcatcccaattccctaggggtttatctgtctttgattgatgagaatatatatatatagtccctcaaagaagttgaataacaagaacaaaaaatgggaatttatatctcacatatgctagattccaaggaaactcgccctctttagtctatttcttcttcagccatagccttcacctttacagcaaagatagctacatttctgctgtatataaataacagcaaagcaatacagtcttttaaccacaaaaactcactaaccatctaccagaaacttt

SEQ ID NO: 39029 - DNA, 351 bp, Glycine max
  Clone ID: PAT_MRT3847_135243C.1
tttcctttgaggaagtttctttaagtgcagcacttaatggtgttgagggtttggactatatggaaagaatccctcttgccacatctgagggttttcctcatgtgctttcacgcaaaaatggtgaaaaaggcaaaaggagatttgtttctggggatggtgaagagatgacattgattccaggaaccagtgttgaagaggcttacaacaagctaatagtccaacttgagaaaagtgttcctacattgattggtatcgcatgccccaaggatgagaacctttcttgtcgcaaaatttctgtcaacatctaatagccgccgattgactattctccccatggagttcaattttgtg

SEQ ID NO: 39030 - DNA, 1055 bp, Glycine max
  Clone ID: PAT_MRT3847_135244C.1
gaaaaaatatcaatcctcttggagtagcagtggcggggttagctacagtgaatccatggccatggcggctgcatttgcaactacaactgcaacactgagactgccaaatgttggagaaagcaaaagtttgcagctccgtaagtgtaaccctaatcccaataagcttaaggttatgcgggggtttggcggttgttctggagtggcagtgagtgtgagaattggaattggaagggttcgggcgagttcgagttcttcttcttctgaggaggaggaggaggcagtgagtgtgcagtcaaaagtgactcagaaagtatacttcgacgtgagtattggaaatccagttgggaagtttgtgggacggattgtgattggactgtacggcgacgatgtcccccaaacggctgagaacttccgtgccctttgtactggcgagaagggctttggatataagggttctaccgtccatcgtgtcatcaaggatttcatgattcaaggaggagactttgacaaaggaaatggaactggaggcaaaagtatatatggtcgtactttcaaagatgagaattttaatttgtctcacactggaccgggagttgtcagcatggcaaatgcaggtcccaacacaaatgggagtcagttttttatatgcactgtcaagacaccttggctggatcagaggcatgtggtatttggccaagttttggaaggcatggccattgttaggttgatcgaatcacaggagacagataggggtgaccgtcctagaaagaaggtgaccattagtgactgtggtgagcttccaattgcttgaggtggttcttgtgtaattttgttggttattctttctattaacttgttgagattgagaatggaaagaggggtggggaagaagaaactctagctttcttgaaatttttgtttgactattcttaagatatgttcagtaactccttattttcatactgaaccaacaaacttttagcagccacatgtattctgatttgagttgttgtcgggttagaaaatttaatgggccatttgaatggtatctcctt

SEQ ID NO: 39031 - DNA, 389 bp, Glycine max
  Clone ID: PAT_MRT3847_135245C.1
cccacgcgtccgaatcaccctaatatctatgctatattatgtcctacaactgaggcatgcaataaatccatgcactactacagaaagcatttttcacgatgttacttttagatcagttgatataaaaccgatttagaaagaacacggaagcattttttagattaaagcttcaacagtttcatgaagggtgtacaaaaaattggcataaaagttatcattctaaggcagaagatgcaaaactccgtctgataatatgtggaacctatatatatatatatgtatatacatatctagatatattatttctttttctgctgtgcgactcgtaagaagaaccctatgctgtgattatcacatacactgatcgcactctacttgatcccgactat

SEQ ID NO: 39032 - DNA, 1715 bp, Glycine max
  unsure (1)..(1715): unsure at all n locations
  Clone ID: PAT_MRT3847_135246C.1
ataagtcaccaggacctggcccttgagggtttgcaaaaaaattccaatactcgtcggagtagcagtggcggggttagctacagtgaatccatggccatggcggctgcatttgcaactacaactgcaacactgagactgccaaatgttggagaaagtcaaaagtttgcagctccgtaagtgtaaccctaatcccaataagcttaaggttatgcgggggtttggcggatggttctggaggtggcagtaagggggggtctagttagagtgaatccatgaccgtgaccatggcggctgcgtttacaagtacaagtgcaacactgagactgtcaaatgttggagagagcagaggtttgcagctgcgtaagtgtaaccctaatcctaataagctgaaggttatgggggggtttggaggttgttctggagtggcagtgggtgtgagagaaagaaaaggaattggaagggttagggttcgggttcgggcgagttcttcgtcggacgaggcagtgagtgcgcagtcaaaagtgactcagaaagtattctttgacgtcagtattggaaatccagttgggaagcttgtgggacgtattgtgattggactgtacggcgacgatgtcccccaaacggccgagaacttccgtgccctttgtactggagagaagggctttggctataagggctccaccttccatcgtgtcatcaaggatttcatgattcaaggaggagactttgacaaaggaaatggaactggaggcaaaagtatatatggtcgtactttcaaagatgagaattttaatttgtctcacactggaccgggtgttgttagcatggcaaatgcaggacccaacacaaatgggagtcagtttttcatatgcactgtcaagacaccttggctggatcagagacatgtagtatttgggcaagttttggaaggcatggatattgttaggttgatcgaatcacaggagacagataggggtgaccgtcctacaaagaaggtgaccatcagtgactgtggtgagcttccaaatgcttgaggtggttcttgtgtaattttgttggttattccttctattaacttgttgagttgagaagggaaagaggggcggggaagaagaaactttggctttcttaaattttagtctgactattcttaaaatatgttctgtaacaccttattttcacactgaacctacaaacttttagcagccacatgtattctggtagaactatagtttgagttgtcgtcgggttggacaatttaataccccatttgaatggtatcttcttaagccaaagtgcagtttccatggggaattggatggctagagaattattggagtcttctacaagatgcatcatcaaatgtggaattcatttaattgaatttggaaagaatgcacttctttaaatgcttctcgtgatgctttagcaggcgatcaatagaacgtgtaataatttagattagaaatgttaaaaataatttttttatactaaaaaaaaaaaaaaaaaaaaaaaaaaaaaaaaaaaataaaaaaaaaattatttgtttgtttttnataattnttaagttgttttgagtatgggtttttgatnaaaaaagaattatatttttttttataattgtttgtgagtaataatntggaagagagaagttatgttttattaaaaattgtttaatattaatataaaaaattttttataattaattgttagtt

SEQ ID NO: 39033 - DNA, 262 bp, Glycine max
  Clone ID: PAT_MRT3847_135247C.1
gaaggggaattccctgggaaaccctttgcgccttcaatctgtgaacccttttttccttatttgccgatcaatggaaccatccatggatttcttcccaaaccgtctgggattttaccccatcaaggaggccggctctttataatttgatggggcgtgggtattcgggtaccggattggaattcatttgctataagccgagaaccctggaaatttgcccaagaagaagggaatccattcccagggttattatatattttttcac

SEQ ID NO: 39034 - DNA, 467 bp, Glycine max
  Clone ID: PAT_MRT3847_135248C.1
ccacgcgtccgctctgactgagaccatatccgggtgcttcaccatcacgctgctcacttcaccacatcacactcttcatccctcttgatcagcactcttatctataatcattcccctgacttctcgtgcactgccccactatgactgaccgctcaggaccactgctcctccatgagctctctgatgacgaccaacaggcttcaagataaggtggatccaggggtatggcggatagatgaaaatgatgtgactagcaagagagcccggaataacggaaggcttggggtttcctcactccacaccatgcatcaattgagtggggacatgctcggcgggtctctcgaccgcctacaaactgctcgggaacccctacagcggtttaaccataggcgtgcgcacctgcaggcccagcgggggagcctgacttacaggccaactattttctaacatggcagtggaaaagcccc

SEQ ID NO: 39035 - DNA, 288 bp, Glycine max
  unsure (1)..(288): unsure at all n locations
  Clone ID: PAT_MRT3847_135249C.1
tttatatttattatttcttatatcttttttggtaaccatgacttaggtgttaacattnnnttaatattcagatcatacttaggccaagcacaagtacattaaatactcaaacccgcttgaatttccctgaaaaaaatctagctttcatactatatgtgtgaaaatgaataattagaagtcaatagaataagaaaaacaacattaaaaatcattaaaatataatacagcacatattaagggggcaacggatgctactaattatttgcataaaccgggaggcgtgggcag

SEQ ID NO: 39036 - DNA, 330 bp, Glycine max
  Clone ID: PAT_MRT3847_13524C.1
tcggggaattgcaattccacattctcaagaaataaagaggcagaagcggtcatatgtgaacaggaattctaggttgacttattaggactatcctgaaaccaaacgaaatgagatcggaattcctgggggaaattcactgccccatttccaagaaatgacgcggcaaagctgttcatatatgaattggaattatttgaatccttattaggcctatcctggagccaagggaaatgagatcggaagtgcttatggaattacaattgcacattgtcaagaaataacgaagctaaaatgtgcatatatgaagtgggaatagttggtttcttatta

SEQ ID NO: 39037 - DNA, 699 bp, Glycine max
  Clone ID: PAT_MRT3847_135250C.1
aagccatcactgatataaagggagatatcattacgagtctgcaaagtagattggatataatctgtgatgaggtagatgttgactctggtaacaatcatgatgttggaagccaaaaaaggatgcagccttccatttcctagaagagtctttgcaccatggctagcaggggtgtatgtatgtgattatttgcaaccttctgaaactgttgaggttttaaaagatcatagtatggaattactatccatgaaagctccagctgatgtctctacaattttggagccagagaaagaagagatatctttcaaaactaaatctttctgggatgtggtagtcccctcctattcagaaattcacctcatggaagacaagagcaaacgtgatggcggaagcgagagtccaagtagtaaaactgtgaagccgggtcgcattaatgttgtcgccgctggtctcatccttctattgtctgtgttagttggttctgtgctattcgccctgaagggttgagggttttatactaggatttcctctcctccagggacacacattctcttagttaacaaaactgcatgcgtagctgccaacattttatacttcaaaattataccgaggaagatatgaaaaaaataataaaattagcaacatgcaagccccccaaaaaaaaaaaaaaaaaaaaaaaaaaaaagcggccgctctagagga

SEQ ID NO: 39038 - DNA, 787 bp, Glycine max
  Clone ID: PAT_MRT3847_135251C.1
ccacgcgtccgtacggctgcgagaagacgacagaaggggggtgtttatttggaggaagcaattgagtgatgagtgatggcgaaaggcgtaatcggagaagaaacgcgactcaaattagcggagggtcttctcagccaatccgcagttccatccgaggtgggtcttctaatcggcaagttcagctcctccttgggccgggccttcctcttcgacctcattcccaccccacacaacgactctgccgagcccgcctgcgccctcaccgaccccgacaagaagaagggcaccaaatccaaccccgccgattcctcttccttgttcatcgacaaggattgggtcgccgaacatgcccgccaggtttctagaatgctcgtcggcggcatcaaggtcgtcggcctatacgtttgggttagcgatgccgcattcaaaaattcaaccataatgctttgccagaccgtgaagggtgttgctgaggcagctccggttttggagggtgattgggatgagaggctgcttcttcacatttcttatagcccgaggaggtggaattgtagaaactgctcactgtcttcgaatattacatcaagtagtttgcggccttgtgactttaagatggggaaggtcttaacttcccttccgacgttcaagtgcatggcacaactttaacctgaggttacctatattacgcgacagtgcatcaaagttcccgtcattgagtgatgttattagtcatgccatatctattcatgccaaagagcttgccagtgcataggccttgattgatggt

SEQ ID NO: 39039 - DNA, 328 bp, Glycine max
  unsure (1)..(328): unsure at all n locations
  Clone ID: PAT_MRT3847_135252C.1
agaaaaaaggcggaacctgcattccttgttaagtcttctntttttttctttcgttttataactggaaaccccctctctctcttgtactctttctctctttcccagggcattaccacccaaaacacctttattccccttctaacacacaaacaaaactcaatatataaagcatctctatatatacccccccttctcatccaaacaatccccattccctcttctttaaccctatcttctttcttgtcttttattcattcaaatttataccttaagtcgtctcaaatttcaacacttttttcagcacccatttacaataacatttccattt

SEQ ID NO: 39040 - DNA, 1682 bp, Glycine max
  Clone ID: PAT_MRT3847_135253C.1
gggggtgtttatttggagtgagagggtagcaattgagtgatcagtcatggcgaaagccgtagtcggagaagaaacgcgactcaaattggcggaggatcgtctcagccaatccgcagttccatccgaggtgggtcttttaatcggaaagttcagctccgctttgggccgggccttcctcttcgatctcattcccaccccacacaacgactccggcgagcccgcctgctccctcaccgagcccgacaagaagaagggccccaaatctaaatccaaatccgagctcgctgattcctcttcccttttcatcgacaaggactgggtcgccgaacatgtccgccaggtttctagaatgctcgtcggcggcatcaaggtcgttggcctatacgtttgggttagcgacgccgcgttcaagaattcaaccataatgctttgccagaccgtgaagggtgttgctgacgcagcgccgggtttggacggtaactgggatgagagactgcttcttcacatttcttatagcccgaggaggtggaattgtagaaactgctcactgtcttcgaatattacatcaagtagtttgcggccttgtgattttaagatggggaaggtcttaacttcccttcaaacgttcaagtgcatgcacaactttaacctgaggttgcccatattacgcgacagtgcctcaaagttccagacgttgagtgatgttcttcgtcatgcaatatctattcatgccaaagagcttgcaggtgcaaaggccttgattgatggtaaattggttgttgagagtgagtcatattcatcagatggtgtgcatgaagttgaattgcttctttcatttctgaacgatagttctattgaagcatgcagccaaggagatgttgttggtattctttcatttagtggcttgatatgttcgtttgcatatctaaattcaaaagagccaatttcccaagccatcactgatataaagggagatataattacgagtctgcaaagtagattggatataatctgtgatgaggtagatgctgactctggtaacaatcatgatgttggaagccaagtaagcgatgaattatcagctgaaacgcctgttccccaactagtgttgcacttattgagaaaaggatgcagtcttccatttcctagaagagtctttgcaccatggttagcagtggtgtatgtgtgtgattatttgcagccttttgaaactgttgaggttttaaaagatcattgcatggagttattgtccatgaaagctccaactgatgtctctaaaattttggagccagagaaagaagagttatctttcaaaactaaatctttctgggatgtggcagtgccctcctattcagaaattcacctcatggaagacaagagcaaacgtgatggcggaagcgagagttcaagtagtaaaactgtgaagccaggtcacattaatgttgtcgctgccggtctcattcttctattgtctgtgttagttggttttctgctattcgccctcaagggttgagggttttgtactgggaatttctcacctccagggacacacattcgcttagtttacaacattttatacttcaaaatgatacaagggcagatatgaaaaagaaaaaaaaaaaaaagaacagcaatatcattagcctttgatgctctttatctggaatcaactaaaagatata

SEQ ID NO: 39041 - DNA, 209 bp, Glycine max
  Clone ID: PAT_MRT3847_135254C.1
attctctatgattcgatattctaatgtcgttaggggaaagagattgtctgtgtgtgagtcgatatggctggaaactgcgagggtcctgctatcggaatctttcttcgggatcgacttacgctcgcgtcggcggtggctacacgatcgcgtttcgatcatggccaatgatcactggaacagaactacaccatcgtacgtggctttctccg

SEQ ID NO: 39042 - DNA, 272 bp, Glycine max
  Clone ID: PAT_MRT3847_135255C.1
gtacaatgcttatgcagccccaccatctgcatctgctgaaccaattggaaactgacaaaccggtgtacacaggctcggcttaattttcgatgagtttgtctgggctctaccttatgaaataacaattcgaattgtgcctgcaaacatcgtcgggagtgagacattgatgctggcattctttgctggagaaagtggtaatgggtgaatgatctgacatccgcattatttttggtcgaatctacgatctataagtggaattacactgcttgttt

SEQ ID NO: 39043 - DNA, 401 bp, Glycine max
  Clone ID: PAT_MRT3847_135256C.1
ggctcgaggatcacattttctctctatcttataaagaagaaggtggacgccgtgtatatgctcggcgacctcggaggcaacaacaactccaaaagccgatgtcatccccgaaactcttggctacactggagtaaaagcagatgacgataggatcgaatcattgctgactgaagatcagggttacgaaatagttgagactattgccgccggaaggcaaaagtaggccacggttccttctggaggcggaggtccctgttgcctgtgtcctattctactgagggatgtgctgctgttgctgatccctctgcagacgcacagaatgatgtaaaggttgaggacaaagaggaatcttatgagaaggaaaaaaacatgacttttcattaaacgggggaacctatgca

SEQ ID NO: 39044 - DNA, 351 bp, Glycine max
  Clone ID: PAT_MRT3847_135257C.1
gtgccgcctgcttgggggggggggggggggggggggggaccaaaaaaaaagtcggtgtagggatgatgcaagaggcagactgcaggtagtaggcggaacgcatgcccgaaaaacaagatcctagatgaatatagagagaacaaagaataagagccatggtgatcattagttgtgatggaggtgcatatcccggatgtaatgaactgcagagtggcaaggcccatgaagccagcgcacttagtagagagtggccgcattgcatgggctgctagagtggagactaggcagcacggtatggaggccgtggtataaagttgaggggatgttacatgcactgcggaagcaagcccg

SEQ ID NO: 39045 - DNA, 418 bp, Glycine max
  Clone ID: PAT_MRT3847_135258C.1
cttcgttcgttcttcattcttcatctggttagcatttgtctttaaggatttgaacatgattcatggacccttaggggtcctttttattgttttgtgcatctttatctccttctcttatcatcggtaattgtttttctcttgtaaagcatgttttaaccgatcattagtcctgcaagttatctttaaaaaaggttgaaggttaataagcaaaaaccaagataaaaccaactcataactaacttcctttttatcaaatatcacttgagatcgtttcaaggtccaacgccttagcgattctctcctctttacaaaaaaaaaaaagatcgtttcaaggtccaatgccttaacgatcctcttcgctttttaaaagtttgaaacatcgtttcaaggtctaacgccttaaatgacttttgttcgt

SEQ ID NO: 39046 - DNA, 863 bp, Glycine max
  Clone ID: PAT_MRT3847_135259C.1
aacgttcctcccattcccattacaagaaaaaaccaaattcaacattcattcacaatgggtttgaaatcgctcttcaaccgcaacaaggacgcgatctcctccgacacggcgtcccgatcgacgtctttatccgtgcgttcacgcacgcgtatggcggatgagctggagcaggtgttcaacaagttcgacgtgaacggcgacggcaagatctcggcgtcggagctggggtcgatcatggggagcctggggcagccggcgacggagctggagctggacaacatgatccgcgaggttgacggcgacggcgatggctgcatcagcctcccggagttcatcgagctcaacacaaagggcgtcgactccgacgaggtcctggagaacctcaaggacgccttcgccgtcttcgacatcgacggcaacggctccatcaccgccgaggagctcaacaccgtcatgcgcagcctcggcgaggactgctccctcgccgagtgccgcaggatgatcagcggcgtcgatggcgacggcgacggcaccatcgacttcgaggagttcagggtgatgatgatgatgggctcgcgccatgacaccaccgatagagttaaacctgctccagaaacttgacttcctagtaatctcttgcttcccgttcgttaattatatatctgcgtctttctttttcttttttcattatagaaaaatatagtatcattgtatgccaaagtttaatggcaattggttgaaaaatacacgtatttttttttagattttaagcttccttccttcctggatccattttctgaggcagattcagattcttctttcctgtttgtcccccatttattatattctttatttgttggatt

SEQ ID NO: 39047 - DNA, 411 bp, Glycine max
  Clone ID: PAT_MRT3847_13525C.1
ctggtactcctgcagtaccggaccgggattaatcccgggtcgccactcactatcggcggcgctttttttttttatttttttttttttttctacatctctatcttccttggcaaatctttgttgccaccactattattgctaactggcgtagggcttctgcaatcacttctctccttttctctatgccccgcaaccccgaggctggacatcctttctttttctttctttaaatctatcttcacttttagaacaattttgttttccccaacagcctaatgtgttaccaaataggctctttcttctgccatggaactggccttaccaagttaggcgggtgtatttccacgggatgtatgccaagaatccaaactccccccaggggcatcagaaaatctcttacccctatactct

SEQ ID NO: 39048 - DNA, 554 bp, Glycine max
  Clone ID: PAT_MRT3847_135260C.1
cagacaccatggccgagaccagcatctacccgcgcgccgagcttgacggccacaacggcaaggccgtgacggccctcgccacgacccgcgagaacccgaacctgctgctgacggcctcgcgcgacaagtcgctgctggtgtggcagctctcgaacgacggcgaggagtacggcttcgcgcgtcgccgcctgcagggccactcgcactacgtggaggacgtggtgatctcgtcggacggccagttcgccctgtccggctcgtgggacggcacgctgcgtctgtgggacctgaacacgggcatcacgacgcgccgcttcgtgggacacaccaaggacgtgctgtcggtggccttcagcgccgacaaccgccagatcgtgtcgggctcgcgcgacaagaccgtgaagctctggaacaccctgggcgagtgcaagtacaccatcacggaggacggccacacggagtgggtctcgtgcgtgcgcttctcgccctcgacgggcaacccgctgatcgtgtcgtgcggctgggacaaggtggtcaagatctggaaactgtcc

SEQ ID NO: 39049 - DNA, 404 bp, Glycine max
  Clone ID: PAT_MRT3847_135261C.1
atcccctccctcccattctcttttgactttcaaaaatggcctttgcaagtgtcatagccattgttgcatttcttcttctacaacctctttcaactacttctgacttcctttctccttggctttctcccatctttgatgatgtctgcaaagaagtggaatgtggaaaaggaacatgtaaaccttccaagaacagcactttcttgtttgaatgcgagtgtcatcagggttggaaacagagtctttccaatgatgatgatgagtcaagcttgaagtttcttccttgcatcgttcccaattgtacattggactactcttgctccaaagcccctgcccctgttcaagaaaaggcaacaaagtccaatgagtcaattttttatgcttgccactgggttgattgtggaggt

SEQ ID NO: 39050 - DNA, 398 bp, Glycine max
  Clone ID: PAT_MRT3847_135262C.1
ttcaaatcataatgggccgttgtgaccatgttacagaccatgggggatattgatcgttgcaaattccagctgtctcaggtatggagagagcactttattgcgtgacaaaagcataagataacttctgtcacatacggactttatttatttctcgcatttattcccccaggagccacgatgggtagttattgcatcgcaaggatctttcataccatttaactgaggccactttatttgagggatataggctgagcgacatatatttccaagtgcaaaagctgaaaagcacaaattattggatggggaaatgctatacaaaattgttgaatgaatctctcgaagctataatatatctctgctcattccaagcttaacattatgcatagagacacggaagc

SEQ ID NO: 39051 - DNA, 456 bp, Glycine max
  Clone ID: PAT_MRT3847_135263C.1
ggctcgaggagagagagagagagagagttagagagcgtttggttaaatgtaattctcgtgagaaaaaaaattccacttcagagatttattctttcgccgcttcagatcacagacagagaaaaaattatgtgttgatgtgctaatttattaattattcataaatgcaaaaggattgtatcagatcctcttaaatttcattttgtatatccttgaattcgcattcagttggtggtcgttacggctagtcgaagctctgattttcctgttaattccaagagaggtttttgcgactcgaaacgacgtcgcataagacactttgcgcttgattatcataagcaatggctcaacgttagggaagcctgagcaatgcgaccacgtggtttggaagaagagttttagaggagttctatatccaagacctaattagagtatacgatgttcagagatatggtgaga

SEQ ID NO: 39052 - DNA, 278 bp, Glycine max
  unsure (1)..(278): unsure at all n locations
  Clone ID: PAT_MRT3847_135264C.1
cnagtgagccaganggttgggccttccatgaagagccaggctaagggggganggaggttcgccccgcagccgggcctgtggtgcttgccgtagggngcctggaggaaggtgaggnagaggaaggtggggggtgcnattaggaagagggtaagganggagcggtggaananagatnagtctgagtagtgttctgggatcattgttgttgggtagggcntaatgcgcagtnnagattgaattcatanagggtantgagncgaaattgccattnattnaat

SEQ ID NO: 39053 - DNA, 421 bp, Glycine max
  Clone ID: PAT_MRT3847_135265C.1
aattcggctcgagctcgagccgaatcggctcgagctctgttacgtcgttatctcatatccaccgtcacaacccttcgagtttcgggtaccctaaccccacggccgcgtgtcacaaactcactctttttcaatgtttgataattctaactttcttcatctttcccgatgtttgctatcatggctgggttggctccagaaggatcacattttgatgctcgttaatattatgctaagatgaatgatgcactttgtactgatggtcttgatctttttactttttattacaaatatcgttaaagctttgatgctatggtattgtatgataacctctttatgggtatttatgcatatgttttttagaagctctttgctttttaacaaaggggtatttttccttttttttaggtacttgtttgtattc

SEQ ID NO: 39054 - DNA, 371 bp, Glycine max
  Clone ID: PAT_MRT3847_135266C.1
acactatgttatgacttttgcttccgtaaagataaatatggcccattcccctgttcccaccttctttatttagagaacgacaaagaaatgaacaccgaacctattacggcacccggggaaagaatacgaaaggatttttcttcataaacggcgaccagaaccacgcgcccacctcaaaagattttcccttgtgggacgattgtccccgaaaagacagaatgcctatccccataaatcaaaggcgaagacgagcccgtgggcccaatgaaaaaacctttcgggatccaagaacaaggcccaggttgaaaaaaaggtggcacccataaaaaaaaacgggcgtcgctggcatctcagatggaatcatagcaact

SEQ ID NO: 39055 - DNA, 459 bp, Glycine max
  Clone ID: PAT_MRT3847_135267C.1
cccacgcgttcgcccacgcgtccgccagcatctggtgatgatgtggatatggaaaatatgggaattcatggtttactggctccattgaaagcttttggatataccgtcgaatccttggaaatgttgttacttcccatggcaaaagatggtacggaagcccttgggtcaatgggaaatgatactccattagccatcatgtctaatagagaaaaactcacttttgagtactttaagcaaatgtttgcccaagtgacaaacccaccgattgatcctattcgagagaaaatagtcacgtccacagaatgtatggctggtccagaaggtgacttaacagaaatcactgaggaacagtgccaccgtctttccctaaaaggtccccttttatccattgaggaaatggaagccattaaaaaaatgaattacaggggatggcggggcaaagttatagatataacatac

SEQ ID NO: 39056 - DNA, 794 bp, Glycine max
  unsure (1)..(794): unsure at all n locations
  Clone ID: PAT_MRT3847_135268C.1
acggctgcgagaagacgacagaaggggactaaacagagtaactaactaaattaaggagagtccaagtgtgtgggagacaaagagagacatggctaagtggtgtatgttggtgttggttcttgctctagctctggctgtggctacaagtgccagagatgttcccaatcccaaggatgctggtctcaatgaccagaagaacttcatcagctatggtggagttggtggctattctggaattggaagcaatggactaccttttggaggtgtcggaataggtggtggtattggcggtggtggacttggtggcggcctcggcggcaccaccgggataggtgggttgggaggattcggaggtcccattggtggcggtggtgttggtggtggtagcatacctcatcctaccccttgatatgaacatgcatgcatatggaatttcttctcgtttctttggattaccctagtcaacgaccttcggtcaggaaataattgtggtttatgttcgtgtcgtttatcttacaaccattttagagtttaatttattatcgcctattgaaattaagcaaaaaaaatagtagtatatctttgtaatgtattatgtcatttccgtcgatctttgcttaggttttgttgtgtcaagtgccaaccatagtactcatacatatacgtgtggttcctttatggaatatttatatttagcatggaagtaatgtaatcaatatatgagttcaatttactagctagctacttgctttttgcgcgttctnaaaaaaaaaaaaanaanaaaaaaaaaaaaa

SEQ ID NO: 39057 - DNA, 357 bp, Glycine max
  Clone ID: PAT_MRT3847_135269C.1
ggagagaaaattgtgagaggagttttcacgtctttgagaaatgggtgcttcgctatcggtctcggaaaaatccatccatgaattcatggtcaaggtatacttgaatctcaacaacagaaaacctcaatttttttattatttcattttttgaagaatgattatagaaatctcttattatattggtcatggttgacacaggatgctaagggcagagacgtgaacctcagcatctacaaagggaaggttcttcttgtagtaaatgtcgcttcaaaatggtatttttacacacaccctttttttctaacccaactttttccatatgcttgctgtaaaaatccaaatcttctttctttttat

SEQ ID NO: 39058 - DNA, 2464 bp, Glycine max
  unsure (1)..(2464): unsure at all n locations
  Clone ID: PAT_MRT3847_13526C.1
gaagcaaaggtgagttgggactacgagacaaggcgtaatttgtcgcatttagatgaaactcacaactttacttggcactattttttggtaaacaagatcaatattcgttaaagcagcatttctgcgccaaatctagttagtttccatcgccaatacaatacgacaccgcttaatgcaagtcctcgtcgtcgtttaacgctcacgttttctgttctctgagaaggtaaaaagcgttaaaacgcagcatctcaaacacgcgattccgaagcttttctgcgatcaatggagttcgacccgatcccaatcggttcgtgctccaaagaacaccagatgatctataaggagtggttcaattacgctgattcagatagcgatggccgcattacggggagtgatgccaccaagtttttcgccatgtccaatttgtcccgcgaagatcttaagcaggtgtgggctattgcagattcaaagcgacaaggatatcttggtttcactgaatttatcattgctatgcagctagtttctttggctcaatctgggcactcaataacacccgatctgctgactagtgatgttgattttacaaatgggaaacctccctcaatggagggtttggacgtattactagttaagaaaaagcataaacaaaaagaggttgatgcaaatgcgactcgcaagcatcaccgttggtctcgcttccagcccccgacgtcgaagcaatgggcattccacaacctcaacaagatagttcactcctacctccgtcacctccttaatcaacatttatcagttgagtactgacccaaaagcataaccattggtttggcatcaaagtcactatttgtcagtaatggggatacaaaatcattaaaacggtaagtaacttctaatggttatgcttttgggtcagtactcaactggtaaaacaacatttatcaaacatctgcttaaaagtagttatccaggagcacatattggacctgagccaacaactgataggtttgttgttgtcatgtctggatctgatgagagaagcgttcctggaaatactgttgctgtccaagcagacatgccatttagtggtcttacaacttttggcacagcatttttgtcaaaatttgtgtgttcacagatgcctcatcctctactggaacacatcacatttgttgacactccgggagttctatctggagaaaagcaacgcacacaacgagcatatgattttacgggtgtaacatcttggtttgctgctaagtgtgatttgattctccttctgtttgatcctcacaaacttgacattagtgatgagttcaatcgtgtgatatcatccttacgggggcatgatgaccaaattccagtgggtttgaacaaggctaaccatgttgatccccaacaaatgatgagggtttatgggagccttaatgtggtcacttgggaaggtgctgaagacacctgaagtaatgcgagtgtatattggctccttcaatgacaagcctgtaaatgatgctgccactggtccacttgggaaggaactctttgaaaaggaacaggatgatctactctcggatctgaaagatgtaccaaaagcagcttgtgatcgaagaatcaatgagtttgtaaaacgggcccgagcagccaagatacatgcttacattatcagccatcttaaaaaggagatgcctgctatgataggcaaagctaaagctcaacaaaagctcatcgataatttggcagctgaatttggaaaggtacaaagggagttccatttacctcctggcgattttccaaatgtagagtttttcagagagagattgagtggttacaatattgataagtttgaaaaattgaaaccaaaaatgacacaagcagttgatgacatgttagcttacgacattcctaatctcttgaagaattttaggaatccctatgattaaatttctgagcaattgagtcggtgctataattagattagttaagagtgacatttgtagcgtacaaattttacgggatctttatgcaatgtatgtgtgtcatgagatctttatgtgccatccggtggcctttcttttctagtaggaagttttattatttaatatatgtttttgtatttatgtatattttgttatctacaatcaagtgtcaagacagaaaataaagggaaaacacaattacttgtttgcatcanaaaaaaaaaaaaaaaaaaaaaaaaaaaaaaaaaaaaaaaaaaaaaaaaaaaaaaaaaaaaaaaaaaaaaaaaaaaaaaaaaaccccaaaaaaaaaaaaaaaggggggcccttttaagggaccaaattttaatacccggggtttggaaagtttaattttttttttggggccccaaaaataaaattaaggggccgggttttaaaaaccgggggaggggaaaaacccggggtttccccaatttaatgcctttgaaaaaaatccctttttccccggtggggtt

SEQ ID NO: 39059 - DNA, 305 bp, Glycine max
  Clone ID: PAT_MRT3847_135270C.1
tttccgccggtattcactgtgatatcatttgtgtcactggatggactgtcacttcaatgcaggaagattatgtctcaatttgttgtgttatttcctctcaggaatgtgttcccaggacctatcgtgttttaaatccacaaattccttttgtgttaaatcggtggatgggtaaactgacttttccctagggcactttctcaagtgattagatattgtctttttaaatagggggaggagcttgtgcaaaaaatgctttttctatgaatatgcctaaatgctgttctttaatcgtggatatatttttg

SEQ ID NO: 39060 - DNA, 258 bp, Glycine max
  Clone ID: PAT_MRT3847_135271C.1
gctccctcagaagcgaagaaggagccacatagtatcagtctcctactctctctcatccacgatagaaatggcatctcacatcgtttcataccccgtcatgtgtcccaagagagagctcaagttcgctctctagtctttctgggattgcaagatcatcgccgatgatttgcagaaggtgtctgctgatctcagttcatccagctgggtgcatattggcgcgtgctgggatcaagtgcatccccaggaacactttctcgt

SEQ ID NO: 39061 - DNA, 666 bp, Glycine max
  Clone ID: PAT_MRT3847_135272C.1
aaaatgcaggaagggccacgctgaaaattaaaaaaaaaaaaaacaagaagaagaaaaaagcggggctcactgaaaaagcagtttcccgaattagtaagtaatgaccggaaaaccactgtcagggatactgaaaaccgcctcatctctgaaatcttgttcgtaaccattaatacaacgttggtagtaactcacaaaagcctctgttccctccctttccttcactttaccatgtccatgaaccaatagtagctacctttcacgaacacaaacaaagccactctctcgttttatatggcgtaccaccataacccccaagagcttccacttcaccatttcactgaccaacaacaacaccataaccaacctctcgttgacaactccttgctctccgaccctgcttccaaacctgcctccgatcctcatcaacccgcgccaaattggctcaacaacgcccttctccgcacgcactacactgacaacaacaacaacaacaacaacaacgttaacgctgctaacaacaacaccaacaacggcaccaacttcctcaatcttcacacttccacttccgactccggccaatggcttgctcgcccgatcctcaaccgcaaccacagcgaggtcatcgacgacgtgaccggcgccggcgactccaacatggcggccgcc

SEQ ID NO: 39062 - DNA, 459 bp, Glycine max
  Clone ID: PAT_MRT3847_135273C.1
ctcactggtaaatggtctacacctggtcagttccagtccacggtaaaccagccccataccccagaaattgtagaagctgaggtggttgaaccagctggtggtcagaagtgagagaggacagtcatgtgggacattttttgttttctacccgttcctttctggtcttttcttttacactgctaacgggtgaaattggattctttgaaaaacatgggattgggaggtaagaattagaaattccaaagtggaaccttcccggttggatttaaattagcaaaaaaattccggttaccccggtaaaaatttgacccttaaaggtttttttttttttggtggggaaaaaaaacccccctaccccaaatttccctcctttttttcgcagggcgaaaaaaatttttctctcttttccccaaaaaaaaaaaatgggaaatttttgcacaaaaaggaaaaaaaaaaaaa

SEQ ID NO: 39063 - DNA, 464 bp, Glycine max
  Clone ID: PAT_MRT3847_135274C.1
ttgtcatggacatggatgtttgacagctacaatcactcgtttcaggcattcttggcttggtagtagccgccttgctttataaggtaacgaaaacacatggtcctaatgcatagatctgcactgcgccacacgcaggaggagcatgggctattgttggtcattggcacctgttatgggctcattaacttacacacaaaacactagggacaacggctgacacacatggaccaattttcacgatacaacttggttcatacaaaggtctggcgtcgagttgctgggagcaggactgacagcgtttcactgtccatgacaaaacattctccaccaagccctgtggtgcagcctgaaatgtaatgacctactactctgcagtggaaggattcgagcatcatggaccgtactggcgtgagacgaggaaatctgtcactattggacttctctctaaccaaacgcttgaactt

SEQ ID NO: 39064 - DNA, 526 bp, Glycine max
  Clone ID: PAT_MRT3847_135275C.1
ccttaaccaataaaactctgcattttcttaaagaagaagaaaaaaaaccaacaactttcgcgtgaatgtattctaatactccactttcgcttcctccaatcctaatctgccaaaattcatcttctagggtttaatggccgagcaatcccggtctccggtgccgccggcaacgacgataaccgacctgaacgaagactgcatagctcactgcgccggccacctgagtctcggcgacgtttgcaatttggcgatggcttcctccgctctcaaacgcctcgcctattccgattccatttggcaacgcttcttcaggagcactggcatctagagttaccttggcgttcgagcggaaacggagcagcagcgaggggagtgtatatggccagacacgcggcgttgcgacagttcatgtttctcgacccttcgttctcgactttgacggttcatgtgtggaaatgatagatttggatggctgtctaaagagaacatcaacagatttttttccactcgtaatgttatcataaag

SEQ ID NO: 39065 - DNA, 792 bp, Glycine max
  unsure (1)..(792): unsure at all n locations
  Clone ID: PAT_MRT3847_135276C.1
gaaatgtgaaagcttaaacccccaaaaccaaaaccctagcgaggttggttcccaattcccatggtttctcacccgaaatcgaagttcagtgtctatcaaaacccttccttttcggcggttctcacttccaacagtcttcaaccttccaagttcaccatcctctccttcttctctgcctccgcattcgcttttctcgctgtcttctttagggaaaacggcttcgtccacattttgagcttcgcagctttttcccctgtcacagcttagttaggtatgctggtggaggtgttgttgcggctaagtctctgtctgatgctaacagcgttcataggaatgagattttgctaacaaaacatcaattagggcttttaggagtgaagccaaaggttgatttggctcaacctgattcagcaaagaagccccccaagtctaaacttcaactgccttcttcagatttgcttgttccccttcaccggccaattcccagtcccactcagggttcttcgtctagcattgatgccgatggttcaaattctaataggnggtggtgctgnctcgttctattggtactccatcgaggtagtcaggtttcggtgtcattctatctttcgccagggttcggtttcgcctccaaggggttcggctggagtggattcagcagtttcgagtccttggtctaacaggcaagcctnctctgttactaagataacggctgaagaaaagctggagaaattcatagctgaagtggatgaaaggatcaatgagtctgctgggaagatgtctaccccgcct

SEQ ID NO: 39066 - DNA, 436 bp, Glycine max
  Clone ID: PAT_MRT3847_135277C.1
gatccgttaaaacctcttagctctttgtttttattggttggacgaaaacccaaaaaaaaggggaccttccaacattccttgggtggggtgggaacataaaaaacggggttcttacaagcggggaataataaattggggtacagttaaaactgcaaaaagcccggggggtagaaacattaaagggggaacaaaaatgaaactggagggggcaggccccccaactgaataggacaagaagtgatatttttgaaggggaagcccacgggtggggttaaaagggggggacatccttttaagaaccaatgaaaaggggtggataaaaaagggggggcaaaccctttttaaacaatgggccaacccattagatacaggtagcaacaaagtctccactgaccacggctgggccaaataacccagctggggtcattgaaccccc

SEQ ID NO: 39067 - DNA, 462 bp, Glycine max
  Clone ID: PAT_MRT3847_135278C.1
tttttaggaaggaaagcctacacaaccttttattttatagtttatacaaagaagaagaacatcatagggcctctattctatggtcgatttaattgtacgaatctccacgttgtacatttaatttacaatccaagagctttctatatttggatctgaaatcaatccatcgtcaattaatacatacaaaccaaccattatatataactaaacgaacagtatatatgtttattatacatagatcagcgaataaatcccgttattgctgtgactgtgataactctcaaatgccgtgatcttttctttcatgggactgtcgaccatggctggttaattagaatgttggtcgatctatgaaacctttccaataagttccggttgtttcttcatccatgaaatcaccccacggttactcaaaggaggtggaacagttccttgtagttaccataatgcttatagcttcct

SEQ ID NO: 39068 - DNA, 504 bp, Glycine max
  Clone ID: PAT_MRT3847_135279C.1
tggacactccggttaactcagtctccttattcctacaacttgtcctccaactcaccttacctattctgcttaacaccaagctccctatcgcccagcgaacccaagaccttgtctcgggacttaccctcaacgagaaactcgcccaactcgtcaactcagcactcgagttaccagtggtggagtggagccttgaacggtgctgccgatgcaggcttcaacatcagattcaaaggcatcatcaaatccaccactaggttccccaagtacgccgcgacgaggaccttcagacgctctatcagatgcggatgagcatgccaatgtctatgtagcgtgatgacatgcattttctattcttgagtgttttcattttacgattttcattacttgttattgttgttcccctgaggaggttgcttattgtttctgttgttgggttcctgctattattgagtttgtttgctgttagaatccattaattgtaaagattagatatgatttgaatgg

SEQ ID NO: 39069 - DNA, 1331 bp, Glycine max
  Clone ID: PAT_MRT3847_13527C.1
cccacgcgtccgcccacgcgtccgctcacatggcagcccacgcgatctatttcgtataacatttcatttcacttcacttagggtggtgcatttgcaaccctttaatttcctcacaaaaatggaggaacgtagtttgtactcactagtgtttcttgtgcttgctttggctattgtgaacaaagtgcatgggcaagggacgcgtgtagggttctattcgagtacatgcccacgcgctgagtccattgttaagtccacagttacaacccatgttaattctgatagtactttggctgctgggttgcttcggatgcacttccatgattgctttgtgcaaggttgtgacgcttctgttctcattgccggttctggcactgagagaacagcatttgcaaaccttggtttacgaggatttgaggttattgatgatgcaaagaaacagctcgaggctgcatgccccggtgttgtgtcttgcgctgatatccttgctcttgctgctcgtgattccgttgttctgagtggtggactgagttatcaagtgcttactggacgcagagatggacgcatatcacaggcttccgacgtgagtaacttgcctgctccttttgactctgttgatgttcagaaacaaaagttcacagcaaagggcctcaacactcaagacctcgtcacccttgttggtgcacataccattggtactacagcttgccagttcttcagtaacagattgtacaacttcaccgcgaatggtcctgacccttccatcgacccttcatttctttcccaactacaatcactatgccctcaaaacggtgacggttcaaaacgagtagcgctagatacgggtagtcaaaccaaatttgatttatcttactatagtaatttgaggaattctcgtggaattctgcaatctgatcaagcactatggagtgatgcttccacaaagacaactgttcagaggtacttgggcttaataagagggttacttggattaacattcaacgtggaatttgggaagtctatggtgaaaatgggcaacattgagttgaaaaccggtaccgatggtgaaattcgcaagatatgttctgccatcaactagatttatagccacttcaaacaattaataattaaattgcttctagaactgtttctctgttggcatttgccagtgaagtgtatcatatacaatttgcttcttttgtctggccagacgaaatattttcatcttgaaagtgtacaagttacagaataaatattaaattttgttcaacataaaaaaaaaaaaaaaaaaaaaaaaaaaaaaaaaaaaaaaaaaaaaaaaaaaaaaaaaaaaa

SEQ ID NO: 39070 - DNA, 191 bp, Glycine max
  unsure (1)..(191): unsure at all n locations
  Clone ID: PAT_MRT3847_135280C.1
ccaaaaacactctgacacaacaaanacaaacnccaatcgtncaattaaaacaacaanaatataggnagtgacacanattaannatccaacactctcaagctttcgagtttcaanctctgggcgctgaatntggntcatntgtcnaagagtnatanatccttngcatngaaagngntaggnngaggaaangg

SEQ ID NO: 39071 - DNA, 205 bp, Glycine max
  Clone ID: PAT_MRT3847_135281C.1
gcggtggggggttcttttttttttttttttttccgcagagcgaagaaaaaataggggtttatattaaactctgcggaaaacaacgattgtgacaggggctcaaaatgtccatccccccaccacgggggggggtgcttatttattgggggaaagctattttgaggggagttggttctatccaaagcgggggggtgtgaagcagggg

SEQ ID NO: 39072 - DNA, 201 bp, Glycine max
  Clone ID: PAT_MRT3847_135282C.1
tcatttcataacgactatcatccattcaccgcaatttaagccgtcgcagacaagacaacactcgctgcttcggcatacagacagttgcccaattcctcaaacgtatcagggctgatacgattttgctccattgctaccatcatttccttgtatattgcattgcccagtgctgcaaacataccggctgtaaatccttggggc

SEQ ID NO: 39073 - DNA, 123 bp, Glycine max
  Clone ID: PAT_MRT3847_135283C.1
tctatagggataagctggttctcctgctggttcctttcctgtattcccgtgtcgaccctctcgtccgtccgtgttctgatgcatgagagtttaggatatttctagaatgcgtacctggatttt

SEQ ID NO: 39074 - DNA, 404 bp, Glycine max
  Clone ID: PAT_MRT3847_135284C.1
tttcgtttgcgtcgatgaggaggattcctttgaggaagtcctgtttaacatgcgccacttaatggcgcagctgcattgtgctatctgtaatgatctgcaattgccacatgctcaggttgtcaatatgggcaatgacgcacaagagttgaatttggacaaaccagatgaagctctgcaaatgagaaagaaagctctctcttgtattgaacggctgcacaaagctgttgcgcctaccatagcacagattgtagagttccattcgatgcagaggatgatgactgctcctgattcaaatgataatattgatctaactgatgagcattgatacgttgggttcacaaggagcatgtcaagcttttccaacaagattgtttttgatgataaccttgtgtaggctaacacac

SEQ ID NO: 39075 - DNA, 474 bp, Glycine max
  Clone ID: PAT_MRT3847_135285C.1
gctgcgagaagacgacagaagggctttgccatcgtgtattactacatgctcgctgttattggacaatggaagcattcaactgcttcccggcaagaagggatgaaaggggaaatgtcaacaatataattgtgattggtgaagctgccaacgttcggccttatgttcagcaccaacagaaagtgtgtttcaaaccaatagttttttttattttaattaatctacttagagtctcatgatatgttttcctgtaaaggtatcattttgtgcaatttaagagctgcggcctagctgacctagataaattatcttttgcagtttaaaaatttgctttctgcttttacttattatccatttatattatatattatttctgattttgattttcctcattagttctttaaattggtttgaaaggtatctgaagtcaaagactttcttatctatgtaataattcatggtcataacattttgaaa

SEQ ID NO: 39076 - DNA, 266 bp, Glycine max
  Clone ID: PAT_MRT3847_135286C.1
ttttaattattttcagcattaaattccttttgagtggaagacattgatggagaaggatagtgtaagttgaagcatatagtgtgacaaaatattctgtagaatagattctattttattgctatcttttctttctttataaaaggagacgtctttctgctgtcttttgaaaaaaaaaaaaaaaaaaaaaaaaaaaaaaaaaaaaaaaaaaaaaaaaaaaaaaaaaaaaaaaaaaaaaaaaaaaaaaaaaaaaaaaaaaaaaaaaaaaa

SEQ ID NO: 39077 - DNA, 607 bp, Glycine max
  Clone ID: PAT_MRT3847_135287C.1
gctgtcccggctttaatccgtgaggtgcttcactacacaaatggcgatgggatttaatgactcgaattaaccatagctccattaccttatttcccgagctgaacaccaatgacagtgattgaggatcttatctccctggaagacgatatggcgatgggcactgctcccagaccttggaccctatcaacattttctacaaacagaaattacccagatacgggaagagacactcatgtttgagggctctaatccattacgacctctcggcttctatgttaattgaaactgggtcggtatatgatggccaaaggatccctagtgcagctagtgcaccactagctcttgaaaatattaaacaagacgttgaaagtcttgatgctgattccctgggagagaagacaccatattccactagaaggaaattgcctgccgatattgctggtacccctggggtggatgctgatcttgactctggacgctactcattagaggcttagatgacacagggtgactcattgggagatggagcgtgaacaatcttcactgaatccgcatatctgctcgattcttctttgcaaggactgatgcctattgctgatctgatact

SEQ ID NO: 39078 - DNA, 823 bp, Glycine max
  unsure (1)..(823): unsure at all n locations
  Clone ID: PAT_MRT3847_135288C.1
aagggaacctcgatcccatgccatgtgcggatggggcattattatttcactttgtaaatagtaagtgtgtctctcaaacaaagatgagatctttggtgttggatttttgacgaatgaaataatagtattatggagaagaagaaggaagaaggagggaaagtggggctgagaaagaagccatgtgggtgtgtgtgatttttttagttctctctgacaccaccccatctaatcttaacacacaatgagagcacaacatggaagaaaagcacttgagatagatctaaacatggaacatgaaacatgagagagtgagtggtgttgtttttgtgtgatgcagttgttttagatcttgttgagaatgatgagtggtaggaatgtgagagagtctctattgggatccctcaaccatcaccgtagagggcatagttttaatggggtggccaacaacaaccaccaccacgatgacaacctcgatcttttctccgacaaccgtcgctccctcgctcttgctgcttcttctgatgactcttcagatgtttcggtgaaactgaggaggctctcagttgtaacagcgaaaccggttagaagtgggattgatgatctgttatcatctacagaaggagggaagcatgattatgactggcttctcactcccccggngacccctgtttttccatcagaaggagaatcccaaacaaccttagctcctccaaggagaagtttgactagatcaacatctacctctaaggccttcaggcttgcagtctcacaatcagagaacaatcccccctctagaccagcaagaagcaggtcagtaactcgc

SEQ ID NO: 39079 - DNA, 291 bp, Glycine max
  Clone ID: PAT_MRT3847_135289C.1
aagagtataacaaagacaacaacatacgtaatggaaacttacaacaacttaagaaaaccaagacaataacgacatcaaaccaaaatgaaactgtacaaaacaagcgcacgaaaattcgacatgaccatacatgaacactcgctgagccaaacatctactatacgacacgaaaaattgacctgaaatatccaagaccaagggtatctccgtcaactcattccataatcgcacgacaccacactcatgtccactatctctggaagatcgctctagacagagcctattcaacat

SEQ ID NO: 39080 - DNA, 489 bp, Glycine max
  Clone ID: PAT_MRT3847_13528C.1
actaaatttgatttatcttactatagtaatttgaggaattcgcgtggaattctgcaatctgatcaagcactttggagtgatgcttccacaaagacaactgttcaaaggtatttgggcttgataaaaggcttgcttggattaacatttaacgtggaatttggaaagtctatgataaagatgggcaacattgagttgaagactggtactgatggtgaaattcgcaagatatgttctgccatcaactagattgccacttcaaacaatgaataattaaattgcttgtagaattggctttatttgtatctgttggcatttgccattgaagtgtatcatgtacattttgcttcttttttgtggccagacgaaatattttcatcttgaaagtgtataagttacagaaaatgtaatagaattaattaataaatatatttttcttgttttcggcaaaaaaaaaaaaaaaaaaagggcggccaaaactagtgagctaga

SEQ ID NO: 39081 - DNA, 592 bp, Glycine max
  unsure (1)..(592): unsure at all n locations
  Clone ID: PAT_MRT3847_135290C.1
acctgggaacctcttttattagagtatgccactctgatatctcatacggcagagttcactacttataaaaccttatcaattgtaacgggggacaatttataaactgccattctttgttaacataccaagtactctgttgctatggatcgctaccaagacttccatagctttggtgctcgagaatatgagcacatgctgatagcttccactagcgtttgtaagtaccatatagntatgcaagactacttgaaaccttttatgagagccaccaaacctttccatcctttatcatccagtttatacatttaccgattaacaccgctctcactaacaagctccaattggtaagggtcccactttgggattctggctttatctatcagcttaaccctacacaccctactggaaatgcttgctcggaaggacttttagaatatgaccaccgactctataatcataaacaaagcattgaccaacaccttcgtagccctccttgtctaatcgatctaataaagattgtaaggcttgctggacatgctttctttacggattgaatagttgctgaaatccatagatcagcctttctcgcagc

SEQ ID NO: 39082 - DNA, 385 bp, Glycine max
  Clone ID: PAT_MRT3847_135291C.1
acacaccttctacttcgaagaacgatggggatgctgagtttgaaggccttcaccccaaccacttgatcatatgctaggtcttgacctagcttgcctgataaaggcgcatcgccaagaaaagagactactgcttgctttgaagctaactacctgaccctagcttcttggccgctgcgatggatatactatactggtagctgaggcaatgctcactgcaccttctttgacactaagccttgcgacaagtgtgtattatattcatatttatctggggaccatagcggtgagatctattccacgcttgacttactcagacattttttaaactggatattttgattactgacccaaagctttatgcttaacatgaatctgccaagcttga

SEQ ID NO: 39083 - DNA, 554 bp, Glycine max
  Clone ID: PAT_MRT3847_135292C.1
gctgcttgaactcgaaccaaacagtgtcttcttcgtcacaactcacaatctgaacctcgttgtcaacgacctcgcaccagaccacgctgtcgtcgcaccagaaaacgctgttagactcgcaccggcaccgtcgccgcactagcactagaaggtccagaacacggtttaatttttcacttccttcccctgtttatgtgatgtttccccttgggtttcttactacctttaagtcccttcccatttttttttgtgcgatcgggacattgggattctcctcaagtgacttagggacttggggttttagataaagttttaagatttttttctgcgatggagagaaaagttttgtgctggtctaactgtggtttgatggctcgtgctttgtttcgaatttacttgccctttctttcactacactgctgggaaactgattgtatggttctgaccatgatataatacagtttgttgactattttccagagtagtctgaggaatggagatagtggaactgcgaaagcatatatatgagattatagttttgattttagactgta

SEQ ID NO: 39084 - DNA, 612 bp, Glycine max
  Clone ID: PAT_MRT3847_135293C.1
ggctcgaggagaaaagtccaggtgaaacagagagttctggttcaatttcatctctttcagaaagattctctgatgaacaggtatatccaacccaagctggtttttctcctgaagtcacgtctaaggctgcaccgaatgaagaagttagtacccccaaaaaaagtaaagaagaagatacaggtttgaagattcttacagacaaattagctactgctctgctgactattagtgcaaaagaagacttagtaaagcagcattctaaagttgcagaagaagctgtctcaggctgggagaaggctgaaaatgaagtgtcatctttaaaacaaaagcttgatgctgaaaggcagaagaactcaattctcgaagatcgagttggtcatcttgatggggcactcaaagagtgtatgaggcagcttcgacaagctagagaactgcaagagcaaaagatggttgaggctgttgtgaatagttctcgtgactgggaatccaaaaaatctgaacttgagaggaaagttgctgagcttgaggctcaacttcaaacagctaaagcagatgctgctgcgtcaattccgtttgatcttcaccagagactagaggctgtgcagaatgaga

SEQ ID NO: 39085 - DNA, 267 bp, Glycine max
  Clone ID: PAT_MRT3847_135294C.1
gttgattaccactataattctgtttcttacaggaacagagaaaatagagggtgtgagaaatggctctaagatgggttctccactcagcttgccatgttttggggtaccctacgaggaacatagaagaagaggagtgcaagaagattgaaggttactcaaatattggagaggccaaaagcgtgaaggggttatcccttgcaaacaatttcaatgaggttgatcagtgctatccttgttcagggtttcaaatgccacttcactatccac

SEQ ID NO: 39086 - DNA, 426 bp, Glycine max
  Clone ID: PAT_MRT3847_135295C.1
ataaaaaaaccctttaaaatttataaattgtttggagggaaggaacaacaaaactattactactgtattttataagaaccgtggtatggtacctataacaaccaattggaattgacatttataactggtaagggcacgatccaacggggccgggcccacactgttatactattaccactattctccctaacataatggggaaaaggaaaaagaggggaccctaagcaaccccagggctcgggggctcgttgggcgccggcacaaagacaatacaccatgggccccgtcacttgtttaacatagttttccggatcccgaaccatctgatggctcaggcgggcatatagatttggagtcttattcttacttgtggtgggagagggcaattcctttacgcacccgggggaacacaacaggtttttcccc

SEQ ID NO: 39087 - DNA, 158 bp, Glycine max
  unsure (1)..(158): unsure at all n locations
  Clone ID: PAT_MRT3847_135296C.1
ctcgaagaatacaacacaaagcttcggacctttcttggtctctntagntacactacagtcacggagcgctagtactgcttattaagtagtttattttaaaggctatcatgagcttcgctgcaccatcacttggtgctgctgatggtagatctgttaga

SEQ ID NO: 39088 - DNA, 1208 bp, Glycine max
  Clone ID: PAT_MRT3847_135297C.1
ggaagggggactccgctgaccgagtcctcacgtctcaatctcattccagttttcagtttcccgtcggcacttttccttaacggagaattccttaacgggcgacacaaccgtcattcccactccaaaccgtttcttctatcctccactctccccatcccaataacaaagagaggaatcgaagtctgttccgttctgatcagaaagggaataacggtaatcgagatatgtggcttctgcctaacagaataactggaaaaagcctgaaaccagatgagcacatctactctagcaagagtaatttacagagagccttgaaacggcatttatcacatctactcttgtaggactcttctatatatatgctcatcacggcatctatgtcagtgatgacaaagtcattcacttcactagacgtggccaagaagtaggaaccggtactgcactagatcttctcctcattagttcaggaccagccaagtctcgagaaagttgccctacttgtatggcaccccaagaggaacacggggttatctcctcatgcctgaactgcttcctagctggtggggtcctgtatcggttcgagtatgccgttacccctgccctcttccttgcaaaagcccgcggtggaacatgtactcttgcagtctctgatagtgatgatatcgtcatccatcgagcaaaatacctgctcgaaaatggctttgggtgctataatgttttcaagaaaaactgtgaagactttgctatctattgcaaaaccgggctcctagaaatcggacaaagtggccaagcagtttccatcatagggggacctcttgctgctgctctatcctcgcccctccgtatggttactactaacgtttatggaatggcagcgacggcggttggagtctactgtgctagtaggtatatggcagacattggaatgaggcctaatgcggtgaaggtaccggttgaacagttaaccacaaggttggccactggcttgctgcaagtggttgaaccccaaattccaacgaatatttctcgtcaatctcctcagcttgttactcaatgattaagcattgtctttgtttaaaatatatttgcctaagaatgtcccgggtatgtgaatcacatgctcttcttttttcaatacgggtctgtaagagataaatttatttgaatggtgctatggatttgaataatttattttgctgtttgaaaaa

SEQ ID NO: 39089 - DNA, 794 bp, Glycine max
  Clone ID: PAT_MRT3847_135298C.1
ggaaaggggaaatcggtaacgcagatggcacttctgtctaacaggtacgcttactttctattcctccaacgttggggagaactaaaaagcacccgtgtggtggtcttatacaggtctgtttcattctgtggcccatgttgtctggaaaaaaaactcgatccgatttgttttttgctgaattcaaacaatggatgcgcgggtccgcgtccaccgtcacttttccttaacggcgaagctatcgccgaagggcacaaccgtcattcccactccaaaccgtttcttctatcctccactctccccatcccaataacaaagagaggaatcgaagtctgttccgttctgatcagaaagggaataacggtaacggagatatggggcttctgtctaacagagtaactagagagagcctgaaaccaggggatcacatctactcttggaggactgcttacatatacgctcatcacggcatttatgtcggcgatgacaaagtcattcacttcactagacatgggcaagaagtaggaaccggtactgcactagatcttctcctcatcagttcaggaccagccaagcctcgagaaagttgcccaacttgtacagcaccccaagaggaacacggggttatctcctcatgcatgaactgcttcctagctggtggcgttctgtatcggttcgagtatgccgttaccccagccctcttccttgcgaaagcccgcggtggaacgtgtactcttgctgtctctgatgacgatgatatttgtcgtccatcggcaaaatatctgctcgaaaatggc

SEQ ID NO: 39090 - DNA, 285 bp, Glycine max
  Clone ID: PAT_MRT3847_135299C.1
gtctggtacggaattccaatttatggataggaagcatatcatatgctttctgtcggaaattaaaaactttcatttttcacatgaattaacttggatattacaccaacagcaatcatgcaaaaaataatatatagcgattagtggtaagctgatacaattgatgccatataaagaaacgatctatatgaaaattttctatttaccttaccaagatcagattatggagttaccatttcttcatttgataaatttgaactgaaccgattcttggcttctatattatag

SEQ ID NO: 39091 - DNA, 292 bp, Glycine max
  Clone ID: PAT_MRT3847_13529C.1
cacctaccgcatgcagcacagctattccaccaagtccaaccaacacttgttcttcaaatcccctgttgagtagctcttttatcagactaccaagaatagggccagcggacccaggtgccccgtttctggctagatgattcaagtgattccacacttaatgcctgcatattacggtaggtcaaggttacccacaaaccgtgagactgtcaaccgtgcatatggtggatttttatctggaagttccgtcagggaaatgattatcctgaccttcttagttgaacagctgaagatt

SEQ ID NO: 39092 - DNA, 305 bp, Glycine max
  Clone ID: PAT_MRT3847_1352C.1
taatatgatattcttgttactaaccaaccgtattttaataaaaattgcaaggaataatacaaaccggaatcactaacatcttccaaaacaaaagcaaaaaccaaaacctgtacttgcataaacatattattccaaagacatagaagttcaactgggtcgcaaaggtttataacccacagggcaaaaacaggatttggatctgttgacagaatgatttttgcagcacaatcccaagcatagactaaacaaaatccgctccatttggaacccacaggaacagccacgctaacaacaacaccaagaac

SEQ ID NO: 39093 - DNA, 581 bp, Glycine max
  unsure (1)..(581): unsure at all n locations
  Clone ID: PAT_MRT3847_135300C.1
ttnnnnncnccnccgnggngnttccgggacnncccacgccgtccgcaggcttnanaggctcgagggaggatgtcgcgaagtcgattgttatggttcacgttcgggttcgcgtccacatacgtcgcgctttaccaaaccgttttgaaggacctcacgcttcagcgtcacgcgtttacctctcacacggaacgctattttcgcattctcgaagccagactctccaacatcgaacaatcctcttcttcttcttctgttcccgctcccaatcaggttgaaggctagataactctatcaggtccagtgaaatgatttctacttggttctatgggatttatgcttgattcaaaacgtttgttgaggaaatggccattataaaacagacgccaaggcaaaggataaaattcttacctgcttttttttttcgctccggagaaattaaccaactgtgtctgtgacgagaaaatgaaaagaatgtagtgaagttctctctgtcatgttattaaatgccatgcttttgttgtacagctccaaaagcttgaatttttaactctcttttatattattattagcaaattttgatg

SEQ ID NO: 39094 - DNA, 236 bp, Glycine max
  Clone ID: PAT_MRT3847_135301C.1
ctaccgctgtgagaagacgactgcaggccggttctaaaatgaacccaaaaggggatggcaggcttagtcctttttatgccggaactttccgaaccccctcatcaagtccgtgcctacgtaaaaagtactccattagatgtttttttaattccgggccacacgggaaggtaagttggactttccaaaacctgattcaccagctacctaaaccccccttctagtttttgctaccatgg

SEQ ID NO: 39095 - DNA, 256 bp, Glycine max
  Clone ID: PAT_MRT3847_135302C.1
gtttatcgtccgcccacgcatccgttcaagaaagaggcggattgaatctctccaaactgcaccaacttgtggggaaaagcctaaaaattgttggtgtcatcagtcatatttgcgtacgctttgatgaaggagactgtacatttaatggagggggacgccaacttagagacttaatagacgtgaccttcatcaaaatatcgccgcactgtatgcactgcgttatgcgtcttcatgagaaatgtatactttgtaccag

SEQ ID NO: 39096 - DNA, 253 bp, Glycine max
  Clone ID: PAT_MRT3847_135303C.1
tttttgggggtttttttttaattttttttccgtttaattatctctatttttttattctcttatctccaaaaataacatgcagcccatctaattggcccaaccgaaacagtaaaggggtaaagacggtcatgggacattggaaatagcccctacataacaccgtgaacttttgggagaaggtatatttaagaaataaaaagtttccacccccgtttaaaaaaggggtcttattggaaaatatttacaagttatt

SEQ ID NO: 39097 - DNA, 204 bp, Glycine max
  Clone ID: PAT_MRT3847_135304C.1
gctcgagatcgatttcggattgtggaaggtctgatcgccagtgtgcatggcagccgagctagtcagcagactgttgatggtctattcagacaaggactgcagtggtggaagagctgcttccttcgatatgagtcccaggaggactggagccgggaaggctgtaggtcggcttcgtcgagcgctgattgggaaatggactggcat

SEQ ID NO: 39098 - DNA, 188 bp, Glycine max
  Clone ID: PAT_MRT3847_135305C.1
ttcgaatagggatttttaggtaacattgtattcgtagattatttgaatgtggtctgtcacaataatactaatgcagcctttgcaacatgaagacgacctttattatttctttttggtggagcatgaaagaccttatctatgtttgctctgtcagatgatatattgtgcgtttttaatcattctatttc

SEQ ID NO: 39099 - DNA, 255 bp, Glycine max
  Clone ID: PAT_MRT3847_135306C.1
gcagaaactccatcaccgtcaacagaatccactagttcatggcgcgcttgcatcgcactagatccatgacgtcgtcgaacagcaacagttgctgctacaacagcacgagccctacagtgggatggtctcgctgttcgacaccgccacgttcatggttgtggtcaccacggtcacgttgcggacctcatcacggcggcaaaggagtcggtctaccaccaacgtcgaggccaaggacacgtggaacaaccaagtagg

SEQ ID NO: 39100 - DNA, 435 bp, Glycine max
  Clone ID: PAT_MRT3847_135307C.1
cccacgcgtccgaaaatcaatgggagactggatgaacaaacaattgcgcattcctgaccctcattcagccaagaaagttgaagcaacagataatagccctgaaagtggaggttttaccatggtaaatgggaatggagaagaccctgttgatggttctgactcccaatcggaagtctccaatgatgtatctgatgtttcaactattgagcaacgacgggcttataaactggaactccaggaaggtatatcactttttaataggaagcctaagaaaggaattgagtttctgatcaatgccaacaaggtgggtgattcgccagaggaaatagctgcttttcttaaagatgcatctgggttgaacaagactatgattggtgattatctatgaaaaagggtagagtgatgcttgaatgtaatgcatgcctatgaagattc

SEQ ID NO: 39101 - DNA, 458 bp, Glycine max
  Clone ID: PAT_MRT3847_135308C.1
gtaagctcggaattcggctcgagctgctacaaacaacagaaagcatcattggttagtggagcagaaactccttcattttgtggatgcttttcaccaatatgttatggatcgggtatgcacattgtattaagataattataaaaataatttctccaagaaaagatttatctgtaaagcacactatatacatgggacatgattaattggcattgaagaaatgatctagcataaacacaaataatagtagagcctgctaatctactaataaaatggcaagttctagtttttaatgccctttaattccttttatgataatcactaatcacacaatggaatcttcccattattatacactcatgcttacatggttctgctttttgggaagggaacctgagcatttttatctgttactacaatttctatggcgggaactatgcgaaagtatgactgcagcaaaa

SEQ ID NO: 39102 - DNA, 187 bp, Glycine max
  Clone ID: PAT_MRT3847_135309C.1
cagaatccaactcattacagttccctctaattttggaatagcttgagcgtacaatcgtgaagtggccgaattcattgggcatgtaggataatgattaagatatacgcgtacatgaggtggtatgagatagatgttcattacgatattactgatcgtatgaggttcgatgtgcacattaacgactaat

SEQ ID NO: 39103 - DNA, 265 bp, Glycine max
  Clone ID: PAT_MRT3847_13530C.1
cggctcgaggcacaaagagaagcattagcactaggagcagcaacaactagtctcagctgaaatggcctcttcagtgatggcatctgtggccctcaaacgctggcctttgcactgttgagaagtcctcagtgagaggccttcctctctctcaaggaagtctgcttgattcagagttgtggccagtggcaagatgatttcgactgagaaacttttttgcgtgaatggtggcatggctttgagggatggaactggtgcatctggcagg

SEQ ID NO: 39104 - DNA, 528 bp, Glycine max
  Clone ID: PAT_MRT3847_135310C.1
attgaatcagatgccaactcttgtgaaaattgtcctgattatactgtcaccagggaaaatgaatcagatgagaaaaatttacacacagaggtaccatatgtctctgctctcatgtctggattcagaaaatactactcaattgctcccaggtcttgtagttacagctcctgagtttcttgatggtgaggatgaagaaggtgatgcatcaggacaagaaacaaactcttcgaaagataaaggaaagcagtcaactgatgatgctatatgttctgctttagctaattttttgttttctttttctctagagtctccagagtataccaaacgtttaagtgttaaagcccctgagttttcaaatgaagatgatgatgaccatgagagtaatagtgagatagcaaaaaatgacccagttcatctcacagagagtgaggaatttagtcacatccaagtgttggcttcatcctatactttggaaaatagtgagaagatagacccagattctaatgataaattctcgaaaaagactgc

SEQ ID NO: 39105 - DNA, 275 bp, Glycine max
  Clone ID: PAT_MRT3847_135311C.1
ttctcgctttcgcccacgcggccggttgtaactcgttcttcttcttttgatgacctgcgtttgtgtttgttttttctctcacctgaaaattgcttgctgcggtggtaactgtggttgtgcgaagttcctgcaagtgcgaaatccgctgcggacgctgtatgatgtacccactcttgagcctacactgtgtcaaccaccaccaagacctttggtatgggagcggcacctgtttaggctcaatttgagggtgctgatatgggtgtgtcctctgagaa

SEQ ID NO: 39106 - DNA, 1233 bp, Glycine max
  Clone ID: PAT_MRT3847_135312C.1
acatgaccacatcactgatgttctgtgcttcatgtatgactgtttcattgctgggctgtgtctcaggcatgactatctcactgctgggctgtgtctcaggcatgactatctcactgctcagttgtgcatctgacatgactacatcattgttgggctgagtttcatatgtaatcagctcatcactttgctgtgtttcagataaaaccgcctcatctgtttgctgtgtttcaggtaaaaccaccctgttgctttgttgtgtttctggtaaaaccacctcattgctttgttgtgtttcagataaaatcacctcgttgctctgttgtgtttcagataaaaccacctcattgctttgctgtgtttcagataaaaccgcctcctcattgctttcttgtgtttcagataaaaccgcctcattgctttgctgtgtttcagatataaccacctcatactagtctgatgttcagaacgtagcacaccatattcggaagtgtctcagaattgaccaactggttgcttggtggtgcctcagacttaggctgctggtcaagtgtagcttcagaactaacaagattatcatcagctggagcttcagagctcgttgatggatatttgagtggtgcctcagacgcaggcttctggtcaagggtagcttcagaactaacatgattatcatcagctggagcttcagagctcgctgatagattgttgaattgtgcctcagactcaacatgctgattgctgtgtgggccctcatcattgcttgattggttgtcgggcagtaacttgggattctctgactcactattaggaagttcttctgcgttgtccaattcatatttgggcaatgtcccttcatttgcatcaccactagaagcttgggtttcagattcagggagtacttctgctttggaactggagagatccttgtcaggctgagactcagaattttctacattatggtcagactgatttttcaaattagccagatcattgctaggatcaaaatcagtagtgacaggagcatttttcacatcaggggtcgcagccactttatcttcttcaacactaagcatcttgattttgatgtgtatcttcctgcttcaccggagagaaagcgagattgggcctggaaatgaacccgagaagctaattggaccttccagttcgatgtcttctttctggtatttggaacctgcttcgtacaggttcggttaggttcgggcggacgcgtgg

SEQ ID NO: 39107 - DNA, 608 bp, Glycine max
  Clone ID: PAT_MRT3847_135313C.1
actaaagtctcactcttcaagttgtgtattccatttttttttcttatacaaaaccaagtttcttgttaaaatacaactattaaatccggaaggagtatctatttccatgagtgaaattatatgatagtccaaagattattgttatgacaagaagcactaatcagcagaacacagagcaaggagatgcagagcaacaaccagacaaagagatagaagagaatcaaaggccaaaaagggaaatcaacaaatctcactgcctcaaggatttcgtgtaacagactaggaggtagtagcttaactggcagcagagtagtggcccatgcaggataattgtcggccaaatattccctttctgttaagaatcgttccctttgctccttgtatttgatttcctccaaagcatgcagtgccaaaatccgctagaaaattgttagagaaacttctatataaacatgaatgatgtattctaatggataagcagaaataaaaattcctttctcacctttcttctagaagtgcctaagcctcgaatgctaagatcttttctcaaaccagaaaaattctgcgcataagtgctaacaagtcataaatcaagtggatcattgcta

SEQ ID NO: 39108 - DNA, 367 bp, Glycine max
  Clone ID: PAT_MRT3847_135314C.1
tgctcccctcctgcgtatgctctgcctttcgggtggaggacctttccagtggctttttggttgccaatttttgagacttgactttatgctgacagttaagtacctccataagctgtccttgtaaatgttacatgtggtagtggactttgcggtttaccctcctctgattgccatagacttggccgtaaccactgctcataagatctcagcctatggattcgaccctgactagacataggtggactattcggttgtttctcttgagatgttccttgtctatgagcttgactgtctgcactttaccacattatgaatgaaagattctgttctaacgaccctggttctttgctgtcgcgccttacagaga

SEQ ID NO: 39109 - DNA, 255 bp, Glycine max
  Clone ID: PAT_MRT3847_135315C.1
gtgggttgatataaacacatgcgtttacggtacaaatgagtctaggatgttcattgtcaaggtgacacactagataagggttcactgccatgcctggcctgagtgtaccttgtctgacacaaaggaaactgctatgggccttgaccaactggaataccctggcagccaagttaatctgacctgggggccgacaagggacctggactatggaaggttatgagcagtttgctcaccgtgttctagatgaatgtgtac

SEQ ID NO: 39110 - DNA, 473 bp, Glycine max
  Clone ID: PAT_MRT3847_135316C.1
ctcgagccgattcggctcgagtatctttcaggaactcgtctgccctctcatgcagcaattatatgtggactggtaaagaataaggtaatacaccctaatccctgttaacttcttggcttacttagtccttatggtagacttgtgttttggcttgatattgacaatttcttattgatagcactgacatgaatgttttacaggtttatccggatttagaagtagcttttgtcatttcagaagaagaatccctctttaacgccttgtccaaaactgttgaattactagaagacaatactgcattaattagtcagtactattatggctgtattttccatgagcttcttgcttttcagcttgccggccggcatgctcctgccaagagaaactgtgagaatgtcaaatcagttggtatgataggatttgctagatcagcctcatctgtccttaatactgctgagttatctattgatggg

SEQ ID NO: 39111 - DNA, 217 bp, Glycine max
  Clone ID: PAT_MRT3847_135317C.1
ttttattttttgagggttgccccggtagaaaacgaacggttcacgggggccaaccctacattcataaagttaaaagtataataacccaaaataacccaagacaaatccacttaaggcgaaacaaagggataaaggaaaaagaactaaaagcttttgcgtgccaacaaatatcttttcttgaactacttaccaaaaccattacaagctttacaataaa

SEQ ID NO: 39112 - DNA, 624 bp, Glycine max
  Clone ID: PAT_MRT3847_135318C.1
ggactcgacgtttcagtctccgccaacgcggctaaaccgattgattcgcttgttcttcccacatatcctccaaaacaaccacaaaaatgaagcacctcgctgcctacctcctccttggcctcggtggcaacaccagcccctctgccgccgacgtcaaggccgtccttgagtccgtgggtgttgaggctgactctgagcgtctcgacaagctcatctctgagctcgagggcaaggacatccaggagctgatctccagcggctccgagaagcttgcttccgtcccctctgccggtgccggtggtgctgccgccgctggtggtgctgccgctggcggtgctgcccccgccgaggagaagaaggaggagaaggaggaggagaaggaggagtccgacgaggatatgggcttcggtcttttcgactaagcgtatcacggtcaagacttggctatttctgcgctcgatggggttcagcggctcaacatctggcaatgaaaggctcacgtgtatggcttggaaatttggggggatcagtgctggctaaaaacgggcgtcatgtggatgaggactatgtgcagcaaaaatgctgtgtgatatccaaaaaaaaatgaaaaggccgtacacctcc

SEQ ID NO: 39113 - DNA, 304 bp, Glycine max
  Clone ID: PAT_MRT3847_135319C.1
gaagacgacagattgagaagcttatgtgggttgattttgcaatggcctgctgaatggatgacatatatagtagaccagttactgtgagttgaggtcgaaatgtcttgttgaattatctagagtgacctaaaaattctgcctgcgagctgacagcgaatgctcaaggctgatggagacttgccatcagaaaggatggatcacggcaactcaccggggtttgtagaaagtccaattcatgtaaataatggttgcgccacgaaaatagaatccagccctgttgctactggataatcaatggaatgca

SEQ ID NO: 39114 - DNA, 281 bp, Glycine max
  Clone ID: PAT_MRT3847_13531C.1
tcgcgtactcgtgcgctcacgcccttcttgggtcagggtttttaatctaaggaaaatgattccatttgttgtacctaaacttattgcatcatattcttttttcttctgagcttatatgttgaacattctattatttgaaattggacttggtgaatgattcaaccttcttccctatctgtttaagcactgcggtgcattgaacgtataggcgtcagggatgttttatcagcctaaccactttcccaattcgtttaggacttcgaggtgagacattctaattt

SEQ ID NO: 39115 - DNA, 264 bp, Glycine max
  Clone ID: PAT_MRT3847_135320C.1
catcgagccgaatcggctcgaggcgaaagctacgagactcgtccaatctcgaaacccgcttcagcatgcagcaccccaacacgtccctgctcactgtaaccgcttccgtaaatctcaagctgctgtgagggagagagagacaggaagggtgaaggggaaaaccaggatccaagttttgcacgataggttctaaaggtcgtccgctagatgctcagatgggatcgactcaacgaacacttccaagagttgggaaacgcgttagat

SEQ ID NO: 39116 - DNA, 441 bp, Glycine max
  unsure (1)..(441): unsure at all n locations
  Clone ID: PAT_MRT3847_135321C.1
cttggccacatgataaccaacaaactctggtcaggttccaactctcgcgaacagatactaactagctatggtgagaaaaagagaaacatgccttggcctttacatcaccaccaaccataacctacatggagttgacaccaacnccgtcttttctgatgccaccactgctgtctctacaatnataggcaaacctgagaagtctcgtatggtcatattgaaggcatcacgtcgaatatcatttgagggaaactaggaaccagcactctatgctgagatagttncaacgggtggcataaatgcagagatgaagatgaagctgattgctaccttcgaacccttttggcaaccgacctgtctatccaagaacacgactttcctcaaagtctttgacgtgaagtgcgatgtcggaccaacgccaaatgttatgccttcaaattctga

SEQ ID NO: 39117 - DNA, 507 bp, Glycine max
  unsure (1)..(507): unsure at all n locations
  Clone ID: PAT_MRT3847_135322C.1
aaaaaaatttaaaaaaaaattaaaaaaaaaaaaaaaaaaaaaaaaaaaaaaaaaaaaaaaaaaaaaaaaaaaaaaaaaaaaaaaaaaaaaaaaaaaaaaaaagggggaaaaaaaaaaaaaaaaaaaaaaaaaaaggcgcatgattgcaaaaaataaaggcccggcatattcacaacaanaaccccatatttggggggcgtgtaaaaacaaagtgttttatgaaaaaacgaaaaaacaaaaaaatcgaaacttgagaaaaacaacaacctttcagaagttggaaaataaaaaaaaaaaccccccggagagccccctaaacaacatctgaaaagttagaaaaaaaaaagggaaacccggaagaaacccaaaaaaaaaaccgcacagtgggggggtaattggaaacccccacctttcaactttataaccctctaccccccaaaatcaaaaaaattatggccattctttaacagccaaaagggggggttttccgggtctaaccataaaaag

SEQ ID NO: 39118 - DNA, 257 bp, Glycine max
  unsure (1)..(257): unsure at all n locations
  Clone ID: PAT_MRT3847_135323C.1
gcccgcaanncggctcgagccttgattatgaagagagattttatatttatgatagcgcatgcaatatatattcagtataaagtgttgcataattaaaaaataacactctattataagtggaattttactcatttctttcgagacaaaaaaaaaaaagactacccccctctattgtagcttgtcaaccctaaaattaattccggaccatttcctgcatgcgtaccatctttccctataatgagtagtataagagcttg

SEQ ID NO: 39119 - DNA, 1383 bp, Glycine max
  Clone ID: PAT_MRT3847_135324C.1
ccacgcgtccgcacttgggttgtggtgctgtgcttgttagtgggaatgagcttaggttggctcttcgtgctggctttgatcccacgaggtgtatctttaatgggaatgggaaaatcttggaggatttggtcttggctgcccaagaaggtgtgtttgtcaacattgatagtgagtttgacttggaaaacattacagaggctgcaaaaagggctggaaagaaggtcaatgttttacttcggattaaccctgatgtggatccacaggttcatccttatgttgccactgggaataagaactctaaatttggcattagaaatgaaaagctgggtttttagatgcagtgaaggagcttcctaatgagctcaaacttgtaggggcccactgtcatcttggttcaacaattaccaaggtagacattttcagggatgcagccaccattatgatcaactacattgaccaaatccgagatcagggttttgaagttgattacttaaatattggtggaggacttgggatagattattatcattctggtgccattcttcctacacctagagatctcattgacactgtacgagatcttgttatttcgcgtggtcttaatctcatcattgaaccagggagatctctgatcgcaaacacatgctgcttagttaaccgggtgacaggtgttaaaagtaatggatctaaaaattttattgttattgatggaagtatggccgaactgatccgtcctagtctttatgatgcttaccagcatatcgagctggtttcccctgccccagcgaatgctgagatagcaaattttgatgtggtcggccctgtctgcgagtctgcggatttcttaggaaaagatagacaacttccaactccagccaagggtaccggtctggttgttcatgatgctggtgcttattgtatgagtatggcatcaacttacaatctaaagatgcggcctcctgagtattgggttgaagaagatggatcagtaagcaaaatcagacatggggagacatttgaagaccacatccggttttttgagggcctttgaagagagacctaattttttggcagatttgtgtgtagctcaggtttggatttcttgctagagaatgtaatgacatttttttttcttgattcctcattctggtttatcttagcattctaatggagacagctgattagaaaaattgaccatctaaagtcaactaaataaaattgagatggaggtcaaaattcatatttggtgaatttaagttgatttgacacttcatcctatattctcctcagtttttagtttcctcagtaaactagcttgtagcttgaaaagtggtggttaatggcagacacaacaatgacaacatctatattggtttttgtttg

SEQ ID NO: 39120 - DNA, 1923 bp, Glycine max
  Clone ID: PAT_MRT3847_135325C.1
tacaaacccggttctcggtccggaattcccggctcgacccacgcggctgcgagaagacgaccgaggggggagggttttgtcttgtgattatccttgcaacacacattgtcttgtcggcaaaatcttccaccaacaacacacagccatggcaggctcaaacattctttctcactctccttcccttcccaaaacctacagccactccttaaaccaaaacgcgttatcccaaaagcttttttttctgcccctcaaattcaaagccaccacaaaaccacgtgctctcagagcggttctctcgcagaacgctgtcaaaacctcggtggaggacacaaagaacgctcattttcagcactgtttcaccaaatccgaagatgggtatctgtactgtgagggcctcaaggtgcatgacatcatggaatctgttgagagaagacctttctatttgtacagcaagccccagataactaggaatgttgaagcctacaaggatgcattggaagggttgaactctataattggttatgccattaaggctaataataacttgaagattttggaacatttgaggcacttgggttgtggtgctgtgcttgttagtgggaatgagctgaagttggctcttcgagctggctttgatcccacaaggtgtatctttaatgggaatgggaaaatcttggaggatttggtcttggctgctcaggaaggtgtgtttgtcaacattgatagtgagtttgacttggaaaacattgtagaggctgcaaaaagggctgggaagaaggtcaatgttttacttcggattaatcctgatgtggatccacaggttcatccttatgttgccactgggaataagaactctaaatttggcattagaaatgagaagctgcagtgctttttagatgcagtgaaggaacatcctaatgagctcaaacttgtaggggcccactgccatcttggttcaacaattaccaaagttgacattttcagggatgcagccaccattatgatagatcagatttttgaagttgattacttaaatattggtggaggatttgggatagattattatcattctggggccattcttcctacaccctagagatctcattacacctagagatctcattgacactgtacgagatcttgttatttccattggaccataatctcatcattgaaccaggaagatcactcattgcaaacacgtgttgcttagttaaccgggtgacaggtgttaaaactaatggatctaaaaatttcattgttattgatggaagtatggctgaacttatccgccctagtctttatgatgcttaccagcatatagagctggtttcccctgccccgtcaaatgctgaaacagaaacttttgatgtggttggccctgtctgtgagtctgcagatttcttaggaaaaggaagagaacttcctactccagccaagggtactggtttggttgttcatgatgctggtgcttattgcatgagcatggcatcaacctacaatctaaagatgcggcctcctgagtattgggttgaagatgatggatcagtgagcaaaataagacatggagagacttttgaagaccacattcggttttttgaggggctttgagctaataatttattttgtaggaaagaaggctggagaattgttatgtatttggagtttgaatctttcctcgtcaatgaatgcatgactcttgtagttctgtttcttccgttctaattgaatgttgactcccatgataggaacagagaataaagttgatttcagttagattttacactgcattcaattgcctccttccaatgtcaatttaataaaagcgcaaatatgttatttattacagctatcaattgaattgtggagcataccttatgtatggtggttgtatatatttgagtcttactgtgtattgtacta

SEQ ID NO: 39121 - DNA, 730 bp, Glycine max
  Clone ID: PAT_MRT3847_135326C.1
cccttttataattaaaattaaccatagttaatataatggggtcggggattaaggtttcgttttctgtgttgtgtttgttagggttagtcattgtgggtgatcatgctgcgtatgctcaagactcaccaacagactttgttaatgcacacaacgctgcaagatcacaggttggtgttccaaatatagtttgggatgacacagttgcggcttttgcacagaactatgctaaccaacgcaaaggtgactgcaaacttgtccactctggtggtgatggaaaatacggggagaatcttgccggaaggcaccggtaacctaagtggtacaaatgcagtgaaattgtgggttgatgagaaatccaagtatgactacaattccaacacgtgcgttggtggggagtgcaggcactacactcaggttgtttggaaaaactctgtgcgtcttggatgtggaaaagtaaggtgtgacaatggaggcactttcattacttgcaactatgctcctcctggcaactatgttggccaaagaccctactaagtagttgcagtgtagcagctagcaagctaccacttcagattgctggcttatatattaagaaataaatcttaacatcatggatttagctacgtgacgactataaattcatggtgtatatgatattttcccgttgtatagtaatatatacatgtgagtacatgactcacatgattaatatataatgatgttagtcttg

SEQ ID NO: 39122 - DNA, 979 bp, Glycine max
  Clone ID: PAT_MRT3847_135327C.1
tttaaggtgatgagagcaaaaaaaaaaaaatacattcatgttgatagagagcaacataggaagtgaagtgtaggtaagtgagagccatgaagggttatgagccccgttcaagctcttcatgtgcagcttgcaagctattgaagagaagatgcataccaaattgtatttttgcaccttactttaggtctgatgagtgcaagaagtttgcaaaggtgcacaaggtgtttggagccagcaatgtgagcaagattctgattgaagtgccagaagagcagagagaggacacggtgaattctctggcttatgaggctgaggcaaggctgagagacccggtttatggatgcattggtgccatagctctgttgcaaaggaagatggtggagcttcaacatgatctggcaattgcaaaggatcgtcttgcgcgttgtcacgctgctgctgctgctgctactactactatcccttctcctgatatcttgcatgccaatgttagccttcccccattccctgacttttgcacttcttcaagtgatttcaatgatatcttttgccacagttcttcgtctcaattattaggccgacatgaaacggtggatgatttcaatcaaatcccatatatattttgaatgttatgaattatgatgtatgcatgtttatggtccccttttgaatgtaattgttatcaatcaagagcagctacaatatgtcatatgagctaatgaataataagaactccaggagaatcaataggtctgaattgaaaactctctctcaacatgaatgtattattgttttgtgttgttgttgattggtgaatttcacggttcctacgctgctatagcagctaggaactggtggaaaatgatgggtatcttggcctttttttagtttcacttttgtaatagcaaacttagcaataggattatttcggttgttgctgctttaaaactcgttgtcggcggatgctgttggatgagaa

SEQ ID NO: 39123 - DNA, 486 bp, Glycine max
  Clone ID: PAT_MRT3847_135328C.1
agaaaagggtccttgcatctaaaacgtttaattgtccacagtttgccccacgaggaatagaaaaaagagcctacacctattttttttttgaaagcaaaatattgattgcttttaagatgcattaacaagagcctctctatgatgaccagctgtcactatagggtgtgcacaacaagcaacggtggtccacgattatgatgatcagagatcacttgttgcgcactggctgattgtgatttcattagcccaccgggagcatgcaaatcgtcgatcctggtgtccactagcaagggctgtgctgatctccatcttatgacctggaaacctatcgtacttgctaataggagcataaaggggtgcctccacatatcctgtccttaaggagttgggtgacccgatcacgcccccaactttaacaagctctgttatcctcttgcgggaggagaggataatgatcttgaccgccttagcaaatatgaattcata

SEQ ID NO: 39124 - DNA, 465 bp, Glycine max
  Clone ID: PAT_MRT3847_135329C.1
gtggagctgtggcatccaaagaagggtacgaagcagattaccgctcgtcatgtagttattgctgtgggtggacgacccaaggagctgacgtgcccgggcggggagcacgcgatttcgagtgacgacattttttggatgaagaagaaggaaccaggcaagacgttagttgtgggtgcctcgtacgtagcacttgagtgcgcaggctttctaaagggcatgggctacgacgtgaaggtgatggtgcgctctattttgcttcgtggctttgatcaggatatagcaagcaaaattagagagtacattgaggtgcagtcgggtatagagttcattcacaagactgttccacagtccattacgaagctcgagaatggccagctgctagttaagtggacaacggaagacggcgaaagatccgaggaagcatttgacactgtgctaaatgcgacgggccgtgccccggacctt

SEQ ID NO: 39125 - DNA, 593 bp, Glycine max
  Clone ID: PAT_MRT3847_13532C.1
gcgctcctctgcttgccatttattcattcctcttttactggtctctgtcttgagtagtttctttcttggtttctttcaaatcaggttgtgcgcagaagaagagggtgaatttcttgctgtatatgtcagtgtactgcgcccagacttattggggtggcggaatccctgaaatagcaaatcctctccaatggcctcagtttcgcaaaagacgacgtcaccctcctcctcttcttgttccgccaccaacgcagccgcccgcattccccgcctagctgctgccccctcccccgcccccgccaccgccgccgccgtgccgcaagactggactgctgccgtcaccgacgtcccccgcatttcttccaccaatgcatctgctgccaagggagtcgttgctgcaatgccaagggcacagtcaagccaccctttggatcctttatctgctgctgaaatctctgtggctgtggcaactgtgcgggctgctggatctactcctgagcttagagatagtatgcgcttcattgaaatagttttactggagccagataaaaatgttgttgcactggcagatgcatatttgtttccacctttccaac

SEQ ID NO: 39126 - DNA, 600 bp, Glycine max
  unsure (1)..(600): unsure at all n locations
  Clone ID: PAT_MRT3847_135330C.1
cgtcttttgcgagctctttttgagattgtcttgaaacgtggctgggcgcagttggctgagaaggctttgaacttatgcaaaatggggaccaagaggatgtggagtgtccagacacctcttcgtcagttcaatggaattccaagtgatttattaacgaagttggagaagaaagatttggcttgggaaaggtattatgacctatcatcacaagagataggtgaactcattcgtgcaccgaagatgggaaggactcttcataagtttatccaccagtttcctaaattgaaccttgctgcacatgtgcagccaattactcgcacagttttgagggtggagctgacgataactccagactttgcatgggatgacagaattcatggatatgttgaacctttttgggtgattgttgaggataatgatggagaatatattcttcaccatgaatattttatgctgaaaaagcaatatattgatgaggaccacacactgaacttcacagtgccaatatacgagcctcttccccctcagtactttatccgtgttgtttcagatagatggcttggatcacanactgttttacccgtttctttcaggcattta

SEQ ID NO: 39127 - DNA, 238 bp, Glycine max
  Clone ID: PAT_MRT3847_135331C.1
gaccactgacgggttcaagatgagttcatcctgttcgatccagacaagaacggccgtatttcctgacctgcgcttctgtcatttgctgaaccgccacccattgaagcgctaggggcaaggattgcctgaacacgatgaaatccggggctccccacgccgacttccattttatctaccattagcacaagcttatcattatacacaagcctgacaaagctaacaatggggaagaaagaac

SEQ ID NO: 39128 - DNA, 232 bp, Glycine max
  unsure (1)..(232): unsure at all n locations
  Clone ID: PAT_MRT3847_135332C.1
atttgaaacaaaatcaattaaaatatggaaaaggtactctaggggggattttttgtcttnncctagagtccgattcctattccttcttgtntgngtcgaaatagaaatattctaaaaatntcatggaagtaaccttttttaaccccttcctgaaaaaatcctatatccnaagttctatttnttccaacttagaanatntctgccatataatattttattgcatataatacgt

SEQ ID NO: 39129 - DNA, 578 bp, Glycine max
  Clone ID: PAT_MRT3847_135333C.1
ccacgccgtccgcaacaagttgttacttgatttcagtctttgagctagattgaagttaggatttgttgtgttgcaatgcttcaggttcaggaagctcagaacaagcttgatgtttctaaagaggcagaggaacaaccgtgtgatgttcaggaagctgagaacaagcttgatgctcctaaagatgcaaaggaacaaccatgtgatgttcaggaagctgagaacaaacttaatgttcctaaagatgcagaggaacaaccagttgatgaaaccaaggggcatgaactggatattactggtgagagagatgtccaaattttggatgatacaaagtcaaacataagaagtggtacttctgccatggatggtgaatcgataaacatatctggttcaaaaaggagaccacattctgcaataactaagaactccaaaagaggaagtgcaaaagccaatttggaaactgacaatttagagtctgttcaggaaccaaaatcagaaatgcagttgaatactgtgccaaggaagaagggccgtaagcctaattctttactgaatgcagaggaaggctatgatcactcatg

SEQ ID NO: 39130 - DNA, 465 bp, Glycine max
  Clone ID: PAT_MRT3847_135334C.1
gaatatgtatattaaaaaaatttgagtaactcaaacaaaatttacagggacatgatgtagtaatcctatacaacaagagtagctaactaattttctttttgggtttcctcgcatgtattacttttcatatataaccctgttcaagccaggtcaaatactaaatgtagatacttttttcatctaggattcaaatcataattctccacatcaaaagaaactaaccccttccgcaagaacaagagtaactaactaattgtgtgaaaggctctccattttataccaatttcctcaacaacaccctaaaaatgaaccaaaaaaatggtacagcttctgttatcttggccctgaaagcctaacagcagagagattggcttcactgttacaatctgatggtcctgaagaagtgccaacctcactagttgagtaaaaccgagaaccaaggacagagcaaattgctggcttatg

SEQ ID NO: 39131 - DNA, 2096 bp, Glycine max
  Clone ID: PAT_MRT3847_135335C.1
aggcggagaagttgttggacaagatgattgagaaggagattgtgttgcggcagaagaatgcttatgagacagagctttttgagatggagcctagtgcttataatttgatgattgggtatttgtgtgagcatgggcggactggtaaggcagagacttttttccgccagttgatgaaaaagggtgtgcaggattcggtttcttttaataatttgatatgtgggcactcgaaggaaggcaaccctgattctgcctttgagattataaagatcatggggaggagaggggttgctagagatgcggattcctacaggttgcttattgagagttacttgagaaaaggggagccggctgatgctaaaacagctttggacggcatgcttgagagtgggcatctaccggaatcatcgctttataggtcagttatggagagtttgtttgatgatggcagggttcaaactgctagcagagtaatgaagagtatggtggagaagggggtgaaggagaatatggacttggtttcgaaggtattggaggcccttctcatgaggggtcatgtggaagaagctctgggacgaattcatttgcttatgcttaatgggtgtgagcctgattttgaccatcttttatctgttctttgtgagaaagaaaagacaattgctgctctcaaactgttagattttgttcttgaaagagactgtatcatagatttttcaatctatgataaggttttagatgctctcttagcagcagggaagacactcaatgcttattccattttatgtaaaattctggagaaaggaggatcaacagattggagcagccgtgatgagctgatcaagagtcttaatcaggaggggaacacaaagcaagcagatgttttgtcaagaatgatcaagggaacagatggaggtcctccaaagagaggaggaaagagaaaaactactgtatccacatagtttgttctctcttcattttcttgtgttttagaggtgagacaggtattactccttgttgttttggttttggttgtaacaagttatcttatgaggaagagaattcatgaattgttctttatttcaaatccaaatttgcaactcctgtgctgagtcttctgactgactccaacattcttttggttttggatcagagatttgttatgacactcatcacttgttttttattttacttttttaatattgttatcagtctactcctatcaaggtctccatttatgttttttatatttaactcaattctttcgaataatgtaacagtgagaagttggaactgaactgtagttttcaatcaaacttttctcgactttacaggattttgaatctttggatttctctttaattttgcttttcaaatcctgttttgccatgttgaatacacatgatgctgaatccatcccgtaccaagaactgccatcatcagtctatcctgctaagtgctgacaatacaaccaccagccacctggcattatatctgctctttagcctaagtcttgtgctgtgctgggcatttgcagtgtttgcttgttatactgactgagattctaagatctgccacttcccagaatcagctatgcccttggagagcaagatgggattcattttttagtcctgctttctacagctactggacttctgttttgcaggttctataaacaatgaagttgttctgctcacaagctaagaaaatctgggtgcagagataattgcattttccctattttttgagaaattaggtatgtctgatcccacaagtttcacgataccttctgatcctgtgggggattgccgggaatcttaaatgctggaatcggtagtcttccacaagttgggcttctgcaacgagcgtaggtggtccaaacctctctgttctttgttgttctcagttgaaacttacatcgatcccttacctcaaaacaaagtcactaaactggaataatttccggtaattgcattctcagtagatgtctaaaacccaaaacaagggattcaagtcatcttatgccatttgtattgagaggttgcagaatgtttgacggttgtgaagataataatggcatggtaaatttactttgtggatgc

SEQ ID NO: 39132 - DNA, 423 bp, Glycine max
  Clone ID: PAT_MRT3847_135336C.1
aagatcaagagcatctgccgcggctgctaggccgcgtcggtgcgggcagggcgcgacagctcgccccgcccgcgtttgctttggccttccgccccgcgctcgcgcagccccgcgcgccgcccgttgcgccggggttcgtccgcttcggcgagctgctcgtgcacagttgccgtggtcccccagtcgttacagccgtccgggatgctctccccgtaggtgaccggctgccccggccccccctcccggcggccggcgattaataaatataatatataagtaaaatattctaaaaaagtggcgccctctggtaaaaagaattaattcccgtacaaaagggaaaattaaaaaattattattcctatttttacccataaaacccaaaggtaagccaatttacctgatgattaaaaattacttaccatt

SEQ ID NO: 39133 - DNA, 426 bp, Glycine max
  Clone ID: PAT_MRT3847_135337C.1
agaatccctccctttctggctttctctctctaaaactatcattttctacaccgaggctcccatccttccgataggcaacacaaaaaccaggagcggaggctatttctccatcttaactccttctaacaaccctttcttccactccttcatcaacaacctctcctcgaccctcctacactttctcaaccatcaccttccgttgtcaaaactctataaccaataaaaattctctaataccaattacttctctaaatccaccctccttttcaccaaaaacttcatctactttcaagaaactactacacccatatttcactcattctcaaaaaatatctcctcaccaatcctttttctaatcatactcctctttaaaaaaactcccttcttgatcatactctaccttttattaccctcataataaacaca

SEQ ID NO: 39134 - DNA, 474 bp, Glycine max
  unsure (1)..(474): unsure at all n locations
  Clone ID: PAT_MRT3847_135338C.1
tagggaatttggccctcgaggccaagaattctacctatctcttataccttagattccaacttctaaggttttcacataatctcaaaagtaatgtaatgcctccaaaatgtgaaggcacacaccatggctaccaactctagatcatgcgtaggataaatccttcaatgagtcttgacctatggaagaacataggtcgctacttggcctcctacgagcacttctctaaacttaaaacttacttcatttattttactactccaacaaggacctacttgactaaggtagcactcaactggttacgatgactgacttctctatgaaactcagagtttactccttgcaaggacctcaccaaagctttaactcactcaagtcatctctaaaaaaggttaaggttaactcaaggaacttttgggataacttcttggtttgactactacatangggtgtctaatcctaattttacgtttcctc

SEQ ID NO: 39135 - DNA, 193 bp, Glycine max
  Clone ID: PAT_MRT3847_135339C.1
gcgggcggcccttattttcttttttttttttttattttcttagtttttatttatttatttattagctcccttcctaggctcacatggcactaagatgagacgttaatcctagcatagatagctagcaagagcatccatcctggccacacacatgagaacaggaggcagcccgggaagaacattttagagaccc

SEQ ID NO: 39136 - DNA, 412 bp, Glycine max
  Clone ID: PAT_MRT3847_13533C.1
aattcggctcgaggggatctctgttgttccttttctctttctctctctattttctcagacacacactcttagatacacaaaggccattatacggcagtagacacaaaatttcggtatctctctatatttggggtcacacgtacatacataggtaatggcacaattacctcctaaaataccaaccataccccagaattggccatctttccctcaccaaagggtaccctcaatggccaacttcaaccccacaaccttcactaccaccgccactacgactcccccgccgccttcatgggtcgacgagtttctcgacttctcgtcggcccggcgggggggcccaccggcgatccgccagcgactccatcacattcctcgaggcgccttttctcgaggaatgtcgagccggattcga

SEQ ID NO: 39137 - DNA, 451 bp, Glycine max
  unsure (1)..(451): unsure at all n locations
  Clone ID: PAT_MRT3847_135340C.1
gggtngtnnnnntttttttttttttttttttttganatttcgggctcatcgcaaatgttttatagagagccgtggggacccgcaaactaccacatgtccacggatgttcttgaaaccatttataaattgcacatacccttctgatccaggttagatgcgggaaaaagcttaaaacaccaaacaattttcatgaaaggggtacttagaaactaaaaaattgtggcccacttatgttttccccctcatcccatgaaagaattttttaagttgcagagatgtgcattatctcccagttaccccccagttttcacaattttgtaggaactcccaataaagggtgaaggaaccgcggatgattcgatgatgaagtatgcataactttgcttaaggccatgaaacggggccttcagaccttactatttatgaagcttttcaaccttgacaagtgggg

SEQ ID NO: 39138 - DNA, 533 bp, Glycine max
  Clone ID: PAT_MRT3847_135341C.1
ttccaggaaggtttcccgtcatcactgtatgacgtcctccttctttgggggggggggggggaaaacacaggggggggggtaaggaatcaaaacaaaagtatcggtaaagagtagccaatcgatgccatgaaagaagcaaggaagaacctaggggaatggatagtatacaccgaatactgtaataggaaaaaaaaaaaaaatggagggctaagatatcgggagcagcaaaagcaattaattgtgagaggtataaacagaaggaaagaaggaataatagacaatgtgaagtggatagaaggagtaacgttccgcagagaaagtgatatgttaatacgaattgtagaggataaaagtgtaccgcgacggcaagggacaagtcgcgatgaggccacgtagcattgcgggtacagcggaatgttagcgtagggggctaggtacaaggcggaatagcgcgagtggcctaggcagtgggcggggtccgtcggataggggttgcacatggtattggcctggcccggggtatcaggccgggt

SEQ ID NO: 39139 - DNA, 340 bp, Glycine max
  Clone ID: PAT_MRT3847_135342C.1
ccgggccgacctacgatgttgaagccgtaggtacacatgcagggaaagtcatagatcttctaacgagttgccttgtttcatttcatgggttgtctctcgtttcatttcttgcggataatcatctgatattacgaagtttagtcaccttgcataaaactaccagatatgcaacagtgttttaacagatcacggccgttgagatcgattcttccaacaattgccaatgacttttagtgacatcggatatatacatgtatccagcttttaaacatcgttgatttagtgactacacgcaccatcttagtcagactttcacaaggtataccatgcattccatact

SEQ ID NO: 39140 - DNA, 399 bp, Glycine max
  Clone ID: PAT_MRT3847_135343C.1
cagggacagcgttactggtactactacatcatcgacggctacgacgtctcgcacgaccccgccaaggatcacaccaccgagcccacaactggccgcaagcttaacatcatcgatatcccggctgccaaatcgacctcaaagacaactacatccagctcagaccgcaaatcacgccgcgtctcgaccgcttccattcccaagggccgcggccttagcccagagcgtatcgtcgcaccaaagccacaacgcccacacgagacgcgccaggttatcaacactcagtacgacaagacaacacttgaggacctcaaccgccgcttcgccaagcagcaaatcgcagagtcgtccgacgaatcagactacgactctgacgaaggctccgatgttccctcgctcact

SEQ ID NO: 39141 - DNA, 268 bp, Glycine max
  Clone ID: PAT_MRT3847_135344C.1
tcgaccttgcgtccggaaatactgataaatcggcgattttaggttttcgtaccttaaaaccggaaacaaaagcaatcgttacttgatttcaagaatcttccaatttcttcctacttcttggtgtacgatttcttaagggaaagaaaatcactctctgtgctggccacagacttcgtgaatcactttcttttccactcttatgatatatgttgatcactctattattttatataggactttcgtgttaaatttaaatcttttatgtttc

SEQ ID NO: 39142 - DNA, 529 bp, Glycine max
  Clone ID: PAT_MRT3847_135345C.1
gggagaatatatatataaacatgatgtgctaattaaggttattttttaaatataattttggagaaattttataaaattcatttgataattacattgtttagttagcaaaaacattatagcatactcaaatttaacaaattgcaaatgattgttgtctattcatctttgagtctcacatatgaagtcactgcaaatttagctaaagttattcataagtaaaagtgagaaaggtcaagtgtttgtgttatattctccattcaacaagaaaaaaccttcaatatccccttaacatgatttatatattgtataataaatgtttatgttaaatgtcaaacatagcagattatggccccattgtaagcggtaaaatagcagattatgcaggtcgtcgagttgtaagtcaaagtcaggctacacttaattctaatttcaatgtttctattgctcacctttggttattttgcattctgacgtgcaagcaatgggtttctgagaggttctctgcatcttgggatcacttatcatagca

SEQ ID NO: 39143 - DNA, 385 bp, Glycine max
  Clone ID: PAT_MRT3847_135346C.1
aaaacccctattttttcctttttcccaacacacctactatctttagatcaaggtcagatgatatgataacaaaacctatcttccactcatcacaccaaatcgaacaaacaccaccgcggctaagccccattattatcaatacttatgccaatagatacacacaacgacagggtgcaaaaacgacaagccgcatcgcatatccatttaccaggcgtatgtaagaagcataccgctcagctagacgctaacaaagcacttcgcaaaggactccgacgagacctaaccccatcaccctgcccgacaaacacaatggacagcctactgtccacccttgcgccgccaacgaagatcccaacatgcaatagaggtgtttggaaaaaatgaa

SEQ ID NO: 39144 - DNA, 572 bp, Glycine max
  unsure (1)..(572): unsure at all n locations
  Clone ID: PAT_MRT3847_135347C.1
tacggctgcgagaagacgacagaaggggggtctccgttcagcgccaaaacgaacaccacctaaccagctcgtgattcttcccgccgtagatctgttccttttcgccgttcctccacgggcgacgacttcgaattctccgacaaaggccctccttccttcgatcgcgtgggttcaaaaggggtcaacccagcattaattggtctccttcttgttggtgggttgctgttgatattcctcggtggaaattatgtgctatacacatatgcacagaagaccctccctcctagaaaaaaaaagccaatctcaaagaagaagatgaaaaaggagagactgaagcagggcgtgtctgcacctggagaggagaactttttcctcactctatattctgtgatggtaaattgtgctcttttagaaaaaatttctcggtctgtggtctctggagtttggtaatctttatcttagtcatgtgttttactgactgaaatctcgaccacataaattaagtactttgtcaaaatatttggaacaaattatttcgtgcgtgaaaaaaaaaaaaaaannnnnnnnnnnnn

SEQ ID NO: 39145 - DNA, 283 bp, Glycine max
  Clone ID: PAT_MRT3847_135348C.1
aaaaaggggaaaccaggctattaattttattagcctattttatgatgaatcgggggagtcaacccctccctaaagacaaaaaaattggaaatttataaatttggatcaaataacaggggggggatcattttcatcccgagggggggtaggggggggaaacagcaatggttgaacatgttcataaacggggggcgtggtttgatcatctccatggcgaaaaaaaactggggaaggtctacccctggtgggagaagccctcttaactgacaaaggaaaattgggg

SEQ ID NO: 39146 - DNA, 1005 bp, Glycine max
  unsure (1)..(1005): unsure at all n locations
  Clone ID: PAT_MRT3847_135349C.1
atttannnnnnnatnnaggtgacatacactgccaaaaagatagactaatccaacaaagaaggtaaaaaagaattctcctactgtgtgctttctcgtttaagcctcagcttccgcttcaccttcctcctcatcaaattctccctcctcttcagcagtcgcatcttggtattgctggtattcagatacaagatcattcatgttcgattcggcttccgtgaactccatctcgtccattccctcaccagtgtaccagtgaaggaaagccttgcgtcggaacatggctgtgaactggtcagaaatacgtttgaagagttcctggattgcggtcgagttaccaatgaaagtaacagacattttcaatcccttgggcggaatgtcacagacagcagtcttgacattgttgggaatccattcgacaaagtaactcgagttcttattttggacgttcaacatttgctcgtcgacctccttcatactcatccttccacggaacatcgccgcaacggtaaggtaccttccgtgacggggatcggaagccgccatcatgttcttggcatcaaacatctgttgggtcaattccggcaccgtgagggcgcggtattgctgagatccacgagacgtcaacggcgcnnngccgaccatgaagaagtgaagacgagggaagggcaccatgttcactgcgagtttcctcaaatccgcattgagctgaccagggaaacgaaggcaggtggtgataccgctcatgacggcagataccaagtgattcaagtctccgtaggtgggtgtggtaagcttcaatgtcctgaaacagatgtcatagagggccctcgttggtcaatgcaaaaggtctcatcagagttctctacgagctgatggacggacagtgttgcattgtagggctcgactactgtgtcggacaccttgggcgatggcacgacagagaaactgcacatcatacggtcagggtattcttcacgaattttcgagatcaaaagggtacccata

SEQ ID NO: 39147 - DNA, 402 bp, Glycine max
  Clone ID: PAT_MRT3847_13534C.1
ggctcgagccactctccattcaaaaaccaaaacaaaaaaatcatggctttctcaatggctatgcattaccctgtctctctcttacaactctgcatgcttctgctttcattcttatttatcttctacatatccacttgcttcatggccaaactcaaccctaccaccgactcactctaactctatttccctctcacctcgatccctctatccacagcaaaacctctaaatactaacccgaaactcataaccctttcatcttcttcttcatataacataaaatcctcgatcatatactccatggctctggtggctactctcccaatacgaacccctacacagacgcaacaacatggcgttggacaccgaaagccaactctcgttgattcagatccacaacaaaac

SEQ ID NO: 39148 - DNA, 416 bp, Glycine max
  Clone ID: PAT_MRT3847_135350C.1
caagaactacttcatgactgcttgccatgtagagacaagacttgcagaggggcatgctacacaagatggcgcacagagcactgcattggtgccctcctgctatgaatcgttcgtgtagtcaacattgcaaagaatacttgttcatcacctatggctacgaacctctggtagaagtcctagacgccgagatgtagtgactcctataacaccacagtgttgcagagcgtgaacgatgatgatgtcacagctatctcaacaccgcattcaacagaatactaccttgataataacaggctcttattggctataaatatgaattccacggcggtcgcctactagagaactacccatcccggcatgtaataacatatctgaacctggaagtgtgacatctctacctatattgagaagggtta

SEQ ID NO: 39149 - DNA, 336 bp, Glycine max
  Clone ID: PAT_MRT3847_135351C.1
ctcatacttaaagcataaaaccagtcctaaaccttctcctcctatctccttctcttcaaacccaatcatattggcatcaacctagtgcggttgcgatcaaacaaaaatatttaattcaataacccatgtaccccataagagtgtccttagtatcaatcaagatgacaatttcttcttttttcttctctcaaacgaaaactccatttccaacccttatatcaaaatagcccttactgatccatttgtctgttaatctgagccattctccccataacactatttctctgaagacacactcccttctttaactgcttcaccttcctaccatattaacaa

SEQ ID NO: 39150 - DNA, 362 bp, Glycine max
  Clone ID: PAT_MRT3847_135352C.1
cttacataaatgccacacaagcaaatttaaggagcccgaacatacttacacaaaagaagatatattttgcatattatattgccctggaagggaggggggatcaacacattactcatattttatttgcggctctttttaaaaaaaaatcctttggggtctgaatggacccttgtttaatgcggctgtttttttccttagggtgaaacacctttcccattcttaaatgaagcctccccccaaattgggtgcatgggaggaaaacacctttttttttcaagcccctgtggtcaccctggaaatcccacccggtccctggggggcggccatctttcttttataagaggtttattaaagcatgggac

SEQ ID NO: 39151 - DNA, 465 bp, Glycine max
  Clone ID: PAT_MRT3847_135353C.1
tcctctacacggccgcccttggtttttttttttttttttttttttttttccaagagggccactttttttctccccaacaaacaattacaatcacctttctcctgcctaacaggatttcacttcacggctgaagataaagtggctctgtataagctgctttttcccaaagctataaaccacaagggggggcagactggagctttatttttcatcattgccataaacacttgggccttctttcttggataaaatatatgaactcaaccttgaccaaccgggactcgatggaaaccataggacctccaatccttgagctaaaataggcaccacccttttccctttgccataggctacccgtcggcatatatgaccccttccttccgtgggtacccctagcatggaccacgttccaaaacctatacttaacccttcactgcttgacacttggtgattccccatgaccct

SEQ ID NO: 39152 - DNA, 259 bp, Glycine max
  Clone ID: PAT_MRT3847_135354C.1
ttcacgcgtacggtgctgctatctacgtggcctcagattttgagggtgccatacagggtgctccagaaggcgctgtttacctactgagagacaccgtttggcttgaccagaagaagcaacttaagttacttcaacaccagttttgtgttcaacatcatgcatgagacagccccatggctgagagcgcttgattttgatgtcagcgttgtataccactctccaacatagtagtgcaagcaagaggattggcattgccaat

SEQ ID NO: 39153 - DNA, 521 bp, Glycine max
  Clone ID: PAT_MRT3847_135355C.1
gttggaagtggaagtggaagttttttgaagtttaattccgatattactccggcgacggtttgattatctcgcgcgctcccgttgcttctcgtttccctgaataccttcagtgttcagggtcattagggattcaagaaaaaaaatgtgcagagttagcctgtttttccattaatttggtatccagagtttaagcgatgagtccagcatttgaaaatgtacccctttgaagccaatacacaatcccatcgccttcagaaaacaatactttgaggggatttggtggaggaagagatcaagtgtcctcttggaatgccctgctgccattctcataataataataataataatctgaatgagattgtaaaaaatggctgtgaccattgaccgacatcatggattgaagccatttagccgatcccagaggtgcaagctccaatcctacggtcaccttgatcccaacatcattgaacttaaccaaaactggtggtggtgctgctgctcttttcttcttctcaacactc

SEQ ID NO: 39154 - DNA, 179 bp, Glycine max
  Clone ID: PAT_MRT3847_135356C.1
gggtcaaccacgcatccgattgcgcttactttgtacactgctgggaaagatgttctcggatactgcctccaatgtggtgctcactaacgatataatcacacttgctggtcataggagtacccacgatgcagtgaagaatacagttacgcatattccgaaactcaatgaggccgctgaac

SEQ ID NO: 39155 - DNA, 1234 bp, Glycine max
  Clone ID: PAT_MRT3847_135357C.1
atcatggtgtttttttttcccctaaaaattaattgtcaggttctttccatgttgttggacaggaatatgaacgttgacatagtgaatcacaataatcagaccccgttgatgtatgctgcaaagcagggaaagattgattgtgttaaaaagcttatccaggctggagcaaatgtattcatgattgattctgtacatggaggaggttgcttgcacgatgcagcttctcatggccacgtagattgccttaaagccattctttttgctgctcatttcacagcttttgaagattctcggggatatttaagatttgtcgactcgagagattttaacggttttgccccactgcatcttgcagccctcaaaggacaatctgaatgtgttgatgcccttttagacaatgatgctattctttgtgctagaactagtaactgtggaggcacagcacttcatttggctgcccgcagtggttccttggactgtatccggattttgcttgctcggggagctgatagacttcaatttgattatcatgggaatacaccatacacaattgccctggagcacgggcaggaggaatgtgctgccctgctaggttctacgtcgggatcatcacttgtttggccaaaccatttaaggttcatcagagagcttgataagaaaacaaaggccttactggaaaaggccttggtagaacttaacaaggagaggcagaaagccaaaaataagccacgatcatcacggaattcggagagaaataacaataatattgcctctatggccggcaaaaaggagttatgttccatttgctatgaccgagtgtgcacatttgtggtcagaccctgtggccatgaaatgtgtgctcattgtatcatgaggctatgccaaaagaaaagtgatattgatgcacctcgctcttctaattctaaaccagtttgtccattttgccgtggtgacattgttcggttacttgctaagactaagtaacaagagcagtgaatcaagggaggagtgaggaaccttgaagactaattaactactgtattttttcatgaaggcatcaaggtttcttaataggtggagatttagaatgatacacatgctatgtatttctgctgagagattattaggtcgtatattgaaataaaatttaaatgttatataagcattggctgtgactattaatatagagaacctaacagtattttcttttgtcacatcaatttatattttcaac

SEQ ID NO: 39156 - DNA, 1896 bp, Glycine max
  Clone ID: PAT_MRT3847_135358C.1
cgccctttttttttttttttaggtgttcaaatctcaaaacaacccgtaaaccgtaaggataaacaataatgtattgttgcggtatgaactacgtatgatttatgaacaaatgtctgatggtacatgttatatggacatttgaggaaaataaattgaacaacaagaatactgaattcctattactaaacttacaagtttacactaattatcaagataatataacgtcaataataacacaaacggcataattcttgggagtttcctccgtcaatcaagttggtgtgtctgcaccgtcccatcagctccatggacgagaactgccataacccctcccgcggtcttggaaacctcggggacctgaaggtggaggtggtgcaccacgccccattgctgctaattcaggactcactttctgtccagcttcctcgagtatggctataagttccttagcaaatctggcattagcagctgtgaagtatgtgtatgcagttccttttgcaccagccctccctgtccgcccaatgcgatgaacataatcctcaagtgaccccgggaagtcataatttacaacatattttacatccttcacatctagaccacgggctgcaacatctgttgccgtcataataggactttttcctgatttaaattctgagagcacccaaactctttctgcttgacttttatctccatgaattgaaagtgcaggccatccatccatgcggagttgcctagtgatttgatcacatccttttttggtatccataaatatcagtattcggctgccatccatgatgtcctctagcaactttaccaatttatcatatttctgcttttccgaaacaatgtcaacatattgccgtattgcatggttagcttttaaatcagaagagcctataattactttgtatgggttataaaggaacttccttgccaattgttcaacctcctttggccaggtagcactccaatacaaagtttgacgatctggacgaatctgagagacaatcttccgtagctgaggatcaaaccccatatccaacatcctatcagcttcatccaatacaaggtatgtgaccctctgcaagttggtatgatttgactcaagcatatcaattaaccttcctggagtggcaattacaatttcgacacctttctggagatcacgcacctgaggtcccttaggaaccccaccatagatgcatgtactcttaatcctagatgatgcaccaaatttagtagtctcttgttgtatttggacagcaagttcacgagttggagccaaaactagcacaattggtccatctccaggatttagtattggctgagcattaacatgcacaatggcaggcaacaagtaagcaagtgtcttccctgatcctgtttctgcaattcctatcagatcacgccccttcaaagccatgggccaaccttgagattgaatgggtgtaggttcagtaaagccagcttttgtaatttcttgcagtacatattctggaaaaccagcatcgtgaaaggtcttgacaggtttcgggatatctcgcccttcaacagttatttccctctgcggctgatactcattaacttcagcatctgtcattgcccttacagctggtgactcaatgtagaagtttttctcaaaatgaggtaaaccatccaaactgaggttcctctttggtgacccaccatcatcataatccctcctgtttgatgaagagtgttgtacagaaccaccaaaccctgtaggtgcacctagcccagaatcactcctccgatcacgataggaagttgggtcgccggagcggctgtcgtagcggctcatgatgctttttcacgaagtcgaacacagtgcttcctcttcttgctgcccccttctgtcgtcttctcgcagccgta

SEQ ID NO: 39157 - DNA, 322 bp, Glycine max
  unsure (1)..(322): unsure at all n locations
  Clone ID: PAT_MRT3847_135359C.1
aatcatgcctgaatcaatagaaaaacatttactttannggaaggangnggacnacnngancnnaaacaccnacanaaggnggangaacacnnccnccangaaaggccgacgagggccaccngangaaggacccacggaacacgacgaagcnccccggccaacagcacaggggagagccaccaacacacggccaaaacggacagaagacaacacagacccaaagcgaaccaaaaggggcaggaggagaacgcgcccccggcacaccaagagcgagaagcggaacaacccaaagggnagaaaacgcgccaaggagcacaccccg

SEQ ID NO: 39158 - DNA, 351 bp, Glycine max
  Clone ID: PAT_MRT3847_13535C.1
gacgcatcaaacactcaatagtagtgcgtcttcacttcttacattctccgccaccgccaccacaactaccaccacggatggcggcgacagcgactgctgaagcgaaaacctactggtgccacgagtgcgacatgagcgtgtccctgactctcccaacctaccctgtgctctgccctgactgtcacacccactttcttgaactcatggactccccaagcctttccgaagaaaacgacgccgaatcatccctcttagatgtcgtttttcaagacgcactcttactactcaaccctaaccctaaccgtaacactaagccacattcctgcaaacccgtttccctcgcctgcctcc

SEQ ID NO: 39159 - DNA, 690 bp, Glycine max
  unsure (1)..(690): unsure at all n locations
  Clone ID: PAT_MRT3847_135360C.1
aataaattctactactccattaatccattatatcttggttttggtacatggttagatagtagtatattaaaattaattaattaaaatgactgcggtaatagtagtttgaagtggtaaagaaacggacaaaggtgaggggtgattccgtgttatctacctcttcctctattccatcacctatcatcgtcaggagtatttacttgttggctcaccctcgattagatggttcctctctctctctttctctctctcctgcttttgtttgccagtggcgcattgcaggaaacgagggggagagtttcattgggaaggtaaacccagcctttgtttgcaccattccctcaaaccatttacatcagcatccaccactctctcctccctcctttctgctttcttctttctatttcaacaacccaagttatagattatttatgcgtgcgtgcatcttcttttttcctctcactagtgaatgctctagtgggtggtagtaagttttaagagactaaacacccgtttttccaaggaaatttgtgcagactttgtcagggaagttacagtgggaaaaaaaaccctcttccacttcatgtaacagacacacaactacagcactagatcactgttttggattttttatgtaaaaaaggcctgcaacttgtagcataaaatccggnggtgccctgaagtaactca

SEQ ID NO: 39160 - DNA, 663 bp, Glycine max
  Clone ID: PAT_MRT3847_135361C.1
cccacgcgtgcggcgatgcatggaagaactgcagtgtatcattgtagttatgaatcgttctcagcctaaggtactgcgcttgaatttgattggaccacagaagaaggaaggtgaataagcttgtgcatcaccttatgagcatgatgacctgcctgaaaaccgaaccaatatattgctggatttcttaggttctattaaaggaccagctgtaactcctactacgtaggcctgagctaggtgcaccattcactgcaactgaagctggtacttgatcagattcaagctctgatccatgatctttaccattcttgatatgagagatgaatggtgaggtcactatagaggaaactatcaaggaaagtgatgatcttgctgatactaattgagacacagaatgcgaatgtttatccacattttcagcccgcatgagattccaaccatggataacacatttgcttttacatcaaccatctgcacagtgcatctgaagagagatccgagatgtctcacggtatgcctcacgcatcttcaatcagagctttcctagagatgtattctaggcttgatagaggagctggattcgatatctcagcctatagaaatgacgtggatttcagagagaatttaagagaatctgtagcattatctggagacgccccacct

SEQ ID NO: 39161 - DNA, 150 bp, Glycine max
  unsure (1)..(150): unsure at all n locations
  Clone ID: PAT_MRT3847_135362C.1
gaacagtgcaagtnccaanccttaccctacctacggctggatccttgcactcntccntacttgccgacgcactatnttcaaagtactcgggcgcgaaantttcctgcagtactggcttattccgaatncgacgggcgtggagagggntga

SEQ ID NO: 39162 - DNA, 442 bp, Glycine max
  Clone ID: PAT_MRT3847_135363C.1
tatctgggtctaatctaaatctagaatgcacgtatattttacttgtaatactctaaatttactgaacttttcaatatgcaacaaaccgctcctacaaatttgccatgtttagtgcatgtttagattaaagtttgcaaatttaagtttaatcttaagcttgaaaaaataacccaagtcttatttcttcaaactgagtttcaaggaacaattttgatgtgcaaaggtacttttgagagtaaccaaacataaacatagtcttggtgtttcaattttaaaatattttttaaacctaaaatagttacaatttttaattttaaagtttagtttatatttattgctttgggcttaattccaaactcaggcccaaattcaaaataaatttgagctggacacaatcctgtggactgtgaattgtcaacagaaagcccaggttgagttcttg

SEQ ID NO: 39163 - DNA, 2787 bp, Glycine max
  Clone ID: PAT_MRT3847_135364C.1
atccacgcggaagcccatctgatcatataacacaacacactgcaggcttgttgtgttgtgctgtgttcattctgaaactttgatctatgtgagacaagttgtggctaccctgcaaagccagaaaaaatggtgccagagaacttgaagaaacaacttgctttggctgtgagaagcatccattggagctatgcaatcttctggactgattcaactacccaacccggggtgttgagctggggggaagggtattacaatggagacattaagactaggaaaacaagtcaaggagtagaactcaattctgaccaaatagggttgcagaggagtgaacagctgagagaactattcaaatccctcaaaactgtagaagtcacccctcaaaccaaaaggccttcagcagcagcactgtccccagaagatctcacagatgctgagtggtattacttggtttgcatgtccttcatattcaacattggccaagggttaccaggaagaactctagcaaagggtcaacccatttggctgaacaatgcccattcttctgattgtaaaatttttagccgttctcttctggcaaagagtgcatccattgagacggttgtgtgctttccgtttagggaaggggttattgagttaggtactactgaacaggtcccagaagatttgagtgtcattgaactgatcaaaacttctttcttgaatagtctgcatgccaatgttcccaataagtcagtagctacattgaaatcaaggaaccaggaaggtctttcttatgcagcatttgatcataatgactataatgttaaatcaattccagaagttgggtatgaaatagccaacacaacctctcctgatggtagttcaaatgcattccaagccaatcaaccgctagatgaaacatttatgattgaaagtataaccaatggcacttctcaagtccaaaactggcaagttattgatgatgaattgagtaactgtgtccataactccatgaattccagcgactgtatatcacaaacttttgcctgccctgagaatattgcttctgcccccaagtctaacaacccttctgatccttgtgcccgaaattttcaaaagtgcaacaacccaaaaatgaccttagtggatcctcgaagtgatgatttgcactatcagagagttctttctacccttataaaaagttctgaccagttacttatgggaatgcatttgcaaaaatttcctcaggaatcaagctttgttagttggaggaaagaacagccaatggattgcaaatggccaagagcaggaacgtcacaaaagttattgaagaaagtattgtttgaagttcctcaaatgcacttggatgggctgcatgagtctcaagaagagaatgactataaagagggaatgagagtagaggctgatgaaaacggcatgaaccatgttatgtcagaaaggaggaggagagcaaaactaaatgaaaggtttttaacccttaggtcaatggtcccttcaatcagtaaggatgacaaagtttcaatactagatgatgctattgattaccttaaaaagctcgagagaagggtaaaagagttggaagctcacagggtggtaacagacatagagactgggactagaagatcaccacaagatacggtggagaggacttctgatcattattttaggaaaaataataatggcaagaaaccagggatgaaaaagaggaaggcttgtggtgtagatgagacagaaaaagagattaattcagatgctttaaaaggaagttatgctaatgatgttactgtgagtaccagtgacaatgaaattgtgatcgaattgaagtgcccctcgaaagcaggaaggctgctagaaattatggaagcaatcaacagtttcaatatagattttagttcagttcagtcaacagaagctgatggaaatctttatctgaccattaaatctgtgctcacaggaccaagtgttgcaacaaccaaaagaatcaaacaagcactccaaaaattggcttccaagtgctgaatttttatctataccttaaaaaccgtggggggtgttgaatctaattcataccactgccgtgtgacatagagagtccattagaatgatggagtcacaactcactagtgcagctcttggagattttttttctttgaagatttctcataaaaggaaaatgtagactttcactcatctttcggcaataccataactcttggtgacgcaagatatatggactttgaatcacttgtaaatgggtaggtaggcttagttgactagatttatgtaattaatgccacttgctcctatgggaacactaaggttgaccaatgactaaatattgacagagagacgtacattattaattatgatagagctgcgcgtgacgttgaaattgaaaaaaaataaaaaaaacccagctgcacaaaaaaataaagggccttcgaaaaaaaaaatggtctccccagctggcggacccaggaaaaaatccaggtttatgtcggcgtgcataacattatataattctgctaggggaaatacactggccgtgactgacccgttggcactgcaaaaccctggtgacacccagcttattcccttccaattgccttagccttaaagcagtttgccgaaaagcgattaactaacgattgcgcccccttcctaaaatttgcgcaccatgtttgcaaaatgaaactccccttgaagcggcccattaaccccgcagggggcccgggtcacgtgaaacgtgcccacggccctcgccattgccttaccccccccctatta

SEQ ID NO: 39164 - DNA, 746 bp, Glycine max
  Clone ID: PAT_MRT3847_135365C.1
ctcgagccgaatccgggtaataaaacccaaataaaatctaaaaccctacccatcgttagggttctacctcatgtggcgcggagccagagtcgtttccggctacctccgccgtttctcgacggcggtgcggcggcgcatggaagacgaaggtgactggctctactcctccgagtggtggggctccgactccgacgatggtcactctgttctccgatcaacttccggcaagggaaacggcgtcgttgccgtcgttgcatatccctcctccagacccagcaaaatgcattggtcaggaatggaaagatggctgcagcaaaggtgtgaggaggtgcatcctggatacaaggatggagggaagctgaggattcttggataccaatggagggtgcttcgattcaatgaagttactcgccagagcaccgctaaagtatggctgcttaccgtgaaaacacgcccggtgttgtctatctcatgcagcaaccacattgcttggctgtaccatatgtgaagagtatggtatcagctggtttgactactatagcctcatgtagttttgatatcatcagtgcactgcaaggaaagaaaaatatgcacattttatgcattgggcatggtggaggaagtttaccactgtttttggcaagtcgaatccaaggtgccattgtccatgtagttgaaattgatcccctagttatctcggcctcattcgtgctatggggttccccgggtttctcactcatgacaaa

SEQ ID NO: 39165 - DNA, 1105 bp, Glycine max
  Clone ID: PAT_MRT3847_135366C.1
gcttcctctaacataataaccataaatcatttcacgccactcgtccgccacgccagaagcagaaatgagcagaagggaataatgcattaaacaagccttgatacgttccctccatcatctcaattctcaattcacgaaccctcgcgtttctggtgttgctattaagcgtgaaaagaaaaaaggaacggtaggtggcattagtagcactatgctattgaaatttgaaagagggaactgaattcccttccccaatacgaattgatctaatccaaattccgggataggaataatccgtttccgagaaatgctaatttggcaaagctgcattttcgtttgcgcctctgcaattcccgcagcatctgattccctcacaatgtccaccacgcctatttaatcggctcacgatgcgatttcccaagaggcacttctccttttctctctccaacttctctcctcctctcccacctcttttctctcctcgccttctttttgtctctggaatcggcgccaaacctcctcgctcactcgccaacgccacgtcaccagccattcgttttgccacggtagatgtagcgaaagcacgagatacggagggaaatagaatatcattagatactactgtgaactttcaggattactcttctaatccgttgcatgcacaatattcaatggatggtgagcatgaaatcgagtacatgatcgaacattgcatgctaattcttacgagttaacccgtggcatgctcaatattcaatggatgggacccatgaaatttgatgtacatgattcaagattgggggatttgcctggccgtgatggcagcaaacagccatttgtctggtcatctcctgaacatggatttaaaactgaaataggcaagcagatattttgtaaccggtcactgaatatgaagaacattgttgctgtgggatttgacatggattatactctggcacagtacaagcctgaaactttcgaatctcttgcttatcaaggcacaatcaaaaagctggtttatgatttgggataccctcgtgagttactaaattggtcttttaactggaagtacatggtcaggggcttggttcttgacaaaaaaaaaaaa

SEQ ID NO: 39166 - DNA, 225 bp, Glycine max
  unsure (1)..(225): unsure at all n locations
  Clone ID: PAT_MRT3847_135367C.1
nntaagttacattacgagaatttgcttatacttcatagatcaccaacttccaagtgcaactgctcctactctagaccctcttcttcttcgcacaccggctgaaaacaagatgatagatctattaggcatggtttacacgatacataccttcttggcatgcatcaatttccaacatccgaagaagctgatgaattacgactcattggacattgctcgctcgatgag

SEQ ID NO: 39167 - DNA, 301 bp, Glycine max
  Clone ID: PAT_MRT3847_135368C.1
gtagcctctagctgaattgtacactgttgtacttttcgttaataaaccaatggttttcttgcactggcctaatgacgaaaaagttgtggacgtgttttgcaactgaacagttacctaatgcgagacgtctcggggatggacccatccccggactataaccccaacccaccgttaggaaggaagaaaggacttcctatgggcaaaagtaaatccaaaccgcactttctgaagaacataagctgggcttgtagcagccttcttagctttggggctccgtccggtgttggttaaatttaggaag

SEQ ID NO: 39168 - DNA, 277 bp, Glycine max
  unsure (1)..(277): unsure at all n locations
  Clone ID: PAT_MRT3847_135369C.1
nngctngcacgcgtacgtaagctcggaattcggctcgagcnagtnctagatcgcgagcnggccgtcnttttattnttnttncccnnagngaatnatnnncnggntacaggnncnnatgtacannanctntagngggcacccnaagggngttancaaanactacccntggngntacgtttnggcggatcacngaananggnggntnattcttagcgnggncatcattngngacanngantgatccccatagngaggnatcgcgcattgctgncagagg

SEQ ID NO: 39169 - DNA, 287 bp, Glycine max
  Clone ID: PAT_MRT3847_13536C.1
gattaactcctattcgttcgcaaggtagacacattacggctactcctacagccttcctacctataatccgaacagcggtaagacattttacacaagattctgagcacgtgctacatactttgcacgatcgactcagagtatggtgatctcactacgaaataaatcttctgaacaatggatgcactgaagggggacagtgctcacattccacacacataagtgctaccggaaaacagctacagattacctacatatccgagaggcagattggatcatggtttaatatc

SEQ ID NO: 39170 - DNA, 377 bp, Glycine max
  Clone ID: PAT_MRT3847_135370C.1
gtgatgactggcaggagtatgcagacaacttaccttttgaattttttgttttttttggtaaatttcttgaaagtatgggggctgaaagtaattttttatagttggattctcattattctcttcattttaaggaaaaagcgttctcaaatatataaaagcttcataatgtttccctttttggttttctgtttctgttttggaaagcatttccctcttttcttttattacgtgctatttccctgtatagtaagaagggataagaattgttgtgcatagctgtgtgtacctcacatgcagcaatgctcatagtctactatttggtctgttccacctaggtcattgttgattactgattaattcattaaaactcacaatgt

SEQ ID NO: 39171 - DNA, 747 bp, Glycine max
  Clone ID: PAT_MRT3847_135371C.1
tggaataaaaaataaaaaacccttctctagattatggtgatggccatagctactaggttcactcagcaactatgtgaaccatgaaaaattacctgtataccagagtattgcaagtgtaaaaaggtcttaaaattatgataatttcaggaaccatgaaaaattacctgtgtaccagtgtattgcagtgtaaaaaggtcttaaaaccatgataatttcaggaaatgacaaactatgtgccaattactccattaatcaggtaactggtggaaatttatttccttgatatgtaaattctactattgctgcatcagattttgatttttcagaatgtgagaaaattgttgctttcaatttcagtttcatgcatcagagattgaaacacattgacaaaagaaatttctaaatcggtacctcccacaatggaatgaatacactaaataacagagcaaactcttaaatctccatctgaatgtttgaaaattgagcttaagacatattttcatgtttatcttgtttccaatctttctctacctacctctgaaagtttaaatatcaaagtttctaagtatccttttaacagctaagctccagtcctaaagagaaaactaaagtagactcattcaactcctcattagcttcactaatttcatcagatacgattcatatcaaattcataacaaacacacacacacacatatatatacacctcattttctcaattttaaattaccatctgaaactacaatt

SEQ ID NO: 39172 - DNA, 634 bp, Glycine max
  Clone ID: PAT_MRT3847_135372C.1
cccacgcgtccgtccacgcgtccgattactctgtttactctcgtcgctgtgacactgttcagctcaggggaatgagaatgggatagttatttatttaacaatattgtttggccgcgcttctcctgttacttctcctccatgtggttctctcggggcctagtaatgggataattagagttgggttggaaaagaacaaatttgatcaaagaaaaacgctcaaaagaaatattgattcagaagaagcaacattgagagaggccaggccttttggtggctatgaaaattctgatgacacaagtattattcggttaaagaactacatgaatgctcagtattttgggggagattggtattggtactcctcagaaatttactgtaatatttgacactggaagttccaatctttgggtgccttcctccaagtgttacttttcagttgcttgctatttgcactcaagatacaagtcaagccaatctagcactcagaataaaaatggcacaatccctcattcttgggtcatcagctgaaatccgttatggaactgggcaaatttcaggtttctttagccaggactatgccaagggttggagacttgattgtcttgaccaggattttaattgagcaactagagag

SEQ ID NO: 39173 - DNA, 486 bp, Glycine max
  Clone ID: PAT_MRT3847_135373C.1
ttgggaaaaccaaatacattacctcggaattcggaaaaaagaaagaacctctcactctttctgtaatataaaagtctcagcttcctgcactctcttcttatctcagctttcttcagcgaatactcactcactctcccagtcccatggcatttttcatacccacctcctcaacacatgctttctgctctaaaggtttggggaaatgtgtggtgcctggcacaaggagtcgatcctctttcgtaacacatgaaagattttttgtcgcttgaaggtattgaagttatggtttaatataccttaaggttggaatagggaatgaagccattggtcctagtagtttaatttatatgaaatatatattattgaattttttgtacattatttgatgtagtctggatcaaatcatttgctgttgatcgatttgctatagtatattatagtgatgacagcttgaactttactttttaatttcaatgcttccagaac

SEQ ID NO: 39174 - DNA, 377 bp, Glycine max
  Clone ID: PAT_MRT3847_135374C.1
ttggtacttgaactatcgggactccttcttggctctctctgtttagggtacgcaacctctgtactcctttgactagatactatatatttctaaagtgaaaatgtacaaactgcatatcataatggggtacatatgctaacttgtgatacttctgcgacacttttgtatagcatctcaggacaaattcacgggagatatccttatatgctgttggtctgaattcagcagagcaaactgcgtatgagcaagctatttcaaggaagacaaggaccacatagaacaggtacactttacatataaggtggctgggaaggaaagtgtgaacgcataaataatactgctcgagggggaaaatgctaaacaagacgtgagagttg

SEQ ID NO: 39175 - DNA, 174 bp, Glycine max
  unsure (1)..(174): unsure at all n locations
  Clone ID: PAT_MRT3847_135375C.1
ggacttctgctcgaggtctcatagcgctctgtgcgcgtactccgcaatggaatcgggttccaattcgtggagcgggaagtggcggctgacggcaacgttagggagtcncgagacgtagcgggggccccggaaacagttatcttctctgtatagcagactgcccaccctggagac

SEQ ID NO: 39176 - DNA, 494 bp, Glycine max
  Clone ID: PAT_MRT3847_135376C.1
aattcggctcgaggcaagagtcaagaataatctattcagatattctgctttcttttatcaggagaaaatttgcatttgcatccttacatattcgaattttgtgagcataagcctaccattaacttctacaatttctcactccatatagatatttaagtgtaaaaatattgaagtaggctaagtagtctctttaatggagttcaacttcagtttgcattctctttcatgctattcttttcctagttatttttctttgcctcttgtggttatgtatttttacttgggcacatttgaacagaataaggaaaacacgtcaaccaatttgtttgcaatggctgttgggataaagcagaaagaccttgtgaacaaaatggtcaaaaaggtaatttcaaggggtgttttgtataaattgttcattaccaatgttctattttgatatgtgataagtgctgactctttctaccccaaattgcagtttctagtaagtaatttcg

SEQ ID NO: 39177 - DNA, 212 bp, Glycine max
  Clone ID: PAT_MRT3847_135377C.1
tttttaataaaaaaacgcccataattatgatcataataaccatacaatttatgggtggaaattattaaaaaaacgatcataactcataattactttccaaaataattattaagaacaggatcttaaaacaaaaaaacaaatattcgtttcactctgacaatattaactaaactatattattatagaaaaataaatataataattaataaaaa

SEQ ID NO: 39178 - DNA, 677 bp, Glycine max
  Clone ID: PAT_MRT3847_135378C.1
aactaacaaatgcgacgtagggtttaccatctttcgtggcctcagttgttaatcaaacaagaagcaatcttattcgcatcaaagggttgggggtgaagaaaatagtggtgggtgctctacaaccccttggatgccttccccaggagacagccacaagctcgttccaacgttgcaacgccacctccaacgccctcgtgcttctccacaacagcctcctgaaccaagcagtgaccaagttgaaccaattagagaccaccaaggaccgttattccaccttcgtaatcctcaaccttttcgacagcttcatgtcggtgttgaaccacccttccacccacaacattcggaacaagttgacgccgtgctgcgttggcgtaagcagtgggtactcgtgtgggagcgtggacaagaacaatgtgaagaaatatagggtttgtgatgaccccaaatctgctttcttttgggatcttgtgcaccctacgcaggctggatggcatgcagtgtataacaagttgcgaaccatgaacgctcttcaacacattctttactagttagttcattagttgtgatcacttgctctttttgttttgtgttcaaataatgcatgtcttttaggtaattagattgttcctcagatagggtgttgcttattcggactgtgggtggtgcaatgtgcaaat

SEQ ID NO: 39179 - DNA, 531 bp, Glycine max
  Clone ID: PAT_MRT3847_135379C.1
tgactgttgtttatatgtactacttttggggaggtatagagaccccaacaccatccttgctattagaaacatttgatgggctccgggttgggctatgcaccaccactaatagccgaaatcctctcataacaatacttgtccccttggagacgaggatgaaagcaccccattttgacaaaataccctatcgtcggcctgctaccgcaatgactttgcaatatggggcgtgcccatgaccttcctactcagggatccacccgactgggtggaactgcagagatcattggaccttggtttaccaacatggactattgggtccctagcaaccccatcatcggccaccacatgctgaccaagacctcccacaactacgtcaagggacccgggttgcttgcattctaaaggcctgggggaacaggacttacggctctgcttctgaagcctggcagaacaaccaggctctttaccatcctctctctaaacacacaagctgtgtggtttttggacccaaaaccattcacaacacggtgc

SEQ ID NO: 39180 - DNA, 303 bp, Glycine max
  Clone ID: PAT_MRT3847_13537C.1
ggagaaaaaatgttaggaggaatgggcacaaatagtattgggagcgacccccccgcaaacaaagccgaccttaattgggatacaaaggagaagaacccctttttatttttacaaccccatccacaacccataataattaggggacttttttttttgaagggggggaagccaagggttgcagaccaaaaatgtgaggggcacaatttttgaccaaaaaaaaaagggtctccagaatggtgggtttttttaaaaggggatggattttgtcccgaggggaaaaaagggtataaaaaaggagttcac

SEQ ID NO: 39181 - DNA, 804 bp, Glycine max
  Clone ID: PAT_MRT3847_135380C.1
gctggaggaagacgatagctatcactgaatatgggattcgctcagtggctgccaagtatatcatgaagtgtgatgatgacacgtttgtcagaatagagtctatcatcagcgaagcaagaaaagtaggaagtggtagaagtctctatataggaaatatgaattaccaccataggcccctacgttctggcaaatgggcagtaacatatgaggaatggtcagaggaagagtatcctacctatgctaatggtccaggctatacaatctctgcagacattgcccagttcattgtatccaacttcgaggagcacagattaaaattatttaaaatggaggatgttagcatgggaatgtgggtagagcaattcaacagttcaaggccagttgagtatgtgcacagcttcaagttctgccaatttgggtgcattgaagattacttcactgcacattaccaatctccaagacaaatgacctgtatgtgggataagttgcaacaaaagggacaacccctatgttgcaacatgagataataacatagtctatgatcataatattcgtattatatttatgtacataggcactgaggacctttatgatctccacatattcatttattgtttaacctctcttttttttttttcttttcgattctcccaaaaatagaaggcctaggtgtatcatataagttggatactgcagctattgctgaaggagcaaaccaatggtttgtgagcttgtaatgtagagaatgtaactgaagccaaatgaaatgattttttctgcattgacttttttttttttcaaaaa

SEQ ID NO: 39182 - DNA, 242 bp, Glycine max
  Clone ID: PAT_MRT3847_135381C.1
atgggcgaaaaccatatcggtatcgctacaggtgacctaaatccggggctcccgatatgcttcaagcgtttcgcatggcaagactttcgcataatcaaaaatagtggcctcaagcagccccagttttgcgagttgtccgtgtgcggaataccaaatttgttggatgcttcattagatatcacttcccccccgcatttgcccctccctgaaataggcccgcatagtcctcgtcccgctacggg

SEQ ID NO: 39183 - DNA, 1057 bp, Glycine max
  Clone ID: PAT_MRT3847_135382C.1
atcatattttattttccttttgctttgatggattcccttctttttcttcttcgtcaaactcatcaatttgaattcaccatggattcccttccttccgtctcgccctccatggtcctccctccgagccatcctttccgccgcctccctcccagcctcgtctcctcccgaaccagaagccgccgccgccgccacgtgtcggtgtcctgcaccctcgccggcgacggcaccgatgacgaagtcgaaagggctcttcacatggacggcgcaattccccgcacctccgacgagttcgtcaagcgcgtatcctcacgcgcctacgacatgcgccgcaatctccaacaatccttcgacaccagcagctacgacgttttagatgccaacccttggagagagatttcaaagcctgtgtatgtactcacgcaaaaggaaaatcaactgtgcacaatgaaaacccgcagaaatagaagcgaagttgaaagagagcttggattgttgttttctaaaggcagcaagtggagttctggaattggaaatcagtcaaaacaagcgaggggagggactaataagtttcaaatgcttgtggaagatgttagagagggagtgctggtatttgaagatgcaaacgaggcagtaaagtattgtgacttgctagaaggaggtggtcaaggttgtgaaggtgttgccgagatagaagcctcatcgatatttgatctttgccagaaaatgagggctcttgcagttctattccgcagagggaggacacctcctctacccgaaagtcttaagctgaatctgcgagctcgtaatcggtcccttgaagatcaagatgatttgatgtgaaatttgaagactaagatgacccgatgagaaaatcatattcccttgtgttgagagggtaagcaactgtacgctaattgctaatatgcttaagccccccaaaggaacaaaatatgtatattgatagaaattcattcatcatataattgaaaaaagtatagcatgtatatggtttacccaatgctcatgttcaaaatttcagctttttattcagagttta

SEQ ID NO: 39184 - DNA, 958 bp, Glycine max
  Clone ID: PAT_MRT3847_135383C.1
acgctcgagcggtcgagtacggctgcgagaagacgacagaaggggaacacaaacacaaattacatagcctcagtaatctgagagagaaacaaaaacaatgaaggtttccattgccaagttccactcccttcccctatgttttttccttctcttggccttcaacacaaaacccctcctagcagcagaaccagagccagtggttgataagcaagggaaccctttggagccaggagtagggtactacgtgtggccactttgggctgatgaaggaggcctcacactaggccaaacaaggaacaagacatgccctctttatgttatccgtgacccttcattcattggcaccccagtttcattcttagcaccaggccttgaccatgttccaacactcactgatctaaccattgatttccctgtggtgacagtgtgtaaccagccaacagtgtggaggctcaacaaggtagggtcagggttctggtttgtgagcaccagtggtgaccctaatgatatcactagcaagttcaagattgagaggcttgaaggggatcatgcttatgagatctacagcttcaagttctgccccagtgtgcctggtgcgctgtgtgctcctgtggggacttttgaagatgctgatggaaccaaagtcatggctgtgggggatgatattgagccttactatgtgaggtttcaaaaagtctccatctttggtcaagacaagaaacaaccttttagcattttgtaggttggtttgtgcctagtgtaataggtagatgcgggtcatgactcggaataatgagctactagaatgcaatgcaactgtttccttggtgtgcctgtaataggtagatgcgggtcatgactcggaataatgagctactagaatgcaatgcaactgtttccttggtgtgcctgtgtgaaagaatcgaataacaagtttattgatcttttaatttttttt

SEQ ID NO: 39185 - DNA, 761 bp, Glycine max
  unsure (1)..(761): unsure at all n locations
  Clone ID: PAT_MRT3847_135384C.1
tcgcgggtccgacaacgcgtccggcgagcagacgacagaaggggataattaagctttcccaaaaacccaaacccaaaggtgttacgttcattttcatcattcagagttttcagaggagctctttttttttttttagttcagaaagcagaaagcacgcacttgcggaagtgaagttacggttttgcccttcttctggtggtgtcggagaggaacatgtccgtaggaacaacaacatcgatatcgacatggcgcgttgttttggtttaggttccgttctggttctggcggcgctcgcggcgtcgatggtggttctgccgctgatgctgccgccgctcccgccgccgccactagtttttctcttcttccctgtcgggatcatggcggcgctcatgttgctcgcgttctcgccatcagatcaaaacggcgtcgtttacgcgtcgacgtagcgaaggtggtgggaaaccggatcagccggtgccacattttggggtttcttgaaggttccgatgggattgcttcgtttcatgttttttttttttaagttacggtgttaatatgaaaagggaattaattgtaaaagcagaaagtgaaaaaaaaaaacagaatagaaagggatgaaggattcattgtattgcggcatagacatggaaatttcgtttttgtttctttaattaattaattagttaacacatgcttaaaaaaaaaaaaaaaaaaaaaaaaaaaaaaacnnnnnnnnnnnnnnnnnnnnnnnnnnnnnnnnn

SEQ ID NO: 39186 - DNA, 364 bp, Glycine max
  Clone ID: PAT_MRT3847_135385C.1
cgattttcttaacaatcaatcaacacgggcaattgcaatattcacatactcaattaagccataaatttctctaagcttatccttgctttccttcttgcctcgcttcttctccttaatcttgatgatgctgatcaatcagcacatgtacaaactcaagggtctcttatgaagaagataaattgtaatggaacatctgctactaagtgcctgttatcatctcgaacacgtctgtgcaaaaaagcctgtggaacttgatgtaaacgctgcaactgcttaccaactgtcactgctggaaaccaaaaaaagactccctcctatgcttatttgactactcatggaggcaaacacaaaagcccttaaactt

SEQ ID NO: 39187 - DNA, 292 bp, Glycine max
  Clone ID: PAT_MRT3847_135386C.1
ctattatggaaattcggtttcaccgccttgcacaaaaacataatacgagggggcacacgcgggaactatgtagggaaaaccaaacgctacaccgcttacaacatccaacacagaaaagacatgcaacgctgttgaaaaagacaggtgaggactcttctctgaaatattgagaagttcaccttgttttttttaacttctgaacaacactggatcactacccggatcgtaacacccactgcataaaagacgcaaagcggaaaagaaagagggagagccccgcctctaggatgtt

SEQ ID NO: 39188 - DNA, 281 bp, Glycine max
  unsure (1)..(281): unsure at all n locations
  Clone ID: PAT_MRT3847_135387C.1
acacgctttctccaaaaaccttcttcctagatactttaattacaacaattactcaaccttcgtccgccagtttaacaattacgttgcggctggtaaaaaaacaaaaatctatnatattgataacaatccttatttactcaacattattcataatccctagaatggataccaattctatttatctgttctccaataatcataactgatttttgcttttcaaccaaaatccgattcttggttaaccttatcaactttattttttatcccctctatacttttca

SEQ ID NO: 39189 - DNA, 939 bp, Glycine max
  Clone ID: PAT_MRT3847_135388C.1
cccacgcgtccggagagagagagagaatttcatatacatgctatgatttttctttttgaagtgcattaaaatgaatgagcagaaaccttgtttttctttggtctcactttagctagcatagttatacaatttactgattgatggaagctgttattattgtttatttggtttttttaagtatttgatttgatgattcaaatgtgaaaaaacaaaattgtgcacatggtttcgtgcaatttttatatggccacatggagtatctaagtatagaagtatttgatgcccggtcattatcattacttgatcatgaaatttttattaacagcaaccaggcattgggggtgaagtagtgccacaccaggataactcgtttctttatactgaaccacaaacgtgcaccgggctgtggctggccctagaagatgcaaacatattaaatggttgcctttgggcaattcctggatctcataaaaatgggctagttagaaggttcttaagagataaagatggtgtcaaattcgatcaaccatcaccatcttatgatcaaaaggattttgttcctattgaagtaaaagctgggtcattggttgtcatccatggggatcttatacaccaaagctttgaaaaccagtctcaaaaatcaagacatgcctacagcttgcatgtggtggatacagttggctgcaaatgggcaccagaaaattggatcagacgaaaagtggagccagaaccactctttgtaagctgaccatcaaccacttcttttttttaatctggaatttgcaaattgagaaaaacgatgtaatgatgtttaatttgcaagcttaaaccgttgtaataatgttaaaccagtttatgtacttgccactgcacactagatttcacctctttggctttgagatatgaataaaaatcagaatttgatagtttttattattt

SEQ ID NO: 39190 - DNA, 490 bp, Glycine max
  Clone ID: PAT_MRT3847_135389C.1
ggctcgaggccttatacattttagaaactggaaattttttaaagaaaatgctttagttttcttctgttcttcactgtctacagtgtgcttttgtatatggatcaggactgagcaaagtaattacatgtatcagagatacttatctctatactaattcacagacagctcctgatgtaaggatttagagggccttctgccctctgaatatatggtgaggagaatggggtatctggaaaaggaaaatgatctggataaatctgagacctggggggaagtttgttttatatgttcattattggttgttacatatcaaggctgttttggttatgtatcaatattgtggtttatttgagctggaagtgattttttctgtgtatgtatatgtatacacttcaataggttttaattttgaagtgaatatttgccatgactccattttccccataccacttcagactttagcctgtttagttttaaggactgaaaatgg

SEQ ID NO: 39191 - DNA, 573 bp, Glycine max
  Clone ID: PAT_MRT3847_13538C.1
attgcatcagagggcccagaatctctccggtcatctatcaagccttttgcaattgctacaactgccccaagaaacctgctcaagttcatttagtttgcggacagtttcaaaaacaaattcccctccagcagaagaatagtcagccccccagttttgattcttgctcatattttcagaagcttcctgcattcttatcgaatgaggcgctcgatagtttgcagaacggttggatcccattcccatgatagactatttttttatgggactatgttttggatttggagggcatgcaacttttcattgatggggaccaagttatggcaaccccagagtaacccagccatgttataatgcttctatgaaaaggagctatgatgctcatccccgacacgcacatattgagtttggttgctatcttgaggcaaaaaaatgaaaggacgtgtgatcagatctaaagcatttgtcattttttgggtggggtttttttttttataagttcacgtcattgttttcgacgatctgagttgcccaatattgcggtaatttcagtataaaatgagcacgtggtcgtgt

SEQ ID NO: 39192 - DNA, 1267 bp, Glycine max
  Clone ID: PAT_MRT3847_135390C.1
tcccgcgccgagacggctccagaccggcgaggcaaagcaaagcacaacacaaaatggggatacttagtccagaacagctccaattcttcaactctcaaggttagcttgagagcaagcaaagcacaacacaagatggggatacttagtccagaacagctccgattcttcaactctcaaggttatcttgtgattgaatctttcgcatgtagcgatgagattgagtccatgatgaagaggatggagcagttggtagatgactttgacccttcttccaccgcctctattttctccaccaagaaccagcaacagtcgactgataattactttttcgacagcgccgagaggatttctttcttcttcgaggagaaagcatttggtaatgatggtaagttaaagcagccgaagcaattgtcccttaataaagttggccacgctcttcatgagattgagccagcattcaaaaagttttcttcttctgagaaagtttcaagtttgatgcgctccttaggttacaagagacctgcagtcatgcagtcaatgtatatatttaagcaaccaggcattgggggtgaagtagttggacaccaggataacattttcctttatactgaaccacaaacatgcaccgggctgtggctggccctagaagatgcaaacatattaaatggttgcctttggacaatacctggatctcacaaaaatgggcttgtaaggaggggtcattggttgtcatccatggggaaattctaccccccatcttttaaaactgatcaaaaaaaatcaagtcctatttacgtaaaagctgggtcggaggttgtcgtccatggtgatcttatccaccaaagctttgaaaaccagttgccaaaatcaagacatgcgtacagcttgcacgtggtagcactggttggctgcaaatgggcaccagaaaattggatcagacgaaaagttgagccagaacctctctttgtaagctgaaatttgcaaattgagagaaacgatgtaatgatgtttaatttgcaagcttaaagcgttgtaataatgttaaaccagtttgtgtacttgccactgaacactgattccacgtctttggttttgggatatgaataaatcagaatttgatagtttttatgaaaaaaaaaaagcataataaacaacttttctagaaaaaaactgaaggactatttttggtgaatcattatggttggccctgtttataggtctcagaattcgttccgtttgtcatcctattcatatttttttttttatc

SEQ ID NO: 39193 - DNA, 431 bp, Glycine max
  Clone ID: PAT_MRT3847_135391C.1
aaacagaagataagaagcctgcattaactttgaaggggagcactacataagagtggggctgatcatcacgactctcatctaaaacaacgccaccatagcaaagcttgcttaaactacccactgatgatgacactgctacatgagggctccagattattttgacaacataatttggtgggtcccctacgaggcccggcgtgcatgccctaatatgggatgccctggagcttttttctccacaacaggcttcttcagctcgataatggtgggtgcctcctgaggggccacatgaccaaccaccacagtggtgagctgagcctttttcttaaccatcttgcaaatcaacttctaattcagaacacctaagggctgcggggaggaaactcaccgacgcgtaggtcgaccccggaattccaaacccggacctggac

SEQ ID NO: 39194 - DNA, 259 bp, Glycine max
  Clone ID: PAT_MRT3847_135392C.1
gtgttatatttattattaataaaaacattacataaatattgaaatagacaaaaagtttttaaaaacagattggacgcgtgggacaaaacgaaaataccggacacggtacaaaataaagcaccaggtgtccctagagaggaaaaaacacacctagaggggggtgcgctcagtgcccgcttcacagtcgaaaaaccttgcgtggccaaccataaaaaaatagccaacccacagcgtagaggaggaaaaacctgaatggggc

SEQ ID NO: 39195 - DNA, 459 bp, Glycine max
  Clone ID: PAT_MRT3847_135393C.1
tgatatctaattaagttttcctattgcctcaaactttcagcctcatagataattacaatcatgtctccccccatctttaaaggactcacattgatcatatctgtttttgccatcatgcaaatatcaacagctggtgacccagatattcttactgacttcatagtcccacccaacaccatacctgatggcaacttcttcaccttcactggcttccgtgtcatttttttcacccaacaacactgtctcagatttcaaagtgttgaaggcaaccaaggtagaatttccagcccttgatggacaaagtgtctcatatgcaatccttgagttcccaggtggcagcattaacccaccacacacacaccctcgttctgcagagttactcttcaccgttgagggttcccttcaagtggggtttgtggacacaaccaacaagctcttcactcaaacactacaaaccgg

SEQ ID NO: 39196 - DNA, 247 bp, Glycine max
  Clone ID: PAT_MRT3847_135394C.1
aaaaagaaaaactcctaactgattgggtaacccaaaaaaagcaaaaaaaagagggctaaaaaaaacaaatgttacactgaggatgtatcaacacgaacgtcgcttaacacattatcctaaccatgcgccgaggtttacagctatccgtcccaatcttgatcactggataaatcccttttctcaagtttggaatgagctgcaataaatatcaactcctgcaccttgttgagtgcagttctggaaaggt

SEQ ID NO: 39197 - DNA, 473 bp, Glycine max
  Clone ID: PAT_MRT3847_135395C.1
ggcccgccctttttttttttttttttttttttttttttttttttttggtttttgttttttttttttttttttattcatataatttgtaacatttatttttaaacaaagaaaagggtaaataacaggggcaaaacaggaagagaggatttttattctactccaagggatacaggggggggggaaacaggggataacaggacaaaaaaaacaaagggggggaagaagaaaaacagaaaaagaaaccagaaaacaccaaaaaaaaaaaaacaaaaaaaagaagaaaaaaaggaaaaaaggacagaagaaagggaataaacagtaaaatcaaacggagggaatcggtagacaaaccagccaggggaaccaagcccaaccaactccaaaaccttggaaagcaagggaaccgagaggatggcgctcacaagaatggaggaaggccaaaaagcacctaaagcccctcaaccaaaaagaag

SEQ ID NO: 39198 - DNA, 246 bp, Glycine max
  Clone ID: PAT_MRT3847_135396C.1
ttaaaacactggggaaaaggcccaccaccggtccgcctaacaaaaaattgcgcagcctaaaagcctattggaaccccccttttaaaagaaaaataaccccggcggggggggttttaacacccagggggacccttaaatttggaagggcccccccccccgttccttaaaattaagccccgtgttttggggccacccccgggggttttcccccaaaggcccaaaaatgggggccccctttaaggttcc

SEQ ID NO: 39199 - DNA, 166 bp, Glycine max
  Clone ID: PAT_MRT3847_135397C.1
gaacagggttttgggaaaaatggaaggtgttgagtcatttgacatttatctgaaggagccgaaggttacagtcacaccaaatgtgcagccacattaaattctgcaagccccttccacatctgggattaagaccgcattctagctggattatgcgcaacatgctaag

SEQ ID NO: 39200 - DNA, 231 bp, Glycine max
  Clone ID: PAT_MRT3847_135398C.1
aaaaaaaaaaatttttgaagggaaaaaaaagggccggttctaaaaaaatcccaaatcccttggttggcatccctctaaagcgtaaaaaccgcctggttccaaccaagttcccatgtttttaggtttgcgggcttaaaaccaacaatttttaagccaagtgcaagggactgttttttccggcctttattcaaaaggcaaaggaagcatttaaggggggccacatttattgcc

SEQ ID NO: 39201 - DNA, 162 bp, Glycine max
  Clone ID: PAT_MRT3847_135399C.1
acgcgtcaattcagtcgtgagaccacgagtccgtggagctgttagaagatcacaatatgggtttgttcgtgacatgaggatccctcgcattataggatcgcagagtattacgatttgtgtgagacgtgtatgtggcttattgatttgtagtgtcgttactca

SEQ ID NO: 39202 - DNA, 291 bp, Glycine max
  Clone ID: PAT_MRT3847_13539C.1
gagaatggaaactatgactggtgtttgctttttatgcccaaaggttttattcaacgcatcagactaaccgcaaaaggcgcatgctctaaagatctgacttacacccagccaagcagtgcgaccgggtagtatcaagtggctgagcgttatgaggattcgtcttgttcttgctgcgcctgagcgcatatcttagatagaggaagatagcatacaacacgctcaggacgcgtgcgcccgctatccgactagcgatcagtgcttcattgggtgtgacgaggtggaggaccttag

SEQ ID NO: 39203 - DNA, 633 bp, Glycine max
  Clone ID: PAT_MRT3847_1353C.1
ccacgctcgcgaaccaaagccccctctggctttggtccttcgctagggttcggggattcaccatttcccatttcgtcgcttcttatttacccccagaaatcccatgatcctcttctctcgtttcgacacttctcaacttctgagggaaattcaatgcagctgtttctgaggggtctcatgtgatttctgtggttctggttcggtttatcgcggatcttgaggaggcttttgctgaggtctgtgactctgtgacaatgccttctacagaaaatcagggctcttcgtcgtcgttttcctcgtttggccgttccatatttggtgccaggcaggagcaggttcattctgtggaagcaagtaatgaatctgattcctgtaatttagagcttggattgttccagaagcatgttacagatcggtttcaagacctttctgcggctagtgatgaggaatttctctcaattgattggattcagaagctccttggagcatttatcagctgccaagaggaattcagagccattctgctgaataacaaagagcagggcacgaaacccccctttgatcgcatgatgtctgaattctttgagaggcccgtgaaggcacttgacattgtggatgctagccgagatggga

SEQ ID NO: 39204 - DNA, 582 bp, Glycine max
  Clone ID: PAT_MRT3847_135400C.1
gctgttcataattattcttagtttctttagatgaattatatgcgaagcatgacgtgaattcttagtacccacgaacaataactagtccaaactctaattacttaaaaagaggttgattgaccacactgaaacacctcttgaaattaaatggaattgtttttaattattaattaaattatgttattagcatgtgactgttttgactttaattgagtaagttcgttaatgaaactacttagttgattcagttaatgataaaaaaaaaacctcatattaataatatttaaaacaatccaattttgatatttaatttttaaaagtgctttaatttgaaaaagaaaaaagctcttaataagatagagaaagaaaaaaaaaaatagatccaacattaaggaacccaaatagaggcgaggtcaattagactatagcatttgcaaggaatataaataaataagatagctacataataagatgaaaatagatgcccacaaaatggaatatatacacattttttttcaatatcccaaaaatagagataaaccaaaaacaagcggccaattttagccatatataaaatcgtaa

SEQ ID NO: 39205 - DNA, 365 bp, Glycine max
  Clone ID: PAT_MRT3847_135401C.1
gtctagccaccgaccacgcggacagccacgggggcgcttttaaaacagagccctctcctacccgaccgctgcacggctcaacactgagattaagacgagccactctgcctggaggatcgtttgcagggacaagggaggatgtttcggggcaagaggaagacgttgaccgagagaccgagaggagggggcggaactagcaaatacggacagtcgctgtagtctgaactgggtcaagcaggaggaatgacggggcggaccatgacactcgggggaagaccacagaacacggcccgaaaacaagtcgtggcggtcgcctacaagaaggaaaaggatacaatccgatcggggacgcccgcgaagtacag

SEQ ID NO: 39206 - DNA, 366 bp, Glycine max
  Clone ID: PAT_MRT3847_135402C.1
aagggggaacaaaccccagggaaatgggaatcggggattattgcccaactgggaaaccctggggcccccccaaaaggccaaaaattttccaaaaaaggggggaaaaaaatttaaaaaaaaaaaacgggccaaaaagggggtccccttaaacctttggagccaaaaggggccctaaagggccgcccccaaaaaaaaaactttgccaaaaaataaaggaaaagagggaaaattgggttgggttaacccaagggacccaaaaaaccctatggggctgacccccaggcaggggtttcccccaaaaaccggggtttctgaaattggggtcaaagttcaaaaaaatcaaaccagctcaacaaagattttccc

SEQ ID NO: 39207 - DNA, 434 bp, Glycine max
  Clone ID: PAT_MRT3847_135403C.1
gggaaccaaaaaatgaaagtttttttttatagaaacaaagttttttgtttttgaatctcaccccacggaaaggggggaataaatggaaaagaaatttttaaaggggggaaaatttttaaacggccggagatagaaaacaattaaaggggcccgccaaaactttggaatttatcatatccttagggcagtggggctgggcatcgccaacctgttttgctccaacagaaaaaaacttaagggtcccttcccggggcctgcccttggtttttggaactttcaaaaaaaaaaacccccctggcttgaaacccgcccccggtttaattcccaaaacccccgggggggcctaaaaaatgggccttaacggggggggggggggggccatggattccccgaccccaaagggtaagaccccaatgggcatggcagaggcccca

SEQ ID NO: 39208 - DNA, 717 bp, Glycine max
  Clone ID: PAT_MRT3847_135404C.1
ctcgcagccgctgctctccacgactcagttttcgctctttggaaatacccacccactcaaaccccgcagccacgatgaaccccgagtaagttgtcctcgccgcaccctggatgctgaagctactggaggctccaggcagccacgcccgctggtcatgctaatcgcggaccgctcccagatacgactacctcttcaagctgctcctcatcggagactccggtgttggcaagtcttgcttgctacttcggttcgctgacgatacctacactgagagctacatctccaccatcggtgtcgacttcgtgcgttccccggtgttcggcgcgggtcagcctgaccgcagagctgacaaccatacagaagatcaggactattgagctggacggcaagaccgtgaagctccagattgtaagctctccccagccgacgcggagaaggtggtggggctgacgtgatctacagtgggacaccgccggtcaggagcgcttccgtaccatcacctcgtcctactaccgcggtgcccacggcatctgtgtcgtttacgatgtcaccgacatggactcgttcaacaacgtcaagcagtggctccaggagatcgaccgctacgctaccgagggtgtgaacaagcttttggtgggcaacaagtccgatatggcggacaagaaggtcgtcgagtacacagttgcgaaagaattcgcggacagccttggcatcccc

SEQ ID NO: 39209 - DNA, 360 bp, Glycine max
  Clone ID: PAT_MRT3847_135405C.1
ctcgagccgcatcaataaagaaaaattcagaacaggcgaagacccaagcacagaaagaaaaatacagaacgaaaagatccttccagaattactcacagaactaacccaaagggcaccaatacgaacgcatccacgagtaagaatccagacaccagacatcgaactaccagacgcaccaatcaaggaagaaagccccacaccatctcacaccaaacaccaagaactgccaagagacttatacatcatgacggcagtgatcctattcgacggaaagaacccaagaggtcttagcgaactttttcaagtagccgaagcagaatttaaactcagcccagttttccaatcaaacaatgaagaaag

SEQ ID NO: 39210 - DNA, 793 bp, Glycine max
  Clone ID: PAT_MRT3847_135406C.1
cgagaaacatggtggtcggaagtgctttgggagcgtttgcagtggcagggccttcctcgccacttttgttgttaagaggacaaaaggttttcaaattcagacccttctcttcttcttcatctgctgcaccttctagaaagctcgtcctctactctaaacccggttgctgtttgtgcgatggcctcaaagagaagcttcaagctgcattcttactctctggcaccgattcacttcacgacgttgatttgcagataagggatataactaccaatcctgagtgggaaaacgcttaccaatatgagatacctgtgttggccaaagtgctttccgatggcaccgaggtggctttaccgcgattgtccccacgtttaggagtggagctcctccagaaaaagatagcggctgctctgaatcaacaataaaacccgtttcagttccgaaattttgttttgtaaccatagtaccttacatttaacactattttttgtatattgacaaagcttgggaaattaatgtgcgtgttttgcagtttgcacctacaataggagatattgcttgcatttaactttttttcttcagtgcttacctgttgaggggtgtgaaattgtgaagagtctaaatttatcgttttggcggctgcatgtcctggtaacaatgacctttctttcttagggcttgaattgaactttggttctctcaacgagacagcttctcatttattgctgcgtctaacccttatcatggaagagtgcatgtttttgagaacgcatgaaagcaaatgagacacgcaaaa

SEQ ID NO: 39211 - DNA, 910 bp, Glycine max
  Clone ID: PAT_MRT3847_135407C.1
attacccggcctcgacccacgcgtccgtatcttcattcttccagtctaggtggagtgatctagatatcaatcagcatgtcaacaatgtgaagtacattgactggattctggagagtgctccacagccaatcttggagagtcatgagctttcttccgtgactttagagtataggagggagtgtggtagggacagtgtgctggattccctgactgctgtatctggggccgacatgggcaatctagctcacagtggacatgttgagtgcaagcatttgcttcgactcgaaaatggtgctgagattgtgaggggcaggactgagtggaggcccaaacctatgaacaacattggtgttgtgaaccaggttccagcagaaagcacctaagattttgaaatggttaacggttggagttgcatcagtctccttgctatgtttagacttattctggcccctggggagagttttgcttgtgtctgtccaatcaatctacatatctttatatccttctaatttgtgttactttggtgggtaagggggaaaagctgcagtaaacctcattctctctttctgctgctccatatttcatttcatctctgattgcgctactgctaggctgtcttcaatatttaattgcttgatcaaaatagctaggcatgtatattattattcttttctcttggctcaattaaagatgcaattttcattgtgaacacagcataattattattcttattatttttgtatagcctgtatgcaagaatgacttgtccatccaatacaaccgtgattgtatgctcccgacctctattatttagctattttcccgaatattaatttataattatttttttaatattataattttaatatttatattttttttttttattttttatttgtttttgttatta

SEQ ID NO: 39212 - DNA, 2672 bp, Glycine max
  Clone ID: PAT_MRT3847_135408C.1
ataaagagagcattacattacaataactctgtctcttttgtttaaaattagggaaacaaggaagcaaaatgacacaatagtccttcttccctgtttccactttccaggttttctccttctcgtttgttgagcgcttttctctccctctccctcttcttcactcagtcagctgccgtagaaattcattatggtggcaacagctgcaacttcatcatttttccctggtactcataaggctcgagatttcggtgccactcaaaacaatctcttttcctatctctcacacacccaaacccaacattattaatactcttccttctctttaccttttacttttcgaagcaaaaacaccataacaaaacacccagaatttgtgggttccattcccaaaacatagaacaagaaggagagagagagagagagaatgcaacgggagaaacaaaaaacagaagtatttctgtgattgattctctgcaaccgaatcatcatcagccacttcttctcccagtttcagctctcccctctctcttcttttcctcggctctggttctggaaggcgtagtatcgctggccctatcacattattgttaatattcttcccttctttaccttctactttccgaatccagaaaacaccacaacaccacccagaattgttgggttccattctcaaaacagagaacaagaaggagagagagagagagagaatgcaacgggagaaacaaaaaacagaagtatttctgtgattgattctctgcaaccgaatcatcatcagccacttcttctcccagtttcagctctcccctctctcttcttttcctcggctctggttcggtaaggcgtagggggttgttattattcttcataatggttgcaacagctgctacggcgtcgtttctccctgtgccttcgccggacgctggaaaagggaaacccaagaaactgggtggtggtggcggtggcggtggcggttctgtgaacctcggaggactcaaacagaaacaaggtttgtgcggtggcttgcaggtcaaggcaaacgcacaagcccctccgaagaccgtggagaaggttgagaatgatttgccatggttgccgtcgtcgtcgatttcgcacgccccgaggacttttataaatcagttacctgactggagcatgcttctggccgccatcaccaccgtgttcctcgcggcggagaagcagtggatgatgctggattggaagccgcgccgccccgacatgctcattgacccctttgggattgggaagatcgtgcaggacgggctcgtgttcaggcagaacttccccataaggtcttacgaaattggcgcagacaaaactgcgtcaatagagaccttaatgaatcatttgcaggagactgcacttaatcatgttaagaccgctgggcttctaggtgatggatttggttccacgcctgaaatgtgtaagaagaacctgatatgggtggtgactaagatgcaggttgtggttgataaatatcctacatggggtgatgttgttcaagtagacacgtgggtttctgcatcagggaagaatggtatgcgtcgtgattggcttgtgcgtgacgccaaaactggtgaaatcttgacaagagcctccagtgtttgggtcatgatgaataaagtgacaagaagactgtctaaaattcccgaagaagtcagggcagagataagctcttattttgtggattctgctccagttgtgccagaggataacagaaaactaaccaaacttgatgattcagctaatttcattcgcactggtttaagtcccagatggcatgatctagatgtgaatcagcatgttaacaatgtgaagtatgttgggtggattctggagagtgctccgcagccacttttggagagccatgagctatgtgccatgacattggagtacaggagggagtgtggcaggaacagtgtgctagattccctctctgatctctccggtgctgatgttggaaacttagcagatgatggattttttgagtgcaagcacttgcttcgacttgatgatggtgctgagattgtgaggggcaggaccgaatggaggccaaaacccttaaacagaaactttggtcatgttttgagtcaggttcctgttccagcagaaagcacctgaatctcattgattgacatcaatggaagagtggcataattcatgttcccacttgcagattggagagctttgcttgttgccttaaaatataaaacaaacaaaaaataataataaaaaaactcggtcttatcattttgtaattaaaaaatagctcctaccactactaaaaaaaaaaaaccgcttcgtttatggttatgctgctgctaggtgtcatcaaaatttaattgtttcataaaaatggctaagcgtgtatattatagttcttttttcttttcccttataagaaagatgcaatattcctcgtgaacataccaaaacaaataaagctatgtatagcttgcaggaaaggcctcctgggtctcttttgtggtttctattattagcaattaattgcgcacacaaatatgggtcatgtgacgggatggattctagctatatagacaacttcatatgaccggcactatcatgtagacatgtatgttccgagagatttaaccatttatgatttatccatctcaggctgtgatcttttttac

SEQ ID NO: 39213 - DNA, 385 bp, Glycine max
  Clone ID: PAT_MRT3847_135409C.1
ctcgagccgaatcttttcccgattactcaccacatgacactgcgggctgtttgatatcggatggcgacacggataacaccattgtattgtggttctagcaagcagggctgttgtcaggtttatattgacctcttcagtggcggcttttatgtggacacaactcaatataggatcacacttatacagaagtgtccaattgggaacttattgggagttgctgctgggcagaaaggactgctaatggacaagattgtgatgtctgggaatgcaatagtcaaaaggagagattgggcctcattggtacaagagtttttaacagacaggaacaggacagagcattttgatgcatgtgagtggacacaatcagaaccacattgctgggaat

SEQ ID NO: 39214 - DNA, 176 bp, Glycine max
  Clone ID: PAT_MRT3847_13540C.1
ttttccacgcgtccgtcaactatcaacaaccagatgaaagcctaagagtgatacattggtgaaggttcatttatagcctagttgtcttgaattgttttcatagatcatttgcttagatacagtttgttaaatttggtattcattcatcataagtcaaaaccctcatggtttgaatc

SEQ ID NO: 39215 - DNA, 2366 bp, Glycine max
  Clone ID: PAT_MRT3847_135410C.1
gcgtacgtaagctcggaattcggatcaacaatataaagagagcattacattacaataactctgtctcttttttttaaaattagggaaacaaggaagcaaaatgacacaatagtccttcttccctgtttccactttccaggttttctccttctcgtttgttgagcgcttttctctccctctccctcttcttcactcagtcagcccacgcgtctaaccacgcgtccgattacactgtctctctcttttccaaaattagggaaacaacaaggacgcaaaatgacacaatagcccttcttccctgtttccagcttttctccttctctctctccatcttcttcttcttcttcactcagtcagagatccaactcctcatataattcaagacaaaatcccgcgttttctgcatttctagactagacgttctaccggagaagcgaccttagaaattcattatggtggcaacagctgctacttcatcatttttccctgttacttcaccctcgccggactctggtggagcaggcagcaaacttggtggtgggcctgcaaaccttggaggactaaaatccaaatctgcgtcttctggtggcttgaaggcaaaggcgcaagccccttcgaaaattaatggaaccacagttgttacatctaaagaaagcttcaagcatgatgatgatctaccttcgcctccccccagaacttttatcaaccagttgcctgattggagcatgcttcttgctgctatcacaacaattttcttggccgctgaaaagcagtggatgatgcttgattggaagccacggcgacctgacatgcttattgacccctttgggataggaaaaattgttcaggatggtcttgtgttccgtgaaaacttttctattagatcatatgagattggtgctgatcgtaccgcatctatagaaacagtaatgaaccatttgcaagaaactgcacttaatcatgttaaaagtgctgggcttcttggtgatggctttggttccacgccagaaatgtgcaaaaagaacttgatatgggtggttactcggatgcaggttgtggtggaacgctatcctacatggggtgacatagttcaagtggacacttgggtttctggatcagggaagaatggtatgcgccgtgattggcttttacgtgactgcaaaactggtgaaatcttgacaagagcttccagtgtttgggtcatgatgaataagctaacacggaggctgtctaaaattccagaagaagtcagacaggagataggatcttattttgtggattctgatccaattctggaagaggataacagaaaactgactaaacttgacgacaacacagcggattatattcgtaccggtttaagtcctaggtggagtgatctagatatcaatcagcatgtcaacaatgtgaagtacattggctggattctggagagtgctccacagccaatcttggagagtcatgagctttcttccatgactttagagtataggagagagtgtggtagggacagtgtgctggattccctgactgctgtatctggggccgacatgggcaatctagctcacagcgggcatgttgagtgcaagcatttgcttcgactggaaaatggtgctgagattgtgaggggcaggactgagtggaggcccaaacctgtgaacaactttggtgttgtgaaccaggttccagcagaaagcacctaagattttgaaatggttaacgattggagttgcatcagtctccttgctatgtttagacttattctggtccctggggagagttttgcttgtgtctatccaatcaatctacatgtctttatatatatacaccttctaatttgtgatactttggtgggtaagggggaaaagcagcagtaaatctcattctcattgtaattagctactgctgtattctctctttctgctgctccatatttcatttcatctctgattgcgctactgctaggctgtcttcaatatttaattgcttgttcaaaatagctaggcatgtatattattattctttttctcttggcccaattaaagatgcaattttccttgtgaacacagcataattcttattcttatttatttttgtatatcctgtatgcaagaatgacttgtcctccaatacaactgtgattttgtatgctccatgtatagcttgcaggaaaggcctcctgggtctcttttgtggtttctattattagcaattaattgcgcacacaaatatgggtcatgtgacgggatggattctagctatatagacaacttcatatgaccggcactatcatgtagacatgtatgttccgagagatttaaccatttatgatttatccatcggaaaaaaaaaaaaaaaaacgagac

SEQ ID NO: 39216 - DNA, 212 bp, Glycine max
  Clone ID: PAT_MRT3847_135411C.1
aagatatgcacgagaactcacagtaatgatgttgagaatcggtgatataattccattatgcatgtgctgattgtgcgcctgtgcaggtgaattgagttcaggtgtctctactagccgttagatgcagatatagcgactctgttgcaatgggggcatctgctgtccctccgtttgatccaccattggctgcagtgagtgtagctgacaagctc

SEQ ID NO: 39217 - DNA, 517 bp, Glycine max
  Clone ID: PAT_MRT3847_135412C.1
agataatgaacgagaactggtaaagggaactttccgaatgcattacacagcataacatgagaagctattttctttttgggaaacaaaacttgaatctaaaattatagttatacatactcaccatttgttttatgtaatgcgacttcaccagttacggatccttcatctgctgccacaggaacagcttcatcttgcaatgattgcacatcttggcaatactataaattcattcaacaaggattatattagctgcttgtcactgaattttggcgtgttttttttctttcttttgggaagaaatcttgtcaccatttaatttttattttgttctcaatatgtgatagtttcagatgctggtaaaaaagagcttaccaaatcattgggaactattgctaccaattcttgttggctttgaagttctccaccaacagaactggataatgtaggaggcagttcagcttctttacaaggtctactagcatcctgagggactcctccaaatcaatagctccttgta

SEQ ID NO: 39218 - DNA, 483 bp, Glycine max
  unsure (1)..(483): unsure at all n locations
  Clone ID: PAT_MRT3847_135413C.1
accagcagatatgagaactccatcttcctctcacaaaagtggacttaacaaaggcacttggactccagaggaagatgccaagttaatagcttatatcactcgttatggctcttggaattggcgccaactcccaagatttgcaggactggcaaggtgtggaaagagctgcaggcttaggtggctaaattatctcaggcccaacataaaaagagggaactatactaaagaagaagaagagattataatcagactgcacgaaaagctgggtaacaagtatgctctcacattccaagctaaactaaatttcccacaacattgtacagcatcaaaagctagacaggggaactataagattttcccttacttcaacacctacagaccaatgcatcttgcaaagtccactcataattaatatgacaataataattgggacaaaacttataagtaattcatacatgtntatttttttaagtggtgctttta

SEQ ID NO: 39219 - DNA, 513 bp, Glycine max
  Clone ID: PAT_MRT3847_135414C.1
gttgttttgtattgtgtgacagacaactcaaataaaccatggacgcgggtcagatgcagagacagtggatcgactacaccaaatccctcttccttgagggcttcctggatggtcagtttctgcaacttcagcagcttcaagatgagaacaaccctgactttgtggtcgaagttgtctctctcttctttgaagattctgaaaggcttctcaaagatctcacctttgccctgtcagtactattattatcatcataccactctccttcttttccttccacagttcatgcattcatttttcacgcatttagaattttgagttgtcccatcttcattcaatggtggttataattggaccatgcacttaaaaaaggcaacttccaaaggtttataatttttttcaggtatactttattttattattttaatgggtaggatttcatgctggcgcctttggggctgcggaaaatcagaaaatgcacactgtggttatgaatggaactgctgggtggggggg

SEQ ID NO: 39220 - DNA, 418 bp, Glycine max
  Clone ID: PAT_MRT3847_135415C.1
ctctcgtcgaattttaaataacagaaacccataaatactatgataaccggatcgaacgtgattgatcatgatggtgataaataagaagttcgtgaatggccaccatgacttacacatgcggacaatggtgcagcgccggacttgtaataggaacatatgggaccttgcttggggattcttttcacctgaccatagatcggaaccgttcccataacatggtatgcctgcactgtaactatagcaaacggaccttggatgctatcagccgtaacagaatatggtcccaccgtactcgtaaccaggcccaacgggcctgcctccgtgctcggaggaggatcataaagaatccgaaagggtaccggcatcttagcggtgataagcggtgtgacgggtaactgtccaaggagatgacttatgc

SEQ ID NO: 39221 - DNA, 372 bp, Glycine max
  Clone ID: PAT_MRT3847_135416C.1
ccataaacagaaccagcccgcgttgttgtgaacatagaaaatgtggtcaaactacaagtgtacatattatagatctattcctggaagttattcatgcatagtagttctccacgaaacaattacagcgttgactgcaactagaatttcaagtctcatttttggaaagctctatctttaaggccaggttcggtattctaggctgcactggccatttgccacataaggggtgagcaccatatgttagtgacttcctatttttgttgctaggggcggattaggagggatcaccacccctgattacggtcgcgcttggcactttctcttcatcctcaatcttctcaattggaccattcttgtttgtgattttgcccg

SEQ ID NO: 39222 - DNA, 1597 bp, Glycine max
  Clone ID: PAT_MRT3847_135417C.1
gtgaattaataacttgatatcgagctctgcatcaatatggtgtgaaatcaaagttgcaccttcttttgttgcgaatttcttgccttatattaaaacttaccattcgacataccacagtgctacattaaaaacctctactactacatcataattgttcaaacaacgatgaacctataaagttgttttcaaatgggcttctggacggttgaaagatcccagattgctgaaatttagattgaatttggtatgtttcctcatacttgttcatctcgaactatgtttcccgcgcctaagttactgagagtgatgacatcatgattagaatgatcctcctctttgccgttgttctcctctactgtttgcttggatggcaatgtatgctttttagtaattgaatttgatgactcgtagtcattgcttttaccccacaccacaagatacagtcctaaaataattacaatagctccaaccaccctcccaaggtacattatttcagccagaaagaaggagcccatgatagccacaatgaccatgcagagagggttaaaagttgttacaaagaccgggcctctatctttcatcactgctccttggatgtaataagccattcccgagcaaactatgccactgtaaacagcagcaagcagttttgtatcccattgaagagaccaagcagaaagattcttcctttccataaccagtgccactacgccaccttcaactgttcccaataggcatatccatgctgtaagagagagctcagcagggtaggcttcaatggtaatagcttggagaatcatgaaacaagcgcaactaaagcagccaattgtgatcatcactgatccctttattgcatgttgaagattcaccccaccattttgctggttgtgggtactacttgcgtgtgttccaaaaagatcaagtattgggccctttatcagggtcatgaccatggcacctacaacagtggctaaagtccctaccacctttgcttgactgcgtatactttttagttttaccttctcaagcctaagaatccaagccatgacaaaggtaatggcagggaggacattgtacatggaaacagcaaaggttgctgtggtgtacttcatgcccaaaaaatacaaattttggtcaataacaggctctagcaagctgagaatcattatcttcatgaagattgaaaatgtcatcttcggccttactttcttctccaagatcagtgcaaaaggggccatgacaacaaaggcaaaaacatgacggtacacgacaaatacatagttactcattcccttgttcagtgcagctttggatagaatatccataccagcatatccaaactgtaagaacactacacctatgaatggcttcagtctgttaaagagtttttgtttatcaccagccatcttgtttcagctcggaactaacctatttcttgaggcacaagaataagatagcacactggtgcaccacagaaagctcgtgtttatataggggccggagggttgtggtgtataattaatgcaattagtacttagagacttagtagtatatatactatacattatatttatacccacaaatagcagctcgagcc

SEQ ID NO: 39223 - DNA, 290 bp, Glycine max
  Clone ID: PAT_MRT3847_135418C.1
ttttaaattagaaactggcctggagaacattgcttgaaattattagagctataccaaaagaaacgttcgaaacccttaccaaacgggtgggtttggaacaatacatgctttttgcccctaaataaattagcctctttgctaaaacatgcacaggtttgaatctctagccagcactcccgataggaatcccacaaagctagatttgcttctaatgaaaggaaccgtatttctcgatctgaacacccgggcacttgactctccaaattatatcctcgccaacgagagtgaat

SEQ ID NO: 39224 - DNA, 445 bp, Glycine max
  Clone ID: PAT_MRT3847_135419C.1
caaccgaaacctgcaaccaatgggggttgaataatggtataaagccgaccacccactggattctaaaaggttctaaaaaggaaatgggaaatgttggactctgaaaccttattcaacaaccacccccttggcaccgggagggctctcccagacccaagggtgggttgcaaacagcaaagctttgaccaccctcgtaaaaccaacaggaagcgatttgcaccaaacaattaattcattttgatcaacaaaaaaaaacaaccttctccaggagccaataaaaagaacagacccctactcttgtcttttgacggggggagggataaagccaaaggccccttttctgccagaggtgccatccctgggggagccagaccaccaacacccccccgagagggggctccacttcctcctaccgataaaaaagcttgaatatcaatacttgtgc

SEQ ID NO: 39225 - DNA, 871 bp, Glycine max
  Clone ID: PAT_MRT3847_13541C.1
tgggatttttagtccattgaattggatatatttatcctcatacatgatcttaggagacatttgtttttggtaaccactcgtcccaagcctaaataagttaaaacacagaagaaaatgcagaagcggagggcagggaggaagaagttccacgagacacgacacccggtgtacaagggagtgaggcagaggaacgggaagtgggtaagcgagctgcgacaacctaacaacaaaaacgcgcgggtgtggctcggaacattcgcgcaccccgacatggctgctatagcgtacgatgttgccgccttggctttcaagggcgacagtgcttccttaaacttcccgaacgccgccacctcgtttccccgccttaactcgcggacgtgttccgttagggccattcagtttgcggcgacgcaggcggcggagaagcatttttcttgtgtagagtctcaacaactccaaagggagggatcaggctccggaagcttctctttggacgatgattcttcggagttttcgtcccaaggaaggttcttttgggatgaagaggaagtgtttaacatgccggagttgctgaactgcatggcggaagcgctgattatcacaccgccggcgttggaaagagggttcaattgggttggtggcgaaacgactgtggatttgactctgtggtgaaactgatgaccacttaggttctctgcaaaccagagaggaacttgcaatttcgatctgttgcaaaatattatatatactaatagtctaaagatgtagttcatcatatatactagtactgatacattcaaaagttatatagcgtttgctgtatggttgagattttcgtcaaaaacaagctgtatcataaatcttttctgtt

SEQ ID NO: 39226 - DNA, 968 bp, Glycine max
  Clone ID: PAT_MRT3847_135420C.1
acgctgcgaggtacgctgcgagaagacgacagaagggggtgctctttcgtggttgtgccacctctataattctcttccactgtcttgtgttctcctgcaagcctgcaaccacaaaaaccaaatagtttttttggtcaaactcaaagcttttaacttaacagaagcaagaatggtaaaacggagttaagcaagacaaaggaagaaagaatggtgagagagcataacattaacagtggatggccaccaataggggccccactactgaacgtgcagagagatgagtatgatcagcattggagcagcttcgatagctctgtgaatgctgtttcttttggctttgttgccactgccattcttgtttccatgttcttagtcatggctatctttgagaggtttctcaaacctacctcgccgcccattttgccgtccggcggcaggaaccgtcgccggagctctcagatggacttcaatgggaagcttggacacccttcaccgaaaattgtctaatttgtacagatgagtttgtatgccagctgggtttcagttttaatgcctggagatgcgactccttctttcattgctcaccctgtgcctgcaccatgttgccctgaacgaatttcatggccttcacatcaacatagcacattaccatattccacttacaacaccatgcctagtatcaaccacgtataagaagagaattcaatataacatggttctgcaatctgcatgttgcatcaaggagtcaaatgaattttatgtgaagagtagaatcttatgtaggagctgctctctttattagtttatagtataccatgtacataggatttagtttagtgcaaattgggtttgataatgagatccatctctgtccaaatgtttcttccgtgtaattgaagctttgggatttcccatagtgtaaatcagtggttctgaattgcaaaaaaaaaaaaaaagcggacgcgtgg

SEQ ID NO: 39227 - DNA, 366 bp, Glycine max
  Clone ID: PAT_MRT3847_135421C.1
tttttttttttttttttttttttttttttttttttttttttgcttttggaaaagaaacttttttttcccccggggaaaggggggacccaaatttcctttggcctaacaaaaaggaaagaaaacccccacttaaaaaaaatttgggttaaaagctttacaaccaaacaaaacattgtaacctccaaagaattggggcaaccaaccaatagcccaaaaccgcttagccaggtttttgacccccggtagccaccatattacacctcctgcgaaaacgggtaacgaaaaactggttctttggataccaaccctgggttttattcccccaaaaaaaagcccagccaattttcctcaggaagggggaagggg

SEQ ID NO: 39228 - DNA, 967 bp, Glycine max
  Clone ID: PAT_MRT3847_135422C.1
cggccgctcgagccggcgggcgggttactttctttctttcctgttatactaatctgggtctttgaagagcaatgactgtgccaatgaagttaattgctcaacaataataatgaacagagataactagctatattatgcttatgtctaaaaatccttcgtatgctcgattggtttcaaaattcatgatttatcgcttctttcacacaatgtgtcaatttcggtcgctttgctctgattctgattttatgtgttccaatgtctctctggcttgcatacgccattcttattttcagatcagcatagcctagccggttagatatggcagtcactatggcactaatgaccaggcagcatctgctgacctacatctaccttctagtttacatttcactttcatcaggggttattctgtacaacaagtgggtcctctccacattgtattttaattttccatttccgataacactcactatgatccatatggctttttctggtggggtggcctttttccttatccgtgttttgaaggttgtgtcgccgattaaaatgaccctccatatatatgcaacttgtgtggtccctataagtgccttctttgcagctagtctgtggtttgggaatactgcttatttgtacatttctgtggccttcatccagatgcttaaagccctgatgccagtggcaacatttcttgtggctgttacttgtggaactgagaaattaaggtgtgatgtattctggaacatggtgctggtcattgatggagttggcatttagcaacatggggtgtggccgttacttgtgctcgtgagaatttatcaggtgacatgatctgttgctgaagcttggtgactgttggagttgtcatttcctcctatggggaaattcattttaatgtgcttggtacagtttatcaggtcacgggaatggttgctgaagctttaagactggttttaactcaagttct

SEQ ID NO: 39229 - DNA, 776 bp, Glycine max
  Clone ID: PAT_MRT3847_135423C.1
atttccaaaagggcgatcctatatcagtttattcgcacgtaggcctgctcgcgattgtgcttcctcctctatttgatctcatgtcaactgccacgaggctgccagcgacgacttccgcgatcatggcaaaatgctcatagacacatcagcgacatgtcctgatcgcactgcccggtcgtgcctgctttcgatctcaacactctcctaagactcaacatgagcttggtaaaggttccgcaatgcattgtgaatactctctagaggacaaactgacaaaaccgtagcgacttcagaacccatacctggtgatacgaaatatgacgatttcggcatcgagtcgagcttcatcttcaactacgactccgaatacgagctcgatgataccctctctgatgctttgtgccttctcgcaatcgactaccgacaacaacgagtgctaaacgactccctcgttaccaagaatagatacagtctcatcctcagccagcgttaactgatatgatgattcttaactcaggacaagtcgccacgacgaatgtctgctccagcaccgagaccccatattactgagaatgatgactttaaactcggggctcgcgtaaccgataatgatgattgtgaatcatcaccaagtgtgaccggatatgatggtttagaactcgtatccagcattaccaccagcgatgattttgatgcgagaccggatattagctagtatgatgactttgcatccaggtcagataccaagcacgattctgcacctaaagcaagcgcta

SEQ ID NO: 39230 - DNA, 161 bp, Glycine max
  Clone ID: PAT_MRT3847_135424C.1
cccaattcacctgaaccctgcgcactacggcagtgggattattagagatggcagagaaaagggcacggcttgctttaagtggcgggggcatgagcaatgtgagatgacgggtttggatcctgagtagaatacgttgttcaaggggggcgtggtgtgcactg

SEQ ID NO: 39231 - DNA, 120 bp, Glycine max
  Clone ID: PAT_MRT3847_135425C.1
aagacgcctgaaggctgttccgagtagtcttcggactgatccagctgcttattgacttctcattgatgctgcttgtaaacaacttcataatgattcatttgtctaatgataacattatgt

SEQ ID NO: 39232 - DNA, 190 bp, Glycine max
  Clone ID: PAT_MRT3847_135426C.1
ttcggcttgagacacggctagaagacaaccgacagagaggggcaggagactgaccactccgttctgtctacgtgcaagtggaaaccggcctctattcgatatgatgacatttaagacattggcatcttttatgccaccttcaccagctgctacatttgttgcatttcatcctcaagacaaccatattatt

SEQ ID NO: 39233 - DNA, 501 bp, Glycine max
  Clone ID: PAT_MRT3847_135427C.1
ggctcgagtgaaattttcaaataccctttcgtgtatctatgcttgttttgggattggtgtttgattatccggtgattgcgtagtgcaagctggaactctcgtcccaacactattttccaacttaaaatgaatattatgcaaattgctaacactattctactggaggttattttgaaagaggaaaacaaaattatagtagaacaaatggttcccttttctcggtattaatgacttaaactttgagggccaatgtgttgcacaaacatgaacaccatagtttcttgtcatgtattaaattctaatatagactaaggatgtgtttggtttatatgatggaaaaagaagagaaacttttgaattctagtagagtgtaaaaagtgtgggtcccacaaaaaagtacaaaatttctctcctctctaccaaacacaccataaatctgtggtttgactgataatttggtattcttttatttctatttgactatccttcggctcctctatc

SEQ ID NO: 39234 - DNA, 609 bp, Glycine max
  Clone ID: PAT_MRT3847_135428C.1
tatgtttgggatctttttgatgagatgcttgatagaggtcaacctcctgatgtaatcacctataataacttgatagatgctttatgcaaaaacggtcatcttgacagggcaattgcattgttcaacaaaatgaaagatcagggaattcgaccgaatacattcacattcactatacttcttgatggactatgtaaaggtggaagacttaaggatgcacaagaggtttttcaagatcttttgactaaaggatatcatctcaatatctacacatacaatgttatgatcaatggacattgtaaacagggcctgctcgaggaagcattgaccatgctgtcaaaaatggaagacaatggttgcatccctaatgctgttacttttgacattatcatcattgctctctttaaaaaagatgagaatgataaggcagagaaacttcttcgacaaatgattgctagaggcttgttgtaagactaaaactatgtgagaagtttctagttacactctgtgaaaaataaatcaatgtaatgggctcactatgcctttacttttgattaaaagtcatatgtacttagctgcattttttttatgttataaatataccaatagccc

SEQ ID NO: 39235 - DNA, 242 bp, Glycine max
  Clone ID: PAT_MRT3847_135429C.1
ggagaagtggggtttctgttatttatttatttatttattgggtttaggataggtgggtagggtaaaggcagagggggggaaatttaattgtgggtaaccaatactttacagggtgatggtgatggtggtgtgggtgggttatgaaaggtgtatatgtatagtttccttttctaaaacctataatcagtggatatgagacggaggttaatgcaaaatcaaaaaaaaaaaaaaaaaggggcggc

SEQ ID NO: 39236 - DNA, 187 bp, Glycine max
  Clone ID: PAT_MRT3847_13542C.1
aaatgggttcaacccagctttaattgttttcctgcttgttggtgggttgctgcggacatttcttataggggactatgtactctacacatgtgcacagaagaccctccttgctagaaataagaagccagtctcattgaagaagatgagaaaggagagactgaagcaaggcgtctctgtacctggagag

SEQ ID NO: 39237 - DNA, 322 bp, Glycine max
  unsure (1)..(322): unsure at all n locations
  Clone ID: PAT_MRT3847_135430C.1
acantanctnnnnaanctaacnttannnctcaattatactacacnaananaaannttaacanaaannataancaaacatnannaaatcanantctnacaanatanaatatnatacncntctncannaaacntcattnntaacatnatnccactacatatananannnnacannnntaacatacaantananncaataacncannatcnnnatnacnantatacttatntnattaananncnatananacaaaaaaaanntnnaaancnnnatnncaaaaatacanttatnacanataananataantaannaatnnnnccan

SEQ ID NO: 39238 - DNA, 427 bp, Glycine max
  Clone ID: PAT_MRT3847_135431C.1
cgagacatagtctcttcacgatcttaattcactcatgtacactatctaacttacataaatagttcgtcctagttagatcagttcagttttttttccaataaaaaaatgtctctttaaaagactcatgtatggtattttcctcactgcatacaagaaaaaatacaagaatctaaaggtggttaataaaatacaaaagaaatatcagaaaataattaaagcaaaacaacacacaaatactaaaattgttaagcgtagcataatttttagcaataaaagtgatttaattgaattgaatataaacatgagtaatgaaatgaaccactcacggcaattgagatataagcatgtttactgttcacaggcccgactgtgaagccagtatatgcagccatagctccatgaacagcaccatgtgcaagaagagtgc

SEQ ID NO: 39239 - DNA, 257 bp, Glycine max
  Clone ID: PAT_MRT3847_135432C.1
ctgaagagagagaaagaaagaaagagagagactttcttcttttctttctctcatttctcaatgaaaggggaagtgaaaatgaagtcaaagatgaaatgggttggtctgctcggccttgtgctctcggctttctctatcttcattcatttcctccttgctagattcactcaaatgggtgttgcagaatatgagtcctctgttacaatcttctcttggagaccgtctttgagaaaccaattccccccacaaatactccc

SEQ ID NO: 39240 - DNA, 241 bp, Glycine max
  Clone ID: PAT_MRT3847_135433C.1
gcatcgatttcgcgcgatcgtgagcactgaattcagacgatcgtgagcagcccgctacggccgatgggagatagagtcagtgttctggttggccgtcaagggtgatggttttggcgctgcgttttcgcatgctttctccggtgagctggaggcggtgggcgttgtggacgaggcgatcgagaatggcgtcggcgaccgtggggtccccaatggctccatgccaggtgtccacgggagctga

SEQ ID NO: 39241 - DNA, 288 bp, Glycine max
  Clone ID: PAT_MRT3847_135434C.1
aacactaaggaagcggacccatctaacacacggggcccaaactaccgatgtccgacatcgaactcccaaccttcacgtctcccattaagcgcggatggacttcttcaatctaccactcactagcgactaccttaactatcatcttcaaaccaactttacccaggaaccttaacccatttatttttattactatataaatctaaattacactcctttgctccatatttacaactatcattattatatcattcacatccccaaataccattatacataaactcctcaata

SEQ ID NO: 39242 - DNA, 187 bp, Glycine max
  unsure (1)..(187): unsure at all n locations
  Clone ID: PAT_MRT3847_135435C.1
ttctccttaatcgctccctccctatataaactcgctctcctttgctttcttcctgttacttcacttataaaaaatctccccgcgnntnnctncngccccttccgtgcttccagcgaccttccacccacacatgaccgacctgcaaaccgtttgcggaatgaccggcgacgtgggttcccccgacaag

SEQ ID NO: 39243 - DNA, 319 bp, Glycine max
  Clone ID: PAT_MRT3847_135436C.1
gggattggtatgaaacttgtgcttcttactagagttgacccttttccagtggctctgctggctgttcttcttggcgggcagaatgaaattgtgaggtctaacgccactaaccctatgctgacgcgagttcttgagaactagaggaggctgacagctctggatgaggagcgtgctcttgcactagtgaacgaggatgatagattgtagccactgaaagaaagcgcataactatgggcagtgagcgtgttgaaggatgcaaaggaagactgggatatgcttcattgataccatatgttgaggggggggcgctctctaggag

SEQ ID NO: 39244 - DNA, 432 bp, Glycine max
  Clone ID: PAT_MRT3847_135437C.1
gtaaactttaaagaaaacttaggaagagtaagtataatttacttgtatttgagtacttagattttttttctctcaatataactattaataaaaaaattattgacgttttaaaaaatcttatatatttctcaactttaaaacatttcaaaagtcatcaatttaagatactaactttatatattttatcttatattaaaataattaagtgactcctacaataatacatatatttaaccaattcatacataaaattactccaataatataaaaattaagcaacttatatttttaaattttttatttacacttaattttgtatgaaatagatactagcattctaacatgctcttaaatttagaggttataaaaatttgttaaatctatttttgagccttttgaatttaaatgattaagccaagatatactaaatta

SEQ ID NO: 39245 - DNA, 139 bp, Glycine max
  Clone ID: PAT_MRT3847_135438C.1
gagcgatggcgtccacgcgtccgttaatattctccatacacatcaaactagacatacactacactagcctagatctgtaattccacacaaacacactaaacactatgagcatcattcactctctagctaattgatcaag

SEQ ID NO: 39246 - DNA, 641 bp, Glycine max
  unsure (1)..(641): unsure at all n locations
  Clone ID: PAT_MRT3847_135439C.1
atgaagagcttgccaatgaagccaaaagagctgtttctgctgaaaaacaaaggttagcaaaggaggtagcatccatgctaaaattgagtgttgagattgataccagctcatctgaaagtctagctaagattgtggctgcactacgtgcgggagctgaatatgcagggatacccgtctgcaactgtgtccttgttgcaggaagccaatctggcgtagctggaggtacacaggtgggcatgccatgtgttgttttacgaagcagtttgacatctagagctgagtttccattagcaaatgctacaatggatggatnnngaggtgcagatctgtcaatttcaaaattacgtagtctacgccccaagaacaaccacaggcactgaatgagttctatatcaatttaccttacccaagaaattagcaagaaacacaacataattcacacttgctctggatttgaagcttttgtgcgggcaagcaaagggagtttaaaatagtcatcgcttttccagcagcgtgaggaaagattattcttgtttgggattggctgtggataacctccactgtagttgctcggggttatcatctttgtttctgttctgatgtaaattcctatcttaatggaactgagatctttcttgcaa

SEQ ID NO: 39247 - DNA, 482 bp, Glycine max
  Clone ID: PAT_MRT3847_13543C.1
atgaagcgagtgtacctggagatgtgaaattgtacattgaagaacgagtcttggaggagatttgttgaatcctgcctgtgctatacagaggatgattatgttgatcgtgttctaacagagaacaattacattatggaaaaaactatggtaatggatgaagctatatgaggaggttatgatggattttttgaggtaacatataatggtatctaaggtgctaaacacacagagtgtactccgacacttgaagaagcttgctccatgatatagcctgactacctatacactcatctatacacatatactcgtacatgagcctgactgctcgtctgtatgtggataaaatctaagaggtctactagaggccatttctctaaaggatgcccaggaaggacttaagattgtatagagatgtctgagaatccacttgtacgatggagaactacataggcacgttgtgctattcgacaggtgaagtgcct

SEQ ID NO: 39248 - DNA, 521 bp, Glycine max
  Clone ID: PAT_MRT3847_135440C.1
aattcggcaccagggcacctgaatatgcaattggtggactattctccatcaaatctgatgtctatagttttggtgttatattgcttgaggttttaagcggaaagaaaaataaaggattttccttttcaagtcagaactataatcttattgcacatgcatggtggtgttggaaagagtgcagcccgatggaatttatcgatacttgtttaagggactcatacattcagtcagaggccttacgatacattcatattggacttttatgtgtgcaacatcaacctaatgatagaccgaatatgacagctgtagttacaatgttaactagtgaaagtgctttaccacatccaaaaaagcctattttctttttagaaagggttttagttgaagaagattttgggcaaaatatgtataatcaaaccaatgaagtgaccctgtcagagatgcaacccagataaaaaaaaagtgatttgtttcttaccacaagcaccaatgataaggggttgtgttatgtcctaccaaaa

SEQ ID NO: 39249 - DNA, 240 bp, Glycine max
  Clone ID: PAT_MRT3847_135441C.1
ccaagggattttgtcaaggaaaagacactaatggtaaagaaatgagctgcgccgcgcggctagacatcaagtacacaccaactccttgtggaatctggttgaaaaagacagaggtaaatgtggagaattatggaggatgtccacctgctcatacggaaatcagccccagaaaagattagcggaggaaactaaccttagatactaatcaagcccttagatggaaaagctacctctacaaag

SEQ ID NO: 39250 - DNA, 296 bp, Glycine max
  unsure (1)..(296): unsure at all n locations
  Clone ID: PAT_MRT3847_135442C.1
aaaatgaaagtccttgttttctttgttgctatagttctagcagcatggcattgccatgggctcagaccatgaccntgacccatggccacacctancaaattttccctctgagnatggaaactggncatggtggccactaacattccggaggtatcatggccaaagttnngaggccttgtgtggaagnncacaacgtcctttgactgggaaaccgttcctnaagatgcncagggatatatgggaactacatgcttngcggacnatntnnntccggctncaanatagttaacccacca

SEQ ID NO: 39251 - DNA, 142 bp, Glycine max
  Clone ID: PAT_MRT3847_135443C.1
acctaatcaattactggccgcgtttcacatcatcagactggaaaaccctgggttcccacataatcgcttgaaacatacactttcgcagctgcgaatacgaataggccataccgatcacacttcaacagtgccagccttaatg

SEQ ID NO: 39252 - DNA, 1590 bp, Glycine max
  Clone ID: PAT_MRT3847_135444C.1
ctctttttttttttttttttttgttgtgaatccagcaatacataccaagtaggaaagaataaacaccatatcagaatatccaggttgaataaactgatccaacttggggtttcaatgacagactctccaacatgtcattcagttcatttaaacaatctaagctatattcccaacaaaaataagcactcaagggcaatcagaaacacgtatacgttgataattaatagttggcagaagtgaaactgaaaaggtaagttggacatttttaattttaagcattataatcgaagtcaatataatatacacacgtgataacgctctgagtgcttcgccaactgggggagttacaagaaagtagaaatacagcattaagaaaaagggtctatgagtcaagctgagcataccagatgccttggatcttaacatccttaggagctttagcccccaaatcagtatcagaaggctgaacactctcgaagaccccaataacctcaccagtctcaggcttggtcttggtgacactcaaggtgattttgcccttggaagaagaagcactcttgttgttttctttagcaagttcctcttcatctcctctgccaccagcaggcaaagcaacagcattgtcataaccagttgaggcaccccttcccttggggtccaagaaagaggaaccacggtaagaaggcactaggaactccccactgaagctgtctggtttcccagatgccaccaactgcttaatggtaaagaggaatggcacacgctctcccccgggaagctgaacagtgacagcagcatagtcaattccgtctttctcctcgaatttcacggttccatcggatgtaacctcgaagggaccctcaatctcgtccagggtgtaggtgagacgagtcatgagcttggtgttctggaattcgggtggggcgttcttggccacgccctctgccttcaccgtgaaggaagttggttccaggcacaacttctgggcgttgtatttccctggcttgaaggcgaatgagtccactccaccttcaatggttgggcactggttagcagttccagttcccttcacttccaagtatgtcttgctctggatttcgtcgaaggttagcctttttggaacaccttctgcacttgctccagaaacaacgagagcagaggtggcaagggcgaatcctgcaattttggtagcgtcgacacatttttgagcaaattctttgagatcaggctgaagggagcaagtgagtttagctgcagcaggttccaagccaaaagccttagaaatgcattgtgtagatttgaggttgcgagaggctatgccaaccttggtgggttgcatgaaggtagctgcagcttgtagtgaggcagccattgttattgttgttgtggtcaccaaagagtgtgtttttgtttttattgaaagcaagtagtactagtttgtaagtgatggatcatggatggcagagaatcgacacaacacaagtatttggtggcctgctgtgagtaagatttccgatagggtaaggccaactcttattggatgactcaagctaatgtcaatggttttcttgttgccacgttggaatcttc

SEQ ID NO: 39253 - DNA, 1705 bp, Glycine max
  Clone ID: PAT_MRT3847_135445C.1
aggggcattgggtgggcctttttcctaattaagccacttgggaaaaaggggttgttttgcaatccatttaatttgggaacggaagggttttttctagagccttgacgtggtaaaaacgccgggcccgtggcttttaatttagggtacccaaaaaaaaagattttggcgtttagcggcgcccgggcaagtataaacttgtctctcttttaaaagtggcccgccccccctttttgtgtttaatgttttttttctagggtgtgttccattttttcttttagttttttttttttttttttaatgttgttttttttttgtttttttttttttttttggcttttttttttttttttttttttttttttttttttgctccaaaaggtaactcagacattttaattttaagcattataatcgaagtcattataatatacacacatgataacgctctgagtgcttcgccaactggggtcacaagaccgtggatggagttacaagaaagtagagttacaacattaagaaaaggtctatgagtcaagctgagcataccagatgccttgaatcttaacatccttaggagctttagcccccaaatcagtatcagaaggctgaacactctcgaacaccccaataacctcaccagtctcaggcttggacttggtgacactcaaggtgattttccctttggaagatgaagcacttttattgttctccttggcaagttcctcttcatctcctcttccaccagcaggcaaagcaacagcattgtcataaccagttgaggcaccccttcccttggggtccaagaaagaggaaccacggtaagacggcactaggaactccccactgaagctgtctggtttcccagatgccaccaactgcttaatggtgaagaggaatggcacacgctctccccctggaagctgtacagtgacagcagcatagtcaattccgtctttctcctcgaatttcaccgttccatcggatgaaacctcgaagggaccctcgatctcgtccagggtgtaggtcagacgagtcatgagcttggtgttctgaaattcgagcggggcattcttggccacaccctctgccttcaccgtgaaggaagttggttccaggcacaacttctgggccttgtatttccctgccttgaaggcaaatgagtccactccaccttcaatggttgggcactgattagcagttccagttcccttcacttccaagtatgtcttgctctggatttcgtcgaaggttagcctctttggaacaccttctgcactcgctccagaaacaacgagagctgaggtggcaagggcgaatcctgcaattttggtggcgtcgacacatttttgagcaaaatctttgagatcgggcttaagggagcaaatgagtttagctgcagcgggttccaagccaaaagccttagaaatgcattgtgtagatttgaggttgcgagtggccatgcccaccttggtgggttgcatgaaggtagctgcagcttgtagtgaggctgccattgttattgttgctgtggtcaccaaagtgtgagtttttgttttgattgaaaccaagtagtactactttgtaagtggtttttgtgagtgatggatggcagagaatcgacacaacacaagtatttggtggctctgctgtgagtaagatttccgataggataaggccccccttctgtcgtcttctcgcagccgta

SEQ ID NO: 39254 - DNA, 320 bp, Glycine max
  Clone ID: PAT_MRT3847_135446C.1
ttcaaagcgcaggctacctcaaatcatgaatacccagcatgcagactggatctctctccatagccttaaccttgacactgttgctactgaccaacgcagatgactcagataaaactggcattataaactacaacaatagcccgccaaaacaaccagacctgatcatcctaagagacgctattggaacctacactctaatagttacaactaaataaaagggactaagaccgtgccccactatccttgactattgactctgcactctactacaaccccatacacatatgacacagataaaccctgcatcgacaaagacttct

SEQ ID NO: 39255 - DNA, 402 bp, Glycine max
  Clone ID: PAT_MRT3847_135447C.1
ggggggggaaaatcatattttttattttaaaaacccccccccatttaatttccaacaaaaattcttttttgaaaaaaggaaaacctccaaacctcttcctaaacatgctgggtctttttaacccttaaaccaacctttaaaaaaaaaaaatttaggggaaaaaatgaaaaaaaaaggtaaaaaaaaaaattcccccgggccctaaaccccccccaggcaaatggcaacttttttttttttaataccaatggctaccttgggccccctaaaaaatctcccctccttttgctttcccccgccaaaaaaaccacccccaatttctagggaaaggcttctaattacttgaacattggccctttgccttacaatcggaaaggtttttaactttttgcggggggccct

SEQ ID NO: 39256 - DNA, 354 bp, Glycine max
  Clone ID: PAT_MRT3847_135448C.1
aatcacaaccttttgaatataaaatttgaattttcaacaactggcttacaaattattcaactgcaacatgattagattttgcatcatttcacatcatagctaacaacctgtagttttacaaaaggcaaccatgccacatttttgggaattatcaatcaatcccacatatgggaacccctgtttatggatccaaaaatgttttaaaatactgtgacctgcttgtggtactttaaactgccattgcttgatagaaatttggatgtgccaatggttgtcttgcgtgtgaacctgtcctggcgagtcgcatacaatgagtttagtgagaaatgtagttgacttaaggaacacagaatg

SEQ ID NO: 39257 - DNA, 215 bp, Glycine max
  Clone ID: PAT_MRT3847_135449C.1
gtctttatagctcatgagcagcattgcatttgtggggaatttttatcttgtgcgcactactctttaatattatttcttactaattttaggaagaaaaaaataggctttagactttatgtgctgatggttgagtatcttgacattcatttattctggtttatactaatttctgttgcattttattaaaagtgttgatttttttttttaggcttttt

SEQ ID NO: 39258 - DNA, 201 bp, Glycine max
  Clone ID: PAT_MRT3847_13544C.1
gacgacaaactttacggtgtgaacattgttatagttgtaggtacataagagtttattagatgccttatttacaattttttagatgtttttggtattgttcttcaatcaaagtcatagagtttttgtgtttttatttaccagtccaatgttaatcattagtttttgttagaatattaatgggaatttttccttttaactctc

SEQ ID NO: 39259 - DNA, 543 bp, Glycine max
  unsure (1)..(543): unsure at all n locations
  Clone ID: PAT_MRT3847_135450C.1
ggctcgagaaaaaaactaacatttttaggttgtgctcgaaattgaatgaaaaaaaatgcagaaagaagaacaagaaaaagagtatttagaatcgttgacgtgtccaagcttcaactgctactccaccgatgaactcccaggtatcgctcaaagcaggattcaaaaggacgacgcgtcgttttcggcctctcaaaatgacgaccctgacttcgagttcgccgcgtttcgagacgaacccttcgagttctccaacgacgacgccgttttccctctcttcaacagcgacgttgcgagggaccgccggaacagtgtctccggcggtctcgattccgacgcggcggtgctccggtttccgataaccggcgaggagcttcgaaggggtgagcacgatccgtcactgtcgccgtcgtcggagtcgtcgtcggaggcggatgagttggaggttgttccggcggngacgtactgcttgtggaggtcgaattcgcctcaggcttcgccgagaaagtgcaagaagagcaattcgacgggatcgtcgtcgtcgtt

SEQ ID NO: 39260 - DNA, 388 bp, Glycine max
  Clone ID: PAT_MRT3847_135451C.1
aaagaaagctaatgagtgtgctggttcaaccaggtttaaccacacagattacctggtttagaccctttttaccaaagattttaccgtattcgaagaaacctggaaaaaaaaatcttggttggattttgggaaggggcttggaaaaaaaatccaatggcacaaaatcccattctaaccttaacacctggaaaatattacaccttttccaggtgaaattcccctggcccagggaaccattttctagtaatccttataaaatgaggtcacctggttaaagccttttttatgaaatactatggacttttccttcttatgggaagccataccggcggggatccttcaaattaatttaatagattgggctctaaaacctttgggggatacctaa

SEQ ID NO: 39261 - DNA, 260 bp, Glycine max
  Clone ID: PAT_MRT3847_135452C.1
ggaattcggcacgaggacgagttgtctcccccgacaaagatttttttcagattttatctccttcgctgcgtctccttcgaattgctccacgtggtgatcagatggtttcatttggagttgaggattttgaagagagatatggaggtctgaaaccatcccagtttgcagatatgatcgcacttactggtgatagatctgataatattccaggagttcatggaattggagatgttcatgctgtgcaattaatcagtagattt

SEQ ID NO: 39262 - DNA, 213 bp, Glycine max
  Clone ID: PAT_MRT3847_135453C.1
gtaccgaatctccaatttcgggctacgacccacgcgtattcatgatacgcctggaccgtcctacttttatttatgcaatagatatcgctgaactggaggccttattcgtatatgaaacgtgttcgtaaaaaaaggtgtcttatccaatgaatcacttgatagatcacctctgaagccatgaccatatgatcgtcattttaattgctatgatgc

SEQ ID NO: 39263 - DNA, 964 bp, Glycine max
  Clone ID: PAT_MRT3847_135454C.1
ttttctcgtgggatttaatcatactacagaaaagtgaacgaagttgacggaaattgatgtttttcataacaaaggagaatgaaggctttttcagttaaggttgaggaaggaagggaaggtaaaaatggcaacctttctgttggtcctgtgtaccgtaacctcctctcagaaaatgaatttcctccaatggatcctgatttcagtaccacttgggatattttctgtgtgtctgtcaaaaatcatcctaataatcgtatgctgggaaagcgtaaaattgttgatgaaaagattggaccctatgtttggaagacatataaggaagtttatgatgaagttctgcatatgagttctgctttacgagcatctggtgccgaaccaggcactcaaattgaataattgaatacaatttttattatatggtacaaagagatagctttgatatgttgtccacttaaaggatatattaaataccttgaggtgcttttggtcttttgtgctgtccactactggtgatcttataattaatttatgctcttgattgattagggtgtggcatatgttatcatacacaattagcaagcgtgaaatgaggccattttcttttttgcaaagcttctgttttgctgaagaagtttatgccctttgcagagctgcacctggtggtaaaacaacttacgtacattgctgctctaatgagtttgaatgagaagtaagtttgagttctttgtccttttaaccttttagttgaatgtacagtgtctattatttgtcttaaattaattatttcattttctcttggatgtggtttaaagagagaagattcttgaagtactaaggaattggcctgagaagaacattcaagtcattgttgtaactgacggagagtgaattctggatcttggggatctaggctgtcaggtaattttattatacttgttcacgtataaaatttatgatttttata

SEQ ID NO: 39264 - DNA, 179 bp, Glycine max
  unsure (1)..(179): unsure at all n locations
  Clone ID: PAT_MRT3847_135455C.1
cggcgcgagacagctgcnataataccacagaagggatcccactaatccaatcttatcatggaataggacataggggattaagcactggtgatgatggcaaacttacttgtgggtagaaaaatatttggacctttcatggggggatgaatgactttctttagcgctcagcttattaattt

SEQ ID NO: 39265 - DNA, 631 bp, Glycine max
  Clone ID: PAT_MRT3847_135456C.1
tctttagtaatgttatttttacgataaatttgtaaaacgatttttacacactttttacatttatttatataaaaacacgagcagacactgagaaaacacactcagcaagagttttcgatggacgcatgcacatccactatgagaatacagacccagccactcagccagcaagaacaaggccgttcaatgaaaccaagaacaaagggagacacatccaacatgagcataggcatatcagaatttcttaaagaaatcgtaaatggggttgctgatttcatcaggcctttcttgatggagaaagggaccagccccttcaagaacaaccacatcctccagaagcggcacattttttttgaacccacctttgtgaatgtattccttggctcctggtgcattataggtcaggtctagatcacccactataaacttaactggaactttcacttgagcaccagtccacgatgctgtcagctcccaatttagatccaaatttctgtagtagttcaatccccctgtgaagccagtcttgtcatatttactggcatagtagtcacattcttcttcagatagccatgagggcaacgctatgggagaatcagttgggatgtgcaaaagctttaccctttggtag

SEQ ID NO: 39266 - DNA, 298 bp, Glycine max
  Clone ID: PAT_MRT3847_135457C.1
aagcgtcagcaaaaccatacaatggggaggtaaatcagacagaacggggctcaaggttcttcgatcatcgagataacgaaagttaatgattagaatttggatgtccgagagatcaacagggcgttgaatcttgaaatgtttccaaagggaatgctcgtatcctttcgtgaaccagatgtttgtgttggcaagatacgggttctaattcggggtcaataaaattcctgcggctggaaatcatgggggtcatctcaaaagaaagggaaacgagtctttatcaataattcgaatggtcttc

SEQ ID NO: 39267 - DNA, 615 bp, Glycine max
  unsure (1)..(615): unsure at all n locations
  Clone ID: PAT_MRT3847_135458C.1
caatctgctttgtgcataatgcagttctctttgtagtattcaatgatgcaagttcgagtcatgttttcttaaacatggttggggtttgcactatattcagatttgccttcgcattaaattaagatttgccttcgcattaaattaagatttgcctctgtattaagttaaatgggtacctatgtcgtaacacagtattattatttgacaacaaatacaagaacatgttcgaatttctccattaagtgactaaatttcataattaaattcgaaccttctaataactgatttaatgttgctaaatatggacatggaattcccatctttctcacgagtacgaggtttacgaatgtagtcaatgttctaaaattaaggcaaatttaaaaagacaccaacaaaatggggtcttaattggttactatataatacgcaatcccttacatactatcgcatccttttgtgtgcaattttaaaatccaccttatgtgaattaatataatccacgttagttgaattaatataacccatatatnttatttgggtaattatattgaccaagtttgactgaattggtgntattaccatttttttttaaatataataagggaggcaccgata

SEQ ID NO: 39268 - DNA, 374 bp, Glycine max
  Clone ID: PAT_MRT3847_135459C.1
gtgactcgacatccaaatgaaatttcatttagctagcccagactgtcaattcgatgatccgcaatagtagtggtgtaaatgattctattctccataaatgcaaaaatagatgtctgcatgaaccaataatcgagacgaaaggtacactcgattgggttatatatagttacgaggattcccaaggtttatccccacaagcttactagactcatgatacttcacatacatgactgttatgttagtcgatgtaactcacgcagttttgttcaatatcactgctaccataggacagtaatcaccatcctctgcccgtcaacaacgctctaagaggtttggatattgtcaactacatcatcagatcagttgaacacgct

SEQ ID NO: 39269 - DNA, 282 bp, Glycine max
  Clone ID: PAT_MRT3847_13545C.1
atttccctttcacacttcacaaaacctaaatactaaatgatttgtcagtagcagcaaacatgtccagcaagggaaaggtggtagcagatggatcatcaacaacaacaacagctacatgatcctctcatggtggtgacgatcatcatcatcaccacaatcagcagcagcagcaacaacaacaacagttaccactgagtcgctatgagtctcagaagagaagggattggaacacttttggacagtacctgaggaaccaaagggctccagtggcatttctcagtg

SEQ ID NO: 39270 - DNA, 341 bp, Glycine max
  Clone ID: PAT_MRT3847_135460C.1
gggaacaccaattgtattgttaaagaggatgtgaatgatgattcgatatccattggatcagtatcagaagattcaatgaactctgtgtgttcatcttcttcatcagaattggctgaggatgcatcatcctcttcagcatcttatttgtcaacctcatcatcgcattcaaacggccctttgtttgaactatcagagctaatgagtcaactccctatcaagagaggcttgtctatgttttatcaagggaaggctcagtctttcagttctctagcaagcgtggagagcataggggatcttcctaagaagaaagagagattttacaggaagaaaatgaaatcatg

SEQ ID NO: 39271 - DNA, 276 bp, Glycine max
  Clone ID: PAT_MRT3847_135461C.1
agggaaagaacaaaagaaagatgtggaagcactgcactgcatagcttctttttttgtccagtgattgacttgcataaatggttttaactgctaggaatgtggcggaaatgaagatgatggatgagggtggcattgaggagaaagcagaagaggggggaaaacaaaaattgcgaacagagaaaggtttgtcaaagaaaaaaaagtcaaaagaaagaagaaaagaatctgcagaggaagggaaaaaacagagaaaagaggaagtagaaccattagcag

SEQ ID NO: 39272 - DNA, 286 bp, Glycine max
  unsure (1)..(286): unsure at all n locations
  Clone ID: PAT_MRT3847_135462C.1
nttgaggagagtggatcgtggaaatnatnntnttangaanttagaaanttatgtngnngtgtaagtatgntgttgnagagagtntgagnnttngngtgngtggagntgnannggntgtgtgnntggnntntntgggttgnngncggttngngtggggtgtgnatggtgagntngnnnntnggnggnnggtgtggngtgcgnnngttatggggggntggtnagtggggttngngnagaggnngtggttttngtggnggntggggggtgtgnngggnagnnggntntt

SEQ ID NO: 39273 - DNA, 354 bp, Glycine max
  Clone ID: PAT_MRT3847_135463C.1
agttgtaatgtttaaccgcgatcacaggtgggcggaccttaagatcggatacaagaccaaccggcacttgatgtcaagaatatttcaggttcttcctacttcattgtgttcgagttcttaatggaaagaaacttactctttgtgctggccacaaacttgctgaatcattttttattccactcttaattgatatgctgaatcaatctactatgagacataggaatgcgtgatagatgtgaacacaatctgtaaatttttcagtcctttgtgtgacatcaagttgacgctgctgaaatagtggatttgaacttccactctcctatttggggtaggatttaatgagaagacttttaa

SEQ ID NO: 39274 - DNA, 513 bp, Glycine max
  Clone ID: PAT_MRT3847_135464C.1
acggctgtcacgaaattgtgagcaggtaaacatctacaatctgttgccatggcaaaaacaactcacatagctattgtttcaagccctggttttggccacatagttccaataattgagttcagcaagcgacttgtgaagcttcacccaaattttcaagtgacctgcatcattccttcacttgagtcatccacagaatcctgcaaagcctaccttaaaacccttccttcattcatagacttcatctttcttcctccagttagcatagaacaattatcccaaggaggatacattggacagctaattcaactcaatatttctcattctctgccatcaatacatgaggtgctgaaatccttgttctctaaagtccctttaactgcgttggtggtagatgttcttgcacttcaagcattggaatttgctaaggaattcaatgccctgtcctatttttacttccctagttcagctatggtattgtcactgcttctacacatgtcaaaacttgatgaggag

SEQ ID NO: 39275 - DNA, 2212 bp, Glycine max
  Clone ID: PAT_MRT3847_135465C.1
ggaatgttaactctgaaatttcaataactgtgtggggtctaccattagtagaacaaaagacagacagaatattggctacacacaaaagcaactcacaaatcctatcttcaccgttcatttcttccctcaatgctccattgctttagaattaatatagtaaatgcataacattcattgaggacacgagtatgattggaaattgaccaatgcacatgaaaatttcatataaactataacaagttacattatacaacagcaaacctgggattggatcaacaaaaattagaacccggatgcctcaactaatgaggaatatgatgcattttcatccaagtctgtaggcttcttactgctggttttccttgatgttccatcactattgttgccaagtgacccaacctccagacctacaatctcagagaattttaatctttggtgtttagctgaatccatatctccatcccagcaagtctcagaaataatttcaagtgctttatcaatcttgtcttcagccacaagatccccattttccaagaggacaaggtacagttgttcagctgaagcttttcgaatcttagggtaacgatgaccaagaaagttaagaagttgcgaaaaggccctcatattgataggttcctgaactgcagctacataaccaagtattgcaataccagcatacaacttagagaagtcttttgatccctttacttcaaatgacacagaatccaaaacagcaccacaaaaagctggagtgtgagcctccatattaaggaatatctttttgctgaacagaatctcaatggtctttaaagtaggtacgataactctgtcagatttcttgtattgttggagaacccacaggatatcagcagatagcatgtataacctagatgttcttgtattagggtcttcagattcaacctcttctagatactctaacagcgcggagagtgataccctcttcaaagaatcttgcaacccaccaatagatataactaaacctgatagcacatctctgctataacaagcaaattgaagaaactgtataaagcgtgggtaagaataggaaggaacaccccattgtgcatctgcttccttcggaatgatttcttctaacttttctcggaaaggtatatatggaatatgaattatctggttgtacaaaattctgtagagaacatttgctgctgcttctctcagcttatccatcttctccacagcttgcttacaaattcctccaactaaattggtagcaagattctcatcaaataaagaaagctcttggttgttcttaagcatgctatcaattgagggatgtgcaataggctcaatttcatttccatcagatcttccagacaaacaaactgacttgtctatcttacagagcatgtatgtacatttttctaggccatccaatgcagcctcacgaacccaagaacctacatcacctctattatcaacagaataatcatcaagagctttaaataaacttatcatcacctcattctttatcagaataaacagggaaaaatcatcctcaacaaaagaggtagcagtatcttctcttccattaattaatgtttcacacactaatgtgagccctttgacagcatttactcgtgcttcagcatctctgtcttcagggttttcctcaattttacaagagccacaaagcttcaaaagcacatttctccattgactggctaataactcatatggtaaaacacctattgccaatgcagatcctctccttacagctacatttggatcagtcaacatactgaggtactttgctgtcacatcacttatacctttattatctgaagcatgcaagtatgcacggataagtgtttcaggcctttgacagctggccattctggcataagctgatattgcttgtcagatatataatgcccaattggcataagctgacaatattaaacaatagtaaaatggtaacacaaattgcttgtatcagaggaatataacctgtatctgagaattaggatgttctcaaattctcattaagagtatcaagtaggctttttctttatctttttctgataataccactttagtagtagtggagatgcattcaagtaaatcgagaaacagctgcacgcagttagtctctcctccctttccacgataaagccgtgctttctcaatagcaggagcaacgccagcaagacattcttgttcggacgcgtgg

SEQ ID NO: 39276 - DNA, 1689 bp, Glycine max
  Clone ID: PAT_MRT3847_135466C.1
gaggggaagtacttagaaacagaaacacagagatggaaccagaaacatctctgaactttactttgatgctgactttcttactttatctgaacttggttatgggagtgctgagcgttgatcattatcgcagagttgactttcctgatgaattcgtttttggttcaggcacctctgcttatcaggtggaaggagcttctaacgaagatgggagaactcctagcatctgggatacctttgcccatgcggtgtatgagcatggagaaaatggagatctagcctgtgatgggtaccacaaatataaggaagatgtgcaactcatggtggaaacaggtctggaagcctatagattttccatttcttggtcgagactgataccaaatggtagaggacctgtcaatcccaagggattacagtattacaacaatcttattaatgaacttattagcaaaggaatccaaccacatgtcacactacacaactgtgatcttccgcaggcacttgaggatgaatatggaggatgggttagtcgtgatatcataagagacttcacaaactatgcagatgtgtgttttagagagtttggtgatagagtccagtactggactactgtgaatgagcccaatgcctttgccttgggtggctatgatcaaggaacctcccctcctcagcgatgttctcccccattttgcactacaaacagcactaggggcaactcaacatatgaaccctacttggcagttcatcatattttgttatcacattcttcagccgtgagattgtatagaagaaagtatagggaccaacaacatggatatgttggtatctctgtctatacatttgggttcattcctcttacagattcagagaaagacaaggcagcctcccaaagagcccgtgattttttagttggttggattattgaacccttggtgcatggagactatcccatttccatgaagaaaaatgcaggtgcaagaattccaaccttcacaactcgtgaatccgaacaacttaagggttcaagtgactttataggcgtaatttactacaacaatgttaatgtcacggacaatcctgatgctctgaagaccccacttagagatatcctagcagacatggctgcaagtttaatctatttacaggatctattttcagaggaagagtatcctgtcacaccatggagtttgcgggaagagctgaataacttccagctccattatggcaatcctcctatattcattcatgaaaatggtcaacggacaatgagcaattcatcacttcaagatgtgtcaagggtgaaatacttgcaaggaaatattggtggcgtgcttgatgccctgagagatggatcaaacataaaggggtattttgcatggtcttttctggatttatttgaattgctggctggatacaaatcgagcttcggcctatactatgttgatagggatgatccagagctgaagagatacccaaagctatctgcaaaatggtacaaatggtttttgagaggaactattgaactcaagaaggatgcatcatttgattctgttggccatttatttcaataggttctataattttttgtattacaacattgttgcatagtggtgtgtttgactttccgcttctataagagataaggaataaaatagatgattaaaaagaaaaaaagaagttggggactagtga

SEQ ID NO: 39277 - DNA, 268 bp, Glycine max
  Clone ID: PAT_MRT3847_135467C.1
ggtgcttaatggaaggcccttgagcttttctttctttctctgctctcttttcttttaggtttccactctcacacactctccctcttctctttctctgcaataatctctcttctcttcttcactctctcaactcctgccaaacccccatttccgcagatgaagggcagtgccatgcctcgatggtagcatctgcatcttcaccatccctgaactgtttctccctaaatgaggccggatttaaagaatgcaattacctgggattgtcaga

SEQ ID NO: 39278 - DNA, 464 bp, Glycine max
  Clone ID: PAT_MRT3847_135468C.1
ggcccaaaaaaaagccccccccaatcccaaaagggatccaaatttgggccccaaaatttattttttggggggggcaaatgcttttttaaaaaaaaattgggcccaaaaaaaaaacccgcccgggcaaatagattttaaaaaaaaggattcggggccccaaaaaaagaaagtttttactggggcgggctaggggacagaattggaaaagaactttcactcataattttcatcactatcagcagcaaagttgatagcccccccccgggcaaaaaactaagccttcctttcctaaaaaggaagttttttaagggggaccctttggggccccttggggggctccttataaaatttccggaaagaaggaccaccccggggggcaccatgacccttttggaaaagggcctaaaaaccataagcctttatcccacgttggaggaattcgctgaagggggacgggaatttct

SEQ ID NO: 39279 - DNA, 681 bp, Glycine max
  Clone ID: PAT_MRT3847_135469C.1
aggtcagcatggatggtgctccgtatcttaggaaggtagatctaagaagttatacaacatatcaggaactatcttctgcccttgagaagatgttcctaagctgttttaccctaggtcagtgtggttcccatggagctccaggaagagaaatgttgagtgagagcaagctgagggatcttctgcatggttctgagtatgttctcacttatgaagataaagatggagattggatgcttgtaggggatgtgccatgggaaatgttcattgagacttgcaaaaggctgaaaattatgaagggttctgatgccattggtttagctcccagggccatggaaaagtctaaaagcaggatttagggtatcctggatttcctcttttgtctaatcaagtgtttattgttggatcctccggaatgggaaaagcaaaggatgatgactgaaatcctggcattggtggtttaacgcccttccacttatttgttttcaagtccctcaagagtttgtcatggtcctgtgttaatttgttaccactgtaatatcatatgaaagctacaatgaaatattagtatttgtggagtctgtaatcattataggaatccgtttgttttggaagaattgaacatctgttacagccgccaccatacggttctaacactatatttgtgatttgcgtcccctgcct

SEQ ID NO: 39280 - DNA, 219 bp, Glycine max
  Clone ID: PAT_MRT3847_13546C.1
acaaccagctcgatgcagagactgagcttcgtcagactaaggagaacacaattggtcagttggagcagcagatcctcggccttgagagtgatatcgcgacacttgagaacaacctgtctgacatgaccgatgctcgcgatcagctcgagcaggatcgtgacgtccaagtcgccaaccttgctgctcaactcgctgacctgaagaccaagtacatggcgc

SEQ ID NO: 39281 - DNA, 513 bp, Glycine max
  Clone ID: PAT_MRT3847_135470C.1
agttctaagtgtttgatgtagtataagtgaccaagcacaaaaaaaaaaagaaaaaaaaattcttatttaaatttttttggaaccaatgtcatgatgaataaataaagcataatcaattcgaaaactaaaataagaggagtcattatcaaaatttattttattagagaaaacttaaaaaagtcttaatttgaaaaaaaaattgttttgaaaaagagagtcaaaattcatttatacataggaaaagatattgataatgcatgacattctttgtaaaaatgtctataatagatcatttaaggcctaacaactttggaaatatataggtaaaattatactaaggatcctttgtcttattgtgaaaatttgttttggtcctttatccttaaaaaaaattattttggtgctttaacttttagctttgaatcatttcggttttctcattaacttgaaattaacatcattagtgttttaaattgtgcagcacctatgaaatgcactttatgatgattttaa

SEQ ID NO: 39282 - DNA, 2297 bp, Glycine max
  Clone ID: PAT_MRT3847_135471C.1
aattcggctcgagccactcgtcatttctatttctctctccccaaaagcttttgctttctctctgcttatggaaggcccttaaactttcgctctctctgcttcactttctcgcttttgcattttcttgtgaaaaaaaaaaatcctcagaacaaaaataggtcttcttcttctctgatctaccaaagcttcaaattctccttagtttggtttgtctgtgagtttggagtgtaatgtcgccgccgacgctggtaacggaggaggaggggcggagcaccgtggcgtccgattcttcgcaatccttggactgtttctctcagaatggtgctggattgaaagaacggaattacttagggttgtctgattgctcatcagtggatagctgtgcctctactgtgccaagcttgtgtgatgagaaaaaggagaacatgaatttgaaggctacagagttgaggcttggtcttcccggattccaatcgcctgaaagggaaccggatcttttctctttaagctcaccaaagcttgatgagaagccactcttccctttgcttcctactaaagacgggatttgctcgtcggggcagaaagctgttgtttctggcaacaaaagaggttttgctgataccatggatgggttttctcaggggaagtttgctggtaatacagggatgaacgcggtgctatcacctagaccttctggagctcaaccttctgctatgaaagaaacaccaagcaaattgtcagaacgtccgttgctcaactaataatggaaccggtcataaccatacaggtgcttctatcagtggcagcgcacccggcttctaaggcacaggttgttggttggccctccatattagatcatttaggaaaaactcaatggctaccaccacaaacaagaacaatgatgaagtagatggaaaaaccaggtgctggcgcactctttgtgaaggtcagcatggatggtgctccgtatcttaggaaggtaagatctaagaaattatacaaacataccaggaactgtcttctgcccttgagaaaatgttcctaagctgtttcactctaggtcaatgtggttcccggagctccaagggaagagaaatgttgagtgaagagcaagctgaaggatcttctgcatggttctgaatatgttactcacttatgaagataaagatggtgactggatgcttgtaatgggatatgttcattgacacatgcaaaagactgaaaatcatgaagggttctgatgccattggcttatcgtccatggcaagggatataaacatgaacaggtgctatttggtattgtatcctgaagagggctggaaagagaattaatgatttaaatgactgaatgccgtgagaagatgttgaactgcaattgatcctgtaatttaagtttacacaaatattaatatatgttatttttttgaatgttagtaatatattatgtcaatactataatagccaaggtatctctaatgactctgagccttttaaactataatcaatgtggcacggtttgcttaagtagattttcttgcctgtgctcccagggccatggaaaagtctaaaagcaggatttagggtatcctggatttcctcttttgtctaatcaagtgtttattgttggatcctccggaatgggaaaagcaaaggatgatgactgactgaaatcctggcattggtggtttaacgcccttccacctttatttgttttcaagtccctcaagagtttgtcatggtcctgtgttaatttgttaccactgtaatatcatatgaaagctacaatgaaatattagtatttgtggagtctgtaatcattataggaatccgtttgttttggaagaattgaacatctgttacagccgccaccatacggttctaacactatatttgtgatttgcgtcaaaaaaaaaaaaaaaaaaaaaaaaaaaaaaaaaaaaaaaaaaaaaaaaaaaaaaaaaaaaaaaaaaaaaaaaaaaaaaaaaaaaaaaaaaaaacccaaaaaaaaaaaaaaaaacccaaaaaaaaaaaaaaaaaaaaaaaaaaagggggggccccttttaaaaaaaacaaattttaccccccggggttggaaaaaaaaatttttttttttggggccccaaaaaaaaaattcgggggcgggtttttaaaaccggggggggggaaaaaccccggggttccccaaataaaatcctttgaaaaaaaccccctttttccaagggggggaaaaaaaaaaaaggcccccccaatttcccctttaaaaaattttccccccctttaggggaaatgggcccccc

SEQ ID NO: 39283 - DNA, 1803 bp, Glycine max
  Clone ID: PAT_MRT3847_135472C.1
tttcctccccacgcgtccgtacggctgcgagaagacgacagaaggggactccaaagcttatttgttgctttgtgcttaatggaaggcccttgagcttttctttctttctctgctctcttttcttttaggtttccactctcacacactctccctcttctctttctctgcaataatctctcttctcttcttcactctctcaactcctgccaaacccccatttccgcagttcttaaatttggagtctgatgtctccgccattgctggttaccgaagatgaagggcagtgccatgcctcgatggtagcatctgcatcttcaccatccctgaactgtttctccctaaatgaggccggatttaaagaatgcaattacctgggattgtcagattgctcttcggtggacagttctactgtcccgaatttgtctgatgagaaaaaggagaatctgaatttgaaggctactgagttgaggcttggccttccgggatcccagtcacctgaaagggagacagaacttttctcgttgagctcaacaaaacttgatgagaaaccactgttccctttgcttcctacaaaggatggaatctgctcattgtctcaaaaaactgtggtctcgggcaacaaaagaggttttgctgacacaatggaccctgagtttcctggcaatgcagggataaacatgatgctatcacctaaaccttctggagttcagcctaccacagtgaaagaaataccaagcaaggtgttacaagaacttccttcagcggcaaatggaactggtcataaccatacatcaggagcttctatcagtggcagtgcaccggctgctaaggcacaggttgttggttggcctcctataagatcatttaggaaaaactcattggccaccacaactaacaagaacaatgatgaagtggatgggaaaccaggtgttggcgcactctttgtgaaggtcagcatggatggtgctccgtatcttaggaaggtagatctaagaagttatacaacttatcaggaactatcatctgcccttgagaagatgttcctaagctgttttaccctaggtcagtgtggttcccatggagctccaggaagagaaatgttgagtgagagcaagttgagggatcttctgcatggttctgagtatgttctcacttatgaagataaagatggagattggatgcttgtaggggatgtaccatgggaaatgttcattgacacttgcaaaaggctgaaaattatgaaaggttctgatgccattggtttagctcccagggccatggaaaagtccaaaagcaggagttaggctatcctggactgcttgttgtctgatcaaagttttattgttggatccggagagggaaaagcaaaggatgatgatatgactgaattcccgggcattggtggtttatcgccctctgctgttatttgtttttatggcccttaagagtttctcgtggtattatgttaatttgttaccactataatatcatatgaagctacattggaaggttagtgtttgtggagtctgtaatcattgtaggaatctgtttgttttggacaaattgaacatctgttacagccaacatacggttctaacactatatttgtgatttacatcactcgcccattcttttctttcatgtttttctttaaatcttgaacagacattatttcattttacgggtttgaaaatgggtcagcaaatgctttgggtaaggttattaaaatctggttggatattagttgtgacaggttataggctttttatttttaatttttattcattaaataatttttttccc

SEQ ID NO: 39284 - DNA, 421 bp, Glycine max
  Clone ID: PAT_MRT3847_135473C.1
aaacacatcattctttttttttttggggaggcaaagaaaacaaggaagcagttaaatcatcatgaacatatcaaaatattaattcctcaaactattggaacatccccatttagaacaatagatggggaaagaaagaaaagaaaagaaaaaagtacagcaaggggtatccaaaacaaccaactagcatccaatatggatacagggctaacatgtacattggaccactgcctttgcccttagaggggtggtcggaaaagaatatgcacaatcatacatttccactttcaggacgaccattgaccaggtaaggcgagaaagcatgcagccatggcctcccggaaccttttcttgcatggctaaggagaaactatagcgggagcagcattttttggacccccaagtatcccggaagcctccaccc

SEQ ID NO: 39285 - DNA, 1307 bp, Glycine max
  Clone ID: PAT_MRT3847_135474C.1
cccacgcgtccgaattttactttgccataacggtgagtttagagagggaataatggatggaagaggaggctgttgcatcgccaggtatgtacccggtgcatcccacgggtccaccgtcgacaaaataatgcttaggtttcgtccaatcgctcccaaacccgccgccgcggccaccgcttccgacggctcttcgtccgagagcagtgacgcttttctcaaaaacggaaccactaaaagaaagtacgtaagagataacaactacaccagcaaacgaagaatccgccggagaaagaacacttcctcgccggagaaaaagcagaagccggtggtgactcttccgttgcttccggaaactcccgatcggaaggattctcgggcaaaggatctaactccatcaccagctaaaccagtacgaaacaacaacaacaacaacaacaagagcaagaacttgaatattattaacaagaacgtgccggtgtgggtgagttttgagaatcgaagccttacgatgatgggagggtggtgttcgtgtgtgacggtggagggcgtgacggacacgtgcttggagagcgagtggctggggagtacagacgaggaacggagactgaacctcagcaatgacacgtgtccagggttcatatcagacggttacgggagggtgacgtggacgaacgaggcgtacgggaagatgatgatgatgaagggcgagggtgatgagggacagggaccagtgttgctggtgaataaggtgaatacggtggttccgcacgcgtcgttcacgtgcttggtgagggtggtgcaatactcgtgtgggaaggagagaaactcgctcacggtgccctgcgatgtgtggagaatggactgtggtgggtttgcatggagattagacgttaaaactgcgcttagcttgagattgggttattagttcacaaaggtatcacgaactcgaaatacaaaacggcgtcgctccatggtcgtagaactataacactatttcttctcttttaagagcttagaatcgtgaatatatatatctatatatctatatatatatatatataactactgacgctaagctagcttgtttcactgtaaattcatatatgcatgtagcttgtcttttgttctcttagatggttttttctgatttgagtttgagcttggaacagtagctgtgagctaattatgaataactcgctacgtaccgttatggttatgtaacacttcttctggttagtgaaacttttgttacgtcacaaaaaaaaaaaaaaaaaaaaaaaaaaaaaaaaaaaaccaagggcggccgc

SEQ ID NO: 39286 - DNA, 497 bp, Glycine max
  Clone ID: PAT_MRT3847_135475C.1
cggccgccctttcttttggttgttttcttatcatgtttcctggcgatgatatcctaccacagtatcgtttcctgccttgagttatggcataccttactgtgtagcgaagtctttgcacttgcaaagacatgctaataagcctatgcttaatatagacatccgctcgtctcgtatcggtatttgggaggacccgaaatgactgccggccctctgaaaatcatggctcagaaggatgtatttgaccatgacatattctgggacaaactaagtcgagaacacagcatgatcatcttttctcatggcattaaatctgatctgctccctctataaggagactgttttaaggcacccgcacataaaggtatttctcagtggaggacttttggacacgttccatatgtatgaacttcaggatccatctatgttgctaccacctattagtcattgcagaaaggttcagctggaaaaaggttatggatccctgcacacgtcattct

SEQ ID NO: 39287 - DNA, 350 bp, Glycine max
  Clone ID: PAT_MRT3847_135476C.1
gttccgcaatctcggtcaaaaattattccggggctttaaaaagcatatgcccgaaaatttcacaaatgtgaaaaaagtttgcccaacgttgaacccatttaaaactccaaattaggccaagcagtttcaaatagatgctttcaccacacttaacataaacctccaaaagtcccggaacacagggaagctccacggaaagtcccccgatacacaacgcaccggaaaaaggccaactcatagagtcccacaaagggcaacagcttgcagcaaaaccctgtccctggaacccatcttgcatgggctacggaccatctacgaaaggactcacttcaaggggatcaaaaagttgc

SEQ ID NO: 39288 - DNA, 816 bp, Glycine max
  Clone ID: PAT_MRT3847_135477C.1
atgatttctgtttgcaaatgcctgcttattgaacaaacttttaccaaacgtgattatttacttgacaacccgatacacttgccgttagatttcacatccacacaaacaagtagtattcctaggggtggaaaaagtagacctgtctatcccctacaaggtcaccacatatgcaccgagaaaggaaaagcaaattgggaggaactattggcaggtatggtagaagtgtccgttagttggttccctcgatggaaggatggagggaccggggttttgtgctcatgtgaaggattcctgaacgtccccttgacgggaaaaaggggttgtattaattataatcccatactggctataagacaactagtctaccctatgagaggggcaccatcagaagagatcatcacacctttcgtcgcatggggtttcaatgaagataagaagcttaggggaagtagcaacgaggtcattggcggctatcataagtggttaaaagctaggacgcaagggataacttggctcccaaagctaaaagatccaagtggagaggaagttgaagtcctcgaggaaagcgaagaggtgcaagccctgaaagtagagcttgaaagaacgagagtgcgagcattcgctaagcgcgacactcagtggctaagcgcgaggaagaatctagaagaagatgagctgtcagattcgctaagcacaccgctccaggtcatcaagtgcaccgcttcagctcatccgctaagcaagagaagcgcgctgagcccaaaatcactaacatgcggtaagcggtccatacgtgctctaagcgcacgagcatga

SEQ ID NO: 39289 - DNA, 605 bp, Glycine max
  unsure (1)..(605): unsure at all n locations
  Clone ID: PAT_MRT3847_135478C.1
ccacgcgtccgctgttctctcttcccattatgttcctgaaccttcttcgacgtgctttccctgtcattttttatttttatctccaaactccatgaatacagttgaatttctcggaaacggacgccattcataggtatcagatgaacatagttggattgtcgttgttctaccttaatggcacaatatggaaaaacatgaatctttgtgttgcattcgctacctatttttatcttttttgtgttccatgtttgtgttcctttctttaccgtgttcatctatgtattacttgcaaaaaataacgtttactactatgattaactttgaggttctcgagtgatcttgaatctaanaaaaaaaaaaaaaaaaaaaaaaaaaaaaaaaaaaaaaaaaaaaaaaaaaaaaaaaaaaaaaaaaaaaaaaaaaaaaaaaaaaaaaaaaaaaaaaaaaaaaaaaaaaaaaaaaaaaaaaaaaaaaaannaanggggggggggagttttaaaaaaaaaaantttaaaaaccgggttgggaaaaaatttatttttttttttggggcacccaaatttaatttcttggcccggtttttaaaaggggggggggggggaaaa

SEQ ID NO: 39290 - DNA, 283 bp, Glycine max
  Clone ID: PAT_MRT3847_135479C.1
ggctcgagggcaagtgcccgtcggggggattcgcttagatggagggttgtaccccgcattcgaagatctcgctgacacaaatgcctctggtgaccacccagggggatccaggagacggagcgagatggacccaaaagcataaggacgagtacctggctgggagagggtacactgcgattgaaccagggccacggccacgataggttccgtatctgcgccggcaagccagaaggcactcactgaaccggatactgctggcacgtataccacctcctcaagtact

SEQ ID NO: 39291 - DNA, 260 bp, Glycine max
  Clone ID: PAT_MRT3847_13547C.1
gctagccacaatgcagatattcgtgaaaaccctaacggggaagacgataaccatagaggtagagtcatcggacacaatcgacaatgtgaaggcgaagatcaaggacaaggagggcatcacgccggaccagcagcgcatgatcatcaccggtaagcagctggaggacggcagcaccctcgccgactacaacatccagaaggagtacacgcttcaccacgtcatccgaatcagcggcggcgccaagaagcgcaagaagaaga

SEQ ID NO: 39292 - DNA, 384 bp, Glycine max
  Clone ID: PAT_MRT3847_135480C.1
cggctcgaggcccaaagatacattacccgtctccttacaaaagctttaacctacagtccagtggcatatatttagaataaacagattttattattgtattcttttgggtgaggaggaggtgatcaatcatgaacgtggctggtgtgatactacttaccatgacaatcgggcaagtctacatgcaattatatgcaagtctttgggggaaaacaaaccgtattgcaattgctaggaatgagaaaacaacgagtcacagacgcattatgttcttatgaaagataataggcactgctgatagaaaagcttattgacaacaactaagcaaaaacccaaaagatgaattaaaagacaatcgttaaactccttgaaagtgtcaaacacgga

SEQ ID NO: 39293 - DNA, 398 bp, Glycine max
  Clone ID: PAT_MRT3847_135481C.1
atgatcaaaacaaaaaaatcccgaggtagtgtggagagaacatatctgactagatattgttgcgcaagcagcactccctttgggtggggagataattaaaacactgatccttgcccccggcggaaaagaagcctcaatcaaacgcttctgttcctgttggatctcactctatgacactggtggtgagggtaaaaacgttcgccacaagtggatgggacaagagggcaacaagctcccctgcgcggggtggattatatgcaacgtcctataacactttgataaatattttggggaaaccgtttggtacaactaggaacgctatttgtcttgtcttcccatcccacaatagattaattgattttttgaaaaaataataatggttgggttttttgtggggg

SEQ ID NO: 39294 - DNA, 464 bp, Glycine max
  unsure (1)..(464): unsure at all n locations
  Clone ID: PAT_MRT3847_135482C.1
cgtacgtaagctacgaattcagctcgaagcatgttccatgctatggaattttcgctttgttaatgaagcngaaccaccangccatcaccccgcgggggcttttcatatactcacagcgacatgaacaattcgccaaaaaaattaatataaaagtcctgccatcagaaagctcatttaacaaccctacaattacttcccaaccactacctctgctcttaccacttaccattataaccagttgaaatactgtttcccactaatactctcaaagatatcctctaagcttactggatctcatcatataactgcactccacatacaaaccaccaagcataaaatctacaaatcccaaaccctaactcataatctaactcacattaataacctcagcctaactcttctatacacataaagaaaaccagtctcgcctaaaaagattattaatagtccaacacgcccaaagt

SEQ ID NO: 39295 - DNA, 308 bp, Glycine max
  Clone ID: PAT_MRT3847_135483C.1
gatagatagatcacatatgcacgtagacagcgcagaaatgatcatgaagcacgtgtgcaccccaaaattctctctcacagctgcaggtatactacagctaccatatcatttcatttcattaactaacatatataaatgacgaattatctccttttctctagttacttcactactctctcctaactacctgaagccacattttatactagatgagacaccacgatgacaaaaccatgcacagagcaaaccaagtttaaatgtaactgaataaggaactacaagtgatacatgatctgaaatatattatt

SEQ ID NO: 39296 - DNA, 449 bp, Glycine max
  unsure (1)..(449): unsure at all n locations
  Clone ID: PAT_MRT3847_135484C.1
aagattcacaaggaaacacgcacgaattcaaccttattgatggtggcgtttgtgctaataatccgactttagtggcgatgaatcaagtaacaaagcagataattaatgaaaatccggacttcttttccatcaagccaatggaatatggtcgtttcctgataatctctctaggcactggaacccctaagaatgaacagaaattcaatgcacaaatggcagcaaaatggggtctgttggattggttaaccaattctggttctactcccttaatcgatgtgtttactcagtccagcgcagatatggttgattttcatcttgctaccgtcactcaagcactgcattcagaaaataattaccttcggatacaggatgatacattgaccggtacagactctncagttgatattgccacaaaagagaatttggaaaaacttagccaaattggtgag

SEQ ID NO: 39297 - DNA, 596 bp, Glycine max
  Clone ID: PAT_MRT3847_135485C.1
atacccccgtcgatgcccacgcgtccgctctttctcttaagctctcgtagttaaatctgcgagccattagttgaagaaaaaaaaaaaaaaaaaaaacaaaacaaaacaaaaacactagggtttaagatgggttccaaaactcgctcttcccttgctattttcctaacagtcaacattctcttctttgcccttgtctctgcctgcgggacatgccctagcccaacgccaaggcataagcacaagcctgttaagccaagcccttcaggtggctcaggtggctcaggaggttcaggtggttcaggaggttctggtggctcaggtggttcaggaggttctggaggctcaggtggttcaggaggttctggtggttctggaggttccggtgcgtcttgccctcgtgatgcactcaaactaggagtgtgtgccaatgtgctaaacgggttgttgaacgtgactttgggtcaaccaccagttaccccatgctgttcccttctcaatggtctcgttgatcttgaagctgcagtgtgcctttgcactgccctaaaagcaaacattttgggcatcaacctcaacctttccaatctcactcagcttac

SEQ ID NO: 39298 - DNA, 253 bp, Glycine max
  Clone ID: PAT_MRT3847_135486C.1
tgctgccgcgcctgcaggcccgctactactccatcgcctcatcctccaaggtccaccccaactctctgcacatctgtgcggtggttgtggagtcgcagaccaaggctggccgcatcaacaagggcgtggccaccaactggctgcgggccaaggagcctgccggggagaacggcggtcgtgcgctggtgcccatgttcgtgcgcaagtcccagttccgcctgcccttcaaggccaccacgcctgtcatcatggt

SEQ ID NO: 39299 - DNA, 207 bp, Glycine max
  Clone ID: PAT_MRT3847_135487C.1
gagcaattgagtttctaagataaccacttatactactttaattacatacaataggcaaccgcgaagaccgtgaaggatgtttcacctcacgatttcgtgaaagcttacgcctaccatactcaagacgttccggcaagatggaacttcctaagtggactgatattgtaaaaacagcaaaatttaaggaattggctccatatgatcctg

SEQ ID NO: 39300 - DNA, 289 bp, Glycine max
  Clone ID: PAT_MRT3847_135488C.1
gctcgacggctttggcagccgtcttattcagaggttagaaaaggaagctgctgttatgaacaacatacctttcaagtatgcctgcatgctctataaacttaacgctgcacgagaaagacgaattatcattaatattgcttagtggaatttcgaaacatcgatggatgatggcgcagctattgatgagcctggacatatggatcatatctacaatatgattactgtcacattgcaaactgactgtgcatgctttatcattgattgaaccactgcaggatttgaacgtgga

SEQ ID NO: 39301 - DNA, 166 bp, Glycine max
  Clone ID: PAT_MRT3847_135489C.1
tttttctttttggtgagactctgccgccacgtagacgagtgtacccagaccgaacgaactatgcttaacagccctagataatttggagcagaacgaaagcatatcatttgcagtgaaccccctgtgctacactttaggtcaacaaaggaaccattggtttacaaga

SEQ ID NO: 39302 - DNA, 250 bp, Glycine max
  Clone ID: PAT_MRT3847_13548C.1
gttcgagtgaggaatttccagtcgggtccccaactctgtcactgtctggtaaccctaatcgtggaggcaagaaaagtttggtttcctacggggatggctcacctgattcagctgggaagtagggttccaccggggcattgaaatgtatcttacaccgttagcccattggctgttgatcaagtccatcaatactttttgttatatttctactgtaagaagcggtttggtccttgagctgcccagctgttac

SEQ ID NO: 39303 - DNA, 357 bp, Glycine max
  Clone ID: PAT_MRT3847_135490C.1
aaaaatggttgtttaaaaagaagggagagcgcttaatttccttactaaaaccacagagcgaaatagaacaggttgagtgtgtaccctattccccacgggagccacttatttaatggcccaacctactcccccgtgtatttaggccttccgatctacctaccaaaacggaactttgaacacaacacaaacttacaggcctacaattttcttaccttacacactgtaaaaaatcgttcctctaaccctgaacgccggatgcattatatccttttaaatgggacagcccaagttgacccttgtactagagcattattggaaacagacctggaccacaacttcttaagattgtcgggcaca

SEQ ID NO: 39304 - DNA, 239 bp, Glycine max
  Clone ID: PAT_MRT3847_135491C.1
gatcttcagacgctatgttgcgctcgtgactctcatccacttcactcttccagtcatcgtgttctatcagtgagtgtaccttaagccacacctgcgagtcaatgcttctatgtcaccattctaactcttctctgctattctcgagtgctactcacctattcgttgatgtgtattcgcagtcacctgcgtgtggagtccgcgctccgttctcgtatcaaggacaaagatttcgcttcggg

SEQ ID NO: 39305 - DNA, 531 bp, Glycine max
  unsure (1)..(531): unsure at all n locations
  Clone ID: PAT_MRT3847_135492C.1
agtaaggaaatttaaatctttatacactttatgtcaatatgctcaatttacaaattttgaagaagttgcaaagttgtcagtggatgccagcaagttgatccacaagctcatttagcaagtgatcaaatatttctgactcaaaatccgcacttatgctacctaaatcaccttgtttattggtccatatatgtatcttatttgattcagccaattcatcttcaactattctgcaaacttcaacccaaatatctatatactcctggccattcatctcttttttctttgacccttcatgtttgttgttgtcaattgcctcaaccttactctcatcatcaatcatcaagttaccatcagatctcacaggaaggtgctgatcattgtcaagctttggtgacaattttcttcttgcactcaaaccaactgttgcacaagcttcacgctcaaaatcaaggacagaaactgggcttgaatcttctgacttggtttcaacttctatcttggtttctttctgacacaatgtnttcttctttt

SEQ ID NO: 39306 - DNA, 900 bp, Glycine max
  Clone ID: PAT_MRT3847_135493C.1
ccttactattcaaatctcctcctcctccatcccctactccctactactataactctcctcctccaccagttgtgtatcccccacacccttaccatccgcaccaccaccctttgattgtgaaggtagtgggtaaagtctacagctacaagtgttatgactgggagtatcccgaaaagtctcataacaagaaacacctcaaaggtgctgttgtggaggtgaaatgcaaagcaggaagaaatattatcaaggcttatggtgaaactaagagcaacggaaagtatagcatcacagttaaggacttcaattatgtcaaatatggacctacagtgtgcaaggccaagctttatgctccacctaagggatcacccttcaacatacctaccaagttgaacgaaggaacagacttgaaggtgaaatcgaaagacaagtatgaagttgtgcttaaggctaagccatttgcttatgcttcaaagaagcattttgaagactgctacaagcccaagccttcaccaactccttactactacaagtcgcctcctcctccatctccagtttacatatacaagtcgccacctcccccagcccctgccgcagatgactatgaagccatatagacacttctgtttgtaagtttgtctcatttttactttatggaataatctcatgtctgctataagtttatattgggagtcggaagaaggaaataatttattgtttgtattcttggacataaagctcgtaattaatcatcaatttcaataaaaaaaaaaaaaaaaaaaaaaaaaaaaaaaaaaaaaaaaaaaaaaaaaaaaaaaaaaaaaaaaaaaaaaaaaaaaaaaaaaaataaaaaaccaaaacaaaccaaaaatcaaaacaaaaaaaaaaagggggggcccccca

SEQ ID NO: 39307 - DNA, 942 bp, Glycine max
  Clone ID: PAT_MRT3847_135494C.1
gcaccaggtctccaccaccaccacccaaatacccacctccttactactataactctcctcctcctccagttgtgtatcccccacacccttatcatccgcaccaccatcctttgattgtgaaggtagtgggtaaagtctacagctacaagtgctatgactgggagtatcccgaaaagtctcataataagaaacacctcaaaggtgctgttgtggaggtcaaatgtaaagcaggaaggaatatcatcaaggcttatggtgaaactaagagcaatggaaagtatagcattacggttaaggacttcaactatgtcaaatatggatccacagtgtgcaaggccaagctttatgctccacctaagggttcacccttcaacatacctaccaagttgaatgagggaacagagttgaaggtgaaatccaaagacaaatatgaagttgtgcttaaggctaagccatttgcttatgcttccaagaagcattgtgaagaatgctacaagcccaagccttcaccgactgcttactactacaagtctcctcctcctccttctccaacttacatatacaagtcaccacctccaccatcacctacttatgtttacaagtcaccacctccacctgtgaagtcacctccatattattatcaatctccacctccaccatcaccaaaacctaagccaccatactattacaaatcaccacctccgccttcaccaaaacctaaacctccatattactatcaatcaccacctccaccatcaccagtgcccaagcctccttactattataaatctcccccaccaccttcaccagttcctaaacccccatactattaccactctccacctccaccatctcccacttctcatcctccctattactacaaatcccctccaccaccaacgtcatatcctccacctccttaccactacgtgagccctccac

SEQ ID NO: 39308 - DNA, 740 bp, Glycine max
  Clone ID: PAT_MRT3847_135495C.1
cgagtctctccctgtctgcttttggctccacatatctccatctccatgttttcttacagcaaacaatgaaaatgaagcttctcctcatgcttcttcttgtttttcttcttcttcaccaacccatttgggctgcagaccctcctgctttctctccaggggaggaacagcatcacatgaataagaaagtggtaatagccatcgtcgtagccaccactgcacttgctgcactcattttcactttcttatgcttctggatttatcatcataccaagtatccaacaaaatccaaatccaaaaatgttcaaagtccagatgcagagaaggggatcaccttagcaccgtttttgaataaattcagttccatcaagattgttggcatgaacgggtctgttccaataattgactataagcaaatagaaaaaacgacaaacaattttcaagaaagtaacatcttgggtgagggaggctttggacgtgtttacagggctcgtttggatcataactttgatgttgcagtcaagaaactacactgtgagactcaacatgctgagagagaattcgagaacgaggtgaatttgttaagcaaaattcagcatccgaatataatttctttactgggttgtagcattgatggttactcgaggttcattgtctatgagctgatgcaaaatggatcactggaaacccagttacatggaccttctcatggctcggcattgacttggcacatgaagatgaag

SEQ ID NO: 39309 - DNA, 1411 bp, Glycine max
  Clone ID: PAT_MRT3847_135496C.1
tcagtttcttatgcttctgggtttatcatcataccaagtatccaacaaaatccaaattcaaatccaaaaattttcgaagtccagagaaggggatcaccttagcaccgtttgtgagtaaattcagttccatcaagattgttggcatggacgggtatgttccaataattgactataagcaaatagaaaaaacgaccaataattttcaagaaagtaacatcttgggtgagggcggttttggacgtgtttacaaggcttgtttggatcataacttggatgttgcagtcaaaaaactacattgtgagactcaacatgctgagagagaatttgagaacgaggtgaatatgttaagcaaaattcagcatccgaatataatatctttactgggttgtagcatggatggttacacgaggttcgttgtctatgagctgatgcataatggatcattggaagctcagttacatggaccttctcatggctcggcattgacttggcacatgaggatgaagattgctcttgacacagcaagaggattagaatatctgcacgagcactgtcaccctgcagtgatccatagggatatgaaatcttctaatattctcttagatgcaaacttcaatgccaagctgtctgattttggtcttgccttaactgatgggtcccaaagcaagaagaacattaaactatcgggtaccttgggatacgtagcaccggagtatcttctagatggtaaattaagtgataaaagtgatgtctatgcttttggggttgtgctattggagctcctactaggaaggaagccagtagaaaaactggtaccagctcaatgccaatctattgtcacatgggccatgccacacctcacggacagatccaagcttccaaacattgtggatccagtgattaagaatacaatggatcccaaacacttgtaccaggttgctgctgtggctgtgctgtgcgtgcaaccagaacctagttaccgtccactgataacagatgttcttcattcactcatccctcttgttccgattgagcttggaggaacactaagagtttcacaagtaaagtgatacacgctaaactgtgttaaacaaggatatgatttgagattatgatgctctgccaaaacagattggttttgccaaatactcgaaattgcaaatagacccacgtcaaacgtactataaggagattcattcgggaaggatgtttagcttaaatagagaagagcattagattgttaataacaaatgtaaagaagaaattagtttcgctttggtggggggaaattgcctagagtattgaatttgtataaaattggatctgattgtcttccattccatactttgggtgtatgaaattcagtacataaagcaaaatattactactaaactcttaatcattaatcata

SEQ ID NO: 39310 - DNA, 120 bp, Glycine max
  Clone ID: PAT_MRT3847_135497C.1
gcaaagggcattttcaacaggagcgtggtcacatccgtataagacgatggtaaggatctcaggtgtggatgctaaatgttgggcgcactaatcccttgcaaaccatggctgagttaagaa

SEQ ID NO: 39311 - DNA, 298 bp, Glycine max
  Clone ID: PAT_MRT3847_135498C.1
tttccaatcaaaacacaatggtcttgaagaggttcattcattaccacgctaaaatttgtttcgagaattttagaaatgtcttctatgttgtcattattaaaacactaatcctttgtataacctccattcttctctgagcgggaaaaaaggatgaatatcatgcagggttggacccttgcctttaggatgtttaatgtatcattaggtatcacaaaaatcattttgttcttaaattttagtgctatttgtcaatgacactactggcagcatagtggaggagacacaaaggtttcttggc

SEQ ID NO: 39312 - DNA, 322 bp, Glycine max
  Clone ID: PAT_MRT3847_135499C.1
gggctggaggacactgaagctaaccgccaggtgtaccgcacgcttcttgagacaactccaggacttggtcaggacatctatgtgtgccattctctttgaggaaactctctaccaaatcacaactgatggcgggacaattgatggcgtgctcctacgagcaaaacattgatgccggcattaaagtcgacaaggggttgggacccctatctcgttgcaaccataagtcatggagccaaggtcttgatggtctagcctctcgctcggctgcgatactaccagcaaggtgcccgttttgccaaactgcgtactgctgtgagcattc

SEQ ID NO: 39313 - DNA, 618 bp, Glycine max
  Clone ID: PAT_MRT3847_13549C.1
ccacgcgtccgaaccttcgatgactcttgttctcttgcggctaggagttttatatgcagctatcttctacattgacggctagcatgggtaaggaaaaggatcacatcactattgtggtctttgaacctagtcgactctgggaaatccactaccactcgtccacctgacttacatgcttgtaggctttgacaagcctgttattgagaggctggagaaagaagctgctgatatgaacagctaggtcttttaaggatacctatgtgctaagacaaacttaatgccgagcgctatagatcaaccaccattgattttgctttgaggaagatgaaaacagcgaagtactattgcacagttactgatgcgcctggacatagggatctcatacacactatgactactgggacatcccaagctgactgcgcacttcttaacagtgattctaccactggtgacttggaagctggttcttccaaagatggacagactcgtgaacatgctctgatgacattcacccttggtgtgaaacagatgatacgctgctgcttcagaatggccgctactacacccatgaattccaaggccagatatgatgaagctgtgaaggagatctcttgctac

SEQ ID NO: 39314 - DNA, 647 bp, Glycine max
  unsure (1)..(647): unsure at all n locations
  Clone ID: PAT_MRT3847_1354C.1
aaaaacacattcaaaagtcccttattttataaagatcaaaaacttatttaagtcttattattaacatagccttcttccaccacaaccagattctctctggatgttaaaatagacagcagcaactggcaatccaagattgtaaagttcagcaaattctctagtaatgaaattttggcgccatcctggtgcatacactgtctctctaccctgttgacgaaataacacaaagactatacgatggatccccatcatgggtcggggattttcatatgttacaacctcatgaccgaaagtaggccccgttgttgctggaatgtcagttactaaccaatggaggtattctctgaaattgggatcacttgggctaggtgcatcaggatcaaccgcgantcaaagtgtagaagttcctgaaatcatcaccaccgatatttattcttggttggttgacaacttgtgagggtttgaattcacatccattgctgacatctttgttattggtaggtgaccctcataggaatagaacattcaaaagggtccaatacatccccaatcacacgcccaacaactgagagggtccctacttccacgaggcatgatcaataaggnagaacagtggaaactactttacaattgcggacgccgtgggt

SEQ ID NO: 39315 - DNA, 504 bp, Glycine max
  Clone ID: PAT_MRT3847_135500C.1
cgccaatctcacccttcgtcgaccgccgccaacacaccagcctcgacaatgcctcccaaaggatccggaaagaagcctgcggctttcccccaggccacctctaaggcctctgccgccaagaagcaaaagaaccctctcatcgagaagcgtcctcgcaactatggcatcggtcaggacatccagccccagcgcaaacgtcggccgcatggtccgatggcccgcttacgtccgccttcagcgccagaagaagatcctcaacatgcgcttgaaggtcccaccggcgattgcccagttccagcacgttgccgaccgtaaccttgccacccaggctttcaagatcctcaacaagtaccgtcccgagaccaaggccgagaagaaggagcgtctcaccaaggaggctaccgccgtctctgagggcaagaagaaggaggatgtcagcaagaagccctacgtcgccaagtacggtctcaaccacgttgttggcctcatcgagaacaagaaggc

SEQ ID NO: 39316 - DNA, 289 bp, Glycine max
  unsure (1)..(289): unsure at all n locations
  Clone ID: PAT_MRT3847_135501C.1
cgaagggagaagatgaaaactggccgatctctatggaaacaccgttggctatctctnctaatgctttgattcagacaagaatatcattattcgtgaatttcaagatccttaataatctattttctaatacccttttactactataattctattaaccaaatactactaaaccataataatatacagattactttctcatatactaaaatgaaattctaccacatatactatatatcacatcaccattatattaaccaattaataatctttaatattcactaaattattt

SEQ ID NO: 39317 - DNA, 413 bp, Glycine max
  Clone ID: PAT_MRT3847_135502C.1
ctattctttcgttctccttgaccttcaccatagcccatgctctactcagaagcctctgaagctgcccatccaagattgacagatctatctacaccgatatcacataccccacactctaccacatcttcaaccataacactcactgtgtgtaacacacacacgcacacgcacacttcttctgttcaaagtcacaacattcaccacaccccagtatcgcctgtgaacctcaaagtcacttgtgatcatcaacagacgttacctcagatagcacagtgtggtatgaggcaaaatctccttgaggggtctcttgcgtcgctgtgcctctacaattactaatactatgctataccgctgccgctgcagttgctgctgctgttacatgtggagatcgctagaggtcataaatataagac

SEQ ID NO: 39318 - DNA, 318 bp, Glycine max
  unsure (1)..(318): unsure at all n locations
  Clone ID: PAT_MRT3847_135503C.1
tncttnntacnnnagnangnattcggattcngcacgnnantngtnantnncntcaccactntnntcgcnggnnanttcatntangtgattnagnncgattgncacaatcatgattcaaatatggttgcattgtcataccaagggngtggccctctgaattcnangtgnacgacaancatggcagtatntaagtacctctgcctttnnnttgggantcnctantggggccnaacggntgcnngntcnaacatccggagcctntggggacataatctggtatgtaaacccttgttncccaannggantgacattcnncaa

SEQ ID NO: 39319 - DNA, 561 bp, Glycine max
  Clone ID: PAT_MRT3847_135504C.1
accagcttcaactgagttacttcattggaattcgcaaataaaacgaatcagacgatgtatgtgttagaagagtaagttattgtcaaatagtagtcccaccacactttttttttcttcttcctgtgtcgggctcaggatttcgtcacaagtaataacgtgggtggtaccggtcaaaattgttaacctgttgaatgggaaacaacaaaattataatctttagtgcgactttttggttttatggccgtaattagaactcgaaagtgtagcacatgctggcttctttgtagtgtgctatcagctagcgggacaagtgtcaatttagtgtttagccagcaagcatctgttttgggtcattagtcaaaggtgcatgcttcagagaaaaatggataagaatcctacgcaattgtaaactgcggaacatttcagacgttgaacgtaatactttttgtgatacaatatacttgtacatgttgtcaacagtggcatcttgaaccggacggccttgtgttttttcttggtatgcacgccagatttggccttatttttgttgaagaggaggga

SEQ ID NO: 39320 - DNA, 659 bp, Glycine max
  Clone ID: PAT_MRT3847_135505C.1
atgatcatggtgccggacacatcaaccctagaagagctcttgacccaggtttggtctatgatattcagccacaggactactttgaattcctgtgcacacagaagcttactacatctgagcttggagtttttgccaagtattcaaacagaacttgcaagcactctctttcaagtccaggggacttgaactatccagccatatctgtagtttttccactgaaaaattccacttcagttttgactgttcacagaactgccaccaatgttggtcttccagtttccaagtaccatgttgtggtttcaccttttaaaggtgcttctgttaaagttgagccagacaccttgagttttacaagaaaataccagaaactatcttacaaaattaccttaacaacacaatctcgccaaacagaacctgaatttggaggtctggtgtggaaggatggtgtgcacaaggtaagaagtccaattgttataacgtatctgccaccaatatgaaacttcactttggactacctataagtttagcagtatttctttttcttttgcaatgagcaaaattttctgtactatgaagtgtacgcatttttattacacgaaaagtgcctggatattgtctgctttcaataatgatcttgcatgccacttttattgcatctt

SEQ ID NO: 39321 - DNA, 669 bp, Glycine max
  Clone ID: PAT_MRT3847_135506C.1
gaccaaatgctattagtattgccttttcattgttcttagtggttactattgctccgttttgcctcaatgacatatacttgaactaggggcgcaagaaaagcttaaaacagtaaagagttcaaggggctgaaatcgttttcttgaaactctaattcctcgacagggtcttcttcgaaaaggaaaggtgcgggttcttgagaattgtggggcttcttgttgtccatctctacaactgaaacaattctttcctcaatacagttttccacaatttcagttccaaccccttgggactgtaatccaagaagagaaatgcattctccctggaaatccaagtcacaggaagacaagatcccagcaattgtcttgcgagatcaggggcataaccgcaaatctcgacgtcacgtgaacttaaaaaagcctgggaatgattcgccttcaagtcatctagggaaagtttaactgctctcttaacaaggtttctgacaagtggagacattttccttggagctggtatcatggtcttataatgtttatgatacgagtgtagcaaaatatcaatgtgagtatctgtaggcaagttttcccattgtagtaatgtaacgccatcttgctccactacgcctcctaaattcaaaccatatgttttccagtcaatgctttgcaatgcct

SEQ ID NO: 39322 - DNA, 293 bp, Glycine max
  Clone ID: PAT_MRT3847_135507C.1
ggagcaaagaaattgcttatcttgaatttaaattatgtcaaagaaactgaactttagggtttagggtatatgtaatagtgttttagacgtgagtctgaagtaaaaaagaaattaacactcagaaacacaattcttttagaagtgtagaagacatctcagtgactttccgacggttaaaagatcaaaggccttgtttatctcctcgattggaagctcgtgagtgataaaatcatccaacttcaccactccatccatgcattctttggcaaaatggggcaattgagtcttccctt

SEQ ID NO: 39323 - DNA, 401 bp, Glycine max
  Clone ID: PAT_MRT3847_135508C.1
gaataaataaatttgttacttatggactatcaaaaaaagtacatgttttatcgcggggtgtgcatgcctatgaaataatgcatgtctaatgatcatccctttctcttttatgcagaggaaactgatacttttgttcagggacaatggaacactttgggaagaaactataattgccaaaggccataaagataaatcttccccttcctgtgtatacatttggaccgcaccaaaaagctttatttgtataggtaccacaaaaggcaccaagtaacttggagggcgcacccttcttatacacctcagctaggtgtgaagccctttcaattcttgatgaaaggaaagtttttgcaccttaagtgggattaggattctcatccatagctctgccccccctgaaacca

SEQ ID NO: 39324 - DNA, 169 bp, Glycine max
  Clone ID: PAT_MRT3847_135509C.1
ttttaaaggaaaaggcaccaaattcaaattaagggcgcactgctactcaaaattatagaggacgacggtacactctgaaaaatatagtctgatcatcccaaaataaggaaactatctttgcccctcctacattgagaatgctcttaatgtgacacgcaagacccatcac

SEQ ID NO: 39325 - DNA, 174 bp, Glycine max
  unsure (1)..(174): unsure at all n locations
  Clone ID: PAT_MRT3847_13550C.1
cggcgntnacggtaaagactncggggaaatttcccggaagcttttgggnataccttccttaggaaggcgngncccgcccggaacttaagatngaagnctnncgtgccgaaccaccgngggaaatttnaaatttncccgggaacccgggttaacccttgncaagggncgttgaac

SEQ ID NO: 39326 - DNA, 424 bp, Glycine max
  Clone ID: PAT_MRT3847_135510C.1
gggggggttcgggggaaaaactttaaaatttaaaaacaaaaacaatttttttggaaaaaaaaaattggaaaaatttttaattaattttgaaaggaatgaacatttttaagaccaaagatttttattggcaaatattaatggtttaaaaataaaaacccccgttaatatttttaaaagggcttaaatgtggaaaaaggggccacagataagttcttttttaaagtttggaatcaaaaaaggggggagtttggaagcacgtttcttttaaaatggagggtttaaaaaggggaaaaagaattttacctttttggggatgtgaaaaaacacaggggttaaaacctacaagcccctgttgttctttaccaaaagagaaccctaggcttggaaccaaaatatgtgtcaaactaaaaagggaaatttcggc

SEQ ID NO: 39327 - DNA, 334 bp, Glycine max
  Clone ID: PAT_MRT3847_135511C.1
aaaaaaaataaaaataaaaattaaaaattataaaaaaaaaaaaaaaaaaaaaatgataaaaaagaaaaaaaataaaatataaaaaaataaattaataataaatgaatgaataatataatattataaatatattgaagtctttaatggtgtatgatgatattatcgactgttagaaattatataagaataatctggatatggtttacagatcatatacacatgtaactgagtgtcaatacttctgctagtacaagtaacaagggtttacggattagaagacatatttactatataaatggtacataaattattcaatttgtaagagaaacaatat

SEQ ID NO: 39328 - DNA, 150 bp, Glycine max
  Clone ID: PAT_MRT3847_135512C.1
gttgaagtggcagctttgcactcttgcttatattatatttgtaggcatttaagtactcgtgagattaaaatggaccgtgacaaaagaaagacttgacactcttgtgaattagcatttcttgaaatatttccggttgctatttccgtttcc

SEQ ID NO: 39329 - DNA, 1099 bp, Glycine max
  Clone ID: PAT_MRT3847_135513C.1
tacggctgcgagaagacgacagaagggatcctcctccatacactgaacaaaatatgaagccaaattattggattccgcatttctcactgaggacattggttgttggcctgttaaaagttcagcaagaactacaaaactttagacatcacttttttctgtaaattgactagtgtaaaaatattcgggatccaagtatccaaaggtaccttgaacgactgtggtgagatgagtatcttcaatggaaatcattcgggttgctccaaagtctgcaattttagctctatacttttcatccaatagaatatttgtggatttgatgtctctgtgataaatgggttgagatgcaactgagtgcaagtaaaacagtgctcctgcaattcctgttgcaattctcaaacgaatatcccatgtcattggtaagtcctcgttttgatcatgtaaatattgaaaaaggttaccattaggaatgaattcataacaagcaagggtatttctgtccccaaacaacatcctaacagcttgaccacatttctattgttaatttgtgaaaggatgataaactcatcctaacatcctaacagtaccttggcctccctttcctataattatgttcaagttaaagtggtcagtggctttctctaaatcctttaagctgaacaaagtagctttgtccacattaacttcaccagatgacattcttttttttagcaacaaaccaccattctttttgaagaatttttgtatgcgtttctttatcactctcttccttgcccctttatacaacaaccatagaccaaggaggcagatgatagatcccaaggcctgacgaaactcctacacataatttatctgttgactacaaaaattgatgtgaatgcacttatattaatcagtaaatttaaattcataaaggctctagtttacaatacggggatttgagtaatatgcataaggttatacttctaacttcagggcaactattgtaaaaaaaaaaaaaaaagaattccaggaaattataaagaaaaatgtttcttggacaactttgagttgtctacaactcgagagagaaaaaaaaaaaaaaagggcggcgctcgcgatc

SEQ ID NO: 39330 - DNA, 283 bp, Glycine max
  Clone ID: PAT_MRT3847_135514C.1
gctgaatcattaagataatcatttgaagaggaacaagtgtcgaaacagaagtccaatgaccaacaacagttcacagatgccaacagttcaaacaacagtgcaaatctctttaaccaacaacatcttacagatgcagataatagcaagaatttacttttgttcattaatcttttggaaaagtatgagttgatgtgtagtcaagtctctaatgctctccaaacatttgctaaccctactaagctggtgctagatacaataaaaggtttttacgcttctcattcaa

SEQ ID NO: 39331 - DNA, 608 bp, Glycine max
  Clone ID: PAT_MRT3847_135515C.1
gaaacttgctgtatataaaccatgtagcatctcatagtttaggccaactcaacacaagagcaaaatctttacaaactgttacatttcttatatagctcttgctcttagagagaaaaattaaatactcaaaagaatagtacgtgcttggaaaaactaagatgcagatgaagaagagtagtcttgggattgtgatgattatcacagtgtttgtggtttcatcgcagttttgttttgtgtatggaagagttcttcgaccagaggcgttaaagacaccggtaggtgacggttgtgaggatttcaaaggagaagattcttctcttggaatggctacatttgctgttgcttctaacaactctagcactcgtcaatttgcacgaagcttggcctacaaacttgcttctggacctagcaaaaagggtcctggacattagtcttagttgcttgttactatgtctttcttccatttttggttttgaaattgttcttttctttctaggtctttgactcagatgatgagcttctctctctctctctacgtttttcatgttttgtttctgtcttcacttcctccacatacattaatctcatacatgtgtcatatatatgta

SEQ ID NO: 39332 - DNA, 217 bp, Glycine max
  Clone ID: PAT_MRT3847_135516C.1
gcatatcttcgtgaaaactctaccgggtaagacgatcacccttggagtggagtcttctgacaccatcgacttcgtgtaggctaagatccaggacaaggaaggcatcccttcggaccaacatggctatattttggtctgattgcagctggatgacagccgtaccctttccgacttctacatgcatacggagtctcccgtacaactcgtccttcgtctt

SEQ ID NO: 39333 - DNA, 930 bp, Glycine max
  Clone ID: PAT_MRT3847_135517C.1
gattcattagggaaaagagatcccaactagttcgaaatttgactagaaagtaaaaattaagaattgtttccgccaaagatgaaagtacttcaactatttaaccttaacttcaacacattaatcactcgtgttcaattacttgattttcaatcaatttaaataaaagcttgtagatccatcgagtttacatggatatcagctttttaaactgatgagtgatgaggattcggccggacaacatccttttcttttccttctaattcaagaccctagaatatcgctccccgtccccccctaaaaagaagaaaaatagttctcaaattcagacacaataacatggtgtcatgtgatgtgggtctaacaaccacaatcgaggaataaaaaacgcctttaaaaatcaatttatttacgcaaacaatagttcatatcttggttatttccagaagctagtgatgaacccagttcttaaaattttgatacctcatccccaaaagctaaagctaattcatgggagggacaaaggtcgtcgcccctaattttgattatatcactaatcaatgtgtgctctccagcgcactctctcacaccaaagactgcttttttttctttttttttttagtttattgattattgatggccgataggtctaacaacaactctaagattaagataaactctagtagtagtatcttaaaatttagaattttgggcctaaataaaattcaaaaagaaagagttgtctttaagatatttagactaaataaggtggaatctccaacagcagtgatggatcaatctggggagtggtagcagtatgcagggggaacgaacaaagtaagaaagacaaatgacagagacgccaatttgggttatttttgaaacagaaagtatttttactcgagccaagaacctgctagggggagatatggg

SEQ ID NO: 39334 - DNA, 253 bp, Glycine max
  Clone ID: PAT_MRT3847_135518C.1
gggagaaccactttttgggaaaaggaacttgcaacttacaggcagatggattcaaaaggtagtgaccaatcatatggcaaggcaaaggtgcaacatgatcaatggggacaaaagcctccaatttcagttggaacatatgaaaatcgaagcaccatatcatttgttaagaaagatgaaataaaagatatttctctaattatatggttgctcagacttgcatcaatatgaaagacggacaagagctggagaaaat

SEQ ID NO: 39335 - DNA, 251 bp, Glycine max
  unsure (1)..(251): unsure at all n locations
  Clone ID: PAT_MRT3847_135519C.1
gctcgagtacggctgcganaggacgacagagaggggggggaagaagagataggggtggtggcaatgtgttacgagtgtcgtatcatatgttcgttcgtcttcttgggttagggttctacgcttgcggtctcctttgacacccacgcacgcttcagccgtttcagttcgttgcctcacgcgaccgactatcgttgttggacacggtcctgtttattaagcggtttggatgagagagtagaagcgtaagatgg

SEQ ID NO: 39336 - DNA, 451 bp, Glycine max
  Clone ID: PAT_MRT3847_13551C.1
ataatataataggatgcatatttatttatatgaaatgaaatacaagtgcaacagcctgatataagagctacccatatgagttggctgtagaaacgaagtaacatctgcctaaccacacacgtgaagtgaagctccccaacacgctcattgtttctctcacatcataacccccatatttatggattttggtgataacacactcaacaggtaggattaataacaacagatcataaaaaccagaagtacttatatctgcctaacttcatcttaggtctaatgcttagtgcaacaagattatataatatacctaggagatgcactatcatggcagccttgaacaaatgtttggtacacaactgtaccacctagtcaaagctgttcagtgctcctcttaccacagcaggatccttagatgtctaagggaaatagatgaagtttgtgaccatgcatg

SEQ ID NO: 39337 - DNA, 306 bp, Glycine max
  unsure (1)..(306): unsure at all n locations
  Clone ID: PAT_MRT3847_135520C.1
ngtttaaataccgccaggaaaacactcttgactaggaggactttttcaaaggacacggctgtgaaaccaagctgccacagacacacaaagcgaagagacgatgcggcagcaaactaggaagcgccgagcctgaaaagtgatatggtggagcagcagtaaagatgaatatgcagatgcaggcacacgagacacacgtgcgagaaacgtagggtgcagcccaaacaacgcgaccaacacggttagcttctgtgggaaagtcaacgggacattctcagagctgagaggagaaaagaggaaccaaagcaa

SEQ ID NO: 39338 - DNA, 1183 bp, Glycine max
  Clone ID: PAT_MRT3847_135521C.1
aaattatctgaaagatttcggcgccacgtaccccaaattttggcggttgaggagcagctccttcatttcctcttactctgttttttctgtttctgttggctaagaaacaaagaaagagcccagcgataaagcaaaagcgcatttccgctgttgtatgtgtgtgtttgcgatgccaggtggggcaaccgtctgctccggtcaccggtttctctgcgttgttctgcattcgactcgtccccgactcagctacccgactcggtcgcgacccgttccggttcaacttggatccgtgtttgtgtcgaatggtaatggcgatagtaagcggttcagctccaagttgagcctcattcccagagccgttgattcttccaccgcacaatcttccgtcgtttccgacgatggcttctccgtttctaagctttcatttggtgtgattggtctaggtgttggactctcactcttgtcctacggttttggggcatattttaatattctccctggatctgaatggtcagctataatgttaacttatggcttccctcttgcaattattggaatggcactcaagtatgcagaactcaagccagtcccatgcctaacatattcagatgctcaaagcttgagggaaaaatgtgcaactccaattcttaaacaggtgaagagcgatgttaccagatatcgctatggagatgagcagcatttggatgaggcattgaaacggatatttcagtatggccaaggaggaggaataccaaggagaagtgctcctgttttacaatcgattcgtgaagaagtcacgcaagatggtaaatactgtttggttttagtttttgaggccaaggctctgcagttgtcagattttgaacaaagacaggccaaatttacttcattctttgggccaggaattacagctgaaattggtaagggtgagaaagatttgtatgaggttcgacttatctccaatacagaccccaatgcttctccttcatgaagttatggaccgttttatcctcttccatgttgcatggtttagtcaattacaggacttaggtcctgtaaaatatgtaaaaaaaaaaatattatgctcaaaagtatcaagtcattgtatcaagtgtacattttgacatacaagaaaagaagaaaaatagcatttggaaaggaattgccaagctaatgaggatca

SEQ ID NO: 39339 - DNA, 341 bp, Glycine max
  Clone ID: PAT_MRT3847_135522C.1
cctagacagtaagtatgattccatttcttccaatgtgttaatttccatcgaacaaaggtccacgccccaaatttcgactatgctattcttgagatcctcttcatcatccaaagcatcttctcttgctccaccctcaactgtttcactgttgccactcaaatcaatatctggagtaaaaattatcccctcaacaactatatctatatcaccactctccgaagtgtcaagttttaacttcttcctactactgctattatgtgcatgagggcgtgcatttctctttaaacttgaggtacgggcttcaaaattggcatcttaagaggaaagttgatttaataaaa

SEQ ID NO: 39340 - DNA, 276 bp, Glycine max
  unsure (1)..(276): unsure at all n locations
  Clone ID: PAT_MRT3847_135523C.1
tccggtnccggnaattcccgggnntcgacccacgcgtccgtacggtgtgagaaaaaggaccacaggaggggggaacatagtactcttttcattatcgctcacgagcagagtaggttatgatctccttggatgagaagcgaataaatcgatctcctttatgagaagcagataaattatcatgctataacaaagctgtatattccttgcgaataaaataagcacacagtgtctcatgtaaaaaaggctgaactgaaagagaagggccgatctagagga

SEQ ID NO: 39341 - DNA, 485 bp, Glycine max
  Clone ID: PAT_MRT3847_135524C.1
cgacaaggcacacatcaacaacacaaaaatgagcagctttccaaactacagcacaactgaatatattcacaagtaccacttgagaggtccttcaccaacaagcacaactagtagtagcaatgccaacacacaagatactgacacaaaagacgccattagtagactacaagcattgagagtagactttgacaagaaacaaaatacgacttcaccaagctacgaaccattcatcattggagtcgcaggaggaagtgctagtggtaaaacaacagtatgccaagaaatcattaccaacttgtcgaacaagagagtagtcattatctcccaagattcattctatagaaatttgacagatgaggagaagcaaattgcaagggagaataagtatgattttgaccatccgaatgcattcgactatgagatgtttgagcaaacagttgcagcaatcaaatctggaaagggagatattgaaattccaatttatg

SEQ ID NO: 39342 - DNA, 223 bp, Glycine max
  Clone ID: PAT_MRT3847_135525C.1
gcggcttctttcgccaagattaagtttcaccagtaatgggtaagccgaaggttcacatgaacatcgtggtcattggccatgtcgactctgggaagtcaaccaccaccggtcaccttatctacaagctcagaggtattgacaagcgtgtcatcgcgagattcgagaaggcagctgctgagatgcataagaggtctttcaagtatacctgggtgcttgacaagct

SEQ ID NO: 39343 - DNA, 1136 bp, Glycine max
  Clone ID: PAT_MRT3847_135526C.1
aaagaagttgctggaagctgttgatcttaagtgcaagctggttgattttggaaacgcttgttggacttacaaacaacaaggcagtataggtgtcctgaggcaatataggtgtcctgaggttcttcttggatccaaatattcaacccctgcagatttatggtcctttgcttgcatttgcttcgagcttgccactggtgatgttctttttgatcctcacagtggtgacaactatgatagagatgaggatcatctggcattgatgatggagcttcttgggaagatgcctcccaagattgcactaggtggtcgctattcccgagaatttctcaatagacatggtgacttgaggcacatcagcaatttgcgattttggccaatggataaggtgctgatggacaagtataatttcaatgagcaagacacaaatgacttggttgacttccttgttccaatacttgattttgtcccggaaaagagaccaacagctgctcagtgccttagtcatccatggatgagtgcaggtcctcggactcttgagtcctcaataactaccgtgcaacctgatgccatcaacgaggaattgtctaaaaggaggaagagggaaacggctgagaaggaggcagtggaaattggtttgaggaatatatccattaaagaaacatctgagcctctcaaagactcccaacctctaaagtcattcaaatagatacaaattggcttgtctggcggtatatgcaacctgttttgttttaatgggtcagacgacgagcttgtgacttgggaaagctcttcctggggcgaagcggctggatttctgtattgttgtaacctaacttatttcacctttactggtattacagggttagcttcaaattcaattgattaagggtgctaagttttagaaactagatattttttggtgtttggaactgctccccagattagagttttgtctttcagaaatacgacatttgttttggggggttgtccaattgtacttcaaatgagttaatccttgatttgtctagcatcagactttgttgcatgttgagtttatggaacatataactttggttacggtccattgtatgtaaagagagatcttcaatatataaaaaaaaaaaaaaaaaaaaaaa

SEQ ID NO: 39344 - DNA, 1076 bp, Glycine max
  Clone ID: PAT_MRT3847_135527C.1
gttgatcttaagtgcaagctggttgattttggtaatgcttgttggacctataaacaattcacaaatgatattcagacaaggcagtataggtgtcctgaggttcttcttggatctaaatactcaactccagcagatctgtggtcctttgcttgcatttgctttgagcttgcctctggcgatgttctttttgatcctcatagtggtgacaactatgatagggatgaggatcatctggcattgatgatggagcttcttgggatgatgcctcgcaagattgcacttggtggatgctattcccgagattttttcaacagatatggagatttgaggcacatccgtcggttgcgtttctggcctcttaataaggtgctgacagagaagtatgatttcagtgaacaagaagcaaataacatgaccgatttccttcttccattacttgattttgtccctgaaaagagaccaactgctgctcaatgccttcagcatccttggatgagtgcaggtcctcggactcttgagtcctcattgactgctgtgcaacctgatgccatcaacgaggaattgtctaaaaggaggaagagggaaacggctgagaaggaggcagtggaaattggtttgaggaatatatccattaaagaaacatctgagcctctcaaagactcccaacctctaaagtcattcaaatagatacaaattggcttgtctggcggtatatgcaacctgttttgttttaatgggtaagttttgctggtccttggaacttgatatctgtggaaatgttacatgggacattatatgcaatgcaggtcagacgacgagcttgtgacttgggaaagctcttcctggggcgaagcggctggatttctgtattgttgtaacctaacttatttcacctttactggtattacagggttagcttcaaattcaattgattaagggtgctaagttttagaaactagatattttttggtgtttggaactgctccccagattagagttttgtctttcagaaatacgacatttgttttggggggttgtccaattgtacttcaaatgagttaatccttgatttgtct

SEQ ID NO: 39345 - DNA, 256 bp, Glycine max
  unsure (1)..(256): unsure at all n locations
  Clone ID: PAT_MRT3847_135528C.1
gacgagcgcgatggctatgcagatgangcggagttgcaccgcgtgttgagaaagtcagatacaaaaagaaacctagagactttgattcaagccgagcagtcgaaagantctacaaccagtacgaaaagaattggagttgcaagcgtctgttttgggctgtccggaataaagaaaagtttgagcatttcgtcaacatcctcgaaacacatgttcagtggattgcacaagctagtgttcgaggagcagcggaaagagg

SEQ ID NO: 39346 - DNA, 493 bp, Glycine max
  Clone ID: PAT_MRT3847_135529C.1
tctcattcgcccgccttcaatagcagccccacctcaaaaccggaaacaaaaggaatctttacaagaatccaaccagctctcaccctccttcctacctctttgtggacgatatcttaagggaaagaacatcactctctgcgctggccacagacttcgtgaatcattttctcttccattcttagtttatacgctgaacactctcctatttgatataggacttcgtgtcagatataaactctttctgtctattcctcagaactctgtttaattccaagatcaagctggagaaatcctggattagtgctcccactctcctatccggtataggacttagtgggtagactattctacttctctccttcctttcactctcttcttcccactgatccgcattgccgtccaaagtggtcctatttgaaaaaacacttgggcgctggagcaaatgtttgctccgataattttctctggagataacaggcccaccgagaaaaca

SEQ ID NO: 39347 - DNA, 282 bp, Glycine max
  Clone ID: PAT_MRT3847_13552C.1
cggtgtctgtctagccacgactaaagatccggaggtgagtcctatatccatacccttattaaaggagaatcctagatctagttgcaacacatagaatttacataggcgagcgtagcctataaaaaccactacggacccccttcgctcattggagcctcaagaatacacaaaagctcaggttaagacacagagagatagagagagagagagagagacacagactgggacgatgggctatcgcggtgcatggtggcgctgctgccgaccctaatctcccactct

SEQ ID NO: 39348 - DNA, 628 bp, Glycine max
  Clone ID: PAT_MRT3847_135530C.1
cccgcgtccggccttgctcaaaattctattccttcttcctttccctcaaagctcaaactccaaaaacgctacccctcttgttgtacagtacgaggagaaagtcttcgagtttttagggttcgaaaaatccaccccacacattttctatgaaactttaggtgaacaaatggcagagaatagagaacataaggttgttgataaatctcaggtagctccagctacaagtagaaccatgtcatttcctctatcattccttgacttgccttatgcacgtcttctttatgtgaaacgtttattcttctatcactttccccattcccttctctcaaacacaatctctctcttacccttcaacatttcttccctctcgctgggaatctcctgtgtccaccacaacctaacaaacccttcattcgctgcaccgatgatgactctgtcaccttaaccatcgtcgagtccaaagcatatttcaaccatctctcatccaaccaccccaaaaatctaaaagatttggatcacttagttcccatggtgacattcacaaccgtgcctggtgatgatgatgaggacacgtatgtttcgccattgggggccttgcaggtcacggttttccccaacctggcctttg

SEQ ID NO: 39349 - DNA, 708 bp, Glycine max
  Clone ID: PAT_MRT3847_135531C.1
aagatatgtaattatggtttttgttaggatcaatagtatttttttaataaattatgataatcatccactgatataattatgtattaatgataaagtattacatattatgaatttatgtatttttttttctaattcatgttaatgcatctaggctgtatcatatcttggatttttaggaatttctcatattcttgcatgtgtgttgtattgtatggttgtacccatgctgtattaagtatttgggtgttcaactttgatatggtatcagagtttctatgactaaatatttatgagtttgatcattgccactcgtaaaaaaaaagttgaatttcatcatgacataagatgggtctgtgcattatcccatcttcaagcccatagggggagagttggtctactctgttatttaatttcaaaacatgttagatcatagatgtgcatattcttctaacaaaggaccgcagtatcttgtaacatgcataaaatataaattactaagttccttatggttttagtaaaggtgcattacttactttcagctagctggtagttagacaatttaatcaggtgaaaaatttgatattattgatgtaaacaaagcgggagccatcttggctaatggacaaatagataggatggatctgaaaacgagttatggccatgtttgataatgagcttaatcaagtgctttattcaataatggtctgt

SEQ ID NO: 39350 - DNA, 143 bp, Glycine max
  Clone ID: PAT_MRT3847_135532C.1
tccagtcacttccttgtccatgggggtaacactttctccctcgatttattacctaacacggtcactataaatggtctcttgtgtttctcaccttctgtgttatttgcgagtgttgagcgtcagctggatccaaactttttgta

SEQ ID NO: 39351 - DNA, 195 bp, Glycine max
  Clone ID: PAT_MRT3847_135533C.1
ccctcccggctgcgaaaagacgacagaaggggaatggacttttttatttattcatttgtcgccgcccttcgaagcgagcttgaatgtctatctatcgctggcccttttgggtgcttctacaatcttcaaaaggttcagggttttacgatttctgaatctcaacgacttttaggcgcttataatggaacaagaaca

SEQ ID NO: 39352 - DNA, 175 bp, Glycine max
  Clone ID: PAT_MRT3847_135534C.1
gaaaaagaaaaccaaatttcaaaaattgttggtggacaccccagaccaaataccgaggggcattgacatcctcattcggtgaaactcttgggtgactaatcatagctcgttgaaagaatggctgcaaccagagatattaagcacggcggtgtcttgctcacccattgcgaaaact

SEQ ID NO: 39353 - DNA, 429 bp, Glycine max
  Clone ID: PAT_MRT3847_135535C.1
aaaactaataaaacagtaaatacgtatgaaaatgagatattaacaatttctttaccattgtccactagatgttcaataactctcctctcgtcatggcctcacgaaggtttcaacaaaaatggggaaactgtcactctgcatacattatgttatgtgtgttgggtataaaccctttaaatgaacactcgtatatctatcatttctgtagagatacaatcctaactactatctactatgtataccacaaccctaaatttgttaaagcacaattgcattggtacccagagacaacatatatatatttgcagaaccccgtcgtcgctcgtccaagattaactaggctgtgtgtctacaaacagagaagactaaagaaaaaaagtggcataaatgcattgtcaaggtgtgctgtgtgggcctccaacaaccact

SEQ ID NO: 39354 - DNA, 304 bp, Glycine max
  Clone ID: PAT_MRT3847_135536C.1
ggctcgagtttccatcttttaactcacatctccctcctgccacagatagattacatctggatgttgggcacaattggcataatcacttctgccacccatttgttcccacattacagcaggcaagaaatcctcctattgaaggtgggtgcaacccaatcctgtctcgtcctattcctatgagattggactggcccccagtttttcgtggtggcatgaccccatcaccaaactataactatgactatggttgtatatctaggaagcaatgtacctttttaaaaggattggttgttcacaacatgca

SEQ ID NO: 39355 - DNA, 266 bp, Glycine max
  unsure (1)..(266): unsure at all n locations
  Clone ID: PAT_MRT3847_135537C.1
agggcggggcgaggggaaanaaaacnaaggaggccangaaaaatcatcaatgcttccagacgtaacgtagcaaggggggagagaagagcgggggacttttcacaccaaaccccgagcagagagcttcactagcccgcccacaacaaagacagccccgacggcgcagaaggccgagacgctgacgcacgtgcgcaaccagaggggcgaccgcgacggccactacctggcctggagaacccttggccccgacaaaaactccctgggcg

SEQ ID NO: 39356 - DNA, 411 bp, Glycine max
  Clone ID: PAT_MRT3847_135538C.1
ctttgtttggttttttattctcctataatcactctaatataccgaagcatcacaggattgttggctcaatccaaattatttaggacctgacgattttgaacccacttacacacccgattagcaagtggtgcacaatagacatctcaaaatttttttttaggcgggtgtgcaccatggaaacagacaatacagggcctcaaaaactgcgagatcagctaattttactgccacttatttatatttgttgctctccccagacaataagcatgcgtggatgtaggaagaggtatcagactacctgccctttgacccggccaaactcaacttatattccacacccattgcgcgtttttgcaccagggttaaactttacccactctcccttcccatattcaacataagggaaagaaa

SEQ ID NO: 39357 - DNA, 371 bp, Glycine max
  unsure (1)..(371): unsure at all n locations
  Clone ID: PAT_MRT3847_135539C.1
ttttccctttttttttttttttttttttttttttttttttttttttttttattttttttttttttttttttttttttttttaaaaacaaaaacccaaatttaaattggcaacaaaggggtttctaaattttaaaccaaaacggaaaattaattttggggggagaaacaggaaattttgngtccctaaaaggccaaaggggccaaaaaaacccccaaccgggggggggggtcccccaccccagggttaatggggggggttgccccccttggccccaacattttgaaagaaacccccaagaacccccatcagttttccaaaaacaaacttgggggctttaagggccttaactttacaaaagaacacattttgg

SEQ ID NO: 39358 - DNA, 140 bp, Glycine max
  Clone ID: PAT_MRT3847_13553C.1
aaacacactcattgctcatagtaaatgcgctttatttaagtgaataaaatactacatactaggttcacagaatgcaaaaggacacttctttcacccagatattatgagactctttacagttcctcaagaaagtcgcgtta

SEQ ID NO: 39359 - DNA, 258 bp, Glycine max
  unsure (1)..(258): unsure at all n locations
  Clone ID: PAT_MRT3847_135540C.1
gattactatntgctagccntgttaattngggagattctgnctaaacaggttgcaagtttaggggccangcttatnanntccngcaagaaatnaagctgagctaaaccgagtnggnacacagctganaggtaagcatgnacctgatgacgtcaagatctnaccantggatttatcanctggagaggatntcnctnagganagctgtngagaaancagaatcctttctccggattctggtnttgattacatggtccataa

SEQ ID NO: 39360 - DNA, 424 bp, Glycine max
  unsure (1)..(424): unsure at all n locations
  Clone ID: PAT_MRT3847_135541C.1
ggataaataatataattgatttaattttttatggtattaggtttacaacccccgcaaacgcagctgggtgaaaacttcatgatcatgccgcgagggcgccgggctttacaactgtttaaatacaccgattttcttttacatatgaaaatagacatgatacccttccctttcatagaaaattataatgatttaacattttttttataaaagacaaaacgccgaaactttgcttccaatttttctttttcgggcatcgggaagggcttcttcttccttttttatcggtttcttttattcgtgggacatattcttcatatccattgagctttgctagcttattgtggtaaggaggaggggggggacccttttttgttaggcttgttggttggagatggtggaggaaagctcnagccgaattccgagc

SEQ ID NO: 39361 - DNA, 468 bp, Glycine max
  Clone ID: PAT_MRT3847_135542C.1
gcatgtctagctatctcgatcgaactgtccaaggtcctgtcacagtatgaagtactatgactaatacttagcccacaccgacatatactgggtagttaacaattacaatataccttaaactgtgtgtttaattaacctacaacccaaggtttagaaggcattgtgtgttaagaattaattatctacgggctacagttagtgcttaggcaaaatggacgcaaccacagacaaacgctagctaaccacgcccctgggtggttacggaattaattagccccgcttttgtatgtgaacgtaaaataggcacaaacattgtaacatgcggtgggcaatacatgtaacaacacaacaacaaccggattacacatcacaaagttataatgccggatgagcatatacaatatattaacaatcggccgcatgccaaacaaacgcgggcaggggtgacttaaccagtttatggggagg

SEQ ID NO: 39362 - DNA, 624 bp, Glycine max
  Clone ID: PAT_MRT3847_135543C.1
attcaccaataaaacaataaagtatattaggatttttacttcataagtcttttcctaggacgctatacatatgcaacaaatcaaacttcataacaatcgtatatgatcaaattacaatgtacaaaatgaaaaagaataatcaaagatatttacggcacgatttctgaaggtcaattattcgaaccttcaaatgctaagtggtgggccgtgaattgctgacttacacctaattctgatccaaatactaatggcagcacaaacaaactagtctagacttttcaatctatactgtgctcatccttgttgaaaaagatgaaagatatgatgaaaaatatgccgttgatcttccactttgtaaaccttgcaacaaagaagatggaaaagactcatgaccaagtggcactggcctatcaggcatttgatgaatgtcaatatcaccctctaacattttaagtgcttcagctatggttggcctttttgccaccattgcatgagcacaaagtattcccacaagaacaaacctttccatgaccttctctgggccttctttccttattgatcgggcaaaaatatctttcatgttccctgattttggaaagtgtccatgcccaatctctgatcaaa

SEQ ID NO: 39363 - DNA, 1251 bp, Glycine max
  Clone ID: PAT_MRT3847_135544C.1
gatttccctcatactgagtagtgttctgaattgtgctttttgatatcttaagccatttcagcaacatgagtaaccacactcgcgcgctagcgcgagcagctacccctaagatgcagcaaaggagggagcgacgcatgttctccacctctgatgacagtgccatgaccaagcaagttgaggccactcatgcccctgatggtcgtgaaattgatgtcaaacccattctccaaattgtggatgaaatcttggttcggttcattgctcgcaccgttgagggtcatgaagtaaagcgagatcaagatgcattggagatgactgctgctctggctgaatttgacatgcttgactcgctggcttatatcataaacaaaatttcctgcgagctatcatgcaagtgctcgggagggggagatgcacattcatcaactatggtgctactgaattacatgtctagctatgcatggcatgcgaaagttgtgttaaccttagctgcctttgctgttatttttggagagttttggcttgttgctcagttgagtgctgaaaacacacttgccaagtctgtggccctacttaagcaactacctgacattgctgagaatttcatgtccctgaagccccattttgaggcactcattaggctcgtgaaggcggcaatggatgtaaccatgtgcattgggctgaattctcggagctaccatctgaatacatttcagaggatactcctaaaatgtctgttgcaagtactcacattcctattgcttcctattgggtcatcagaagtattgtggcttgttcctcacaaattgctagtctcgtaggcatgagaaatgaatccatttcatcaaccacagaggcatgggaattatctagtctggctcacaaagttagtagtatatatgagcacctcaagaaccaactggttctttgctaccaatatatagatgacaagaggcatatagaggccttccataatctgatacgtcttttcgagacagtccatgtagacaacatgaaaattctcagagcactgatatatgcaaaggatgatgttcttccacttgtagatggaactgcaaaatcaagggttagtctcgaggtactaaggagaaaacatgtgttgctgctcatatcagatcttgatctttcacaagaagagatcctggtacttgacaatttgtacaaggatgcccgagcgaggggtgatacgcaatatgagatggtatggatcccagttggggacaagaacct

SEQ ID NO: 39364 - DNA, 373 bp, Glycine max
  unsure (1)..(373): unsure at all n locations
  Clone ID: PAT_MRT3847_135545C.1
tttcaaattttattatggggggnagtaaatgaataaacctctctgtctccttctcaacanagnnnnnnngnacatcagttctgatatctgtaagggatgccacataaacattagtttccttctttgtgccagattattgcatcttgagtgtaataggacttgaaatgtgtggacgaaatttgtcagcagaaatccccgtaaaacgaagggaatataagaaaataagttaaattccttaaaatctttgttatgcatggctctgttccagaataggtagctataatgcttgaggaaatatttttctgtggtgggatttgtgggtgaagtgtaggattgattgttaggtgtaatacaattaggggtagcttgtttg

SEQ ID NO: 39365 - DNA, 145 bp, Glycine max
  Clone ID: PAT_MRT3847_135546C.1
tcaaaatcactcaagcccagattcaaccatatatacttttaacccaatgctatgatgtttcaaaattgagatcgttaaatataacagttactgcagcccacaataaccctctacaataacattatctcatatctattatcaacac

SEQ ID NO: 39366 - DNA, 275 bp, Glycine max
  Clone ID: PAT_MRT3847_135547C.1
cgtctcgaggtttttgaacactcatcaccatggccaagcttgttcttgtccttaggttacttctgctcagaggctgcttctctctgagagagcaagcacagcaaaatgagtgccagattcaaaagctgaatgccctcaaaccggataaccgtatacagtccgacggtgggttcattgagacctggaaccctaacaacaagccattacagtgtgccgacgttgccctctctctgtgcacccttaaccgaaatgcccttcgtacacattcctacacc

SEQ ID NO: 39367 - DNA, 658 bp, Glycine max
  unsure (1)..(658): unsure at all n locations
  Clone ID: PAT_MRT3847_135548C.1
ggccaaaagcttatattataattgggatttacatatacccttaaacatataacacatagtatacctaacaattctgtcctctaattgttcctaacgatccttttgctcattcacacgaatcaaagctatataataaggctataagcatgattttgagcaagcttaaaagtttccaatgcccggcaagtgttttaagaacaagaatgtacaaaactgactatatcatgatcaagtataacaatatctagaaagctgtaaaagaacaaagaatggttgaatggagtaacttctgatgctatttcatgcttctttccaggcttgacagatgtaaaggggcctcttgattgttggctgttgggtggtgttcattttcttttgcttcttcctcatcatggtccactcttactatcaagtttgatgttggtgaaatggaagacaactcggtatcagaatggtaatcatcttggtcatcgtagtttgatacaaagtgagttgagtgaccggtagttttgtaacggtgtagtgtggggccagaagagtgtattgttgaatcagtgctgcttccatccatggctcgcaccttggaatttncaagtttcactccttgcttctttttcacagccatgtgccatttcttcaacgccttcgatgtttgttc

SEQ ID NO: 39368 - DNA, 270 bp, Glycine max
  Clone ID: PAT_MRT3847_135549C.1
aacttctgctacccactctcttcttccaagtccaaccacgcttttctctacagtcatgggcaaggtcaagatcggaatcaacggatttggaagaattggccgtttggttgccagagtcgctctgcaaagagaccatgtgggacctcggtggccgttaccgaccttttattaccaaccgttaacatgccttcattgttaaattccaacgtggttaacgacccctgaagcattaagatgtcaacctttaaggccagaaaacacctctttttt

SEQ ID NO: 39369 - DNA, 371 bp, Glycine max
  Clone ID: PAT_MRT3847_13554C.1
cccacgcgtccgatcaagtcaagttcaagagaagaagagagggaaaaaccgattaccgtgccaggattcggttgattaatcaggacaagaacaaatataacactccgaaataccgatttgtggttcgctttagcaacaaggacattgttgcacaaataatatctgctagcattgccgacttacaaattatgcagcagcttattgcactggtctcctgttggcccgaagagtcctcaaaacacttgaaatggatgaggagtatgaaggaaatgttgaggctactggagaggattattcagtggaacctgccgagagcaggaggccattccgtgcactccttgatgttggtcttgttaggactacaacaggaa

SEQ ID NO: 39370 - DNA, 387 bp, Glycine max
  unsure (1)..(387): unsure at all n locations
  Clone ID: PAT_MRT3847_135550C.1
gctcggnnattcgctcgnagccgctttgtacctggagctgcacattgcctttgtagtgtacactccatcatccttttctctttcaagatcatgtaatatactgtgaatacttccacggcaaaaagcggtgaaagatttaaaatactctctaaaacttttgctcagaatgctgcacttatagcaatggagatcatatcttctctttatgcagcacatgcatgtggaaatgccaaatttgtcattgattcggaagaaggtatacttcatgaagttttaaccttgagcatttgggatctccatttgactaatattatttgcttttaaatatgctgtaaaagctgcatgcactgtactacgtgtggaccaaattattatggcaaaaccaac

SEQ ID NO: 39371 - DNA, 660 bp, Glycine max
  Clone ID: PAT_MRT3847_135551C.1
aacagaattaggatatactctaaattatccataaaaaactggttaaagccagtttcacttacccttggtgatgcagctctagccctacattatgcaaatatgattgtattgattgagaggatgttgtcatcacctcacctggttgatcttgcagcaagagatgatctgtacaatatgcttccaactactgtaacaactgctttaagggctaagcttaagtgccatgcgaaaagtaaatcatcctccaatgctcatgatgcaaaccctgctgctgaatggagtccggtgcttgcacagatattagaatggttggctcctctagcacataacatgctaagctggcattctgagagaaattttgagaaggagcactcagttttcaacgcaaatgttttacttgtccaaactctttactttgcaaatcaagccaaaactgaggccgcgataattgatcttcttgtaggtctcaactatgtgtgcaggattgatacaaaagttggcacaagagatacactggattgtgttagtactagatcttttaatggtgttcatttgagaaagaatggaatgtacactgaatttttatagactatgacgttttgacaacgtctgaaggttaatgtcatcagcgctgtttagctttatcattttcaaatgaga

SEQ ID NO: 39372 - DNA, 269 bp, Glycine max
  Clone ID: PAT_MRT3847_135552C.1
gggaaccctacaaatggaaggggggcttttaataaaccaaagcaacccaacgcagcaaaggggggaaacccgctggttttttaaaaagggaatcggggggtccgccaaacccaccactttaaaacacaggtaaataaaagcatttttgccaccggcgatcaaaaacccagttttgggaacaacagttgggaaaggaggggggaaacttaaaactttggccgaaaaacaagctccctaaaaaagaagacccaggagtcccgaaaagaaac

SEQ ID NO: 39373 - DNA, 307 bp, Glycine max
  Clone ID: PAT_MRT3847_135553C.1
gacttgaaccgagtgaatatttgtcactcacaagtaccatgatcagcaattcacgtgtctgaaaaaggagttaatatgtcacaagccggagagggaaccggcaaaacaattaacacaggctagctgaaggcaaacaaattcagaatggttatgtaggaaaggaacatacatgcatgggccttttttattggacattattctcacgtcttattgctaagctaatgggggtcccagatcattcgactggattgacttgccactcaaggaatgctgatgactctggcgaacgtattaactttgaagtggg

SEQ ID NO: 39374 - DNA, 155 bp, Glycine max
  Clone ID: PAT_MRT3847_135554C.1
ggaacctaattgaggttttgcctttgccacttcaaaaccagattttcatcattcgtccttctgtgatgacttcttccagtatgtgcacgtgagggcaaccacaggagttgcataagtacatttatgagatccttcagatcacgctgaacgcaaat

SEQ ID NO: 39375 - DNA, 347 bp, Glycine max
  Clone ID: PAT_MRT3847_135555C.1
ggctcgagagcaccctgctaacgccatcatcttttgtcggcgcgtcgaacctacgcatgctattgatgctgacctgattatgggagctctcaactatactggtgtgtatagaccaatgtatggcaaccgcaccactattactttggccacgttacaacaggactcatacagtctcgcactattagaaggagcctgggctgcatcgaacacttggacgagatctgcctcgcatagatcgcctacagcgccaccgtcatgacagctgcatggaggcagctggccttacacgagctcatattacggaagcgcgacgtgctactcatgctgcaatactcctactgcgccgt

SEQ ID NO: 39376 - DNA, 282 bp, Glycine max
  Clone ID: PAT_MRT3847_135556C.1
cttctacaacacaacatgccccgacgtttcattctacaccaataccctatcatataccttcaacttccttagcccactatctcttaacctctacaaactcaaccttattactcactgaatccaaaaccatccctacaaccatacccctttcattatccttaccagagaacctatctttcccctcacctaccctcctttcaagaccaacattcttttctcaccttatataaccccaccaatttcttcggccctataccatatttcttgtttcaaatcaaaacc

SEQ ID NO: 39377 - DNA, 1031 bp, Glycine max
  Clone ID: PAT_MRT3847_135557C.1
cccgggccccaatcccgagttcccgccacgggctcgaggtcagagaaagtgaggcttttatttgattctaaaaatgagacgtgctcttgctttgcttcctcttctcttcctgtttgtagcgattggggaatcaagaaaagatggaggaaaatattggaaaatgaacacgagagatcatcagatgccgaaaaaatttaaggctctcctcaaccaaaactttgagatccaatctgaaaagattctcaaaaccaaggaacaaattcttgaaggttctaaacatgattgcgaaaaatctctcgttaagaatactcacaccaccatattagaagattttgaaccaatatcaagtgttccaatttacagaaatgatgacatttatgctaaggaagaaaataaagttgtaaaaaactttgaaccaagacctaatgtttcagcttatggtgacaatgatgttgatgctaagccaaagaaaaatgtcatcaaagactttgaaccaagacccaatgtttcagcttatggtgacaatgatgttgatgctaagccaaagaaaaatgtcatgaaagactttgaaccaagacccaatgtttcagcttatggtgacaatgatgttgatgttaagccaaagaaaaatgtcatgaaagattttgaaccaagacccaatgtttcagcttatggtggcaatgatgttgatgctaagccaaagaaaaatgtcatgaaagattttgaaccaagacccaatgtttcagcttatggtggcaatgatgttgatgctaagccaaagaaaagtgtcacgaaagattttgatccaagacccaatgtttcatcttacaatgacaatgacattgaagcagtggaagaaaagaaaatcatgaaagattttgagccaatacctaaagtttcaacttatggtgatgatgatgttaatacaaaggaaaagaaaaaagtcatgaaagattttaaaccaagacctaacgtttcagcttatggtgacaataatgttagtgccaaagaaaagaataaagtcatgaaag

SEQ ID NO: 39378 - DNA, 349 bp, Glycine max
  unsure (1)..(349): unsure at all n locations
  Clone ID: PAT_MRT3847_135558C.1
aattcccgggacgacgagaataaagacggcggccgcccttnnnnnnngggagggttttttaaaatataatggcccgtttcccccccacaggtacttgatttgttttagggaaaaaaaagcggaaaaggggtaaaaaaacagggcccccaaaggcaaaaaacggaaaggggaaacaaaaaaaggggcccaaaaaggggggcaaaaaaaaaaaatttgaaccggaaagggcgaaaccagggggcaaacaaaaccaaagggaaagcaacaaaccggagtgggggggaaatccaagggaaggggttcggaacccttaccaaaatattatgaaggggaacaaacccagcatggg

SEQ ID NO: 39379 - DNA, 527 bp, Glycine max
  Clone ID: PAT_MRT3847_135559C.1
ccaagcctaacgggaaattaatttaaaaagcatccccagcccatagacaaattcgtacaaaaatataggtgtttctaggttgaaaaaacaatgaatgtccaaacatgataaaagattttggagttttctccataagctttaatagcctgcaatgataaatatggggggggggagtaaggtagaaaatgaaaaagcttgtaaaagatcctcgagtttgcagttgactacacacaatcatccttcgaataaataaaaagatggccacaaaggaggtttctttatataatactgaacttcactgggctctggcaacttccttttcactgtttcataaaaatcacttaaatattgggtttttgacgagcaaaaccaggctgaaaaagcatcgatggaggaggtgcagcaggttcagcaagaacatgacttctagtttttctaccatttaatgtagtaactgagggactattagttggggttatgccccaaaagcttctttttttggcagttggggctggtgatctaaaacg

SEQ ID NO: 39380 - DNA, 452 bp, Glycine max
  Clone ID: PAT_MRT3847_13555C.1
ggagaagaggtcgagtttcacagcagcaatggtgtacgtcaaggctcagaaatcaaaagcctacttcaagagatatcaagtcaagttcaagagaagaagagagggaaaaaccgattaccgtgccaggattcggttgattaatcaggacaagaacaaatataacactccgaaataccgatttgttgttcgctttagcaacaaggacattgttgcacaaataatatctgctagcattgctggcgatattgttcttgctgcagctctcaactctgctgctgataatgatgaagatgatgagtgaaagttcattgcagatgccttctcatggctacactagtagaaactatcttatttggtatctacagaatcattttcttgaaaatttatttgcctgcctgtttatttctaggcccaaaatttggatactttttttggagttgagtaagccttaa

SEQ ID NO: 39381 - DNA, 351 bp, Glycine max
  Clone ID: PAT_MRT3847_135560C.1
gcttaggattttgaatgggaatcagaacaggacgttccacagcaacctaatcaccgggatttgcatcttgctcacaagagtcatcaggatcatacgtactttgtatgcaaccgtgtgtaaagttatgtacactggctctctgctctaattacccactgacaaagtgctgtttgctatatgaataaggtgactggttgtacactctcatagggtaccttcgacatggcccacaatataagaggctggtatctgtatctcagagcaatttgttgcgctactcttacagggtaataatttcttagatgtgaggttgcccttggcctgagatcaaatattccatttggggagcct

SEQ ID NO: 39382 - DNA, 543 bp, Glycine max
  unsure (1)..(543): unsure at all n locations
  Clone ID: PAT_MRT3847_135561C.1
ggcacagctttcaaataaacaattttatttggatctgtctgatggatatacactatttacagaaacatacataaaattaaaatatttcctactttaagaggagatggagataatagatgtcaaactatctcaacttttgttagaggctcgaaagggactggtaatcaatgaaacacttgaaaagtgaggcaaaaactccttctgactagtttgttttatcatttcaggacagttatcaacttgcatgggagttggagaatgcatgggaacaaagtattaaatcagggagtccaattgacattgattcttccctaaggaggtaatataccattttgcatttatgcaaatgcaaatgatgatattattgacttgattcgaaaagagagatcgtttcttgcatcaaccatggctcaatagttaatgtttcattattggtttaaatacatttttgtttcttggaatttagtgatcttttgtttttcgttcttgtaaaaaaaaaaaaaaanattcagtcattggaaaatatattatttttttggtttt

SEQ ID NO: 39383 - DNA, 532 bp, Glycine max
  Clone ID: PAT_MRT3847_135562C.1
aattcggcaccaggagcctgatattaggacttgcaatttcttgctgaaatgcttggttgaggcgaatagagtggagtttgttagacgggtttttgaggaattgaaggaccgtggtccatcgccaaatatctacacttatacaatcatgatgaatttttattgtagtgatgttgggtgtgatgcaggtatgagacaggctgctgtgattctgggaaaaatatatcggagtggggaaaagccaactgttgtcacatatagtacttatattcatggactttgtaaagttggtaatgttgaggctgctctgatgttaattcgcaacttgcactatacaaaccagcccctcaatagccattcttttaatgatggaatttatggattttgtaaaagaggtgaagtgtttgaggctttgcaagttttggaagaaatgaagagctctgggatattaccagatgtttatagctacagcatcttaattaatgccttctgcgggaaaggtgatgtaatgaaatgtcttgacttgatggaggaa

SEQ ID NO: 39384 - DNA, 457 bp, Glycine max
  Clone ID: PAT_MRT3847_135563C.1
attcatgcagggaagatgtctatgaatccctctttttggtctggagtttgcctacataatatggccaattgagccaaggaggggactaccatacgtcgtgtaatggaatctttattccggtactttgataatggaaacttatggtctataaaccatggccttgccttttctgttttaaaggatatgctatttttgatggatgactctgagaaaaacacacatgttttgctgtcgacgttaattaagcatctggatcataaaattgtccttaaagaacctcaaatgcagcttgacattgttgaggttgccacttcacttgccccatatgcaaaagtccaaccttctgtatcaatagttggtgcagtaagtgacatgatgagacatttgcggaagtgcatacactgttccctggatgactcaaatctggcccctgatgtaatcaattggaacaagaatt

SEQ ID NO: 39385 - DNA, 406 bp, Glycine max
  Clone ID: PAT_MRT3847_135564C.1
ggctcgaggagaaaggttgtgaaaagggctactatttaggaagatgtttaggctggaccgtctcaggggccagaaaggcagccaattgaaacactagctcagggggacacggactacaaaaaagcagccccaataactacttctgatgctgttgagctagctgcatggtccttgtacggagctgcaacagcagagggagcggtcgctttttagttcctatacattaccaatgcaactggcagggttgtgaacacacaagccttcaaatgagccgctcgtggcattcatggtattgcttgggcctaaggaggagggacctatgctctcgcctacgagcactgctggtaagttagggggacacatatagacatctgtgaccattggactctcattggccaggaagctg

SEQ ID NO: 39386 - DNA, 204 bp, Glycine max
  Clone ID: PAT_MRT3847_135565C.1
gtcagacgcccgcgagaagacgacagaagggggggcatatggagacaattacgcgcttaccccccccaacaggggacaagagagcggaccgggcaggcggtacgggagcaccaagaaaaaaccgaacgcggaaagccaagggaggcccgctgaaacgatccagagggctagaagggccgacgcgcaaaggaacagaaaaggaac

SEQ ID NO: 39387 - DNA, 670 bp, Glycine max
  unsure (1)..(670): unsure at all n locations
  Clone ID: PAT_MRT3847_135566C.1
aatcaaatacaaaggatttcaagtggctccagctgaacntgaagcccttcttctcactcatcctaagatctctgatgctgctgttgttccaatgaaggatgaagccgcgggagaggtacctgttgcatttgtggtcatatcaaatggttataccgacacaacccaggatgaaattaagcagtttatctccaaacaggtggtgttttacaaaagaataaaccgagtattcttcattgatgcaattcccaagtcaccgtcaggcaaaatcttgcgcaaggatctaagagcaaagctaacagcaactgttccaacatgaaattaaagcagacccacccttcacccatcatatcatcatatagatattatacgatgcccgctcaagcttcagcagaaaaggaagaggcgctgttgcttcatcgctagcttttacgtattttctcgtacgtaacaaccatgtataactaattacgagtgtgattttcttacatggaaaatattcaatctgtcaaggactttcaccttcatcaaattatatttttatttataaaaatatatttaattgcattgtttaatctattgtgattgagatagcaaaattgaccgtcaggttgaaaaaaaattccttttgccaattgaagtgataaacctaattgtcattttgttcgttatt

SEQ ID NO: 39388 - DNA, 750 bp, Glycine max
  unsure (1)..(750): unsure at all n locations
  Clone ID: PAT_MRT3847_135567C.1
gggaaaataatgaaaaaccccaaagtgtatgtccattgctgctgtagtattttgctataagaggacaggggaccacagaattcattactcccatttatttgtagaaacctcatctctttcttttgatctttgacaattgtttttccatttatttttggcttcaattgtttaccatattctcctttctctttttaatagtttcttttaatttcacaatttcattcaggtgttgtgtgtaattgaagatatttatttattgcatgatacaaatggtctgacaattttgaaccagcgattgcatgttaggcattaatcaaggtgattctctttcacttttactgctacgaagtggagttggtggaggaatatattttatattttcttcaagagctcatgattgctttgggttcttgcatcatggttctaggttattaggttggtggtcaattgatgaagggagtcaggaagaacaagcacgactataccacgagggagcaattgggtaatcctcatttcattttattactacgttggcatgtaccatcaaataatgtaacttgcatgttgtctcattttattgcttatggcatgaaataatcaaacagtgtacccctatagctcggaggataatcataaaacatgaacttctggtaccttgtgcctttattgctatgatgtatgcttggttggtattttcttaatatatgatgcatactgtgacattgtgttgaggctgaaaaaaaanaaaaa

SEQ ID NO: 39389 - DNA, 316 bp, Glycine max
  unsure (1)..(316): unsure at all n locations
  Clone ID: PAT_MRT3847_135568C.1
gggtttgttatactttttttttttttttttttttttttttttttttttttttttttttttttttaaaggatcaactcagtaacaagaagaggggtaaacccaaccaatgggcacagggtttcccccccccctgaaaaaaacgacacccaacccttttacaaacggggggaacagngcccttgttttacgcgggaaattatttttttaaccaaaaaagaccccaggaaaaaaaccccaggcgcgggggggaaggatcctcaatcccaatttcatttcaaacacagggcccagaaagggaattaaccccggggcggcc

SEQ ID NO: 39390 - DNA, 240 bp, Glycine max
  Clone ID: PAT_MRT3847_135569C.1
aacggccacggcatgctctactctcttcaacttcctctgcacaatacatcttccaccctggctgcatcctccatctctggctgtgctggcatcaggagtctgttgctcatgcttgtatttggagaagcggtaacagcgtcatccgaatcaatgctatacgcttgaacgacgtagggtactccactcgcgaccacatgtgtagttagtgacactacgaaagacttcatgacagaagcaaca

SEQ ID NO: 39391 - DNA, 773 bp, Glycine max
  Clone ID: PAT_MRT3847_13556C.1
aaaaccaaaacacttcctgctagaaataaagcgtatatcatcaaagtatggtaaaacatcaattcaggctaacacgaaactgacaaaaaaaacggctactccaacttcaaaaatagtatccaaaatttcggacctagaaaataaacagtacatgtaaataaattttcaagaaaatgactccctagacgcaaaataagatagtttctagttgtgcaacgatgatacggaatcttcaatgaactttcactcatcatcttcatcgttatcagcagcagagttgagagatgccacacgtgcaatcaacttagccttcctctcctcataagtcagcttcttcaagttgtacctcttgtgctccttcgggagctgcttatcagatttcttaagagtaggatcagcacgaatggcggcatgaaccttcttatacagtgcctcaataccatcagcttctatcccacgcttgatgtattcactgaagtgtgactggtatttctctggttcatcttcagccaagatctgcagaaaatataaaataaggttgtctaacaactagctaaaaatccaaatattgcattaaacaacacaagactgatacaaaataaaatcttctctcatgccttcatataggcagcaacatgtccaccaaaaacatatttgcgatgaacctcagcatcaagctccttcttttccttatcaaacccagcaaacctcttatcactgtgaggaatatccaaccccccatccagagctcccttaagggcaccaaacacacg

SEQ ID NO: 39392 - DNA, 414 bp, Glycine max
  Clone ID: PAT_MRT3847_135570C.1
cgtaggccgcccttcgttctttttttttttttttttttttttttattttaaattctgaaaagcaacagacaaaagtgacgtgaggattttctatatgaaaaaatacaagcttataaacctttgtacaatgtataccactactggttgtccatatactaatgccttggggctttcatatgaaattcaccaaacaaaatatttaactaacaaaaatgggttttgagcctttctagaaaggccccaagaaatcgaaagggcggattggccaaaaaaaaagtgtgccgccggcctcacgccacttttatgttgaacagccttataggggaagttcagaaggaatgttgccgcctataaagaacccgagggcaagctcgccattcttgattcattcccagcagaaaacttttccatttt

SEQ ID NO: 39393 - DNA, 207 bp, Glycine max
  Clone ID: PAT_MRT3847_135571C.1
aaaagggatgctaaacatcgatccagaaccttctttaaacacaaggagaatgctctcgggggagacgatgatgggccatgcttgctagcccaattaagctatgaggatattgattatatttcacatattgaaagattccacaatcagatgtgctgtggtgatcaaacatgatgtcatataaagaaggaatattcttgcaacattaaa

SEQ ID NO: 39394 - DNA, 278 bp, Glycine max
  unsure (1)..(278): unsure at all n locations
  Clone ID: PAT_MRT3847_135572C.1
ttggttttttttggtttagggaataattactttattacgggataagtctattatgagaacttgagacgtcgcgtatactttgcaagtccctcgnaatgatggaagggaaaacatcctttaactacttggcacagttttatttttgctactatactttttttggggcgtgcgaaaataaccatagagaccctgctaagatttccaaaaagcgggggtgtggagattatgtgatgaactgagtgtttacttcttaggatcgatcttcctatcactggctc

SEQ ID NO: 39395 - DNA, 343 bp, Glycine max
  Clone ID: PAT_MRT3847_135573C.1
cagcaaggggaaacatcccaaaattgaaattcctgtcaataatgaagtttttttaataacagggcttgaatgtccaaaaaaagccatcagcacattgaagacaaacaccagtttctacaaaaccacaggaccccttagggggttgttttcatagacatttttaaaatatgcccttttgcaaataaactttttaatcattccgggatattccaaaaaacgtttttttattgttttttttgctcgccactgttttaaactcctatgctcttaaaggctttaaaactttctgtagcctatatcagccccaaatatccggtccctcgagccgaattccgagcttacg

SEQ ID NO: 39396 - DNA, 568 bp, Glycine max
  Clone ID: PAT_MRT3847_135574C.1
agctaacggagtcacacactaaaaaatgcaccatctccgagaaaactctgacagggaagactataaccctggatggccagagcgccgacaccatggccaatgccgatgcacagcagtcaagacccggaaggcgttacttcgtgtcaagaccataatgatttgcgcacggagagcagcttggaaagggcaggaccctgggcgattacagcatacataggaatatcccttcatctggcctctgctgaccgggggcatcattgatccttccctagtggctagagctcgaacatacaacctatacaagacgatttgccgcagtgtgctatgcctactatgcattctacggctgagaactgccgcacgaacaagtgcactcataggaaccagttgacgcctaataagaaaaacaaacgaatgctgtgtgaaccgtgggtctcatcctacaagttgctggatttggaacacgaacaggttggatatgtataggacgtggtgttcattaatgttaatagtattgagacaatacatggtgaagtagccaatactatagtacttacgacattttgga

SEQ ID NO: 39397 - DNA, 420 bp, Glycine max
  Clone ID: PAT_MRT3847_135575C.1
gagggattttactacggctaaggtgagtgcaaaaatcatgacccttactcctggagtggatggggaacctatactacttactgatgggaggttggctggggctgaccgtatcactgtatgtgccatgcttgcgggggatacttatgatacccaaacctccccttgcggcacgggaggaaattgtggctcctagcgcaggcgattggacaactgcggtggtgacataaactagcacgcctgagcctactgcaccgcacgtgggagctatggaacagctcatgggtaccactaccagtgccgactgcgacataggtggagcactgctaatggttgatgcttatgataccagtgctgctgatgccttgacatcaatttacgctgcaccttccatggggggatgggccatgcagatggacacat

SEQ ID NO: 39398 - DNA, 259 bp, Glycine max
  Clone ID: PAT_MRT3847_135576C.1
cgaccgagggttctggatcaatttgaccttaaagcttgggtctatggctcacaagattttgatgttgctgctcttacaaaagcgattcttaaggcacttcggtccttagcagcagaagaaaaagacttgaatctgctccaacttgaattgaagcaaagactgatgggacagaactttttgcttgtcgtagatgatgtttggcacgaacactattggagttgggaggcactataaattcccttcatttatggatcttcag

SEQ ID NO: 39399 - DNA, 472 bp, Glycine max
  Clone ID: PAT_MRT3847_135577C.1
acaagaatatcaatcagttaatttgtgcccttcctttcttttcatctcaaaagtaaatagtcagaaaaatcatatcaaacctatgtgcatgtttggtattcgatcagtaaaccttgttatgcacgaatcttgagattaaatcaatgatatataaaacgcatcttacaaaaaaaaagagtggactgtagagattcattttgttgtccatttgcaaccgaaatccaaacatttactctatatacttgaaaaaaaaaaaacacatagttaactcctatagtaatatagaaaatgcaattagaacgaaggtacgttggatgattgatattttaaataattgtttttatttatttttacttatttttcatcactttttccgtacatattttaaaatattctaaaagaaacccaatttttcctcgttttaattgtggaaaaaaaaatcccgtttgaccaagtcttcttctaaaggata

SEQ ID NO: 39400 - DNA, 1503 bp, Glycine max
  Clone ID: PAT_MRT3847_135578C.1
atggggtcgaaccaagcaccctcttttaaaaaacggttctatcatgtcaaagtcaagagcctagaactagccagcttgcaaaagctaaggcagcggatggaccaagttcaacatcaagctttccgcaaagcatatgggaaaatatgggatttggccttgatagaagtatatgttgaagccatcgcatcccttgcacagtactatgaccagtcactcagatgcttcaaatttggggactttcagttggtaccaaccatagaagagtttgaagggatcttgggatgcccactaggaagaaggaagccgtatctgttttctggattctacccctccatggcaagagtagaaaaagtggtcaagatctcgccactagagttagaccgactgaagcaaaatagaaatggagtggtgggcataccaaggcagcacttggtggagaaggcaaaagctttggcagatcaaggagagcggactttgttcattgatgttttagcactgttggtgtttgggatcgtcctctttccaaatgtagacgggctagtggatctagcggcaatcgatgcttttcttgcttatcaccacaagaaggaaagcccgaccattgttgttttggccgatgcctatgacacattcgacctgagatgcgagaagagcagcacgagaattgtctgttgcacacccgctctttatcgagaccaaaccgctaagcgagacaacagtggcttagcgcatgaggataagtgttcgactagaatacttgtttactccctcttccaaattggtattacttgtttttatatggaagtggtcttaccggcaagcgcaccgggtctccaaagtttacatcaactactcaataagaatctccaactgagggttttagcctttcatggcaaggaagatccttttacactgaagaagaggaatcaagagaaattgtttgcttacaaaggagtgaggatgtctcctccacctctaggaatctcacaatcactcaaaaactcactaatctccctaaaagatgaaaacttggccccttgctctgctctacgctctcttaaattctcactcttccagcctctgagtagtgaactgttctcttggctcccctcacaattttgtgcaaatcaggctttaaaagggcttcctgatcttgacgtcgcgtttagcatgaacgagataataataaaattgttcaaaaagcatggaaataaaaatccagatcctgtcaatgatcccgtgcatgctcattcaagtccagtgctggtgcatatgatggatcctgagaaagaggcaggtccaacactggtgcagatggctcaggctcaagctcaggctgaggagatggctctggctctggtggagtgggctctgaggcctctagaatgttgtcctcctggtcctgctaaggctcctgggatgcagaggcctcaccccttccaaaaggagaaggttggactcctggccaggccaccttttgaagaaaatcctcgacgctcataa

SEQ ID NO: 39401 - DNA, 221 bp, Glycine max
  Clone ID: PAT_MRT3847_135579C.1
ggcgggttaaccaacctcatttccaattcattgtgttttaggaggcacactacttccaccatccgtgttaatgactttcataccataatggcttgtgcacaccctactgatgcgtggactcacgggaagactctcatgcttatcgcggtcacaatcctactatagattcctccggtccctaccctatatatcactaccatgatggagggatccccttagac

SEQ ID NO: 39402 - DNA, 785 bp, Glycine max
  Clone ID: PAT_MRT3847_13557C.1
gaccaaaaatacggcttactcaacttcaaaaagtatccaaaattttggacctagaaaataaacagcacatgtaaataaaatgattgactgaacgcaaaataagagagttttagttgtgcaacgatgacatggaatctgcaatgaactttcactcatcatcttcatcattatcagcagcagagttgatagccgccacacgagcaatcaacttagccttcctctcctcataagtgagtttcttcagattgtacctcttgtgttccttcgggggctgcttctcagatttcttgagagaaggatcagcacggatggcagcatgaaccttcttgtacagtgcctcaataccatcagcttctattccacgcttgatgtattcactgaagtgtgactgatatttctcaggttcatcttccgccaagatctgcaggaaaaaaaaggttgtctaactagctgaaaaatccaaatattccataaaacaatacagaaaactggtacaaaataaaatcttctctcatgccttcatataggcagcaacatgtccaccaaaaacatatttgcgatgcacctcagcatcaagctccttcttctccttatcaaacccagcaaacctcttgtcactatgaggaatatccaaacccccatccagagctcccttaagggcaccaaagacacggttgccagttgtagtcctaataagaccaacatcaaggagagcacggaatggcctcctgctctcagcaggttccactgaatagtcctctccagtagcctcaacatttccttcg

SEQ ID NO: 39403 - DNA, 410 bp, Glycine max
  Clone ID: PAT_MRT3847_135580C.1
acattaaatgccctggacggatttgcattaaaaccaagttccggaagggaacttcaactaattctaggcttacaacaattaccattaggaagggaaaaaaagagagtttcaaaaaccatcgagtattggggatcaaaaaaaaaaccaagggaaaaaccgtaaagggcaacccggggggggggggggttccctggtaaatataccggataaaaaattaacccaccttcaacatgcaaaagcatttcaaattttcaccccaattttggaacattaactttatacccaaattgggatttaaaaggttcatattgaagcttcaatttccaggaaacccatcaaaattggaaatttgagggactctttacaaggctattccctttttttttaaagaagtcacccttacttaaaca

SEQ ID NO: 39404 - DNA, 244 bp, Glycine max
  Clone ID: PAT_MRT3847_135581C.1
gacacgcgtccgtccacgcgttctggtacaccctacgctacagttgacctgtggtgtgttctacttctatctctacaaaagtacatgcaatttatcttgactcagctgcatttcatactcctacaccgcttgacaatgccaacaactcttacacgaaacacacatgcttctttttaagttcttcatatctaaacctatggattgaatctgcaccatgaaccaataaccacaaactcgtacttgt

SEQ ID NO: 39405 - DNA, 235 bp, Glycine max
  Clone ID: PAT_MRT3847_135582C.1
ccttcaagggagaaacaaccgacaggaaaccacacccttaaagcaaaagccagaggggggaaaagactgaggaacgcggattcatttactccatgtattaccaaataggattggttcgcttctcagacacagcatgagacggtcataaaaaataacaacgtgtttgcaaagtccataacggatgaaaaacgaggaggagggaccactaagaagtaccgaccatatgtggggggca

SEQ ID NO: 39406 - DNA, 409 bp, Glycine max
  unsure (1)..(409): unsure at all n locations
  Clone ID: PAT_MRT3847_135583C.1
aattcggctcgatggcactttggtaaggtgagagaataggaaaaagggaaatatggcatttgcaggaacaactcanaagtgcaaccaaggtatatgatccctttgtgtgagctttaaatagaggggaagagcagaacaaatgaagaagagaggagataaggatcatataccttggttgcactttggtaaggtgagagaataggaaaaagggaaatatggcatttgcaggaacaactcanaagtgcatggcttgtgacaaaacagtttatctggttgataagttgacagcagataaccgagtgtaccataaggcttgcttcagatgccaccactgcataggaacactcatgcttatcatctataactcttttgagggggtgctntactgcatgccacactgcgaccaact

SEQ ID NO: 39407 - DNA, 164 bp, Glycine max
  unsure (1)..(164): unsure at all n locations
  Clone ID: PAT_MRT3847_135584C.1
cncaccacaaccntctncttcttcttcngcaacgtctggttcaanacntcnacagtntgttgaattggcgcnttganatacgactcaatattctttcgcgngctctgtgcgcnntgcanangttaggttcttcgagagttctcnttgtgtncactccgncgctt

SEQ ID NO: 39408 - DNA, 524 bp, Glycine max
  Clone ID: PAT_MRT3847_135585C.1
tcactacactgctccaaacaaaaccctaaatcagcgactcccacgcgtccgcaacaatggcttcctctcaattcctaatcatgaccacaatggcggtctttctcgccgtcgtctccgccgctcacgccgccgatgcgccggcacctagccccacctctcccgcctccgtcatctctccgtccttcgccgccggttttctcaccgccgccgttgctctcgtcttcggatcttctctcaggatctgaacatgttgcgcttcggcctctggattttcattttctttctaatttttttttgtgtggatttatcagagatcgaggcttgactagtactagagtattgatgtgcagagactttatgtgttcgtttctggatcttaagtaattttgctatttcatggctattatcatttgttatcattggtttggtacataatgaattttatttgatattctattttatgatcattagttaacactagatttggtacataatgaaaattatatattcctttaaagttacaa

SEQ ID NO: 39409 - DNA, 481 bp, Glycine max
  Clone ID: PAT_MRT3847_135586C.1
tccgggattcgcattatctttcctcactacactgctccaaacaaaaccctaaatcagcgactagcaatggcttcctctcaagtcgtaatcatgacagcaatggcggtccttctcgccgtcgtctccgccgctcacgccgccgatgcgccggcacctagcccctcctctcccgcctccgtcatctctccgtccttcgccgtcggttttctcaccgccgctgttgctctcgtcttcggttcttctctcaggatctgaacatgctgcgctccgccctctggattttcactttcttttctatttttttgtgtggatttatcagagatcgaggcttgactagtagtagagtatagtttcccctgtattgatgtgcagagatttcatgtgttcgtttcaggatcttatgtaattttgctatctcatggctattatcatttgttaacattgggtttggtacataatgaattttatttgatattctaaa

SEQ ID NO: 39410 - DNA, 260 bp, Glycine max
  unsure (1)..(260): unsure at all n locations
  Clone ID: PAT_MRT3847_135587C.1
gggaaaaaaanaaaatggggaactttttccaagttggggccaacaacttccatcgtttaacagattttttaaatcaaagggaacaaaagggtgcgggggaggcgaagttcctttggggggagctttcacggggggggaaaaagctttcaaaatttaacttcccccccccaaaatggaaagggaaaaaaaaggggggaattaatataaattattttaaaccaatcgagaaaaccgggttggcgcaaaacggggtttttaac

SEQ ID NO: 39411 - DNA, 528 bp, Glycine max
  Clone ID: PAT_MRT3847_135588C.1
tccaaattcattgatgacaagattgggggtactgtatggaaatctgttttcacggttgatgagaaagagcgtgagaagaatgttgaagaatcgttgaaggctctgcagtttcttgagagtgagatcaagggcaagaagttctttggaggagaggagtttgggatggtagatattgctgctatcttcatagcattttgggtccatatggttcaagaaattgcagggttggagttattcacaagtgagaaatttcctaagctctacaattggagccaagagttcatgagccaccctgttgtgaaagaagttcttcctcctagagacccactttttgccttcttcaaagcccgctacgaaagcctgctcgctgattcaaaatagatttatttaaggatacttgtgtgaacaacttgtctctcgttgagttattgatgtttgaatttcatgtcaatttgatactatatgtaatgtaacttaggatcttattcccattttggccatttcatttaataaagaaattctttatat

SEQ ID NO: 39412 - DNA, 290 bp, Glycine max
  Clone ID: PAT_MRT3847_135589C.1
gggggccacgcatacgctcactcgtacgtacggatgtaagaagactacattattgtagagtatatcctaagggcgcgggttttaataggcggggggacacactttttaattcatatatttatcttcgtaccccaagaaatcaaagagcaaaaaaattatggtttcccttgaatctattaagggcaaccattgatatagtgatacacttacaagttctaagatatatttaaaaagttgagttcttagattagaacagactgctttttcatcagttccaaacgcactaataa

SEQ ID NO: 39413 - DNA, 641 bp, Glycine max
  Clone ID: PAT_MRT3847_13558C.1
agcaggggttctttgttggtgtttttattcatttgaatttcatttagtattctctgttttgcttttcaatacaaaccccccttttcaattagatcataatcaattaggttgtgtcttccagaagtatgacctaagttgttccctgtaacgcatgattaaggaaaactcttgtatttttggtagtggccctcccaaaatatgcacacacaacagctatggagtatgatttatgaataacatatccttattcctatttgcaagttagtgattctgagcagtgaaatctggctcagcttgctttttgaggtaacagagatagtagtagtctctgttgcattttgttgggtctgctattttgtatcaagtttcgcagtgcattgtcagcaaaacttgatgcatatatggttgcaccaaagcatcttttagcttgtcttcggcttcatgcaatgacctctcaatcttctttttccagtatcggctccaagctgcttgtatgaaacaggcagcccttgccctctactgcccggaatagaacctgagagcgtggtggagctgtttgccgccatgatttcgaaattcagaagcaagaagcttcaagtcttcagacatgagagcaaaggcttcaacttctgatatagttt

SEQ ID NO: 39414 - DNA, 420 bp, Glycine max
  unsure (1)..(420): unsure at all n locations
  Clone ID: PAT_MRT3847_135590C.1
aancaaaaaatgaaggttcaaaatagtaaataagtagtttaatttatgaatgtaaaggaaattntgaaaatgattacaaatttagnaggttgaaattttggatttgttgataaagatattgaatggtattnagtagttagatgagattatggtgaagggatagtagaagttatnaaaanattttnaagntagtgtnaggantgaatgtgatagtttttngatttagntggagttttttttttggtaatttgtgaaanatgaaaatnntgtgtgntgtttttttttttaattttgtnaagggagtagaaaanggntgggantttagtagatgaagaaaaatnaaaaaaanaaagaaaaggggnaananaaanggntgtgtttaatttatataaatntagattatatngtttgggttaatat

SEQ ID NO: 39415 - DNA, 435 bp, Glycine max
  Clone ID: PAT_MRT3847_135591C.1
atattaataaattgacttattttttatggaaatgggggttccaccctaaaattgattccagtcccttccaaaatggatggtaattactttttaaggttttaggccaaccttaaatggaaaagaacttttccatggtttttccccaaggaagccttcaaattattattattccttatggccttttttttacattttaaaatggaccaaacctcctctaaaaaccctgaaaatggggctaccattttggcaacaaacaaggaaataccttgaatgggaaataatgctgatgctgtgttcccttgagctggtgctggtgctggagatacctcatttacaggaccattagtagaagcatctgctgcttgttgaggagatggagaagcttggggagagaggcctccagcaggagcagcagcaggcgtctcagacaatcca

SEQ ID NO: 39416 - DNA, 1985 bp, Glycine max
  Clone ID: PAT_MRT3847_135592C.1
gcgggccaatcctccaaaatactcggatatgcatgtaagcaaatctgcacaatatacacataggtctgcttctagtgacaaccttcactatattactaaaagtactcataaattccgattttctccctggaaaaatggcagcctctgccggcggccagataactctctcgtcaaccgtgcagttacatggagtggcctgtagtaggaattggaagctagtgaagttctgtaatggggaagtcatgggacgtaagcttgtgttaaaaagtgcttatggtggcagcactaaggatgttaggcaccaccaacaacaacaacatatatgcatgtctctcacagctgacgtttctactgaatccaagttgagagacctagatatggaaagaaggaacccaaggacagtgttggcagttatactaggtggaggagctggaacccgtctcttccctctcactaagcgacgagccaaacctgctgttcctattggaggtgcatacaggctcattgatgtaccaatgagtaactgcatcaacagtggtatcaacaaggtgtacatcctcactcagtttaactcagcctctctcaacaggcacattgctcgcgcttacaactctggtaatggagtcacctttggagatggctacgtagaggttcttgcagcaacccaaactccaggggaggcaggtaaaaagtggtttcaaggtactgctgatgcagtgaggcagtttcactggctctttgaggatccaagaagtaaggatattgaggatgtcttgattctttctggagatcacctctaccgaatggactatatggactttgttcaaaatcatcgggagagtggtgcagatatcactctttcttgtctgccaatggatgacagccgtgcctcagattttggtctgatgaggatagacaacaagggaaggatcctttcatttagtgaaaatcccaaaggagaagagttgaaagcaatgcaagtagatacaaccgtgttgggcctttcaaaggatgaggctcagaagaaaccatacattgcttccatgggagtgtacgtcttcaagaaggagatacttcttaatctattaagaaatatgcaccgagaataaattgatcttgttccaaagcttgttttttaagtgctacaaattaatttaatttagatggcgatttccaacggcaaatgattttggatcagaggttattcctgcgtcggctagagaattttacatgaaggcttatctcttcaatgattactgggaagacatagggactatcagatccttcttcgaggcaaatcttgccctcactgagcatccaccaaggtttagcttttacgatgcagcaaaaccaatgtatacatcaaggagaaacttaccaccatcaaagattgacaatagcaagattgttgattcaatcatatctcatggaagcttcttgaataattccttcatagagcatagcgttgttggaatcagatccagaataaactcaaatgttcatttaaaggatacagtgatgcttggtgctgattactatgaaaccgatgcagaagtggtagcactcttagctgaaggaagagttccaataggaataggagaaaatacaaaaatcaaggactgtattattgacaaaaatgctagaattggaaagaatgttgtcatagcaaattcagagggcatacaagaggctgacagatcttcagaagggttttacatccgttctggggttaccattgtattgaaaaactcagtaattgaagatggattcatcatataataaattcgcccgtgatttgtttgccccgttttaccatgaatttgaggatgggaatgttttgatctttatgaattatgtttttttttttaaagaaaagcattaaatgacaatgtgttgccgaaatggatattccaaattcagcacaacttctctgagcttgtacttgtatatcataattattaactcaagtacattttttacgcagt

SEQ ID NO: 39417 - DNA, 267 bp, Glycine max
  unsure (1)..(267): unsure at all n locations
  Clone ID: PAT_MRT3847_135593C.1
aatccanngcttancaggtaacagtaacacncagaangcaanaangagagantgagagagaatcacaaactcctcatncncatttcntcnctnntgntctcttgcagtcagcaagcagcaaggatcgcatccgnagtgngtgggaatnggcggcgagaaaatgnagggttggttctcggggcagagtagcgangaggaggcnaacgacgttcgtcnttgtngncgattggaactcctacncatccgccgaaanctctgaaggttcat

SEQ ID NO: 39418 - DNA, 229 bp, Glycine max
  Clone ID: PAT_MRT3847_135594C.1
aaaaaaaaaaaaaagggggggccgctcgaatcgtttttttcagaaattttcccacctttgggggaagcgcgagacctttgcgtgttcaagatgggagctaggtggaagaataaccgcttgggggggttaaaggggaacccccaaaagttgggacaaagttctaggtaggtgcttgaacagggatttgtcttgatgtgtttttccatctgctaccagtttcatgacattt

SEQ ID NO: 39419 - DNA, 222 bp, Glycine max
  Clone ID: PAT_MRT3847_135595C.1
cccacgcgtccgtcgcagaataaaatttctcatcgtctatttctaataccttacaacgcgccgtgttgtccaccatgtcccggccgttctccaccttcgcattttcctaaattatgctaggctagatcggaatggtttctttaatttctgaagaacaccttcgtaggaggtttctaatttactcttctgctagaactgtatcttcaacaaggatttttaaag

SEQ ID NO: 39420 - DNA, 496 bp, Glycine max
  Clone ID: PAT_MRT3847_135596C.1
tttggggtttttttttttttttttttttttcagccgccatgacgtccgtcatttgctgctacactatccgtcatatttttacggaggattgttggctttccgccatgaaccgtcatccgtcattaaaaacattgttggggggtcaatggaggaaaaattacatttgatttcaaatgttgactcgcttcttgactcaagagtttacacggttttaatgagtttacatgtgtttacatacaaaagagtttgacaatgagtcaacatgctaactagaatagtaaactcataagagtcttatgagttaactcaagggtttaacaacattggtttaaaacattaaaacagcctttcacacctaaatatatatactttggggatacttctatataggggactttgaggcttgtggaaataaaaataagagcattaccaagatgcaattccttaagagcttttggagtcattctcacattataatgggggtttcacattagta

SEQ ID NO: 39421 - DNA, 328 bp, Glycine max
  unsure (1)..(328): unsure at all n locations
  Clone ID: PAT_MRT3847_135597C.1
gggaaaaaaaccctttttaaagggaaaacccaatcgggggcctttttccctcagagggggggggggaatgggcccaatcaaaagggggaaaaaaaaaaccccnggggggggggctcggggggaaaaaaaccccttaatcaagggggaaaagggggggggggcccctcaagttttaccccttcccctacccagtcccttaggggaagatgaattggaaaaattaacctttttgggcccaccccctaaggctggcttcttttcttaacatgggggggcctctatctggggacgcctaactttgggggggtccaagggcccgggaagaacc

SEQ ID NO: 39422 - DNA, 527 bp, Glycine max
  Clone ID: PAT_MRT3847_135598C.1
cccgaaaaggcttcactgttcactgttctaccactgcagactcatgctgaaaaacttttggattacacgttgacatcatatatatccatatatgtcatgttcaaacctttttacaaaggttcctgtttattcacatgatcgaatggaatttgatctttaatttgattattaataaatatagttatatatgcggcagaaggttgcaaatttcaatttcgtccactagttgccattttcatttcgaactccattgacagcttgctgaaagcacgacaaggcgtactgcacgtcactagccgatatttggtggtggaagacaattctcaatcttgatgagcccattggcataaaaaggataccatagtcttccaagtccttgcatagctttgctgctgtagctcgtgagccctcttcaacttcaacatatatgatattggtttccacagaagatatatccactctcagccctttaatttcgtttaaaccataagccaaaagtctagctttattgagatcactttgtagct

SEQ ID NO: 39423 - DNA, 179 bp, Glycine max
  Clone ID: PAT_MRT3847_135599C.1
cgatctataaccgtacgcgtggatctatttatttaatacggaccgctgcctgcatgccatctatcttttttagagtgagttttaatatagctggacgcaaggacacacctatctgctttctgagagagagaggcgttcctcccaatcgcacaaaacgtgccagagggatgcatagccca

SEQ ID NO: 39424 - DNA, 382 bp, Glycine max
  Clone ID: PAT_MRT3847_13559C.1
tacggctgcgagaagacgacagaagggggaagatcgaattaggaattagcttgaacattttgtattttcttaatgttcaagctaggccacatagaagagcctaaaaatgacaaaaattaaaaatttgttggaccaaagaacagtggttgttatgaaattaatggaccatagtatctggcaaggtggtctcccctccagagtccagatatcatattcacacacccctgatgctaaaggttaattatttactatttgtgctcctagtttacagaattgtcactttcattattcgggtttattaatactagattgttttgggctgtcgtggagtctaatttaaacctggctaggagcctagggagttgctatatatatagatcat

SEQ ID NO: 39425 - DNA, 711 bp, Glycine max
  Clone ID: PAT_MRT3847_1355C.1
gcatgtgttagatagtattgtgggtggtgtccatcaaatatttttctaaaaaaaaaaagttaacttgttaaatagagtgcatgtcatgcttaaaaagtttaccaaaagttcatctagattattatttttaattattgttattttatgaatagttgaatatttattattaatttgcattgtttcttaatttaacactaattatcggttaattacttgattatgattgatgggcaggaactcaaggaggaaaatggacaagggttggtgtttggaggtaaaatagaggtctcatcaatggggtgggataggaggcttctaggtgggcctgggtcatcgccacctcggtgcacctccaagtgtggcagatgtacaccctgcagaccggttcatgtgccggtgccgccggggatgcgggttacggctgagtactacccggaggcatggagatgcaagtgtggcaacaagttgtacatgccataatgaacataattttctctaagtatgatgatgtatttttgttgggtctaatatatagttcattttattgactataaagactctctcatctctttgatgtgttacgttagctttagcttgtggtggatattggatatggaaaaaagagggtacagaacttgatttgatgtgaaatatataatatcttccccctgataatggattaatgttagtaacagtaaagttatgtttctg

SEQ ID NO: 39426 - DNA, 462 bp, Glycine max
  Clone ID: PAT_MRT3847_135600C.1
ggaacttcaaggggagtagatttctgggcatcaagacatgaaattacagcaggtcgtctactgaaaagtagtcatatagcgccgtaacgctcccattccctatccttacattgcaattctacacaggacaggggatcttaaaatgtcaaacaaattccctcacattctcctgactgtagagcacgttgcaataacgtgcttacaactttgcgccaaccaacttggcgtaagcctcagggctgaaagacttgggcctctcaatgggggcaccgacggcacggtcgatgatgagctggggaaggacaccgagcgcacgggatacaccaaagagaacagggtagtagttctgctcagggaggccgtagtactggaggaggacaccggagtgggcgtcaacgttggggtagagggttcttggtcttgccgtgctcggtgagaacaccgggggcgatcttgtagacc

SEQ ID NO: 39427 - DNA, 287 bp, Glycine max
  Clone ID: PAT_MRT3847_135601C.1
ttggttcccatacacagtctctgtgcttgtgggctcaattctggagtttcaaggtctagtttttcgtgcaccatacctacagccttttcacagataactgtttggaatcaaacggctagccgccataacaccataggattttgaccctagcaagcagagctttggagagttttatattgaccttctctggggaggaactcaagtggacaaaactgcagattggaccacacttgtacataccgctacaactatggacgcggagagaggtgcagattggaagactgggt

SEQ ID NO: 39428 - DNA, 490 bp, Glycine max
  Clone ID: PAT_MRT3847_135602C.1
gttatgagatgctgagcaggactatgcatgggtcaagtacgggatgatttttccgtttatggatcatgtagacaggtttcaggggcagtctgatttgggttgctataactataatccctctgaatttcaaatatcaatagaggaggcatttttggcagatcagggttttacagagaagttgatagcagatataaatacagcagctggtagaactggttgtggtgattctgtactgaaaggctttcagaaggtcactgcttcgaaccagaatgcagcatgtcactttctgaaccaagtaagtcagctagagggcatattttttcatttggagatctaaatggctgttaatgtacacatgcgtcatatttagaaggttctaaaggaaagttgatacagattcattttgctttgcttttgtaattattatgtcattctccatagtccatagtacaccaaaatgcaggagcgaggaagtctactgacaactcaa

SEQ ID NO: 39429 - DNA, 825 bp, Glycine max
  unsure (1)..(825): unsure at all n locations
  Clone ID: PAT_MRT3847_135603C.1
cacgcgtccggctaaatccccaagttttgcatatagtaatagtaattagtaataataaatatgacctgcaaccttgccctgagaaacagtgatgactgaagaaccaaagaaatacacaagctaactcagatttcaggaaagtattgattttagctaagaagcggatcctttccttttatatggcatactagtaaaactaaaatgcatcaagctgaatctactctataatgcagcaagcaaggctagtactgaaaaaatgcatatactaggggcaggctgtatagtagcaaacaaggctagtacccaaaaaatacattagttagtaggaaattacaacttaatagtcactcccagctgacaaaatttaggacatcgaaacacacagcaccagtctgcaaactttaatccaatagaagaatgcatagttccttgtaaagcccacttacagagatctagcttcaattgcattcaatagcattagtacaacaataacttaccatattatgtggggacaactacatgtatcaatggacgtcatcataaacaaaattttcaaatagtaaagttctactaagcaaggcacataaaaatagcttgaccatgtaataacagggctgataaaggtattaacagtacaaattaacaatctttcgatacagtatttttcataaaacatcagctaacatgacaaaacaccctatgtttcatagaagtaattttgaattgagcatataatacagtttttacacagtccacccaggaagttagcaaaggaaagaatacagaggatccaccaacactatnctgaaaaggatttcatttaac

SEQ ID NO: 39430 - DNA, 289 bp, Glycine max
  Clone ID: PAT_MRT3847_135604C.1
aggatcaggaggaagaggttcgtatggactacgacggacgcacaatgacaaatgatcgcatcaccaatggcgatgccgagagctgtactcacacacaaactgcggcgtctccagggaggacggccaagcatgaagcaggcatgtgctcaccgacaccagatgacgacccagctgtgcagaggcatacgcataggaagtaagagctcatagatccctgcggaggatgaccgacaggagggagcggcttacaacattacttttggatattgggttcattgatcatcagtcc

SEQ ID NO: 39431 - DNA, 343 bp, Glycine max
  Clone ID: PAT_MRT3847_135605C.1
attcatgcaaagaccacacatttacttggatttcccacctgtatttgttaagccttcatacagaaatttcatacttcataaacaaactggccttagaaccttcctgaacctatacggggataattttaccagtccccaatgattaagtccacaacattaatatttatacaaacttcccttagtgcaatatcacatcacaaccacaatcaggggtatgtttgtatttaagggccggatggaaatatagaaactaccgtggagaccctggaatttacttcaaacacattttcacctttggagatctttgaaaatacaattttttcccaaattttgccccaagaat

SEQ ID NO: 39432 - DNA, 880 bp, Glycine max
  unsure (1)..(880): unsure at all n locations
  Clone ID: PAT_MRT3847_135606C.1
gttggaaggaaagaaagaaggagaaaggggtaagatagtattttgacatgcaggaaacgaagcggtagtagtagagagtagtgggaaggtaaccggagtttctctcccaccgctatatcatatgggggccaattgttttattttcatcattcattcaaattctgcttccaatcatatttaaatagaaacacacactcctcatcccaaaccctacattttcttcaagcgctgcggtggatcagattccccattaaggatggaggatggtgagaaacccagccatggcattgctgatatggatgttgttgatgccactttgcaaagccatcgtgtggcttctgatcaagtaatggtcctacagggtcatgatatcaaaaacggcgattctgatcctgctcacgtgccagcaaccagtgcaattagcaataatcagtttgaacttgaagatgctaagactgtttcgcatcaggaactgatcactccaaagcctaaagaaaagaatgtcagagaaatgaagaatgtgctaaatgataccgagatgactgattatgatgagtatggcacgcctctggatcgagaaacatttatgaaagagcttgagactttctacagagagcggtccttggaatttaagcctcctaagttttatggagagccactcaattgtcttaagttgtggagagctgttatcagactaggcggctatgatgtggtaactggatccaagttgtggcggcaagtaggagagtctttccaccccccaaagacctgcactacagtctcatggacatttagaattttttatgagaaagcacttttagagtatgaaaagcacaagagagagattggggagctacagnctcctgttggaccattccat

SEQ ID NO: 39433 - DNA, 565 bp, Glycine max
  Clone ID: PAT_MRT3847_135607C.1
tttgaatcatccattgccaaattcccattaaacatcatttgcatttcaccttctggttgtggggcttagcccccttccattaataaaatttgaatatgcaattcaccagccacacttcaccagccacactgaccaatcctctttctcaatccccaattcctattaacaattgaagaatctgaattctaaatttaaaatttttaataccccacttgcccaaaaatagaaaattaaatacgatttcaatttcaatttccaaaaccgcatccaataaactttgctacttcacgcttacgacacgtgaatccactttgcaacactgggcactccctggttcaccgcaaatgccatgtagtaccccggcggcgccaccgccccactcggcggagctgttaccccaattcgatacctgccgtcaccgccgtcaggcacagcagaggaaacagccagtttgaccaaacgttgaccctgcgagaacgagtgcgtggcaaaaggcgcacttgccaaattcacttccacaatccccaccacaggcaaagcaaccgaaaccaccacaataaacttc

SEQ ID NO: 39434 - DNA, 431 bp, Glycine max
  Clone ID: PAT_MRT3847_135608C.1
ggtatttatgattcacctgcctcatgggggtattaccagcattcattgttatgataagtgtatttagcccagtgcctggcaggtagacattgttacttactctgggtcttggtgggacttttccctgggtctctggttttctctacctgtaatatgatggggttggtgaatgcagatctttccttttcttgtgttatataagtactccgtgaaatgtatgggatctgtctccttaaaacttgacttttgcttatccacagacatgaagggcatggatggataatttaaaggttgctgactcttaagaattagctattttttgctttggaatgtggtgagatgaattttaaaaaaataagttttaactttttagtttgccttttgtaaagattttctttggggggagttgcacgtgtgctctcagggatatg

SEQ ID NO: 39435 - DNA, 136 bp, Glycine max
  unsure (1)..(136): unsure at all n locations
  Clone ID: PAT_MRT3847_135609C.1
anntgtngnatgcacgcggangtaagctcggnagngcgggctcggagcnctgaagncggannctgctgtnntngtactctgcngcaacaaactngcagnntgtgcntacctgccngcggatgcangtgntgcagcn

SEQ ID NO: 39436 - DNA, 928 bp, Glycine max
  Clone ID: PAT_MRT3847_13560C.1
aactcacatttcataaatccacttcaattgtcactgatacactgtaactacacactccaattgaacttttctcttggtagtgctacataaatgaatttactcgatttaacaacggcaacggcgcatactagttaccatttaccagacaacttatgatcaaacgttaacaaaacctgattttatacgaacattacttgggtatagtgaatcataaaaataaggtaaaacattaattcaagcttaacacaaaattgaccaaaaataaggctctcaactccaaaaagtatccaaattttggacatagaaaataaacagtacaggcaaataaatattcaagaaaatgattctgtagacacaaaataacatagtttctacttgtgcagctatgagacagcatccgcaatgaactttcactcatcatcttcatcattatcagcagcagagttgatggctgccacgcgtgcaaccaacttagccttcctctcctcataagtcagcttcttcatgttgtacctcttgtgctccttcgggggctgcttatcagatttcttgagagtaggatcagcacggatggcagcatgaaccttcttgtacagtgcctcaataccatcagcctctatcccacgcttgatgtattcgctgaagtgtgactggtatttctctggttcatcttccgccaagatcttcatataggcagcaacatgtccaccaaaaacatatttgcgatgaacctcggcatcaagctccttcttctccttatcaaacccagcaaacctcttgtcgctgtgaggaatatccaaacccccatccagagctcccttaagggcaccaaagacgcgatttcctgttgtagtcctaacaagaccaacatcaaggagtgcacggaatggcctcctgctctcggcaggttccactgaataatcctctc

SEQ ID NO: 39437 - DNA, 444 bp, Glycine max
  Clone ID: PAT_MRT3847_135610C.1
accacgcgttcgttttttcattgtgagagtttccacactatcccacacgtctaagacattatacactgaaattattctgttgtattataaaaacaaaaatgaatgccgtggcatatttccacttcttgtgcaatcagattgcggcccatgatcctggctttaatgaacagatccacgatcccgtttggtctaatttcaaagctgagtctaccgtttttgacatgcgaacatgataaacagtgccgaatgcttgtcgagtgtacgagctgtctcaaatccattcaaacgtggactctttgggggtggtataaaatggaacttctacacgtgccttgttgataaagagcgatctgtggatgatctttattcacccactgcttcgcctataagcattggcaaggaatcgctgaagctgttggattcctgaatgaatctatgaatgac

SEQ ID NO: 39438 - DNA, 568 bp, Glycine max
  unsure (1)..(568): unsure at all n locations
  Clone ID: PAT_MRT3847_135611C.1
ggctcgagcaagaaaacaaaaaatctttaatactctcaaactcctttttttctttcaaacacaacacagacacaataatcaatggcctccgctgctgtcttgagaagaaccggaactatggagcagaccgctgccgaagcgaggggatctccttttcaacgcagctctctggcgccttcctcagcaaccatctgcggttgcaactccctcgaagacaaagaagacctccactaagaaggcgaagaccacgaagaaggtctcgcccaagtcttctccaaaggcttctcctcctcgctctcgctctcccatcaagaagaagacctctcctaaggcttccaccaccgctaagagcaagtcctctgctgcggccaagacttccgctgttgctgcggctcgtggacccgctgccttcgtggtgcctttttccgctcaggatgaggaagagaagaagaagcaactcattgccagcttccttcccgctaaccgcggncccgtgactggcgtagacgtggtctttctcttcacaccactggttcgatgtccgcttggctcaacaccgtcgcaacaa

SEQ ID NO: 39439 - DNA, 305 bp, Glycine max
  unsure (1)..(305): unsure at all n locations
  Clone ID: PAT_MRT3847_135612C.1
gcaactgtctatctctaggccaacatctctatcgacatcatttcgatcttccattgtgatcctgttctgatctcacaatgagtcaggtctttggtaacggccgccacctgtcagtgggtagtactgctccccctttaaccaaagggaaacttcnactttacagcatgaagttttgtccttatacccaaccaatgcatttgattcttgatgctaaaaaaattccatattatgtcgtcaatataaacttttctactaagccagaataactttttgataaccatccgcttaccaaaattccaccaatt

SEQ ID NO: 39440 - DNA, 354 bp, Glycine max
  unsure (1)..(354): unsure at all n locations
  Clone ID: PAT_MRT3847_135613C.1
ggagaaacgcggcgattacctcgctgncggcgaccgaggtgggcgcgttgtgatattctaacgcgacgatcggaaaaagaatgctaggaatgaccgaagagaactggagcagcgggaatttcgcgacttcgcggcatcccgaatttcgtttcaaaacggaatttcagagccacgagcccgagtttgattacctgaagagtgtggaaattgaagagaagattaacaaagtaaggtggtggatgtccaacgccagtttgcaatttattctttcaaccaacgactaaacaattaaattgtgggaggttaaggcacataaggtaaaacaagttaaagaaatggcccctcctttatgct

SEQ ID NO: 39441 - DNA, 424 bp, Glycine max
  unsure (1)..(424): unsure at all n locations
  Clone ID: PAT_MRT3847_135614C.1
acgagcctgaatccacctgaaacggaggaaatgttgaatgaaaagaacaactacagggaattgtctgaacttgcagaacaagccaagaagcgtgctgaagttgcaaggctaagggagcttcacacacttaaaggccatgttgagtctgtcgtcaaactcaagggacttgacattgagacaatgcagcaacactacaccgtttgagtgcttgctgctactggaacataggtttagaagacaaaataaaaggagagaaatagacatttttattacattgcccttcatgacgtctcaaatctcatttggattttgaagaatgccaggggctctagaataatatccaacacttcgagattgtgcaacacagtccatggttgngggaggtttttttttttttttttttggcgatgttatcatcaatttg

SEQ ID NO: 39442 - DNA, 720 bp, Glycine max
  Clone ID: PAT_MRT3847_135615C.1
ccacgcgtccggcaacatacacacttattaatttcatttatacttacagttttttttggaacacaatatatacagaaacattatgtgtatatacagaaatagtgtgtgtatgctatttactttggccatttcaattcttactcagtgcctcccctaaatttggaacaaatttaccttgcaccatgcttcctgtggatgatgctctcctacagcctaagtcaaggtagcaagagataacactgtataggctcaaggttcaatcaatcaataattcattcagctcaaactgggtgcaagggataaatcattcaagcacgtggtaagctttttggctaagtggctatcacaatcaaacatggccttcatcatcctcaatttcatgcatccagtccatacttcagagattcatgcaaaaatcagtactaaatgataatcgtttctctcaaaatttaaagttcacactctcaccgggatacagtcaatgcattccttcacaatcaatctgacaaactgactaacatttttagtcatacttccaatcacatgctcattctcttctaatggctacaagcttggtgaaatcaaacatctactcattccattccactcaaatcatacaatggctcattcaaattattcgcaaacactcattttatacaaaacaatcccctacatatcaaattcaaccagttcactattcaaacaagctttctgtacaag

SEQ ID NO: 39443 - DNA, 615 bp, Glycine max
  Clone ID: PAT_MRT3847_135616C.1
tcgtttcctacttcactagacagtggacacaatcatgccacgcaagcacaagcaccataacacccacaatcctcattttctctctcatcatcatcatggtcatcatgtctaaagtgatcaaaatcacttgtaatgtaacactttgagttgcattacatcacaacaacaacatggctgccactgctgctgcaggcatagcttccttgttttcttcttctattaacagtgtcaaatgtcttcgttcctccaagaactgctccataatagaccctctcataacaacagtgccctcaaaccgtggcatgtttgggtcacacttggtggaacctttgtccattaattcgcacaagttgtggggacctagaatttctgctgctgttgcacaagaagaggctgttgttgttgtggatgatgatggtgctggtttagttgaagaagagaaagtggaggagaatgaaggagaagcggtggcagaacaagactctgattcctctgccaccaagctttattttgggaatttgccttatagtgttgatagtgccaagcttgcagggttaattcaggattatggtagcgcagaactaattgaggttctttacgacagggattctggaa

SEQ ID NO: 39444 - DNA, 277 bp, Glycine max
  unsure (1)..(277): unsure at all n locations
  Clone ID: PAT_MRT3847_135617C.1
cganatcctgagcttncattgngctcactcatctcttanaacganaccctcttcaacttgctcnanctgcgacgannatcatggcctcaagagcagtgtcattgttggcnatgtgtgtgctnccggcnatggttgtggccattcgcncagcaaagaacccnttttgcgtgaagggacgtgtctactgaganccntgccgtgctgggttngaganctcagtatnactanattgcggtgcgagatatgtagnaangcaagagnaggttagcncgaagtt

SEQ ID NO: 39445 - DNA, 713 bp, Glycine max
  Clone ID: PAT_MRT3847_135618C.1
accatatggcttttgaattgtatggtatgcttgcgggtaatgtcagtccgatgacgggagagaatgtgaagccagcatatggaggtgaagatgaggcttttttaaggaaagttgtcactcctatctataacgtgattgctaaggaagctgcacgtagcaaaaagggaaggtcaaaacattcacaatggagaaactatgacgatttaaatgaatatttctggtccgctgattgttttcgattaggttggccaatgcgtgctgatgctgatttcttttgcctgccagctgaaaagctggtttttgataaatcaaatgtctgctgctggagttctagagctagaagatggaagtgctggtaggtagtgctaacatggaccatttggaagcattgaaacggggtagtctttgataatcaatctttcgagggaagcaaagtgatggatggtgcattatttctactatggtcttggcttaaggttatggagaagggtttcacaatgcactttagctactggtcctcccacctgaaagcagttttctaaaactagggagtggccatgtttgtaacagtttcaactagatttgcagggcatgtatatttcctatatgggttcagtcagattcttagtgttttgaatctgctgtatacctatcccctatatgtactttagtacctctggtactcatctataatataatctacttgtgctgag

SEQ ID NO: 39446 - DNA, 265 bp, Glycine max
  unsure (1)..(265): unsure at all n locations
  Clone ID: PAT_MRT3847_135619C.1
caacaacacttccgcggcgaaaaatgtctctgntgncgaacgagcatnnccagcacattctgcgtgtgctgaacaccaacgtggatgngaagcagaagataatgttcgctatgacctccatcaagggtattggaaggagattcgccaacatcgcttgcaagaaggccnatgttgacatgaacaaaagggctggtgatttganttncngcananttggatantgtgatnactgtggtggcgacccntnggnnttttcaagnncggg

SEQ ID NO: 39447 - DNA, 778 bp, Glycine max
  Clone ID: PAT_MRT3847_13561C.1
cccatgagaaaaggggtcatcttttagaaactgattaattggacatacacaggttttcccccatactaatgttttaaaagaggcgccctgtgatgaaacaagatggtccccaaaaaaggggccaaagcgcaatctccccggccgtaaatgtttgttttctaaatcggccccccccctttacactattatatcacacggttgtgttttgcttgttgattcctacctagcacgtttgtctctttttatcggatcttcttttttcacttatttttttatttttttttttttttttttttttttttttttttttttttttttttttttaacccgaaattgaccaaaattaaggcttactcaactccaaaaaaagtatccaaattttgggcctagaaataaacaggcaggcaaataaattttcaagaaaatgattctgtagataccaaataagatagtttctactagtgtagccatgagaaggcatctgcaatgaactttcactcatcatcttcatcattatcagcagcagagttgagagctgccacacgtgaaatcaacttagccttcctctcctcatatgtcagcttctttaagttgtacctcttgtgctccttcggggtctcgcacgcggaaatataactggagcgtcaaggcaattcgcagaaagaccaccggaactggcaggatgagatacttgcgtaacgtgcctcgccgtttcaagagtggcttcagagaaggtaccgaagctgcaccaaggaagaagggagcagctaccactgca

SEQ ID NO: 39448 - DNA, 267 bp, Glycine max
  Clone ID: PAT_MRT3847_135620C.1
caagacggacgcaaccatcacacctcacctcgttcacgcgacgcctttctgctcttcttctacctttcacgttttaaaagtagacagatggaagagacattcctatgtacgtcagagtcggtgaacgagggacactctgacaagctctgcgaccaaatctccgatgctgtcctcgacgcttgcgtcgagcatgacccagacaggatagttgcctgccacacatgcaagagagacaagttggtcatggtcgtcggagacgatcaggag

SEQ ID NO: 39449 - DNA, 330 bp, Glycine max
  Clone ID: PAT_MRT3847_135621C.1
cttacgcgtcgttttacgcggggggaacgcagggggagctcgtgcggaagatgggggagaagaacacaggctacacgtggggtaacgcgacatgggcccgttatgatgcctctacactcttgctgtatccgagtagtgaggagggattgactatgataggaatgccgaacagtatttgtatttaatgaccctatggccgcttaagcactgctcctggttataaatacaagtgaagtgggtggaaccggaatccttgatcagtgttgtatgcttagaggatgtatcactagcgggtgttgtagttggctacccagcattccatggagttgt

SEQ ID NO: 39450 - DNA, 247 bp, Glycine max
  Clone ID: PAT_MRT3847_135622C.1
tcaaagttcttaccttacctgagcactcgaggatcagccagtgcacatccacctcaaccatctcctcacactatgacacccgctagtagcctacatcatctaaaacaaattactgctctccattcacgatattacccatcttattgagatgatgcgcgttgaccggcttgattaccatgctagtaatcaagccacgctgagcatcaacaccgagcttgaccctgataccgaaagaccagttagtagc

SEQ ID NO: 39451 - DNA, 360 bp, Glycine max
  Clone ID: PAT_MRT3847_135623C.1
acagacggcaaaatagaatatccaaaagcggtggcacccttgaaaccaatgtatctccccccaacccgttttgaaaaaagaagagcttgggaatcacataccgggggcattcttaggggaatttttttttaaacaggggggggtggtaattcttggataaccaggccggggaacatggcgagaaatttccggttggaattggggggtcaacccccttggcggtaggccaggggccaaccttgggggggaactgggtaagggggacctttcccgggtttcggggctcttttacaatggctggcccggaggccggggggtccaccccgggtattttcgggaccggctcccttgcgggcgtcc

SEQ ID NO: 39452 - DNA, 571 bp, Glycine max
  Clone ID: PAT_MRT3847_135624C.1
ccacgcgtccgacaccatcgacaacgtgaaggccaagatacaggacaaggagggcatcccgccggaccagcagcggctcatcttcgccggcaagcagctcgaggacggccgcaccctcgccgactacaacatccagaaggagtccaccctccacctggtgctccgcctccgaggtggcgccaagaagcgcaagaagaagacgtacaccaagcccaagaagatcaagcacaagcacaagaaggtgaagctcgcagtgctgcagttctacaaggtggacgacgccaccggcaaggtgacccgcctccgcaaggagtgccccaacaccgagtgcggtgcgggtgtcttcatggccaaccacttcgaccgccactactgcggcaagtgcggcctcacctacgtctacaatcagaaggcgtaatcccatgcgccgctttgcttcacccgcctacctatcaagcattcacctgttggttactcgatttgaatatcatttagatctggttgaggttggaacataaatgcagcagtagtttctgtcttattatattggtacctctgttactgagttgat

SEQ ID NO: 39453 - DNA, 290 bp, Glycine max
  Clone ID: PAT_MRT3847_135625C.1
gaccagcgtggcttataacggattgttgaatcgcacacagactttgatactagaatgacctatgaatgaatgaccatagtcgcaatatgaggctgccttacggagtccgaggatctatttagacaccagcttgaaagacgacgatatgagcgccgtcttggtcaactacatcacactcagtatcctctcatatatggtctgctactacgatgtctgcaagatactaaacactacatggctgagaggctcggacctgagatctactactagtgatgacactgtcaaactgc

SEQ ID NO: 39454 - DNA, 321 bp, Glycine max
  Clone ID: PAT_MRT3847_135626C.1
gttttcgctgcctttattggatattgaaagttctctgcggggtgtgaattaactgtttgaccttgtaatccacttgataaccaaaccagagtttccaatggcatgtgggcatttttccttgaaaaccgggggcattattgctgcagcattttcagctctgagtattggatctacttggatcacgggctcttggccatcgatttgtgatcttagagtaatcgctcacattgaggacggctaattcaatccacatgcccctactgtgatggtagagatacccatgtgtcgcaccaatagtgcatgatgtatagtggagctctt

SEQ ID NO: 39455 - DNA, 173 bp, Glycine max
  Clone ID: PAT_MRT3847_135627C.1
ggttttgagtagtcggtgataattaaataatcgagtatgaaacacgtatagctatttctgtgacaaaaatgttcatctatattctgaagatacaatcctgctcaggagaccctatggaccctcacctagaatatgaccacgtaggatgcactgcgttttcaagaatcataaaa

SEQ ID NO: 39456 - DNA, 389 bp, Glycine max
  Clone ID: PAT_MRT3847_135628C.1
gcatcacatgacaattttattttcccctttaccatggcttgcagtttaattatatgctacattatacgctcattcttcacacgggagaaggaagggaagttttttgttcatgaataaaccgccccgatagactaaaccatgcgccttcattgtttagactttagcgcaaggatggcaccttgccgcttggaaacatatgcatggtatgggccctatgaagggccattcctggtccctcttccatgataaccattcccttcccttcttcaccaacctttcattcaaaacactgaatcattccaactccggcgttggggatcatctgcatagctagtgaagcacccgggcagcttgttctcccagctccgaatgacaaaagttcaaaatgc

SEQ ID NO: 39457 - DNA, 382 bp, Glycine max
  Clone ID: PAT_MRT3847_135629C.1
ggaaaaccttcattcattcagccttacaaatttgatttgttttaacggggggaaaaccagtcctttttacccaggtatattttcgagattccaagcaaaaaataaatttttgaagggttgtaaaacaaaggctaaattttactttcctactcaaacgattgttacacaagccttcaaagtttgtaattttttaagagcaataaatcggtttttttcaacatttgcttccaaaccaaaatgatggctttgccattctgagggcttcataagatcccagggacctttaacttgaaaaattaatccccccttaattttaagtttgtggggattctacttatttccccaggtttgatgcgtaaatcaatcgttgataggatctggg

SEQ ID NO: 39458 - DNA, 2848 bp, Glycine max
  Clone ID: PAT_MRT3847_13562C.1
ccacgcgtccgaaaggaaacgcctttcctaagaagttgggaggaagaagagagtgagagtgagagagatggaggttggatttttgggtttggggataatgggcaaggctatggcaatcaatcttctacgccatggcttcaaagtcactgtttggaacagaaccctctccaagtgtgacgaactcgtgcaacatggtgcttcagttggagaaaccccagcaactgtagtcaagaaatgcaagtatacaattgcaatgttatctgatccttcggctgctttatcggttgtgtttgataatgatggtgttcttgagcatattaatggaaaaggttatattgacatgtcaacagttaatgctgatacatcttccaaaatatctgaggctatcaaagcaaaaggtggttacttccttgaaggtcctgtttcgggtagcaagaagcctgcagaagatggccaactcataatacttgctgctggacataaggcattgtatgatgaagtgcttccagcatttgatatactggggaagaagtctttctttctgggtgaggttggaaatggtgcaaaaatgaaactagttgttaacatgataatgggcagtatgatgaatgctttctctgagggaatcacactagctgaaagaagtggtttgaaccctggtactcttcttgatgtgctggatcttggtgccataagtaacggcatgtttaaattgaaaggacctacaatgctccaaaacagttattccccagcttttccgctgaaacaccagcagaaggacatgagattagctcttgcccttggagatgaaaatgctgtatcaatgccagtagcagctgcagcaaacgaggctttcaagaaagccagaagcatggggttgggagaccttgatttttcagcagttcatgagactttgaaagctcctgatcattcatcttgaccagatggatctctgaattgattaaaccactgttaggcaacagtgtgatgcgaaccatctatttatgaaacagcaatttgagcataggtcattattgtagaatcttgttgaaatgaatgaaccttgtaaaattttgctactttcactgcaagattaagctataaaatgcaagaacattggtttagttcaactgattgcagacttgtagtggacggcttggccatctgttcacagacgttaattgttttagtttatgtgagtggtttgaataggttgcatgactattttatgaaccttcgtggcattaaatgtttgctttgattagactttctttttatgtatttatactaaggaaaatactaataagtatcctcaaggcattgattaaggaactaaaaaaaatagtgttattgggatacgcaaaattgtgtaatgcaaatgataattgattcttttaaaataatttggaatccaaatgataattatacctaaaagatatacatcccaacataaaaatttgatatcttgattcctatttataggtttttttcatttgtcttaaaaaatagtaaaatatgtggcgtctaatttgtgaaagtgtatgttcaattaaggaactggatttagccttaagattaagtaaatctggattaaatttaacctaacaaattaaagtggtacattctttcattgtcgaaaaaaaaaacaagcacagttcgttaaactaaacaacttcctgatagaaacaaagcgtatatcataaaataaggtaagacatcaattcatgttgacacgaaattgaccaaaaatacggcttactcaacttcaaaaagtatccaaaattttggacctagaaaataaacagcacatgtaaataaaatgattgactgaacgcaaaataagagagttttagttgtgcaacgatgacatggaatctgcaatgaactttcactcatcatcttcatcattatcagcagcagagttgatagccgccacacgagcaatcaacttagccttcctctcctcataagtgagtttcttcagattgtacctcttgtgttccttcgggggctgcttctcagatttcttgagagaaggatcagcacggatggcagcatgaaccttcttgtacagtgcctcaataccatcagcttctattccacgcttgatgtattcactgaagtgtgactgatatttctcaggttcatcttccgccaagatcttcatataggcagcaacatgtccaccaaaaacatatttgcgatgcacctcagcatcaagctccttcttctccttatcaaacccagcaaacctcttgtcactatgaggaatatccaaacccccatccagagctcccttaagggcaccaaagacacggttgccagttgtagtcctaataagaccaacatcaaggagagcacggaatggcctcctgctctcagcaggttccactgaatagtcctctccagtagcctcaacatttccttcgtactcctcatccatttcaagtgttttgaggactcttcgggccaacaggagaccagtacaataagctgcagcataatttgtaagccctacttcaagaccatatcgtggcagctcatgtgcatatgctgcagcaagaacaatatcgccagcaatgctagcagatattatttgtgcaacaatgtctttgttgctgaaacgaacaacaaagcgatatttcggggtgttatatttgttcttgtcctgattaatcaaccgaatcctggcacggtaatcggtttttccctctcttcttctcttgaacttgacttgatacctcttgaagtaggcttttgatttctgtgacttcacgtaaaccattgctgaaggactgaagggcagcagcgcccccacgcgtccgcccacgcgtccgcggacgcgtgg

SEQ ID NO: 39459 - DNA, 808 bp, Glycine max
  Clone ID: PAT_MRT3847_135630C.1
tgcatgcctgcagatagcactttatgagagtttgttagctagtcctcatcgaacactaaatggtgaagaggcagattttttctttgttcctgttcttgattatgtatataactcgtgctgatgatgctcctcacttgagtatgcaggtatattttacttactgttatttttaccagaatatatttgtagaatatctattgctgcatgtgacctgcatataaaggctgactgcattagtgtttcagcctatgcatgttagtagtgcttccagatcattctgagttacaatatctgtgattaattggatgacatggcagtcaacactgacatctatgtcatgatgtgcatggattttccttccatcaactttcttgaatagtcataatttcaaaatgggaaagacaattgcatgtaatgctgttttttcccttttcgcatggaaggatagaaatatcttcagttatctattacttgtgtgtgtgtgtgtgtgtcattccatgtttacactgttagttttctcttttccttacattttgttttataacattcaggagcatatgggattgaggagctctctcactttggaatattataagaatacatatactcacattgttgagcaatatccttattggagtcactcatcaggaagggaccacatctgggtaatgagaattgtttatcttacgttgaagactttttaacgaagtaacttttactttatttgcttgtgagaagcatgtgctaattatttcacttctatttctgaaggcagtctttttcatgggaatgaaggtgcttgctatgc

SEQ ID NO: 39460 - DNA, 299 bp, Glycine max
  Clone ID: PAT_MRT3847_135631C.1
ggcctcggcattcggctcgagggagaatagggatgtgtatcctaacctatctgagttgcatttgggtggtgggaatggtggaagtggtggtgcgggaagaaatggggttccatcttcctctccaatgatggatcctaatgatgttgatgcagcttcgggtggatggttattagggggttcttcatcatatggtcatccactgcattgacctgcaagtgtgcctttccgagtgcaagacattactagatggtcttgcataggctgatgacgtaccttggggtctgcccctctttatattt

SEQ ID NO: 39461 - DNA, 496 bp, Glycine max
  Clone ID: PAT_MRT3847_135632C.1
ggcatatactagcaccccctcatcattgcagtacaaataggataaaacaaattgcagcgggggggggcggctttcaacagccaacatattgttgcaaatcccagtatccatgtgctctagcggctaaatgatcatgttcatttggtgtagaaaccaatgccaactgccaaacccaatatcaacaacggtactggaaactggaagatccctattaagaactcccgattcttcaactggatatacaaaggttgttttggagtgaaagtgctcaaccttactggggttggacgatgcacaatgtctccaacatataactcatccataatggctccggaatctttagcttagaccaatatcctcaaaagaattggtcgtatttatcccactggataaaaacaagacctcactccccaccagtgagatcttacgaaacctctagcccattacagaccatatcctgaatgacaggccttcaggttatgcaattgttgcactg

SEQ ID NO: 39462 - DNA, 468 bp, Glycine max
  Clone ID: PAT_MRT3847_135633C.1
gggcttacaagttgtttcggcaattacatataattgttgggctgcatcacaaattacatagaattgttgtttattatttgtaaagtctgggaattactataacaagaaagtgtacataaagatatcatacacttctttagttatggattattgcattgaatttaaaaaaaaaaattggcattattggttaattgatatacatgattagtgatgctagaataaatttttgatagtgtcatttacggatgtgatatttacttgttgtattggtaaatataatttaaggatataatatttacttattttaattaatgttttatatttttctactatcatgattgagtgtaaatctagcagatccttcccatgcatttgcatttgcatgtctagtaatttttttaattaaaatgattgacacaatatattttcaaagtgatctctattgtgaaaattgatttgattaaaatt

SEQ ID NO: 39463 - DNA, 408 bp, Glycine max
  Clone ID: PAT_MRT3847_135634C.1
gctcccacagggactaaaacaaaatgaattttgcagcaccatcgggctatataattggggtgcttagagccaagatggatctgttcctagacaaactttggaaagcaggcttgtttaactcattagttgcttatgaatccaactaaggcataattaaaaatggaggctacagattgatacgaactatactgtaacttcctgaccatgacgggaagcaagaatgcattggagcataattaaagccttatttaaccaatggctgctgctcagactgctgttaatgcagtcatgtgcaacgttctgcttgatgaactcaaaatggatagtgcgtgaactattgaccatatccatttggttcaagagacggggattgaatttatacactcatctgaaacattgctctaacca

SEQ ID NO: 39464 - DNA, 271 bp, Glycine max
  unsure (1)..(271): unsure at all n locations
  Clone ID: PAT_MRT3847_135635C.1
gnntagatagtcaaancgaaagccgagctncaanattcctnctnantgcagtaaccgaaacccaatganccagttatccatggtttgcttcaaacattgntccctgaacccnagcgttgctccctcttcgccaanaacgctnatncgatcncgatcggtgtcctgattccganccgaaccantccatggtgggggngcntctnntcctgttcntctagacatnaaaggcgcggtccncatntnggggatanggngtncntcacgcngtcna

SEQ ID NO: 39465 - DNA, 335 bp, Glycine max
  unsure (1)..(335): unsure at all n locations
  Clone ID: PAT_MRT3847_135636C.1
ctcgagccagatcagcatagagcggttagagcgattatactttgaaaccggcgtatttacacgtgatggtgcgacgcgtgaggggtgatatgcacggtngctgatagagaaagacgagtattatacaaagcgttattgggagcttatctgcaaacactttgtgaggtgagagcgtgcttttagcactttttgtacccaaacactctggacctataagtatataagtgagacgcgtggacagttactttattgataaatatttttaaaaaaacaaacaggatatgacaaagaagcaaaatttaaaggatttttttgggggcgctttccaaatacaa

SEQ ID NO: 39466 - DNA, 126 bp, Glycine max
  Clone ID: PAT_MRT3847_135637C.1
ccaaccccccaggggaaaaacttttggtttaaaccccatcaaacaggtcaaggcataccgatctttaggggcgcccctgaaaagaaaaccctccctgcccaacaaaaaagcggccccgggggcccc

SEQ ID NO: 39467 - DNA, 1487 bp, Glycine max
  unsure (1)..(1487): unsure at all n locations
  Clone ID: PAT_MRT3847_135638C.1
cccggaagagtggttttttcacagaggaaactcttgaattccagcggaagattctggagagggctggccttggtgaaagcacttactttccagaggctgttctcaatgatcctcccaacccttcaatgaaagaggcaagaaaagaggctgaggctgttatgtttggtgcaattgatgagctgtttgctaagacttctgtgaagcctaaggacattggaattctgattgtgaattgcagcctcttttgccccacgccatcgctttcggcaatgattatcaatcattataaacttagagggaacataaagagtctcaaccttggtgggatgggatgcagtgcaggtctcatttcgattgatcttgctaaggaccttctccaagtccaccccaattcctatgcattggttgttagcactgagaacatcactttgaattggtactctgggaatgaccgatcgaagcttgtttccaattgtttgttccgtatgggaggggctgccattctgctttcaaacaaaggctctgataggagaagatcaaaataccagctggttgacaccgttcgcactaataagggttctgatgacaagtgctttggctgcgttgtccaagaggaagattccaatggcaagattggtgtcactttgtcaaaagatttgatggcagttgctggcgatgctttgaaaaccaacatcaccacattggggcctcttgtccttccaatgtctgaacagctcctgttcttcgccacattggttgggaagaagcttttcaagatgaagatcaagccttacattccagacttcaaactggcttttgagcacttttgcatccatgctggaggcagagccgtgttggatgaactggagaagaacttgcagctgtccacttggcatatggagccatcaaggatgacgctttaccgttttggcaacacctccagcagttctctttggtatgaattggcttacacagaagccaaagggaggatcagaaagggtgacagaacatggcagatagcattcggttccggattcaagtgcaacagtgcagtgtggaaggctctcaggaccatcaactctgcgaaggagaagaacccttggatggatgagatccacaagttcccagttgaagttccaaggatttcgcctctctaaacaacgtagttttgagtattttttggtcagcattaggtggtagctgttgaagtggtggaaagggatgagcggtaggtcattttgggataaattttgtttgttattaaatttaattaatttagtcaacgacttgtgcaaaagctttggactgccggggttttcagcaatctattgctctggggtagtgaattgtaattacaattcaattcgggatttgtctgatacatttacaattttttcccattttgaacttgtaaaaatttttattttttttatgaaaaaaaaaaaaaaaaaaaaaaaaaaaaaaaaaaaaaaaannaagggatcccc

SEQ ID NO: 39468 - DNA, 197 bp, Glycine max
  Clone ID: PAT_MRT3847_135639C.1
ttcacgctatcgttcacaaggatcatgaacaaaatctccatccgattgatgccatattgagacaaacaagatatccttaacaacctgaggctcaagtcctcatggcaacagagaagaagggatggcttcttgttgaagttgtaagttccaaaggatgtatgctgtgccacaaaatgcttgatgagagagagagcctt

SEQ ID NO: 39469 - DNA, 417 bp, Glycine max
  Clone ID: PAT_MRT3847_13563C.1
gttatgggggtatctcggacgacacaagcgtccgagatccttgcctcacgaggccatgtgcctcctaaccaccattcttgccagaatgttcctataaaaacccctccaccaagggaaagagacaacttttagacacaatctgaaatcataatggatcctactagtgcagagactctcattctctttcttctctctctcctccccttctccaccccctcactcagcatcacctgagcgagagtcgtgccaccatgccagaagctcatctctgttgcacgggagactcacctccaccactcttactgcacaaaatttttaaccagtattaccaaatgtgtgttttttgtgtttatgctcttccaatagacggtttggtgagagaattgatgatgaaattgtaaaaaagagaataatttc

SEQ ID NO: 39470 - DNA, 1061 bp, Glycine max
  Clone ID: PAT_MRT3847_135640C.1
ctaaaagatactcaattttattaatcaccgtaaaaatctatgttggggggaaggaagaaaaaaactaaggtatagaagttgaatatgaagaaggtatagaaagttttgtccaattttttttttcttttgtgttcacatgacaaaatgggagaaaataattagaggagggatcaaattactccatgaataactcttaaagttactcctcatcttgaacatttattttcttataatttaacgggtaagattatttatttagactcagaggtgcagcgtgagtgatgaatgtaactcccattagaaggacgaaacctgagctgacactccaaattgcaccagaacttaacagaacctaacggcccaaccctccaccgtgtcctcgcgcttcccttcaagtcaaaccctataacgtcacgcttccacgactcatccacttcttccatctgctcaggagttaacggaatggaagcagaccgaacaacgtagttgagtggcttggagctgttcttggccacatcgaatggcggagcgagcataacagcaattccttgtccctggtagcttaggttgaaccttatgtcggagaacgttgcatgggccttggcgttgccgttctgcgccacgacgatgatggtgagctgcgtctggaggaggcccgtgtagtcgttgctgagaagatcgaggtgggcattggtgatactgatcacagggatttaagggtggatcaccatgtacccacgaaaacaactaatgccggctattacaacgctaatgaaataatggtgcaaaagaaatggccgctagccaagataaaagggtggttttgccgctgtggtgagtgttcaccaattttcttttgatggttttgtggtggtggtggtggtggtgctcaagccacggaatgttcgtggggttcaaggtcgcgatcgcgggtggggcgggcatggagattgttcaatgaataaaattcaaaaaattcaaacccatgaggggttgtttgggagttttatgtttggtgtgagggatgagactacttgagaaggaggagtttgggggttggc

SEQ ID NO: 39471 - DNA, 427 bp, Glycine max
  Clone ID: PAT_MRT3847_135641C.1
gtgcgcctacgcccatcgcataccttcaggtgagcccattcatgaaggccgagcctactagtgacggcatgatcaccacggaggcaggctctatcaccactggtggcctcgtggtgatcctcagcctatgcctcacaatctatgggatttcatcgttctaacgaacgacacccatccactgacccgacactgaccttgacaggccttatgaaggagcccgatcagctccaaactgctgatcagtgggccacactcaccggatgcttactctagccaggcatttcagatgctattaccgtctacttgcttctgtacatgccgaaccttacttactacatcgcctgattaacgtgctgattatctagaaagacatgtatggagaatccattgtgtatgaatggacaatgggtctaaaatgatcctcact

SEQ ID NO: 39472 - DNA, 912 bp, Glycine max
  Clone ID: PAT_MRT3847_135642C.1
tcttaaaagctgagatgcattcccctcctctagtctgaaattacaatgtggaattccagaaaatccagaaggaaaaaacggttaaaaagctgcggctatggcaaaaagtgaaccaaaatttcaaagatataataagcgaagtatatgtaataatacaagaaaaaacttgaataacaaaacttcatcatctaacagtggaagcaacagtttgagcccaccacctgagactatcttttatgtcaatttcattgttcagagcaggaatcttccaattcacgagagggttctctttctttctcctttcttgagtcttccatgcttcagagaggtaaggtctttggactgaggatcctaattcagaatcctcttcttcctcatcacttttccctagcctttgcaagccaggaatgattgaagccaaacttgagtccttatcttcctctgagaaaacaaaccccagatccatgaacccttttagctcctcaaattcaaggtctgataaactcttgcttgaccttttcttcctcctttccctattcttaggcaacaatactagttgatgctgcacctgtgctgcttctgagtctgtgacatcttttcctgagagaattgtttgaagctttggtgagaaaactgagtctggggagagagaatcatccttgaaacatgtcatggaactcaactggtcgctcatggacctgctgtgactgctttggatgcgtaaaagcattggttcttctcttatttgatgatctgaagaattctcatgaggacttggtgttggtgaacttgttgtgtgttcctttaaattttgatgcccaaaccagcatgaatcatagagcttcaagacttcttctgcatccatcatgaataatggtggaataggaaactcagatgagcctttctcgagcc

SEQ ID NO: 39473 - DNA, 191 bp, Glycine max
  Clone ID: PAT_MRT3847_135643C.1
ctctttccttgggtcgaacataacttaaatcaaacgtttctacgttgtgcacacaactgtgatgagtacccagatatctgtggctgagaaataataggaggcagattgaggtaaaacataatgtcctcgcacaataacgtgcctatttgtaaaaagacgacctgcagatggtcaattcaagaaggagaatt

SEQ ID NO: 39474 - DNA, 429 bp, Glycine max
  Clone ID: PAT_MRT3847_135644C.1
agggaaaactataagttactgtcttttgttttttacccacgctttcttggggggggggaaaaaaccgggaaatgcggtctgggattttacccccccccccctggccctagggggagccccgaaaaatttggccggggcccggggagagccccacccttcccaaaagggggatgcgaaaaaaatgggcaacaacatagggaacacggggcccaaggggaaaaaacctggggcgcccaacaagtgcgccaacacacaataccggggttgaactcaaaggccggggggcgcccaaaaagcggacccgccacatgaaatgggggacccccccaccccccttgaaaaggggaaaacctattgggcccccgggttaaataaatttgcacccccccggcgggagggaggttattgtccttcccccccgggggcttt

SEQ ID NO: 39475 - DNA, 376 bp, Glycine max
  unsure (1)..(376): unsure at all n locations
  Clone ID: PAT_MRT3847_135645C.1
aggtgaggtgaccatatactgatgaatgttgttacacacgcgtaatccgnaagtgccagtgtgaatttttagacaatgatagcgtcttctctctccatcctacattcttgttcatcttcctctatcttattcacaatttcactttctaatcccaaaccctcttattccctacctttcatgctccaagcccaagacaggacccgtaaggaagacaggtccgcgcgccacactctcatcataaagaaagtcgaaggcacacccgagaggccgaggctctcccctttgctttcatattgcatttgtttcctctgtggctgatagctaattgaaatcgctcatctaaatctatgatcacaaacagatctatttaaattac

SEQ ID NO: 39476 - DNA, 533 bp, Glycine max
  Clone ID: PAT_MRT3847_135646C.1
tgattggctaactgtgtcagtcagaataatgtgaagaaagcagaggaagtttttagtaaaatgaaggacttggattttcctattacagtatttacttgcaatcagttgctatttctgtataagaggaatgacaggaagaaaatagctgatgtgttattgttgatggaaaatgagaatatcaacccttcttctcatacttactcgatcttaatagacacaaaaggccagtccaaagatattgatggaatggatcaaattgttgataggatgaaggctcaaggcattgaaccagacatcaacacgcaggctgttttgattaggcattacatctcttctgggcttcaagataaagctgaaactttattaaaggagatggaaggggaaaacttaaaacagaatcggtggctatgccgaattttgcttcccctctatgcaaacctaggaaaggtggatgaagtgggaagaatttggaaagtctgtgagacaaaccctcggtatgatgagtgtctaggagcaattgaagcttggggaaa

SEQ ID NO: 39477 - DNA, 438 bp, Glycine max
  Clone ID: PAT_MRT3847_135647C.1
ctgcaggagacccatggttttttgaagacaatttggccagaaatttctatctggccttttcctctctctccttgtcccaccaggtggcagccaagcgtcctccgacttcttcactgcatgttaactggccagactcagtttaaagcactggcttccaaaacgggttgtgccttctttggttgtcattcttaatagattcgtgaagttatttaatttactgtagtgataagaatgatgtaaaaaatacatgtaagttatgggatgaaagcgcttggtgtgcactgaacagtgcaaaaagcaaaaaggcaatttgtcaatgaatgggctgcggagatccccgggggcccggaagcagcctcggtcatcgccgaagagctgggctatgaccttgtgggtcagattggttcacttggaaatcactacttaatcatacataaa

SEQ ID NO: 39478 - DNA, 472 bp, Glycine max
  Clone ID: PAT_MRT3847_135648C.1
tacggctgcgagaagacgacagaagggggcttgatgagttaaccaaaaccaaccttggcctgcactcaaagaacaaaaccttcaaaatagtatccaaaacaccccttttactcccaatatctcaaacccaatttcaatttcaatttcaaattctcttctccaaagatgtctcttcaagctcaaccacaacaacaaccacaacaactagtccaagtttacccaacaaatcagccaccttcatcttctcatcactcaaatgggtcatttggggcagttttcattgtccttgccataatactagtcatttctgtagttgcatgctttctagggcgcctttgcaacaagcgctataataatagccacagcaaccgccagaaaccctctaagtagcataataggccacagatccacaatttgcatccaagagatcatcatcatcatgaaggggacattgaatttggtgacaaaggaa

SEQ ID NO: 39479 - DNA, 484 bp, Glycine max
  Clone ID: PAT_MRT3847_135649C.1
agaaggtattaactaaaatttattggattttataataattacttcaaaatagtttcgaatactatccattttttaaaattaaactcttaaaagaagcaatacatctcattgggttaaagagggggggaaaacaaacattattttttggaaaatccaataccgggggccggagccaattgttttccccccggggcttttttttgacaacattgaaaagaacaaaagaacaagcgcacacgaacactcgctcataatatcggtactttcttcaatatcactggatacttcaaatgcttcatcagtttccaaatccccggattcttctgaactggcatcctcatagataactggcactggttgacctttatttactttttcataagcaacccctgtgttatgaatgtctacccaacttgacaaatgaacggccgattcaaaaggccaaactcttgattcaatcagctggtacaatgagttcaaaaca

SEQ ID NO: 39480 - DNA, 699 bp, Glycine max
  Clone ID: PAT_MRT3847_13564C.1
ctcatcttacactagatggcattcccttgagagcccattggacccatcactgagggacgcattatacgccaatctaaatgagaaggagcctcagccaattatgcatgagcgcagaagaaggaagatgagatcaaaccacaaacttgtgtttgactatgtcaatgctgcactattggaacttgttggttatgggtcagaaaagtgcttaaagagaagtaagagccactacagggtccaagtccaagagggtgcatcagcagcagcatctcccttattggtggaccacattgtggcccaaatgaaggaattaatagcaagtggggtgaggtgtgagtgggaaaatggtggggccagcaccagcctggtggtagaaaatgttgtcagaaaagaggttgtgcaaatagggtgggttgagcttatggaattggagattgatattttggggaaggagattgaaggggacttgattcaagagcttgtggagaatgcagtggttgatttgacaggcagggcctctgagtccctctctgtcaaatgaacctttctgctttgattcttaaattaaataaatattattgttgttgttgcatttgatcattcacactaccctacatacctaatttattaaattctatgctaccaaataaatttgtagttatttgacattgatgactttgaattttatatacataattacct

SEQ ID NO: 39481 - DNA, 1738 bp, Glycine max
  Clone ID: PAT_MRT3847_135650C.1
ctattgcacacggatctctatagcctaaaccctctttcacatattattctctctctgtcttctttggctagatggaaatgaaaagtatgaagcattaatcacttctcttccctcgtttcagttattgggaaatttttgctgctgtagtctttgctgttttgattcatttccagttcatcattgggagatattagtatttgggagttacggtgtttgctcaaagatgattactaacccttcattgcatgcttcaacattgccaagtgctttatcttcatctctgattactctacatggaagttctgtaaagtgtatgccctgccttccatttagagccctaagaaaaatcaactggataagagctacatctgctgcagatggagggcctattgagtcatcgccagctttgggatcaaaaaatcctcttgcggttgttttggacattcctcgtaccatttggaagaaaacaatgcgtccattaagtgattttgggtttggtggtaggagcatatgggaaggtggggtaggattgtttttagtttcaagtgcggttctatttgcgcttagtttggcctggttgaagggtttccaaatgcgatccaaattcaggaagtacacagcaacatttgagtttgatcaggcttgcggtatttgcactggaactcctgtgaggatcagaggggtgactgtaggtgatgtcattcgtgtgaatccttccttaagaagtattgaagctattgttgagattgaagacgataaaacaatcataccgcgaaattcattggttgaagtaaaccagtcaggtcttcttatggaaactataatcgacattactcctcgtgatcctattccaacaccttcggctggacctcttgaccaagaatgttctaaagaagcactcattgtgtgtgatagagaaaagattaagggtatagaaggagtgagtttggataaattggttgggatatttacccgtcttgggcaagatgtagagaaaattggcattgttaatagctattcgttggctgaacgagctgcttcaattatcaaagaagcgaaaccacttcttataaagatgaaagccatggctgaagatgttcaacctttgttgactgaagtccgtgatagtggcctgttgaaggaagttgagaatttaacccgaagccttacacaagcaactgaggatttgagaagggtacactcatccataatgacccctgagaacactgaactgctccaaaagtccatatatactcttatttttaccctgaagaacattgagaatgttagctcggatattttgggtttccctggcgatgaagctacaagaaagagtttgaaattacttatcaagtccctcagcaggttattgtgaggtcaacagtccaattttagtaggatataatgcaattaggttatttccaatgtgtttcaccaaccacaacattgaaggagtaaatattaccgtgactgtttttttgttgtctctaaggagtggcaatactgatggtttttacattctactgtgatagaaatttgtttacaacgaggtgcagagatgttattgattggggcagatgattgctatgtgcacaaacttattttgctgaaattgttattcatttgtgtagaatggaggtgattcttaatgattgtcagtcacacttcagctaaaatgaccctgacttttgttaattgccattgcaaaacaaacaactaatggaaattgtaatcttcg

SEQ ID NO: 39482 - DNA, 982 bp, Glycine max
  unsure (1)..(982): unsure at all n locations
  Clone ID: PAT_MRT3847_135651C.1
ccacgcgtccgctccttcacaggtctcctcaatctgaaactagcttgacgccgctctgccacggctgagaaaatagcgacgcggaaacacgctcgtcttcacgatccagcgattccgctctccgacgagtctgcgtaaggtgaagaatcacgaggccagccgccggtgaagaatcgcgcgattcgtctggaaatcgcgattcaagctcgattcatctccgttatagagattcaaccacgattcaggaacaaaaacaagacaacttccgattcgtttcagtagcagctagaatcgtatcgaatcgtgcgacacgtatcgtgaaccggcaatttttgctgctgaaatttctgttgttttgattcatttccacttcaacattttggagatattagtatttgggagttacgacgtttggtcaaagatgattacgaacccttcattgcatgcttcaacattgccaagtgctttatcttcatctctggttactctacatggaagttttgtaaattgtatgccctgctttccatttagaccccagagaaaaatcaataggataagagctacatctgctgcagatggagggcctgttgagtcatcgccagcttcgggatcaaagaatcctcttgcggttgttttggacattcctggtaccctttggaagcaaacaatgcgtccattaagtgattttgggtttggtggtaggagcatatgggaaggtgggtagngaggntgtttttagtttcaggtgcagttctatttgcacttagtttggcctggttgaagggtttccaaatgcgatccaaattgaggaagtacacagcaacatttgagtttgatcaggcttgtggtatatgcactggaactcctgtgaggatcagaggtgtgactgttggtgacgtcattggtgtgaatccttccttaagaagtattgaagctattggtgagattgaagatgataaaacaatcataccacggaattcat

SEQ ID NO: 39483 - DNA, 542 bp, Glycine max
  Clone ID: PAT_MRT3847_135652C.1
aataaaccccaagacaatgatcatggggttgaggtgcaagtctctcctgtatatataccttatattttgattccaacaattgatttgaatgaagaagaatcataatgtggacattggcacacttgctttcagtgcggggttactttttgtccaatgtttattttcaataagccccatcaagaagatactgaaatttttttatactgctttggggttattatatatggatgtagaaatcatgctgttgttggataaaagatacttcttaggagagtgatccccctgcgatgacggaggagcatgcaatttcaattgtaattttgaggagttgccatgcttcatgccttacttttttattgtatcttcttcccctctggatcttttagaggcctcgaattttccattaaaaatattgggaattttgctttttgatctcaaacgggtagagagactggagagcctgtgaccgtcaatttttatgtgtacaatggaagcaatttttcatgttaattttgcagttcaattcaacttctaattttgtg

SEQ ID NO: 39484 - DNA, 793 bp, Glycine max
  Clone ID: PAT_MRT3847_135653C.1
ttggggctcgagagcctattccaggactctacgcgagcggagaagtcgccggtggtgttcacggagcaaaccgattaggaggatcctcccttctcggatgcgtcgtctacggtcgtgttgccggtgacgaggctgcctcttaccttctcaagcagctctcttccggtcagatcgcaggagagcgtttgggtcaggtcgccaaccatctcgagactaagattcggattgacccctctaccaacaaggctgtcattgagttcagctgggatggtcagaatcagcaggcttcctcctcttcttcctctgcctcaagcagcggtgtacaggaacgacccgccgctcagactgccccgccgcagcagaccgacagtctggctcaggtgccttacaacgatcaccaagtcaaggggaggaagagctactcgatcgatgaggttgcaaagcacagccccgatgatgacccatgggtcgttgtcgctggacaggtgctccccgttaaggacttcttggaggaccccccaggaggcgcaaaggcaatcctgttgtacaagggcaaggactgcacaaaggcctttgacatgctccacgagcgcgacgtcattcagaagtatgccaaggataccatcatcggaactctccaaaagtagggtgctgtaacctcagggaaacccccatctttttcttatgtcatgtaacgggaaatagtgtgcatattcagctgtagtcttgtcaattttcagcttggtgtactaggtagtcttccttcatatcgctacgacgctatcccattcgt

SEQ ID NO: 39485 - DNA, 423 bp, Glycine max
  unsure (1)..(423): unsure at all n locations
  Clone ID: PAT_MRT3847_135654C.1
cagaatttctgcaacttgattggcctccgggtaagcagggatccaggtgaaacgacctccatcactctcaaattttctgatcatctcaacaagctggaaacatacataactaggagaacacctatgttgaattagtgatatagctaacttcgaatcagattccaccagcgattctgagaaacctcttgattttgcaacttggatgcccagaacaattgcccaaagctcagcttgtgtaacagaacatcnggccatcttaaacacaaaggtcaccactacattgccattattatcccgaagcacacctcctgtgcctgcatttccattcatatcaactgcagcatggcagttcaacttgaatttactgggggggagcttactcagtgccggttaatgctctttccaaccattgagtttttccgc

SEQ ID NO: 39486 - DNA, 264 bp, Glycine max
  Clone ID: PAT_MRT3847_135655C.1
atgagaatggtgaaagacagtaagaatgagagattaactttgcttcttgaagaaacaaataaactactggtaaatttaggagcagctgttcaacgtcaaaaggacaacaaatattcaaatggtattgaacccttggaagattctgaagctgatttactggagtcagatgcttctaagaatggagtttctaaggaatcacctcttgatgaagatatagatttgatagattctgatcataatggtgattctagtgatttacttgaa

SEQ ID NO: 39487 - DNA, 430 bp, Glycine max
  Clone ID: PAT_MRT3847_135656C.1
ctcacgcacgctgccctcagcccggaactcggctcgagagaaaggcttgacggacagagaacccaccttttgttgaattgacaatccatccgctgtgccacgagtagaatggaatgaagaggcggtgagcggtgcttaaccgtctgtaccggacaaacagtatctgcgctatgtctctaaactgttatatggctctctcaattagtgcgcttgacattccactgacagtaggatggggactctggtgatagcatccatctccgatccgcgcgtcgttgatgtgcaggggcctcacactgtctcttgatgacgcagaatctagccttgtcaatacttggctggttgttttctcgcttttggttgtaccgcagaagaaccttagacttccctttggtttcaaacaaaggatgccgagagccccaacccttca

SEQ ID NO: 39488 - DNA, 409 bp, Glycine max
  Clone ID: PAT_MRT3847_135657C.1
ggcacctctttccttccagcttttgcattatccttctgttttaggatatttatagaaataacttgtttctgttgactgtgatgcaccgtgattttgcagctgtcattaatcagtacattgtggattgactctattctggctaacattataataatctgatttttttttatatatttctggatttagagtttgattaattttaatttataattggtaaatcatgtaatcaaatgaattttacttttctgcatatatgtcatccaagtctggaatattgagtgacatgagaatgtcagaatcaggaaccctgcttatattttactttgtcatatagtggcttttaggttgattgcacttctgctgtgaacaacaaaattttttagttatggcaaatcattgatctatcact

SEQ ID NO: 39489 - DNA, 394 bp, Glycine max
  Clone ID: PAT_MRT3847_135658C.1
agacgggtgccaaaaaaagaaaaaaggggacatcagtcagtcattacgtattattcgtctacagtagtgtcaattacgcttctcctctctgtaacatgtacgaatacttataaggtcttcttagaaataaccttcagcgggtaatcagccagccgaatcattatagatccaggttcctacataactcaccacaccgtcaaaaatgtccacttgatttgcaggatctaaaaagtcgtagggcagataggcattttgatcaatacatgggctcggtcctcgatcacgtgatccagattttcatgtgtcacagtagcaacttcaccgtaggaaagatacctcgtagcgaatatatttaaggctccatgttcaccgacgagaacttcttaaaaatcca

SEQ ID NO: 39490 - DNA, 338 bp, Glycine max
  Clone ID: PAT_MRT3847_135659C.1
cttaaaggcacattatttgattggaggcgccaaaaaagcggaacgaaaagtccgttggataaaatgttatacttggatcacactggctcatttactgcaaaggtctccaacatttaatgctccaactcaaactgtatggattgggaatcccccccaaaattaacgatctaaaaaattcgtgctcaaagggcaccatggtggtttgcggttgcttgccaccccagatttccttgggccgctccagttttgcatagaagtgtatggcgcaaatagggattgccttccctgaagcatctttttcaaatcaagaatcttaatgcccagggccaaacgttccc

SEQ ID NO: 39491 - DNA, 1740 bp, Glycine max
  Clone ID: PAT_MRT3847_13565C.1
gaaacaaagaaaaatgtatttttttcttcttcttatacttgagactagagaaaataccagacaatcacaaattacgatcacacctcaggttaacaaaaactgattttataaggtaaaacatcaatttaagctaacacaaagctgaccaaaaataagacctactcaattccaaaaagtatacaaattttggacctagaatttattttttctggaaggcaaaagcatatatagaaaaaaatttggaccaagaaaataaacagcacaggcaaatagattttaaagaaaatgattcatggacacaaaataagatagtttctacttgggcaggctatgggacagcatctgcaatgaactttcactcatcatcttcatcactatcagcagcagagttgatagccgccacgcgtgcaatcaacttagccttcctttcctcataagtcagcttcttcatgttgtacctcttgtgctccttcgggggctccttatcagatttcctgagagtaggatcagcacggatggcagcatgaaccttcttgtaaagtgcctcaataccatcagcctctatcccacgtttgatgtattcgctgaagtgtgactggtatttctctggttcatcttctgccaagatcttcatataggcagcaacatgtccaccaaaaacatatttgcgatgaacctcagcatcaagctccttcttctccttatcaaacccagcaaacctcttgtcgctgtgaggaatatccaaacccccatccagagctcccttaagggcaccaaagacgcgatttcctgttgtagtcctaacaagaccaacatcaaggagtgcacggaatggcctcctgctctcggcaggttccactgaataatcctctccagtagcctcaacatttccttcatactcctcatccatttcaagtgttttgaggactcttcgggccaacaggagaccagtgcaataagctgctgcataatttgtaagtcctacttcaagaccatatcgtggcagctcatgtgaatatgctgtagcaagaactaaatcgccggcaatgctagcagatattatttgtgcaacaatgtccttgttgctctagtaaccaggtcaaggtttacacacacagaaaaagcattgccagataaaacatcttctcaatcttcatatgctatgcacgagccataacaaatgtaaactacatagaatgtttattcagaagaacgtttgagacattgattttaaatcaatggaagttaggttaaaattgattttcaagaaaagtgatagtgatttatttttggatgctttttatactgaaaccaaagcagaaactacttttatcacttctagtcgaatctaggttgaggcaaaatcatttttacctaccaatagccaattttattaaatcaagtttaactacagtcaaatcaattctcattattcacactcccaaatcatttcttcatgcctgaattaagctaattaagatatcgataagaaaaggatacaaagcgaaccacaaatcggtatttcggagtgttatatttgttcttgtcctgattaatcaaccgaatcctggcacggtaatcggtttttccctctcttcttctcttgaacttgacttgatatctcttgaagtaggcttttgatttctgagccttgacgtacaccattgctgctgtgaaacctcgacctcttccccaaaagtgacggaaaggagtgagagtaaattagggttaggatttatt

SEQ ID NO: 39492 - DNA, 284 bp, Glycine max
  Clone ID: PAT_MRT3847_135660C.1
gttcttctcttcgctgggaatgctaatgggcaccatgatgattgtacagactcatttgactgacgaacttcggggacatttagcttacactgcacgaatgtgaaccagatacagtggcatagccactgcggtacgatcatgaaaagcatcggcccaaactttcttgaatttcagaaaatgtaatcctcataggactaccattctaagtcactcatgaacgaattaactgaagtgttgcttaatataggctctataggagtgtgatagagatgatgcctgtgcac

SEQ ID NO: 39493 - DNA, 417 bp, Glycine max
  Clone ID: PAT_MRT3847_135661C.1
gggtcgacccacgcgtccgaaactgctacgaggaggtcaaggaccgctgcaccctggcagagaagctggggggcagtgccgtcatctccctggagggcaagcctttgtgagccccttctggccccctgcctggagcatctggcagccccacacctgcccttgggggttgcaggctgcccccttcctgccagaccggaggggctggggggatcccagcagggggagggcaatcccttcaccccagttgccaaacagaccccccaccccctggattttccttctccctccatcccttgacggttctggccttcacaaactgcttttgatcttttgattcctcttgggctgaatcagaccaagttccccccaagcatcccagttgtgggggagcctgtattttttttaacagcatcccca

SEQ ID NO: 39494 - DNA, 506 bp, Glycine max
  Clone ID: PAT_MRT3847_135662C.1
gcgagaagacgacagaagggccagcacgaaggtaatgtataaaccccagatgctgaacttgctcagagtgtcaccaataatgccctctaaaaagcagcaaggagattggtattagtgaaggtattgataaaatctctggggaaataatcttctgatcgacttctgcctctaaaaagcagcaaggagattggtattagtgaaggtattgataaaatctctggggaaataatcttctgatcgacttctgcctctaaaaagcagcaataagtgtgtgttggacaaaagtttgcaaaattgattttgagttgaagtaatttatgtttaaatgtttttattctgaaaagtaacttaccagtaaaactgactgcaaaaatttatcgaacacaaaatttacttatagttagtttaacttaatcaattttagattcaaaatcaatttatccaacaaatccaaacatataccttggctgatacttcaacatctaaatccaaagtcacactaaata

SEQ ID NO: 39495 - DNA, 301 bp, Glycine max
  unsure (1)..(301): unsure at all n locations
  Clone ID: PAT_MRT3847_135663C.1
tcgagggaaaccaagnctcagaagtgaggtgcaaaatattaatgtggtatggttcggtgcaggaaatatagcaaccttcgacagtggcagagttgatgctggatgcacccatagcaagttgtggttgtgttgcattcagctgtgttgcttaatagggcatcacctttgccagcagatttcaagttagagacatactatgtgtttctgatgcttcccattaagcgagggatgctcgttgtattaagcggagatgacattttttcattttcttgatccttaattctgctctcgcttctttcta

SEQ ID NO: 39496 - DNA, 282 bp, Glycine max
  unsure (1)..(282): unsure at all n locations
  Clone ID: PAT_MRT3847_135664C.1
ctaaaccccaaccaccaattttcttttctcttctccactttcccgagaaaattcaaatgggcctcgggacttcgccttgcgattncagatccccatctcctccacaccgnctccctcctcccatcctnncttctccaccaccctcccatccaaccctcgccgcngcacntctccctccnaccgcctcctctccacggngcgccgcaccccgccgcgctcgaagaaatcncgttgacatcagcgcacgcgcgggccagctccagangcggcgctctggancta

SEQ ID NO: 39497 - DNA, 143 bp, Glycine max
  Clone ID: PAT_MRT3847_135665C.1
gctgctagaggaggatagacacttgttcttactgtgccataccgttatgatgtggaatgcttatctttgtcgactatagacacactgaatatccgctgctgcggtgataacgatagacgctccagctcctgcacatccgctaa

SEQ ID NO: 39498 - DNA, 725 bp, Glycine max
  unsure (1)..(725): unsure at all n locations
  Clone ID: PAT_MRT3847_135666C.1
agttattgtgcatgttttttaattgattttttttaagttagtccactcagtatctgtaagcagataaagtaatgaaaatgtgagtgtgtgtatccttttacctttaatttttttttctttttaaagtcaattcttcagtgtctttaaacaaataatgaaatatgctgagaagtgcatgatggttcatgtaacctctcaagaggatttttagttgttcaaaggattaagtatttgtgcttggttttggttccataggagaataaaatgttataattcaaaagtatcttccattttgaaggtatcaaagtggagcatgatggtaatttatgcatgtatatttttctattctcaatggttgactattttccaaggtggtatttcaagtgtttacaccatttgccagcaagcaaccaatatatattaaattaggggctttgcatgcaaattttacccaagcaaaggtgtccttgggtagctttcatgttgctttgcctacttaaccaagggtcttcttggtcaagttggtagaatgtggtagcgtagaagatgaaggatggagcaaaaagtttcaactgaagttatgactntgaagtggaaaagaatgcattctcatttcggtttccatcttcttgcattttctgttataccatnngctgtgntgaaagtgatttttcatccccaaaaatttgtagcttcaacacttttttacctaagtcaggttaagt

SEQ ID NO: 39499 - DNA, 520 bp, Glycine max
  Clone ID: PAT_MRT3847_135667C.1
ccacgcgtccgtgggagtgaaggggctccattaaattaaagaaaatataaatattcgtatgattctccagatctgtttatccaccttaggttgaattcatcgccgagcatcagatccgaaatgtcgatcggagatgcttttctgtgcttactgttcatcgcaacttgttggatttccgctgcttctgctgattccatctatggctgcggtggatttgtcgaggcgagctcatcgttggtgaagtcgaggaaacaaactgatgccaaattggactattccgatgtcacggttgagcttcaaactgtggatggactggtaaaggatagaacacaatgtgctcccaatggatactattttattccagtatatgacaagggttcctttgtaattaaaattaatggacctccaggatggacatgggatccagaaaaggttcctgtggtggttgacaattatggttgcaatggcaatgaagatataaactttccgtttcacagggttcactatatctggtagagtt

SEQ ID NO: 39500 - DNA, 637 bp, Glycine max
  Clone ID: PAT_MRT3847_135668C.1
cacgcgtccgcgcggtttggtgcaaccccgcccgcgttggcgaaaaattcaaataagcagaacgaagaacgaagaacatggatttggttgaagacgatcttcatcgccttcgctccaatctttcttctctgctccttcaggtgcgtgcgtactctcactttccctttctttcataaaatgcaaaaaatcctttcatttttcactcggttgaagacgagggagcaaatgcagtcattgattatttattagccctacatttctaacctaacgtatgaaaaagactaataatgagaaaccagtgttagaattaatgaattcgcagattgacgaggttgtcgtgcaagccattgaagtgaattacaagaacaacaaaaccataagcaaagagggcaaaacgcaaatcgagtctttctcccgtgtcctttctgacatgctctcttctttgaagccatggcttcccaaaattcaaaatgcccttaaccctcaagacatagtttctgacgatgaaaccagagaatgcgaccgtcccaaacccgaagagacaaccttaaatttagtatcttcttcaccccttgtgtcatggcgtgccaactgcactgtcaaaagagggagacaggatgttcatgctgacacctct

SEQ ID NO: 39501 - DNA, 406 bp, Glycine max
  Clone ID: PAT_MRT3847_135669C.1
tttttatcgctatatattcaatgatcatataaatgtttgttcaatgaaataagtgagctattactaattagtttagtatactcagtttatgaagtgatgatctatacaagtatttctcatcctaatgaaagaaaaattaaattcttggggggttgggtcaacaaatgtctataggatgtgtcttcacaataataacatatccaagattaagctaaaactctgcgggttctttaacttgttgatccaatgtttgtagtgtactgtatattatgcttctttgggggtgggaacagtctccaaccacaaaaatggtatttgttctctcaacttcaatccagctgcattcagctggttttttcaaatctttggtcctcatcattcttctaactttcattaccccatccaa

SEQ ID NO: 39502 - DNA, 1359 bp, Glycine max
  Clone ID: PAT_MRT3847_13566C.1
ccacgcgtccgcggacgcgtgggttgggagaagaggtcgagtttcacagcagcaatggtgtacgtcaaggctcagaaatcaaaagcctacttcaagagatatcaagtcaagttcaagagaagaagagagggaaaaaccgattaccgtgccaggattcggttgattaatcaggacaagaacaaatataacactccgaaataccgatttgttgttcgctttagcaacaaggacattgttgcacaaataatatctgctagcattgctggcgatattgttcttgctgcagcatatgcacatgagctgccacgatatggtcttgaagtagggcttacaaattatgctgcagcttattgcactggtctcctgttggcccgaagagtcctcaaaacacttgaaatggatgaggagtatgaaggaaatgttgaggctactggagaggattattccgtggaacctgctgagagcaggaggccattccgtgctctccttgatgttggtcttattaggactacaaccggtaaccgtgtgtttggtgcccttaagggagctctggatggggggttggatattcctcacagtgacaagaggtttgctgggtttgataaggagaagaaggagcttgatgcagaggttcatcggaaatatgtttttggtggacatgttgctgcctatatgaagatcttggcggaagatgaaccagagaaataccagtcacacttcagtgaatacatcaagcgtgggatagaagctgatggtattgaggcactgtataaaaatgttcatgctgccatccgggctgatcctactctcaagaaatctgataagcagaccccgaaggagcacaagaggtaaaaatgagttttgacttgaactagaataataatagatccttgaaatgtatctattttgtcatttgatttccagcaatgatttggacctgttgctggcatggccttcttttcagctgtttatgtgctatattgggtgtgaccatatgtttttgtttgacttttagaagttttggattggtaacgtagcttttggtatatctacagaaaggagaatgttcctgagagtatctgcctctttctgcaggtacaacttaaagaagctgacatatgaggagaggaaggctaagttgatttcacgtgtggcagctctcaactctgctgctgataatgatgaagatgatgagtgaaagttcattgcagatgccttctcatggctacactagtagaaactatcttatttggtatctacagaatcattttcttgaaaatttatttgcctgcctgtttatttctaggcccaaaatttggatactttttttggagttgagtaagccttaattttggtcta

SEQ ID NO: 39503 - DNA, 1078 bp, Glycine max
  Clone ID: PAT_MRT3847_135670C.1
cggccgctcaagccggcgggcgggagaataattattccgctatttgaagacctttggcagcaaccttgttgtcttgtctctttgcaactgcatccgttgtttacaatgaaggctactctgaagggaaagtacgacgtcgacaaaaacggcgctgcctttgccaacatcgccgtcaacgccggcgacgtcaagttccgagcctccgtaacggaagccactttcattaacggccccagcctcaccggcttggccctcgccgtcgagaaacccggttccttcatcgtcgactacaacgttcccaaaaaggactttcggtttcagtttatgaacacggttagggttggggagaggccgttgaacttgacctacgcgcacagcaggggcgacaacaggactgtcttggatggaacctttgtgtatgattctgcgaacaaggtttctgccaattacgcgctcgactcagggaactgcaagcttaagtacacctatgtgcacaaggggttgaccacgtttgagcccgcctatgacgtggccaagaacacgtgggacttcgccgtctcgcggagggtctacggcggcgacgacacgttgagggcctcctaccagacatccagcagggttctgggagttgagtggtcgcggaatcccaaacacactgctggcttcaagattgtagcatctgttaacttggccgaggaatttaaagctcccaaacttgttgctgagaccacatggaattttgagatgtagattggttccaatatattgttcaattgcttgataggtttactgtcaagttttgaaggctttttggtcaccattgggcatatttttgcctttgaatattatattcttggaagtgttttgatcatgttatgagcaactctggcattaattgtccaccaacaacttcccgtttgattttaaactatttcatattcacattacaaaaacctgtaattgcttgcctataaaatgtgctcaattattctcataaaagttattctatatagcttttctgttcgatctttttccatgcactcgagaatggtttgaattttgaaggatatcttgttct

SEQ ID NO: 39504 - DNA, 606 bp, Glycine max
  Clone ID: PAT_MRT3847_135671C.1
cggaattcccgggtcgaccccgcgtccggaaagatagagtgccacatcatcaagcctaatcactgccatgtccttgtcacgccatcacgtgcttccccttctccccttttccttttcttcccctgcatcatcactgttaagggatttccattgttgttttccattttattcttcttcttctcatggttcaaggttttagtaacccagatttcaattctcttttggccttcaaaaccacttcagacacatcccaaaagttcacatcatggaacattaacagcactaacccattttcttagagcggcatgtcgtgcattcacgactgagtctcatgacttgtcctcaaaaacctcaacccatcgcttcaccattggtaccaccaaacaacaacccaacaaccactatatcatcttcatcaagttcaatgctgaaaacaccaacataaccatcaacaacaagtaataaaagccacaaaaagggtggttcgaagataagtctagtggcacttatagctgttataatgggtgatgttttggttcttacaatagtgtcattgcttttgtattgctacttctagaggaactataaggtgaaaaaaggaaaaag

SEQ ID NO: 39505 - DNA, 471 bp, Glycine max
  Clone ID: PAT_MRT3847_135672C.1
aaccccaaaaataaccccatttttttccttttttttaaaaaaaaaccctcggccccaaaaatttgggttcgggaataccaaatttccctccccgaattcgggaaacaagaccaaaattggtccttagggattaaaaaggcgtttccccccaggggggggggaaaaaaaccccccttttttccttttttaaaaggaaaggggccctggggcccccccggcccttgggggtgggggggccccaccggaaaatcatcagcccggacccccatagaaaaaggaattttaggggcaagggggaccccccccttttttttatttcccggggtgggggtttttttcacccccatcacccgtggccccaaaaaaacagccccaaaaaagtccggcccctttttgcccggaggggacccctcccagggcatgttgccctcggggggggaaaacctccccccccggaaaagggggggggcc

SEQ ID NO: 39506 - DNA, 417 bp, Glycine max
  Clone ID: PAT_MRT3847_135673C.1
ccacgcgtccggtcgctctcacactcatcagtatgctcaccgcattcccctctggccactagaaccaaatcctgtctctcccttgatctggtgcttcactctgcgcttcacaatatgacggatgatcgggacgctctgtttgacacgagtggtcgacctggtcctcgactgtgtggtcccttgcattgacgaccccaaggtccgcgacgcctgcttacaagtctgtcgatgctgtatcgagctcgactccctcactcccatgcacgtcaccatacagctctgctactccaacacccctgggcgcctccaactgtcgtttcctgacctatgattccgctttgctcagcggcaagcccagagcagaagtcctcaactggataccttaccgacggggaggccacctcaccgcatgaggga

SEQ ID NO: 39507 - DNA, 301 bp, Glycine max
  Clone ID: PAT_MRT3847_135674C.1
ctaaaaaaagggggggatttttaaaggaactttccctttcccacccacaaacgaaagaccgaacaagcaagacgagcgagagaagccaacgccctccaagaaaaaagggggggacaaaagaacagggccaaagaaccccaaaaagacacccaaccaggggtacccggggggggcccaggggtcacccaggcacgggaaccaaaccaaggtgccccgaaaggcttacataaggggggcgggccaccgggcaaaaggggggccacaaaaaggaccaaaaagggacctggccagaacacgaggg

SEQ ID NO: 39508 - DNA, 630 bp, Glycine max
  Clone ID: PAT_MRT3847_135675C.1
ggctcgagaacatgtttaccatgtggcagggagcaaaactaaagcaaaggaattggagcttttgttagcaatattgccagacaataatgggtctctctatggtgatctcaagcgaatttgtgaaactgaccttggcttaatttcacaatggctggctgacaaagcatgtcttcaaaatcactaaacagtacctggctaatgtgtctctgaagatcaatgtgaagatgggaggtagaaacactgtacttcttgatgctgtaagctgcagaataccattggttagtgacataccaaccataatttttggagcagatgtaacccacccagaaaatggagaagactcgagcccttcaatagcagctgtagtagcatcccaggactggcccgaagtgacaaaatatgccggtttggtatgcgcccaagctcataggcaggaacttatacaagatttgtacaaaacttggcaagaccctgttcgtggcacagttagtggtggcatgatccgagatttactggtttcctttagaaaggcaacaggacaaaagccactacgaattatattttacagggaccgtgtaagtgaagggcaattttaccaagttttactttatgagttggatgcgattcgga

SEQ ID NO: 39509 - DNA, 311 bp, Glycine max
  Clone ID: PAT_MRT3847_135676C.1
accacacgtccgcataaatcctgaaaatcaggcacttttggttagtatgaagtagttaatcttgcataccaatgattctatgctaattgacagggatcttaaatacaattttattctatattcctcttctatataaataattagctacagtacatcattatgccataaacaatttattgacgaagaattcattctgtactttgcattttatagattaacttaactttcagttccagtaggacaaaaccgtgtgtcgtttgtaatctgtgatctaacttcgtgtgctttctagggtcatgagtcagggcttt

SEQ ID NO: 39510 - DNA, 875 bp, Glycine max
  Clone ID: PAT_MRT3847_135677C.1
aaataaattgagtgtgctaatttcaaaatcgcttcttaaaatactaaaacagcaaacaatgttcaaatgtatgcagatagaaaataataacaaacaacctataggaagtgttggatagtaattttttatatcactgcaccaacgagactggaagacaagatttagaacagtcaatgacccccaaaagggactcaaatagtgatctatctaccttttccgcttcctctgcctcaactcaggaaatttaagagggacaggaagtgtggcataaaatatgtttttttggcgggaaattttgcaacccaaatgctcatagagttgtctcacgggcagtatgttcatgctcagatcctttgcaatatctgggtagccagttcggaactcatcaaaaaaaagcgtaggccccaagacttaccaaatgagaagactaatcttttcagggggcagcctttttgattcaaaaacagcaaacatatttgaaaacttatgacgcaaaatgttggggattttatggccctttgccgacaaaacatcaaaggaatgctgatctttgaactttataagatgattgatgtatgagaatatgcaggaaagctgcttcttttctgactcatccttaattttcctcaatctttctatcctgttgcgaacaaaagttggataagcactgaagtctgcttcttctccccgttgcaaattattataaatgtcttcaagataatcccattctcccttaaggttgattttgttgatattagagggtttgggtttactacttgtgcttaatttccacttattccccgttgctcctctattcctttgggatttagctacttattccatatttttccctaccttgtccctcgagccgaatt

SEQ ID NO: 39511 - DNA, 486 bp, Glycine max
  Clone ID: PAT_MRT3847_135678C.1
aagcaaataaaaaagttaaatacctctttagggaaataaagggtccaactttttccagccaacacgaaaagacggataatcagcagcaaaacattgttttctgatggaaaagaaaaaaaggaaaaaaaggaaaaaaaaatttttggaaaaaaataaaaggaaaaataaaggggccctttcacagggatagtccaaccctgacccagccactcatttttttggaaggaaattgggggggatttacagggcaaaacatcctccaggtggacaactttcctcttatgcggctttggctgggcgtttttcttcccccattcgggctttgatgaacgagtaaagggcccccccagcattggcaagggctgtcccaataccagttggggggctattcttgttcccgaagactttattagaaaatccaaggacaaatacccgtttaagtccgtccccaccggcttgagggaaaggagccactctctccagggg

SEQ ID NO: 39512 - DNA, 474 bp, Glycine max
  Clone ID: PAT_MRT3847_135679C.1
tattttttttttgttggttctttaaggccaaccgatgttgactaaaaagcttcccttacgaattgttgaactgttggccactaattcaaacccaagaagaataaaccggaccttgggggcacctaacgctagtgcacacacttctgctgggcagaaatttatccatacggaaaaacacctgtgcctgtaaccatggttggggactgactctgtgaacagcccttggaccgttgggagccttcttctaaaacgatggggctgatcataacccgcatttgcctttggataagaggcgcttccgggccataccgaccttccctttggaggctgggaagtacccgtctcacgcctaatgctactcaaatgtaagtgagtgggcgacgttctaaaaaaccatgaatggtaaaaacccgtttgtgactcgggcgctgtgttaatacggtgagactgtgctcgccccggggcgagccaaat

SEQ ID NO: 39513 - DNA, 362 bp, Glycine max
  Clone ID: PAT_MRT3847_13567C.1
tccgaaccagaatttgggtttagtcgatggtgcttgccatggtggatgccacctgcggcgatgggtgtgaactttgacgacgacattaagatccgctccaacggcgatggcgctgttcgactgaggcagagagagtcaaagagatagtcgaacattgttcgagttctagatcgacgacgccggtggtccgagcctccgaggtcgacggcgccggagtttggacaacagagggctaactcgatgatgtctactccaatatcaatgatatagagtcctgggaaatggagggtttttacttataaaaaaaccacatattgaaagttttatttcgctaatatcttggttcagtgaagattctaata

SEQ ID NO: 39514 - DNA, 251 bp, Glycine max
  Clone ID: PAT_MRT3847_135680C.1
tcgtgtacgcgttggttttaatgtggagattttttgatggagatctcgtctttgaagtttttatgatgacttcttcctacattaaaagtacagtttttttttatataaacatttggaaaatatgtttgatgacaccatcaattttgaggccttttcccacatgctggtgctttttggagagattcatgataaagttgtatagaaatctttacaagaggaatttcttacatcttggtcaattctggttgcgt

SEQ ID NO: 39515 - DNA, 895 bp, Glycine max
  Clone ID: PAT_MRT3847_135681C.1
gaaaacaaaacaaatgtgggcagatatgcttaagtggaggcaagaatttggtgctgacactatcatggaggattttgaattcaatgaactagaggaagttctaaaatactacccacaagggcatcatgggattgacaaggatggccggcctgtttacattgaaaagttgggtcaggtggactctattaagctgatgcaagtaacaacaatggaacgctatctcaagtaccatgtaagagagtttgagaggaccttcgctgttaagttgcctgcgtgttccatctcagcaaagaagcacattgaccaaagtacaactcttttggatgtgcaaggagtgggtcttaaaagtttgaacaaagctgcaagggatctcctccagaggcttcagaaaattgacggtgacaactaccctgagtcactgaaccgtatgttcatcatcaatgctggttctggatttaggctcttgtggaactccattaagtcattcctagatcccaaggccacctcaaaaatccatgtcctaggtaataaataccagaggaagttgcttgaaatcattgatgccagtgaacttccagagttcttgggtggtacttgtacttgtgcagataaaggtggttgtatgctttctgacaagggtccatggaatgacccagatatcttgaagatggttcacaatggcgagggcaaatgcaagagaaaaaccttatctgggattgaggagaaaacaatcatagaagatggtacagcacatcaaaatgtaggaaacaaagaatcatttccagagacatacgatgttgatgaacaatgtttatctccaaaaaagcaatgtgctgtgtataaatatgacgcatttgtccctgtgctgggcaagccagtcgattcatcttggaat

SEQ ID NO: 39516 - DNA, 226 bp, Glycine max
  Clone ID: PAT_MRT3847_135682C.1
gccaatcaaaatcatcgccgtcggaaggcctgaagaggccactcaccccgacacgtggaaggcgggtgtggatgacttaatttaacccttaattcttcggttcgccggttgaggctccggcatcgcctacaacatgcttcccgacagcggcgcgtgcaccgctgtaggactaatctccgcctccatggtccgtacatttgatctatgcgtagcgttgtacgtcggc

SEQ ID NO: 39517 - DNA, 420 bp, Glycine max
  Clone ID: PAT_MRT3847_135683C.1
gggatcactcaatgggaggaatgccaagagcctctccaactgttttgtcagacactatgtctgtgggtacgcacaggctttcgaagcagggcgctattacgaaacgtatgacagctattgaggaaatggcaggattggaccttctctgcagagacataaatggaacattgaccctgaacaagctcagtgttaacaaaaacctgattgaagttcttgccaacggtggcgacaaagactaagtgatgcttcttgcacctagggctgtgacgactgagaatcaagatacgatacatactgcaatagggagcatgcttgctgatccacctgacgcacgagctggtatcagggacgtccactgacttccattcaatactctgctcaataggaccgttctcacatacccagaatcagatggaaatc

SEQ ID NO: 39518 - DNA, 461 bp, Glycine max
  Clone ID: PAT_MRT3847_135684C.1
attctaatgatatggttgcttgctgggattctggggtatgaagcctttgatagaatcattgatggtcctaaaaatgaggatggatttttaacggttctaggttctggcttcgagcttgtggttactatcatcatgacattgttattgtgtcatgatcattggcgcagacatgctggtcacagtcacagacacggacatgactggctatggccacagtcatggatttacaatgtctacccattgtgatgcataccataccagagatcattaccatcacacacaccattttgatgaataccatgcaagcgaggcgcaccatcatactgaggaagatcacttgcaccatcatggtcacagagaggtgactgaactgcatttgggtgagtaagatggcggcactaagatgaatatgcatggaacataaatgtacagggggcttatctgcatgttcttggggactc

SEQ ID NO: 39519 - DNA, 226 bp, Glycine max
  Clone ID: PAT_MRT3847_135685C.1
ttaagctgaggtcttcctacttttgtcccttttagttctattcgccaagacgccaaccaatacttgaccccttagatggaaatacaacttattggatctgtctctctctctctctcccctcttttatattggagatctcttgaacatgagaaatttttgggtaaacctgaaccatagtggggttttcagtgaataccatgccaccttactttggtggcaggcagtg

SEQ ID NO: 39520 - DNA, 331 bp, Glycine max
  Clone ID: PAT_MRT3847_135686C.1
gggtagaatggcttatttaaagggagggaaaaccaaccttaacctaaactattggtccttttggggttaccaaccaaaaggtaccggccaaattccataacttatggtcacctggaatggattcgggaaaatttttttccatttttgggaaatgcgccggaattaaaaggtccaatttagagatcccatgggagaccaccggccaagggcactggaccggccccattggcctggtccttacaaccaaatccttttaaccacaggtctggccaactttttttggaccttccttgggggttcaatccgatttaagggtttgaagaccggccta

SEQ ID NO: 39521 - DNA, 224 bp, Glycine max
  unsure (1)..(224): unsure at all n locations
  Clone ID: PAT_MRT3847_135687C.1
cgctcgagagcattgatagtgacgtctattgctacctgaccgtgagtgtgtgatntaatggacgaactattaaacatacctccaaattcactgacgtcaagccccataatgggggcgaccatcttgacaatggaggcacatataatattttgataaacataaaattattaaggggaattaaaactatccgcacaagaaatgaaacatgtcctacaaatgtggag

SEQ ID NO: 39522 - DNA, 236 bp, Glycine max
  unsure (1)..(236): unsure at all n locations
  Clone ID: PAT_MRT3847_135688C.1
aaaagagaaaaatcttgaagagaggaacacattgctagaattagaacctgctgcagcccaggtgcttcatgaacttgtgtctttggttcacaacagtgttagttccacccaggatgggcaatcactatcaacttctataaatgattttttatttgctgggaatgataaacatgagaaaatagngacttctgttttgaaagatgatccacttgctaaaattctctgggacgttgaac

SEQ ID NO: 39523 - DNA, 263 bp, Glycine max
  Clone ID: PAT_MRT3847_135689C.1
ctcactcatgcgctaccgacagtgctggacttattggaaggcatttatgagagggatagtgagagggattgtctgaagcagaggatgagcccaaaccacagctctgaccacatggttaagctgattgcctatgctcctgacaacactgcctatatcactgtctatgatatcgatgagctcactggtgtgctcactaatgtgctctcgattgggatcacactcagtatcacactcggtgataaccctgccactgacactatcac

SEQ ID NO: 39524 - DNA, 425 bp, Glycine max
  Clone ID: PAT_MRT3847_13568C.1
ataactaggaaaatggacttgttacggtttatttctccttggaatcatagggaaagtacacccaaagaaagccacttggtggttactttggtatcaatcaatgacagagataactttttacgagcccctatttcagaagatgtatcattcaatttagaacaggctcacactcaattagaactgcatacgagctatattgcaccaactacttcaatttctagtgaagagggccctcacaactattggactcatgacatggtgcttgccatcaggccatatcagatttccaaacgcgcagttattagtggcctttccttgcatggccttgaaggataaattaaagctcttctcgtgccccacatttttgaacttcaagatgctgggcttaacacaaacggcgattgcatacgggttttggacatgag

SEQ ID NO: 39525 - DNA, 347 bp, Glycine max
  Clone ID: PAT_MRT3847_135690C.1
gcaaaattggaccctaaaattattttatccagagtaacaatttgcaaaggggggctagttttcaattttcaaaccaatggccaatttgaaaacaggcgtgcaattcatgaaagccaaaatttatttagcctaaacccaaaaaccttaacaaacattattttcctaattccttccaaattctaactaggccacttaattaacctcctaaattttggggccagcaccattaccaccagcagggggagcattattatcgacgttaccaccagtaccaggttcgccttgggacattttcgctataatgggattgcctttgccctcaagcttcttcattttggcttcaaatt

SEQ ID NO: 39526 - DNA, 712 bp, Glycine max
  unsure (1)..(712): unsure at all n locations
  Clone ID: PAT_MRT3847_135691C.1
cccgcgtccggagattttgaaaccagacttcttgagattcatggatgaattctacatcaatgaatccttcccaaaaggaactaatgcttcctttatagccctcattccaaagattaatgaacctcaatctttcaatgattatagacccatctccctcatagggtgtgtctataaaattgtggcaaaagtcttggcaaagaggctggctgctgttttaccaaaccttatagatgaaaggcaaacggcttttatgaaggggagacacattctacatggtgtcttaattgccaatgaggctatagctgaggccaaatctagaagtaaaccttgcatggtcttcaaagcggactttgagaaggcttatgactcggtttcttggggctttcttgactacatgctcatgaggatgggtttttgtgaaaggtggaggaaatggataaatggttatctttctactgcaaccatatcattttagttaatgggagtccatctaaggagtttacccctaagagaggtctaggcaaggtgatccccttgcacctttcctcttcaatattgtagcggaaggtcttacaggtttgatgaggtcagcctgtgtccaagaatctgtttagcagctaccttgngggggatctttaaaggaangagtgaacatnctccaatatgctgatgataccctgttttttgggagatgcaactaagcataatgtta

SEQ ID NO: 39527 - DNA, 250 bp, Glycine max
  Clone ID: PAT_MRT3847_135692C.1
cattggtccttacagactcatcagtcatcaccatggccaagctagttcattcactttagtttctgattttcagtggctgctgcttcgctttcagttccaaagagcagcctcaggaaaacgagtgccagatccaaaaactcaatgccctcaaaccggataaacgtatagagtcagaaggagggctcattgcgacatgggaccctaacaaaaagacattccagtgtgccgatgatgccctctatcactgcac

SEQ ID NO: 39528 - DNA, 803 bp, Glycine max
  unsure (1)..(803): unsure at all n locations
  Clone ID: PAT_MRT3847_135693C.1
aatgcatcagtttcaggntcctcaataccatgcccccatcgcaatttgccacatgcaatgatacatcatttcaaatattttttagacttaattcaatgtttgacacaaacaaattagtagttttcttataacaaaatgtgaataatagataaccaagctcaaagcaccaacaccatttacaaaatgaacagacacagttattggcccatttggttgagtaaacatagaagcaggatctgcagttgccatgtacaacaacatacttcactgccaagatctttttatgggtgtgcgaattactcaacaattgaacatgtggtctagcatttgtgtctttataggaaggaataaagatattcaagccaacaaagcaaagccagaaacccaaggctcaagacttttgaaagaaaaggttattatgattatgttgtcagtcttgcagcaaagataaagaaatggctttcacatctttgaatgaccccccatcttgttactaggctcagtcccagtttcagctacccttgaacgctgctgttcaaatttctttttagctctataaaggatattatgcacttcttcaaagtgaggatttgttgcagttctcgtatcctcaatccactgaagaactttcttgtatggggataatattcgactgcgatccttctcgtccaaaacctcaagttgcatgagttcacaaaccatgctgagatctgctatagatggttgagagacaccaagcaggaagtgtccatctccattgagccaaatatcctctagtttcgataaagaagataatagaactt

SEQ ID NO: 39529 - DNA, 747 bp, Glycine max
  Clone ID: PAT_MRT3847_135694C.1
gaaacaggggaatactgctgtttatttgctgtatgcacatgctaggatctgttccattatcaggaaatctggtaaagacatagaagaagtaaagagaaacgggaaaatagtgttggatcatgaagatgaacgtgcattggggcttcatttgctacaatttcctgaggtttatgaggaggcatgcacctatttgttgcccaatttcttgtgtgaatacctttacaatttggcagaaatctttacaaaaaaattttatgctaattgtcaggttgtggggtcgcctgaggaaactagtagactcttgctatgtgaagcgacggtgactgtgatgagacactgcttttatctccttggaattgaacctgtatacaggctatgacatataagagcttcatatgcaaattatttatcagatttttttgggatatacaagtataggaaacttcacaatgaaaattgttcaggcaaattcgatcacctcttcccctcttccattttgttaattgtatttgagttgtaacttttacgaaggaaagtaaataatttatagcaatattgttgacaaggtcccatgaaatttatttagatgagttatattttgctttacttgtgttccaagagaaattactagaaaatggacgttatggagtccattgtacatttgtactaaagaaaaatgcaactgtacctgttcttttgtactcttaatctcaaaagtaacaggactctttttattgtttgggtttt

SEQ ID NO: 39530 - DNA, 233 bp, Glycine max
  Clone ID: PAT_MRT3847_135695C.1
gagtcagcctcaatttgcattattgaggaaacaaattatacacactttgtgtcacaagtgctcatattgcaaacatcacaaatctacactctaatataactctaacacaagttctaaatagcagcagcatcatttaagaaaggaaccctttgctcttcaaatcctctacagcatccttaataatcttctccattggaatgaattgcaaacccaaatccatcagtttctttgct

SEQ ID NO: 39531 - DNA, 321 bp, Glycine max
  Clone ID: PAT_MRT3847_135696C.1
tgtgtggttttttttgttttttttttttttctgggaaaagcgagtaacattaaggtgggttcgggtacacaagataattcacattatctgagggacttcaccaaacacaaatctaaaaactctcaaaaggcatttcggtttttgacgctcactttccgggggcgaagtgggggcgataggcccaagcggtggtgttgacaggggcagcaaggggatcggggaggggctccaatggaccctttccggaacagtgggctggacaaaagagccaaacataggaagcatgggcaagggggcggggcttgggttccttcaccttag

SEQ ID NO: 39532 - DNA, 1199 bp, Glycine max
  Clone ID: PAT_MRT3847_135697C.1
ctcaagtttctctggcaagatgaagacctttcagttagcaaatgagtcttcttctctactttccttatctcctaaatttatcctcccagaagatgaaagaccacaactttcagaggttacttctctggactcaattcccataattgatttgagtgatcacagttatgatggtaataaccattcatcctcattggtggttcagaagatttcacaagcttgtgaggaatatgggttctttcagatagtgaaccatggtattcctgaacaagtttgcaacaaaatgatgacagcaattactgacctctttaatctgcctccagagcaaacaggacagctctacacaacagatcataccaagaacacaaaactttacaactattaccttaatgtggagggtggagagaaggtgaaaatgtggagtgaatgtttcagtcattattggtaccctattgaggatatcattcatcttctgccacaagaaatagggactcaatatggggaggctttcagtgaatatgcaagggagattggttcattggtgagaaggcttctaggtttgttatcaatagggcttggaatagaagaggatttcttactgaaaatatttggggatcagcctagactaagagcacaagcaaatttctatccaccatgtccagatccagagttgaccttaggtcttcctgtgcatactgatttcaatgctctcacaattgttttgcagtcacaagtttctggtctccaagtgatcaaagatgggaaaaggattgcattaccttttattcccaatgcatttgttatcaacctgggagatcaaattcaggttcttagcaacggaagattcaaaagtgtacatcacagggctgttactaacaaattgagtccacgggtgtcgatggcaatgttttatgggccaaacgtggacactacaattggcccaatccaggacttgatagatgaagaacaccctcccagataccgaaattatcgcttctctgagtttcttgaagaattcttcaaacaagaaggcacgaggaggatggttaaagaagtctttgagttgccatgttagagattaaataattctctacacccatttatggtcctaatatcaatccacttgtcacgtgactagcgactggactatcatgctatgaaggatagaagtgtcgtacgcacagaatgataatctaccctgc

SEQ ID NO: 39533 - DNA, 187 bp, Glycine max
  Clone ID: PAT_MRT3847_135698C.1
ggaacaatgaactcaaataatgaagaatttagttttagaagttcgaagaatatttccattaacaatgtaacaatatctaccattttgccaagggaatagggattatttttagttcttgaggagaatgtattcattaaattaaaatcctaacacttgtctggtatggtaaaaaaatttccttcttaaa

SEQ ID NO: 39534 - DNA, 475 bp, Glycine max
  Clone ID: PAT_MRT3847_135699C.1
tacggctgcgagaagacgacagaagggatctacatttatggttttggtttccttttgcatttctgtagaatactaaatgtttcagtggcttttgtgtgtttgttttcgaagtccaacaccacacgcataagtattgcagataatatggtgtttgttacttaatatgttataatccaaaaaagaaaaaatcaacgaatatcacggttttgtagattgatgaggagattcttcaggaagcggttaatatgggatttgacaggaatcaattggttgaatctcttagcaacaggatacaaaatgaggtttgtgatcttttattttcacctcaagtgtacctgccagattgtctcatctcactgtctgtatttcagggtactgtaacatactatttgttattggacaaccggtttcgtgtttctaggggttatcttggaactgaatttcaagaaacaatgggggggttggttttccttta

SEQ ID NO: 39535 - DNA, 527 bp, Glycine max
  Clone ID: PAT_MRT3847_13569C.1
ccacgcgtccgttgacgcgtgggcggacgcctggggtcactagagcgtcagggcggcggcgctcaggctcgggctctcagcgacggcgtcaacggcttcccctcccgcctccggtcctccgcacaccggccggtgaccctgcgtgcgtgcctctctctatctctcctctctcctccgttggatcgtcaacagcgccctgccccggcggctgcgccgcacgggcctgagggcagcgggagccagcagccactgcttcaccaaggcggtcgcgccgctttgggagcgtttatgccccaaaacaaagcgatacccgtcctcttagcgcttcagcgcgctaaggcgtgcgcttagtgccgctttttggaaccctaaattaagctgtttttattggtgtgtgtattactagtattgacattaagaatacaagtagtgtgtactattaggttcatccaccttgattattatgcgccagatttagggtaagttgcattgcgcatgtgtattgttccttcatgctgacattagct

SEQ ID NO: 39536 - DNA, 197 bp, Glycine max
  Clone ID: PAT_MRT3847_1356C.1
aattacaaactttctgggagcacaagccactttcttatatatattttatcatataacattaccccagaaccggacatcagaaattttcctttcagaacccttattatattatcattttacctattacttattctaacttggattccattaggccaacctggttggaaaccattaaccattaaacatggaacccaata

SEQ ID NO: 39537 - DNA, 203 bp, Glycine max
  Clone ID: PAT_MRT3847_135700C.1
ggcctgccacgtttattctctgtgtttgtcatcatgaactatcagatgatcgggctttgcatgcctggatcggtgcttatgatcatgaagagaactctttacagagacattgccacaaattagccatctagaaactaccctgacgtccacgaagaagcgggttggaaactgggggtggggggatggacacgccacctgacaat

SEQ ID NO: 39538 - DNA, 434 bp, Glycine max
  unsure (1)..(434): unsure at all n locations
  Clone ID: PAT_MRT3847_135701C.1
cggaanaacccgggcccgaccgcacgcgtggcgagaaggaacctaagcttannaattagtattctaaattatataagaagaaaggaaagaaattgagtgggttgggtaatgcatttggagagaaagaaaagnccnnanaantcccaattaaggaaacccagctaccaaacccattggtgctntctgcccaagnngctggcatggagaaagaacccccaggccactgtctcaagagaaaggcagaaagaatgaccagcacgtgatctcggtgcaaaanggagttggcaaccccaaaagaatagaaggcaaagatgaacccaggcggagcctggacccaagcaggcggcgccgtcaagcataacaacggcggcccaaacaaagtccgccactcaacggcttgggcaccatggggacatgggcccaccacaaaccac

SEQ ID NO: 39539 - DNA, 333 bp, Glycine max
  Clone ID: PAT_MRT3847_135702C.1
cgatccacgcacgcgttctctccggtggtaggagaacaccgaagggggaccccccgggaatatttattggcggggggatacctttttggaaaaggctttctgcccttggccttttcctttcattacccttgatgttaatttttttaggatggcctgttgccccgaccatgatggtgatggcgggcattacgggtgctcattgtccgggggcccctgggtacccgcccctgggagtggaaattcgcgggggaaaaaaaggttttcttaacttaaccgggaggggaaaagggtttggggtttttattttaggtaaaacccccactccattttttt

SEQ ID NO: 39540 - DNA, 143 bp, Glycine max
  Clone ID: PAT_MRT3847_135703C.1
agattccaagcgagacccagggaattaccaaagagacattgtaaatttggaaaaggaagaaaaattccttacttgccaacaacagcataatactcactattttgagacgctcacattgccataatatggagtgttgtaatgca

SEQ ID NO: 39541 - DNA, 741 bp, Glycine max
  Clone ID: PAT_MRT3847_135704C.1
ggaagccggcgccaggcaaaaccccttggtgttgattcttgacaaagtcaaacaaaaaatgtttgaaaaaatacaaagcctaacgtcattaaggcaaaaccccttgggcctgctgcctcagtaccaatcctggccgccagccgtttgcttcgctccgccgcctcccgagcacccggtgcggccaatctggctgccggagctagaacgttcaccggggactcattccttccgtttctcggagtgcccaaagccaaagcctcaatctccaatcgcgtttttaggttaccggtcgaagcgagtttctgcgtggaatcgatgcttccttatcacagtgctactgcttccgcattgctgaattcgatgctctctgtgtctcgccactcctatggttggacccctgaagcttttcgattatggatgattgctgtttgtgggtgcggtgcatctgcgcatactttgcatggatttcagtttactttgttaggcctgcttagagatttttctccttggttgaatatgaaacctgaaagacttgtaaattgaacgagcatccagagctggtaccatgcttaggtatgatgactcttttagaacattattgcaacatttccattacttgcgatatacaatgatttacttcaccctgttcatggaaatggttttactccaagtgttagcaaacattcccaaattttaaatgttacacgagcatgttttagaccaaaaaaaaaaaaaaaaaaa

SEQ ID NO: 39542 - DNA, 544 bp, Glycine max
  Clone ID: PAT_MRT3847_135705C.1
aaacagcaatcatccatctagaatttaagaagacaataacttgagaaaattcaaataccatacaaaatcagaaccaaaaggtcaagataatattaatcatactaatgcacagtagtaaattttaaaatgcaaattatttagatacaaatcataaatccatcgaggtaagggaaagcaaagcaaaacggaaatgacgaaacattacatgggtagtcctcaagcctaaagccaaagagcaaatgatcacgacccttcaggggtccaaccataggagtggcgagacacagagagcatcgaattcagcaatgcggaagcagtagcactgtgataaggaagcatcgattccacgcagaaactcgcttctaaaaacgcgattggagaatgaggtttgctttgggagccgaaacggagattgtgccagtctcggtctagctccggcagccagattggccgcaccggctgatcgggaggcggcggacatcgtgaatgaggaaacatcaccaactcaatatcatcatctatatatatatatatatatatatat

SEQ ID NO: 39543 - DNA, 577 bp, Glycine max
  unsure (1)..(577): unsure at all n locations
  Clone ID: PAT_MRT3847_135706C.1
ggtttcgattcctcattcacgatgtccgccgcctggcgtttgcttcgctccgccgcctcccgagcagccggtgcggccaatctggctgccggagctagaccgagaccggcacgatctccgtttcggctcccaaagcaaacctcaatctccaatcgcgtttttaggttgccggtcgaagcgagtttctgcgtggaatcgatgcttccttatcacagtgctactgcttccgcattgctgaattcgatgctctctgtgtctcgccactcctatggttggacccctgaagggtcgtgatcatttgctctttggctttaggcttgaggactagccatatggatgattgctgtttgtgggtgcggtgcatctgcgcatactttgcatggatttcagtttactttgttaggcctgcttagagatttttctccttggttgaatatgaaacctgaaagacttgtaaattgaacgagcatccagagctggtaccatgcttaggtatgatgactcttttagaacattattgcaacatttccattacttgcgatatacaatgatttacttcacacaaaaaaaaaaanaa

SEQ ID NO: 39544 - DNA, 980 bp, Glycine max
  Clone ID: PAT_MRT3847_135707C.1
ttcggctgcgagaagacgacagaaggggcttggtgttgattcttgacgatgtccgccgccaggtgtttgctgcgctccgccgtctcccgagctgccggtgcggcaaatctggctgccggagctagaacgaagcctgcacgatctccgtttcggctcccaaagcaaacctcagtctccaatcgcgttttcaggttaccggtggaagcgagcttctgcgtggaatcgatgcttccttatcacagtgctactgcttctgcattgctgaattcgatgctctctgtgtctcgccactcctacggttggacccctgaagggtgatgctgaatgccacaatttctggtctgtaagctcgtgatttggaatttattaaacttaacacgtctgtgtaaaatgggcaatgtgttgagatcgcgtacttttaaatatactgcccctacaaagttttttatacatttagacgttgtttgcaacttttattttgacatggctgttttcttgtttagggtcgtgatcatttgctctttggctttaggcttgaggactagccatgtaatgtttcgtcgtcatttccattttgctttgctttcccttacctcgatggatttatgttttgtatctaaataatttgcattttaaaatttactactgtgcataagtatgattaatattatgttgaccttttggttctgattttgtatggtatttgaattttctcaagttattgtcttcttgaattttagatggatgattgctgtttgtgggtgcggtgcatctgcgcatactttgcatggatttcagtttactttgttaggcctgcttagagatttttctccttggttgaatatgaaacctgaaagacttgtaaattgaacgagcatccagagctggtaccatgcttaggtatgaagactcttttagaacattattgcaacatttccattacttgcgatatacaatgatttacttccccctgttcatgg

SEQ ID NO: 39545 - DNA, 338 bp, Glycine max
  Clone ID: PAT_MRT3847_135708C.1
tcctgtatagcggtcggcctttttttttttttttctataactcatgggaataaatgggcggccttgataaggcacagttttacaatattaagatcctacattgaagctgagaactttcagacgtgtcggggggggaacgtacagatgaaaaaactgcacatggactggagcttatccaagttggaaaattagatcaatgatagaacttgctacctgtgagaaacatatgggtactgttcaaccccgtaaagaaggacatcccgacataaatacagagaagttgtgcgcctgtgttatacgtgttgaaaaacatgcaggacattgattcacacacaaaa

SEQ ID NO: 39546 - DNA, 1446 bp, Glycine max
  Clone ID: PAT_MRT3847_135709C.1
ggtctatttcttccattctcatttctctctctttctctgtttccacatgccatggttcgttcttccttgctctactactactctcaacgccgtcttgcaggctctttcaggggcttcttcttcattcccacaaccttagctctcttcacctctttcttcattctcttctacatttactccacttcaaacatcttcacccatcacaaccaccacccttccacttcacatttcaaaccacaccctcccttttccactaccccttttattgctaccactcctcacttcgtccctgtcttcaaccacaatgcttccgagtccacaaaatctcctccgactttccaattggggtatggcctcggaccgcaaagtcaacggggtctgcctctgccaccgcaattcagctcaaaggggaagacgatccttttgcaaatgtgcttttgcctgtggaatctgaacccggtggcaattataccagtgaaagttacttcaaaaaggtacttatgaagagccatttcattacaaaagacccaccagaagcagatcttttctttcttcccttttccatggcaagattgtggcacgatcgaagagttggtgtgggaggtatacaagacttcattagagactacattcataatatcagtcacaggtatccatattggaacaacacaggtggtgccgatcacttttatgttgcttgtcattcaattggaaggtctgccatggacaaagcacctgatgagaaattcaatgccattcaagttgtatgctcatctagttattttctaaccgggtactttgctcacaaggatgcatgtctaccacaaatttggccaagaaaaggaaatccccctaaccttgtttcatcaaagaggaaaaggctagctttctttgctggaggagtaaattccccagtacgtgtaaaacttcttgagacatggaaaaatgattcagaaatctttgtgcaccatggaagacttaaaacaccatatgcagatgaattgctaggtagcaagttctgccttcatgttaagggctttgaagtgaacacagctcgcattggagattctctatattatggttgcgttccagtgatcattgccaactactatgaccttccatttgctgatgtgctaaactggaagagcttttcagttgttgtcactaccttagatattcccttgctgaaaaagatcctcaaggatatcatcagttccaataaatatttgatgttacaaagcaatgttttgaaggtgaggaaacacttccaatggcattcacccccgcaagacttcgatgcattttatatggttatgtatgaattatggcttagacgaagttctataaaaaatacgtgggtagattctttcagagtttaatttatatgtatgccactgtaaaatattttcacacaagcatttaataagaatttactttatcatggtt

SEQ ID NO: 39547 - DNA, 221 bp, Glycine max
  Clone ID: PAT_MRT3847_13570C.1
cggtcgttgagcgtgctatccttatggggcgagagccaacagatgagggtcgatgtagcagaacccaccctgtgccggcctccatctcatccagggcctgctgccttactatgagtacaaatgggacccttccacacatcgcgcatagcgcgaccttatgtgcctggagtagcaggaggacgatggggatgaacacggtacagcgccaccaccaactttct

SEQ ID NO: 39548 - DNA, 328 bp, Glycine max
  Clone ID: PAT_MRT3847_135710C.1
agattcgtatgtttatattaagcatacagatcaagttgatccgtataagccttacgaatcaagttgatatgtaagacttatacggattttgaatttgtaacatttatttaagtttataatttttttaattattactttgtttgtattgtcattttaaaaataatttaattgtttataagtgtaattgattaaaaaaaaaaaaaaaaaaaaaaaaaaaaaaaaaaaaacaaaaacatgataccccggccccgtcatacttgagcttgtggacccgaaaattttttttcagaccggggggcgggcgacttctaactttccctaccgggaa

SEQ ID NO: 39549 - DNA, 700 bp, Glycine max
  Clone ID: PAT_MRT3847_135711C.1
cactcgagccgattcggctcgagcatcaaccccatcacaacttccatcaccaccacgaagatcaacaatgtctcacaccagaaagcacactccttttctgttcccccatgttgattccactgttgtccctgaaccctccaatttcttctcctcaaaccttgtctcaaatccactccccacaaactccttcttccaaaactttgtcctcaaaaacggtgaccaacctgaatacattcacccttacctcatcaaatcctcaaactcttgtctttccctctcatacccatctcgcttcatgaacccctccttcatctaccaagtcttcaaccctgatcttaccatctcttcctctcaaaaatcccacccttcccatttgaaccacaccatctcttcccacaatgatctcagtgttacattggatatcccttcttccaatttgaggtttttccttgttcggggaagcccctttttgaccctctctgtgactcaaccaacccctctttccatcaccacaatccatgcaattctctcctttacctcaagtgagtcactcaccaaacacactttccatcttaacaatggccagacttggtttttgtatgcttcttcaccgatcaggttgagtcatggactctctgagataacttctgatgccttttctggcataattaggattgcccttttgcctgggtctgattgg

SEQ ID NO: 39550 - DNA, 2355 bp, Glycine max
  Clone ID: PAT_MRT3847_135712C.1
ctcgagccgcgccgccaaaactcgaagaaaaccgaatataagaagctctctgacaaaaaataaaaagccacgtattctcctcggtctattctctgccgcggacccattacgacgaagcggcgtcgttttatcccacacagccgcgcacgattcgaacggaacagagactctccgacctttcctcccaattttcccgagaaaatttcgcttcgagaaaatctagctcaatctctccgcaacactcatatatccacaacaccttacacttatggatcggaggagaaacgcgagtccggtgtacgcccggcagtggagcggcggttccagcagcaccggttcctcgtcgccggcgatgtcgccggctcatcctcagtcgcgcctcggtcctacttctgccaccggtctctccaccgtcaagcgcacgcaaaacgtggccgccaaagccgccgcgcagcgacttgctcgcgtgatggcgtctcagaataccaccgccgacgacggcgaggacgacgacgatctcgatttccggttcagcgctccgtctccggcctctctttcttccttctccagcaactccggcagtaaccggagtgccagcacgaatgccaccgccattcctccgatttcggtcgccaggcctaacagatctccttctcctgcgttaggtcggaactttgtagagcatactcattcggttcgttcaacatcagctggaagaccagcggtttcagttcgctcagcggcagtggtgccaccgaacaaatccacactccggacgcctatggctatacctcctattgaccctcctaccaatcggaatagagacaaaaggtttacatcagatatatccatcagaccacttaactcaaaagacacaggagatcagcgtgaagcttctgcactccgtgatgaactcgatatgctacaagaagagaatgaggttttattagaaaagctaagacaagcagaggaaaaacgccaagaagtggaggcaagaacaagggaacttgagaaacaggttgcttctcttggagaaggtgtatccctggaagctaaactgctgagcaggaaggaagctgctctgcgtcaaagagaggctgctctcaggctgctcaacaaacacagagtgggagagatgaggatatcacagcccttcgagtggaaattcagaacctaaaagatgatgctacagcagctttggaacaacagcaagaagctgaagctgaagcaaagtctcttcgcacaatgacacaaagaatgattttgacccaagaagaaatggaggaagttgtcttgaagagatgttggctagcccgctactggggtcttgctgtaaaacatggcatatgtgcagatatagcacaatccaagcatgagcattggtcttctctagctcctcttccttttgaacttgtcatctctgctggacaaaaggctaaggaggaatcctggaacaaaagtgctgatggtccagatagaagcaaacttgttcgtgatttgaatgatcttgctggggaaggaaatattgagagtatgctctcagttgagatgggtttgagggaacttgcttccttaaaggttgaggatgctgttgtgcttgcattagcccaacacagacggccaaattcggttcgacaatccgttttagattccaaatcacgtggtgatgccaaatattcagaagcatttgaattaagtgaagaggaagcagaagatgttcttttcaaagaggcatggttaacttatttctggagaagagctttgtttcatggtgtggaagaagatattgcagaagaacgccttcagttttggattgcccgcagtggacagtcaccaagttcacatgatgctgttgatgttgagcgaggcttgttggagttgaggaagctgagtatagaacagcaactttgggaagcatcacggaagggaattgatcagcttcaggggtcagcagatgctaatcataagcatgcctctgactctgatgcctcatcctgattgtctgagcccccattagttcttaatcgattctttgtcctatatgtatatttttgtttttgttttgttttctacacaagttttccaatctgtaaacatctcaaacattatattcgggaatacaaagaaagcaagaatctttacgttgcacgagacatagtgggttgtaataattaacaatctacataggactgaatttttccctattcttttaaattaaattttgtaatttgggaatctgagcatgtttgtttggcatccaaaggaagatccttaagatgggcagccattataattttttttccggcgatgttcgccggctcatcctcagtcgcggctcggtcctacttctgccac

SEQ ID NO: 39551 - DNA, 399 bp, Glycine max
  Clone ID: PAT_MRT3847_135713C.1
gtcccacacacccgcgcacgattcgaacggaacagcatctccgacttttcctcccaagtttcccttcgattttcccgagaaaatctcgttccgagaaaatctagctcaatctctgcaacactcatatatccacagcgcctcatactcatggatcggaggagaaacgcgagtccggtgtacgcgcggcagtggagcggcggttccagcagcaccggttcttcgtcgccggcgatgtcgccggctcatcctcagtcacgcctcggccctacttccgccaccggtcttttcaccgtcaagcgcacgcaaaacgtggccgtcaaagccgccgcgcagcgacttgctcgcgtcatggcgtctcaaaccaccaccgccgatgacggcgaggacgacgacgatctc

SEQ ID NO: 39552 - DNA, 386 bp, Glycine max
  Clone ID: PAT_MRT3847_135714C.1
ggctcgaggcttagactgtgaactgttcatagccctgttgcatatgcggtggttacaaagacatagaaggtggaggatactgagattgcaaccccagcatcatcatcctcggccttgactgatgaatatgatgcttgtacgtcttcagccctatgcgatattactgtcttggattgcttgaatgctagcgaaataacattccctattgtgcaggacttggaaaagggtccttacgcggagattgatcgagcagttttatctgaatcagtactgatgtaagtggttgtgtgtgagatgtacgggtgactgaattgaagtcagttatgcttcacttgcatgtgacgagggcacctgttctgacataaggtactaccgtggaaacagtt

SEQ ID NO: 39553 - DNA, 761 bp, Glycine max
  Clone ID: PAT_MRT3847_135715C.1
cccacgcgtccgtacggctgcgagaagacgacagaagggggggccgggtcgactcgaggaagagaactgagaagcagagcagcggtgtggttgattgggatgtcggatccgtacgagcgggtgaaaggaggaagattagcattcaaaggaggaatccttgccagtcgctccaaatccattgacaaaaaggggaagaagaagaagaagaacaagggcaaggacaacgacaacaaccctaaccctaaccctaaccctgaagaacaggaactggaacaggaacagaaacaggagcaggaagaaacccccctcctcgaggacgagggcgagggatctgaatacaccatcgatgcggccaagcgtatgaagtacgaacaactgttccctgtcgaagccaagaagttcggttatcaacccaaaaccaacttcaagtcagttgaggatgccctcgatgatcgcgtcaagaagaaggctgatcgctattgtaaatagtaagtctatacttggttctatcaaatgtgtgctttcagatattcattcttacggatgccatgaaccatgctgccgtaattgtaatggatcaatattatgcttcacctgtctcagtaacactcattcgtcctcttaactttttctctgctattgtattgcttccaactagtgtccgatactgatacatagtttttatattccgtcaaacatattgtgcttttctcttttacccccataacttcagttaatcccctttgtaatttttatcatct

SEQ ID NO: 39554 - DNA, 582 bp, Glycine max
  Clone ID: PAT_MRT3847_135716C.1
taatccttctcgcttttcaggggaactccccaaccaagccttctctgcattctttctaaatccaccaaaccaagtaaaagttacagaaccctttgatccatacttcttctgtctcttgtgccccctcttctattacatcgttaacacaaaagaaaggggaatcgaagctggaatcagagataaacaatcttttaatcacctctgaaactcaaatcttgatccattcttgtagaggaacaatgagaacagagtcaaagaagatatctaagtcttcgtggccaaaattagccgtgagaaagtggctcaatataaagagtagtgctgagcggtttcactcagactatgatgcaacaacagcaattgcgaaggaaaggagaaggagttgttccgaccgagatcgttacgtcgtcgtaccggatgatttatcagaggggtgggtgatggattctacaagcggaatgaagaagaaatcagctcctggtcctggcactgggggtccagacctcaggatgttcgtggggacgtggaatgtcggtgggtagtcaccgaacgaaggcttcaatttgaggaattggcttacgt

SEQ ID NO: 39555 - DNA, 134 bp, Glycine max
  Clone ID: PAT_MRT3847_135717C.1
attgcatgtgttctttatctgtcttaattgtatcccctagggtaatgtatatagcactgatttcttctacttctacaaaactttcatgtgctacttgacttgtgaagttttggattaaaaactatattgctatt

SEQ ID NO: 39556 - DNA, 356 bp, Glycine max
  Clone ID: PAT_MRT3847_135718C.1
ggtcccgctgagatcgccgagggtttgctgatcgtttatattgcacaaccaatgggatactaggtttgaaattgtcgtgctctctcgttttatccaatgcccctattgatgatagatcaattttcctttcaacttatgatctagcgcaggttattgaagacagagtcaagcaatggtgttgctctcttgctgaatctggcatgaaccttcaatgactttgaaagttaatgacagacttgaggaagcagatcaagcatgatggcaaattgacaaggaaagggagaaccttgttttgcgcctccgtcactttgaaacatgaccctcaatacctaaggactaccacacattcccgactt

SEQ ID NO: 39557 - DNA, 284 bp, Glycine max
  Clone ID: PAT_MRT3847_135719C.1
cggctcgagcccggtttagtttagtgagcaatgcagcatagttgtttgggaagtcgaaaactttgaaccgtttccccgggagacaaagaaaggaaacttttgcagaaaaccgctaagcaattacccagacacacacaccgattcaagccttcttcaaccaaaccaaagattaaaaaaaaagtcttcacaaaacgccagagtcagagagcacagttcaaatctcacccctttccttttctactttaatattattattttccgttccctttgaaacaactcaaagc

SEQ ID NO: 39558 - DNA, 564 bp, Glycine max
  Clone ID: PAT_MRT3847_13571C.1
gtttgattcctgaaaaaaaaaaaaaaaaaaaaaaaaaaaaaaaaaaaaaaaaaaaaaaaaaaaaaaaaaaaaaaaaaaaaaaaaaaaaaaaaaaaaaaaaaaaaaaaaaaaaaaaaaaaaaaaaaaaaaaaaaaaaaaaaaaaaaaaaaaaaaaaaaggggggggcccttttaaaaaatcaaattttatttcccggggcttggaaaaaaaaattttttttttgggggccccaaaattaaattactgggccggtttttaaaaacttgggaatgggaaaaacccggggtttcccaaattaaatcgctttggaaaaaatcccctttttcccaattgggtaaaaaaaaaaaaggccccccccattcccctttccaaaaattttcccaccctaaatggaaaatggaacccccctttatacgggtcataaaacccggggggggggggggtaaccccaaaggtaacctttaattttgcaaggcccttatgccccgttcttttggtttttttcctttcttttttccccattttggcgggttttccccggaagttttaaaaggggggcccctt

SEQ ID NO: 39559 - DNA, 263 bp, Glycine max
  Clone ID: PAT_MRT3847_135720C.1
tggagtgagctaattaggaattactagcttagaggggagatcaatagagggcgattttgatcgatgtcacattgataccacccactcttcacccaaccctacaggtgcaagctcatatgcaaacaaatttgtttaaactgcatcttgctgaagtggcaactgatcaaagccacatgatggatctgcaaatttctcaatctaaaattgcacttaccaagaacacagttggaggaaccactttgcgtatcgatctattggcaaat

SEQ ID NO: 39560 - DNA, 136 bp, Glycine max
  unsure (1)..(136): unsure at all n locations
  Clone ID: PAT_MRT3847_135721C.1
gttaagtnaaggcgttttttaaatttttttcctcgggcncaaggtttggtgaatttcatagtaaattgcacccacgggaaaagggagggccagatttcaaggcagaacaaaaatgccgacacccaaacacttaaaa

SEQ ID NO: 39561 - DNA, 982 bp, Glycine max
  unsure (1)..(982): unsure at all n locations
  Clone ID: PAT_MRT3847_135722C.1
acggctgcgagaagacgacagaagggggctncttcaaccttttaagggtaaaagttgaaacgattcctatttcataacgaagaagatcttgccagtctcagaaacagaggcgagtgagggtatcagaattggagaagagaggggtagaagcaaaaattatataagcttttgtgctatcaaatagcaacaactacagcgcatagaagaaattatatttttgtgtcatgatgatggattctgaaggattggagaatgggattgaagagttgaaattgaaggaagagaagggtaatgcacatgcacagccacagggtcaattgcagatcactaccttttctgaactcgtcaatgatgttaacctccattttcaaatcattcgctttcccaaacagatatatgtttggattggttacaactctgcaaaattgggacacatgtatgcagcagcttctactcgtcctaacaatatggtatctgtcacttccatacttggaggggtttctgataatacagggtctggcattgctcatcgattagtgttaaagactggtctcaacataattttggcttgcagtattccaaaaaatagccccattcttgagacagaagctgagaaaatattgattcagaaactcatcagtttgggctataccaagtcaagattgggaggaacatccttgtagtacaggcctgggagaccttatacacatcaaacatgcattatcccaatgtttttacctaatttagcagccatagtggctattgaagacttgaagcatttttacccgacacaaaaactgttaactaatagccgttgttgctcggatctcttgtccatgcttggtgcaaacatatgagatgactatagattttccaactgtttaggattcatagcgacttagaaattttcttatgattgaacgtttcgcaattaatgatgttgatgctacattactggaacgaatgccccatttttccttgg

SEQ ID NO: 39562 - DNA, 159 bp, Glycine max
  Clone ID: PAT_MRT3847_135723C.1
ttcgcaccaacggcagagcgagaaaccacaggagaagccacaaagaccgagcacccggggcccccccgcgcgcaaaaggaggggccacaccacaacggccaagcccgaaagagaaccaagagagagcgcaagcccgcacgcgagccggactggaagggg

SEQ ID NO: 39563 - DNA, 763 bp, Glycine max
  Clone ID: PAT_MRT3847_135724C.1
tgttgggatttactgatgttcactacatacaaaaattaaaggcaacagatacagttgttgtctaaaagtctcaagtcatgataaaactgtatctgttgcctttaatttttgtatgtagttgggatttactgatgttcactttttttagcatgttcaaaagtttgatgaactatttaatatgctcaatgctatttgtttgctccatctctcttttcagtgcttgttctgtggccagggcttatgataagaaatataggataggatcatcaggtatcctatcctattctaattccattgttggcgagccaataggatagaataagtttatcttattcagctttttagttcaaaatttatcatgtggctgggcctggattaaaaaagtaggataggatagataaaaatctcccccactcaccctcatccccaaccttcttcctcaatgtaattagtctcccctttcattgagttacagtagcatttctctccctgcctaacaacctcctcaatgaaacaatgattacaacactttttgctgtctcaaactgaaactgccactgcttgtaattattttgggctaagtagtcaatagtgctgcataagtggcgaattgcggacagcaggagcggatactgaacatgcaggtgcagctgcagtttgtggtgagatagcaacggatgcatgcatgagcaggcacaatttcagcattaaaaacttgattttgcccatgaatcttgtcgtttggatttgggttttttatttg

SEQ ID NO: 39564 - DNA, 557 bp, Glycine max
  Clone ID: PAT_MRT3847_135725C.1
gatgcttaaacatacgtttattgataaagaacagctttgagatgaacaatactcaatcagtacaaacgcatctcttgttgaggacctgtagcatctacactgtcggggcggtcacacagtacctgtatctacacctaaatagcggggtgaacagatgtttgatctgcgcgagccttcctgtctctttggcatactggatgtggctaaatctcaaggcaaggtcaatgggtatggataatatgcgacgcctattatctctattgagccactcaaaggatccctttgttcctcacgcgcagagaagacctaagacttcactataagcattgttcccacgggcaacactaaacaaacatcacatcagcgaacgcttaaaacagacctaaacaaatagatgtggggtaagacttttagaactctcacttaggccaccagatccttacagctagctaatgctttgatttgattcacacatactccatactttttaaatacaataaacagagagcttctgctgaattccatacaggatgatgccttcccttcactgtgcatgt

SEQ ID NO: 39565 - DNA, 247 bp, Glycine max
  Clone ID: PAT_MRT3847_135726C.1
ctcggccttcggctcgcgccacaaccttcaatcgccgattcactgccatgcaccactcatcatcaactcatcatccatggctttctccgcttcacttcgccctacctcttctcaccctcagttgttttgctctgttcggttccctcggcggcaccctcgccgtcgccgaataggtttctcgtcgaacggcggaagacgatgtcgtcgtttacggaccagtgttcggtcggtgttgaccgacaaccgg

SEQ ID NO: 39566 - DNA, 207 bp, Glycine max
  Clone ID: PAT_MRT3847_135727C.1
gcaaggaaaatgaagttttcattttttatacaccacctatacgtcttttctgggaagggaaccaaccctgtctatacataaaaaaccccttggggttttacaggtttaacaccttttttttcggacaatcaataacggcatggcaccccccaaaaaacccccatttcaaaactctacacatgcaagctgggggtttacccccaaaaa

SEQ ID NO: 39567 - DNA, 269 bp, Glycine max
  Clone ID: PAT_MRT3847_135728C.1
ggggtggggggatttttaaaaaagccttaccttctttactcccctaaaaaaccccaaggcgccaacccggccaaaaaaaaaccggggggggaaccacgccgcagagtggggaggggggcaaaaacctcctccattgggggagtggtctggagccttccccccttggggggcccccaatatcgcttcggccccggccctcagggggggctttaacgggccgcccccttcaaaggggggaaaaacggggtccctgataaaaagtccaaaaa

SEQ ID NO: 39568 - DNA, 444 bp, Glycine max
  Clone ID: PAT_MRT3847_135729C.1
aatacaaactgtccaatttcaaccccaaaacaatcaataaaaccctaattttttttcctgaccccacttacaaccaaaacccccaactttttttttatccaccaaaacaacaaccattcatcccacaatttacactacacccaatccattttaaattcaaaattattcgtactctataatgccacctacaaacaaaatcttaaaatatctcacaaagcccaaatcctgttgactcacctcgaacaatatctcttatcttttaaaattacctgaaattccataaaccaattctttatttaaaatccatctgaacttaaccccataatcccttttcatcttaagacgctcctcaataatccgcttctttaacctcctaatcctttgagctcaaccacacactaaatcctgcacccgctttcccttacccataattctttaagcttc

SEQ ID NO: 39569 - DNA, 278 bp, Glycine max
  Clone ID: PAT_MRT3847_13572C.1
ccacgcgtccgtgcacaacacgatagagcaggattagagagaagaaaaagaagaagcaaaagcaacccgaaacacacacagagagagaacaaaacgaagaagaagaagaacacagagagagagagagtgtgtgaaggtgatgacgatggacagagagaaggagagagagatagagctggagagtgcaatgtacacgaattgcttgttgttggggtctggatccggcgatttttggaggtcggagctctcaagggaacttcttgggttgggcattttcg

SEQ ID NO: 39570 - DNA, 175 bp, Glycine max
  Clone ID: PAT_MRT3847_135730C.1
gtggagtaaataattctactcgcgaacaagacacagaagaagacgagaacacatatgcagtcgacaagcatagccagcaatcaagtgcgcaccgctcgaccaagaaacaaatcaaataggacaatgggcgaaagatcatacacacaatagtgctgagcctgcagttgccataaac

SEQ ID NO: 39571 - DNA, 912 bp, Glycine max
  Clone ID: PAT_MRT3847_135731C.1
ccggagggcgactctagacgctcgaaattgaattccgaaccatttaataaattaccatgacaatgactgatgatctcggatgtcccatggaggcccggaagatatcgagacgctcgaaactgaaaacagaagctctcagcaaattcaaacgacaataacattttactcggatgtccgatggagccgcgtaatatatcgagacgctcgaaattgaaaacagaagcactaaacaaattcaaacgacaataacatgtgacacggatgtcccattgagtcccataatatatcgagacgctcgtaattgaaaacagaagcgctgaccaaattcaaacgacaataacttttgactcagatatccgattgtgtcccgtaatatatcgagacgctcgaaattcagaacaaagctattagaaaaatcaaacgacgataactttttacacggatgtccgattgagtcccataatatgtcgagacgcttgaaattgaaaactgaagctctgagaaaaatcaaacgacaataacttttaactcggatgtccgattgtgtcccgtaatatatcgagacgctcgaaattgaaaacagaagctctaagcaaattcaaacgacaataactttttacacggatgtccgattgagtcccataatatatcgagaagatcgaatttgaaaactgaagctctgagcaaattcaagcgacaataactttttactcggatgtctgattgagtcccgtaatatatcggaacgcttgaaattgaatgttgtagctctgagcaaattcaaacgacagaaaatttttactcggatgtctgattgagtcctgtaatatatcgagacgctcgaaatggattactcaagctctgagcaaattcccccgcccataactttttactcggatgtctgattgagtc

SEQ ID NO: 39572 - DNA, 192 bp, Glycine max
  Clone ID: PAT_MRT3847_135732C.1
cccacgcgtccgcccacgcgttcgtacgggtgcgagaagacgacagaagggtacgggtgcgaaaagacgacagaaggggattgacccctgaagtaatttttagattttagaggactgataattctggtatttaagtaatatttggttgactttggcagcttaagattattagtgatattggtcatgttggtc

SEQ ID NO: 39573 - DNA, 224 bp, Glycine max
  unsure (1)..(224): unsure at all n locations
  Clone ID: PAT_MRT3847_135733C.1
atagncttggcaggcttccaccccgcggctgtgcaggtnccgcatcctcagaacactatgttgtgtattcccccggcgctgtcaggaggttcggttactcaggagcaacctgcggcaggaatatgctgaacttatgcacgatttatgacagcagtcaagcaaacttatggggaaaaagttctaattcagtttgaagactttgcaaaccacaatgcttttgatct

SEQ ID NO: 39574 - DNA, 439 bp, Glycine max
  Clone ID: PAT_MRT3847_135734C.1
gcgaattctgtatttcgattctactcttgatgtaatattgacacatgccctttcgtggcaattttactgttatcgccatttttatgtttccattacttctgtctattctatgcttattttaacttcgagcaatgttggtttatattttttcaaatatttaccatttatcctcaaagtacgtttctgaggggttaattcctctaattcataagcaccattcgaatagatctgaattattttaaacggtccttcccaatttggggaccatttgcccaaggctcgatccttactatccatgggcaggataaccttccaaactaaatctccaacattaaaagtttttgacttcactttcttattataaactttagcaactctttctttttgtttagtcaaaacttctaatgctcttaatctctcctggcctaaatcaactaac

SEQ ID NO: 39575 - DNA, 669 bp, Glycine max
  Clone ID: PAT_MRT3847_135735C.1
cggtccggaattccccggtcgacccacctcgagccgaatcatacagagcgggtagccgcttctctctctttctctctctctctctctctttttccatgtccatctgataaccctttcctgattctctttcgtggttgttgctattctgagtgatgggtatgccctgccgctgttcccacacctcccacatcactgaaatcatcatcaccagcttcttccgccacaagtcttagatcaacaatttccgtcaattattccaaaaccaccttaagagccttttccaaatggccccttaaagatcgaacttggtcggagtaaacatggcgggtagtggaagtgccttttccaacatcactagctttcttcgcacccaacaaccctcttctcaacctctcgattcttctctcttcctctctgcaccttcctctgctcctttcctcggttcgagatccatgatgagttttgaaggagaaggagggaaggggtgtaacggctccttcttccgcgcgtttgacatggacgacaatggggatgagtgcatggacgagtactttcatcaacccgagaagaagcgacgtctctctgcgagccaggttcagtttctagagaagagcttcgaggaggagaacaagcttgaacccgagagaaagaccaaactagccaaagacc

SEQ ID NO: 39576 - DNA, 241 bp, Glycine max
  Clone ID: PAT_MRT3847_135736C.1
cccaaagaagcactcttatacagacatgatactaaacagtgacggggtaaagatcacagaacttgagtgtacataaaaagccataaattcatgtaagaccaacagcggcttttgctatgacacctgagctcagcctgagttgaaaaaccatctatggtttaaatggacccggtacagaaacacctgtctgaataaccccggatatacctaagcacgattggcatgggcggctttcgatcct

SEQ ID NO: 39577 - DNA, 3012 bp, Glycine max
  Clone ID: PAT_MRT3847_135737C.1
gaaaaaaagaacttgccttgccttgcgttggttttaaaatactgtatccttttactacaggattactcgtattcagaaggtagggtatgctcctgaaacaattgtaaagtttttggcagatgatgattttaataatattgatttaaatatctttagtctttttatatctttttttgtttattgttttacataatagggaactctacagcaataacattactggccctattccaagtgacctggggaatcttactaacttggtgagcttggatctgtacctaaatcatttcactggcccaatcccagattcattgggcaagttgtcaaaattgcgtttcctgtgagtatacttgttctattcatacgctgtggacattctgattattttttaaaatgtcaatagctattatttttctgttcaagggtaaaatcctgttctggtgcttgtcaatctctacgtacttgatcttttggatatcaggatggatcttaattctggtttcctattatgtctaaggatagtcggctcggtccgattcccgtcgacccacgcgtccggtggtggtggtggaggaagaggaatgagggtggtttttttgtgatgttgtattggggtgcgaggttttgtttggatctgaggttgttggctacataggttgatggagagaaagttcatggctttaggtttcatttggtgggtggtgttggttcatccactatgcctgatttctgctaacatggaaggagatgctttgcatagtctgaggacaaacttacaggatcccaacaatgttttgcaaagttgggatcctacacttgttaatccatgtacatggtttcatgtaacatgcaacaatgataatagtgtcataagagttgatctggggaatgctgcactgtctggtcaacttgttccgcagcttggtcagctcaagaatttgcagtatttggaactctacagcaataacattactggccctattccaagtgacctggggaatcttactaacttggtgagcttggatctgtacctgaaccatttcactggcccaatcccagattcgttgggcaagttgtcaaaattgcgtttccttcggcttaacaacaacagcttgtcgggtcctattcccatgtcactgaccaatattacagctctccaagttctggatttgtctaataatcatctatcgggagtggttcccgataatggctccttctcattattcactcctatcagttttgcaaacaacatggatctatgtggacctgtcactgggcacccttgtccaggctctcctccattttctcctcctcccccttttgtccctccacctccaatttctgccccagggggtaatggtgccactggagcaatagccggaggtgttgccgctggtgctgctctattatttgctgcacctgcaattgcatttgcctggtggcgtcgaaggaaaccacaagaatttttctttgatgtgcctgctgaagaggaccctgaagtccatctgggacagcttaagaggttctcactgcgagaactgcaagttgcaacggatagtttcagcaataagaacattcttgggagggacaagaatttggtcaaggtgtagttaagggacgtttggtcagacgctttggttggtacttcagaaaagattgaaagagttaagcagtactagtgggggccatgagtgtgagaccagagtagagatgaatagcaagactgtgcatagaaatctggttcagctaagcctgttctgtttcagacaagaaataatcatactcgtggataacacagccctaatggaagtgctgcgttttgcaaaagggagagtccaccatatcaagaaaccctggataagccaaccgagaaaagaggagctttgggatctgcaaggggtctttcatatttgcatgatcattgtgacccaaagattattcatcgtgatgtgaaagctgcgaacatattgctggatgaagagtttgaggctgttgttggggactttggattggccaaacttatggattacaaggacacgcatgtgacaactgctgtacggggcactatcgggcatatagctcctgagtacctttccactggtaaatcttcagagaaaactgacgtttttggttatggtatcatgcttctggagctgatcactggacagagagcttttgaccttgctcgactcgctaatgacgatgatgttatgctgcttgattgggtaaaaggacttctgaaagagaaaaagcttgaaatgttggtagatcctgatctacaaaccaactatatagaaactgaggtagaacagttaatccaggttgcactactctgcacacaaggttccccgatggaccgacctaagatgtcagaagtggtgagaatgcttgaaggtgatggcttggcagaaagatgggatgagtggcaaaaggtggaagttctccggcaggaggtggagctggcccctcatcctaattccgattggattgtcgactcaaccgaaaatctgcatgcagtagagttatctggtccaaggtgaccttggcacagtagtaaattaagaagaaaaaaagaaaagaaaagaaaagaatggatttatttatgacttattttttaactataaaagttttcttactttttccctttttggttccttcaagtgccaatatcctgattacatctcctgtaagtccgctgcattatattcatttacatttgtgcatagggatcactttgtcaagttgcaatttgtatcatctgctgcatttgatgaagtgatgtttacttagatgaaacaatgacagcttaatcttttttgtacacccttgtttcatactcgctcaatctacagtttatatcttatctcattcttatatgttttgtatgatagtaacacccctaaaagctgtggaaccggttcttgctaaaatcccatttcaaatgtggattttattatatggttattaccgaataatgtcccatacatgtgataagttatggtaataatattg

SEQ ID NO: 39578 - DNA, 251 bp, Glycine max
  unsure (1)..(251): unsure at all n locations
  Clone ID: PAT_MRT3847_135738C.1
ccaggtctttaaacctcagatagaganaacaagactggagtatattaaacatgatgacttaatattaagactttttcaacgtgttgaaaaacaaactctgcaaaagatcctcaccgacgatgggactcccaatgtagctgcnataagtgggttgtatctgaaattngtcaaagtggggggcaggnttgttagcntctgaagtggaagngctggtgtnctgggaccaattaaatgnccccaatttncaangg

SEQ ID NO: 39579 - DNA, 324 bp, Glycine max
  Clone ID: PAT_MRT3847_135739C.1
ataaggttccaatttttattgaccctaatcccacccataacagaacgcagctaggtagccgaaattttgaatgcccgcagttctgacctatataagctgagtcatttccgttgacttaaacagaaagctgagatatctctaggaaacgaagcatcccaggggtcactgaatgtaaccaagcatcatacacaatctgtactgaagcaaatagtaccaaccaaactgctgacacacaatgagcatatcatatgataaccaataacagggcatggccacctctttagtcccaacaggatcatgagagtgcatactatgataatgtaa

SEQ ID NO: 39580 - DNA, 257 bp, Glycine max
  Clone ID: PAT_MRT3847_13573C.1
tccactcgtaagtacacgtgcagaaacggatctgtcagttgctgatgagcaaaagactatgtgaatgtgttcacgggttgggagatatatttacaaggtatggaacatctgttgtagcaatgttagcatgatggtcatgctatggtggttttaagttctacgggagactagagacgtgatccaggctttcttatttgatcgattatctgtaggactgagacagagtgtgctacaaggactccttttatgttaccata

SEQ ID NO: 39581 - DNA, 190 bp, Glycine max
  Clone ID: PAT_MRT3847_135740C.1
atccactagtaacgggcggcagtcgtgctggaattcgtcctttctagcggacgaccggttagatactgggctgctcagtcgtcagcaacgattacaccgtaactacgcgcatgacatcactcgacctgtatacagacctagctggttaatcataaaccgatactcattacacatacttgctataccaact

SEQ ID NO: 39582 - DNA, 1655 bp, Glycine max
  Clone ID: PAT_MRT3847_135741C.1
gtcagtttgtgtgaatttgaagttggcattgaaggggattaatcgcgtgttggagagcagaggggttgcagggaagcttgatttcagaggttggagggaagaactgaatgaacagaagcgaaggtttcctttgagttataagacttttgaaaaagagatttctcctcggtatgctgtacaggttcttgatgagttaaccaatggggaagctattgtgagtactggagttggacaacaccagatgtgggctgctcagttttacaagtacaagaggcctaggcagtggctaacatccggtggtcttggtgctatggggaagctctctcttaagatactgttgttgaataatcaacacttgggtatggttgttcagtgggaggatcggttctataagtctaacagggctcacacatatctgggagacccctctaatgagaatgccatataccccaatatgttgaagtttgctgatgcttatgggataccggcagctcgtgtgaccaagaaagaagaccttagagcggcaattcagaaaatgctggagacccctggcccctatcttcttgatgtcattgtaccccaatccccatcaagagcatgtcttgcccatgattcctagcaatggaaccttccaggacgtgataactgagggtgatggaaggacaagttactgatttcctcagcatatttatctttatggtgtttttgtaaaaatagtaagctaatataccttcttaaattttgtcttcacgttggctactaatataggctgcttgtttttccatacaatgttggtttcttttagtactaaatattccttaagtgggactaatattatttttgttaagttgtgccttggtgacttgttggtcatgggttcgaatccggaaacagcctctttgcatatgcaagggtaaggctgcgtgcaacatccctcccccataccttcgcatagcgaagagcctctgggcaatggggtacgaagtttttatcaagcccagtagcatcttgtaatctatgtagctgaccttaccataatggtatgatgctattgttgttgtgcatggtcagaagttttaagtcattaattgagtggaatttgattttttacatctatttgcagatacatctttggcagcttggtgttgatcataagttcctgccgattgtcttttttatcctctttccttcttattcatggtctttgtttaagagaattctaattaaaaaaagaaaagaaagaaaaggactaaagtgcttcttaatggcatacacattttttcatttatcattttctggaaaattgaactcagaatctatgtcagtattaccaagaagcagagaaggtgcttatgttattgaatccagatattgatgccactttttcctgatttagcttataatgaacttcttagtaagctattcgaggaacttggtgtgactgttgatgatgtgacggaattaattgagagttggcacctattttctagcaaattttactatggagtagatagagacaaggaaagaaagacatagtgcctactgggaattggttctgaatgacatacaggatacttttgaactcctgaccaatttacaatgaaaaagatgggtagatggatatgcatctttagtagtttccccatgcttgcaaa

SEQ ID NO: 39583 - DNA, 2337 bp, Glycine max
  Clone ID: PAT_MRT3847_135742C.1
ccacgcgtccggatggcggctataactgccccaaaagctgcgttcagcgtcctcccttcatcatcccattccccgaatccctttgtgcgtttcgcaatcccatacagcccccatcactcccagcgccgttctctcagaatctccagcgccctatccgatgcaaccacgaaatcctccaccgccgccgctgaagctttcgcctcccgattcggcctcgatgagccccgcaagggcgccgacatcctcgtggaggcgctggagcggcagggcgtgacggacgtcttcgcctaccccggaggcgcctccatggagatccaccaggcgctcactcgctcatcctccatccgcaacgtcctccctcgccacgaacagggcggcgtcttcgccgccgagggctacgcccgctcttccggcctccccggcgtctgcatcgccacctccggccccggcgccaccaacctcgtctccggcctcgccgacgccttgcttgacagcgtccccctcgtcgccatcaccggccaggtcccccgccgcatgatcggcacagacgccttccaagaaacccccatcgtcgaggtaacacgttccatcactaagcataactatctcgttctcgatgttgatgacattcctagaatcgttaatgaagcgtttttcttagccacttcgggtagacctggccctgtgttaattgatatacctaaagatattcagcaacagcttgcgattcctaattgggatcaaccaattaggttacctggttacacgtctaggttgcctaagtctcctaatgagaaacatttggagcttattgtgaggttggttatggaatctaagaaaccggttttgtatgttggtggtggttgtttgaattctagtgaggaattgcggcgttttgtcgagctcaccggtgttcctgttgctagcactttgatgggtcttggtgcttatcccattgctgatgataattctcttcagatgcttgggatgcatgggactgtttatgctaattatgctgtggatagggctgatcttttgcttgcgtttggggtgaggtttgatgaccgtgtcaccgggaagcttgaggcttttgcgagccgggctaagattgttcacattgatattgattcagctgagattgggaagaacaagcagccgcatgtgtcggtttgcgctgatttgaagttggcattgaaggggattaatcgcgtgttagagagcagaggggttgcagggaagcttgattttagaggttggagggaagaactgaatgagcagaagcgaaggtttcctttgagttataagacttttgagaaagagatttctcctcagtatgctatacaggttcttgacgagttaaccaatggggaagctattgtgagtaccggagttggacagcaccagatgtgggctgctcagttttacaagtacaagaggcctaggcagtggttaacatccggtggtcttggtgctatggggtttggattgccggctgccattggtgcggctgtggctaatcccggtgcggttgtggttgacattgatggtgatgggagttttatgatgaatgttcaggagctggccaccatcaaggtggagaagctccctgttaagatattgttgttgaataatcaacacttgggtatggttgttcagtgggaggatcggttctataagtctaacagggctcacacatatctgggagacccctctaatgagaatgccatataccccaatatgttgaagtttgctgatgcttgtgggataccggcagctcgtgtgaccaagaaagaagaccttagagcggcaattcagaaaatgctggagacccctggcccctatcttcttgatgtcattgtaccccatcaagagcatgtcttgcccatgattcctagcaatggaaccttccaggacgtgataactgagggtgatggcaggacaagttactgatttcctgagcatatttatcttcatggtggttttgtaaaaatagtaagctaatatagcttcttaaattttgtcttcacgttggctactaatataggctgcttgtttttccatacgatgttggtttcttttagtactaaatattccctaagtgggactaatattattttttgttaattatatctctcgttatttggttaattgttactgaaacattattaaaatgtctttaatggttacttagtgatcaaaatactgcaaatcagaattcagaagaagctaatttctttgtaccagcacagaacaaatagtgagctatggaaaatacaccaatttgcatagtattatcacatcctcctttctaaattctaacaaatcaatcattcttgt

SEQ ID NO: 39584 - DNA, 523 bp, Glycine max
  Clone ID: PAT_MRT3847_135743C.1
acaaaaaaaaaaaaagtaatttagtaattccctgggacgttttttatacaaaatcgggaaaacaaggaaaacccaccctcgaaaacgtataaaaaaattggatgcatgctagtatgctacggaaacaaaaagcaaaatcatccagggattctaaggttttattttggggaaaaaacaataaagcattaactcctatgtttttccactctcagcaaaacaaataggcagaaaactccggaattcagcccgacaaaatatcccccccatcatcaaaaaaagcattgggaccagctttggattttttttcctgggggggcccactttgggaaaaaaggctttaaattgaggctgcccggtttgtcttccgtatttaaaaggactcactatgctcggaacctgcataaaatgccaatgttttggggaaaaatcctgataaagctaacttgcaactagtcgggcttggggggaaggatttactcaggggaaaattggcatcaaatttcttttttaaaagcttaatatc

SEQ ID NO: 39585 - DNA, 794 bp, Glycine max
  Clone ID: PAT_MRT3847_135744C.1
caggttcttgatgagttgactaatggggatgctattgtgagtactggagttggacagcaccagatgtgggctgctcagttttacaagtacaagaggcctaggcagtggttaacatccggtggtcttggtgctatggggtttggattgccggctgccatcggtgcggctgtggctaatccgggtgcggttgtggttgacatttgatggtgatgggagttttataatgaatgttcaggagctggccactatcaaggtagagaagctcccggttaagatattgttgttgaataatcaacacttgggtatggttgttcagtgggaggatcggttctataagtctaacagggctcacacgtatctgggagacccctctaatgagaatgccatatttcctgatatgttgaagtttgctgatgcttgcgggataccggcagctcgtgtgaccaagaaagaagaccttagagcggcaattcagaaaatgttggacacccctggcccctatcttcttgatgtcattgtaccccatcaagagcatgtcttgcccatgattcctagcaatggaaccttccaggacgtgataactgagggtgatggcaggacaagttactgatttcctgagcaaatttatcttatggttgttttgtaaaaatagtaagctaatagcttcttaaattttgtattcatgttggcaactaagataggctgcttgtttttccgtacaatgttggttatttttgttaattatatgtctctttggttatattgttactgaaacattattaaaatgtcaaaaa

SEQ ID NO: 39586 - DNA, 510 bp, Glycine max
  Clone ID: PAT_MRT3847_135745C.1
acgagggaaaaagacctcgatgtagaggatacagagggtcaacttgacctgaaggaactttctggagagggaaatattgaaaacatgctttttgttgagcaaggtttgcggcaattggcttcactaaaggtagaagaagcattggcggttgcattggctcaacataggcgaccaaatatgttgaaagctggtttttcagatgacctaaaattaccaattgaagggcagtgtgatgcatttgaattgagtcaggaggaggctgaagatgtatcttttaaacaggcttggcttgcttacatttggaagagagcaaaaaggcatgagatagaacctgacatagcaaatgagcgtttccagcactggatcaatcacaactcaatgactcctacctcacaagacgcagttgatgttgaacgtggacttgtagaaatcaaaaggttggatattgaaacgcaactatgggatgaatctcgaagagaattggagcaagagattggcaattcaaacata

SEQ ID NO: 39587 - DNA, 1756 bp, Glycine max
  Clone ID: PAT_MRT3847_135746C.1
ccacgcgtccgcgccaagtttctctctctttctctgaaaatttagggtttctgaatcctctgttgtagctaaaaccttcttcttcttcttattattattattcatcttcacagtatgacgagcatggagagcttgatcggcttggtgaacagaatccagcaggcctgcaccgtgctcggcgactacggcgccgccgacaacagcgccttctcttctctctgggaagctcttccctccgtcgctgtcgtcggtggccagagttcggggaagtcttcggttttggaaagcatcgttggacgtgactttcttcctagaggatcaggaattgtgacgaggcgtccattggtgttgcagcttcataaggttgacggtagagcgaaggagtatgcagagtttcttcacatgccagggcaaaagataaccgattatgcatttgtccgtcaggaaattcagaatgaaactgatagagtaacggggaggacaaaacaaatatctcctgttccaattcatcttagcatttattctccacatgttgtcaacctaactttgattgatttacctggattgactaaagttgctgtagagggacagcctgagactattgctcaagacattgaaaatatggttcgatcttttgttgacaagcctaattgtattatactggcaatatctccagccaaccaagacatagcgacttctgatgctattaaactttcgagggaggtggatccctcaggtgagaggacatttggagtgttgacaaagctggatttgatggacagaggaactaatgcattggatgtccttgaaggaagatcttaccgtctgcaacatccctgggtcggtgtagtaaatcgatcccaagcggatatcaataaaaacgttgacatgattgttgctagacgtaaggagagtgagtattttgaaactagtcctgactatgggcacttagccaataaaatgggttccgtataccttgcaaaacttctctcacagcatttggagtcagtaattagggcacggatacctaatataacatctttgataaacaaaacaattgaagagcttgaatcagagatgaaccaaattgggagaccaattgctgctgatgctggggctcaactatacaccatcctagaactatgccgcgcatttgatcggatattcaaggagcatctagatggagggcgaccaggaggagataggatctataatgtctttgacaatcagcttcctgcagcgttacggaagcttccattcgaccggcatctttctcttcaaaatgtaaggaaagtggtatcagaggcagatggttaccagcctcacttaattgccccagagcaaggttaccgacgcctcattgagggagctctcggctactttagaggtccagctgaagcttcagtcgatgcagttcactttgtcttaaaagaacttgtgaggaaatcaatagctgaaactcaggaactgagacgtttcccaactctccaagccgaaatagctgcaggtacaaatgaggctttagagaggttccgtgaagagagtaagaagacagttatccggcttgtggacatggaagcttcatatctcactgtggagttcttccggaaacttcctcaagaaatggagaaagctggaaatccagctaatcagcctaccccaaatgtggatcgatatggaaaaggacattacaggaagattggatcaaacgtatcttcctatatcggtatggtatcagacactcttaggaacacta

SEQ ID NO: 39588 - DNA, 407 bp, Glycine max
  Clone ID: PAT_MRT3847_135747C.1
gaaaaaaaagaatttttaaaaattattattaaacatatttgcggaaggccttgacagatgaatacaaagtataacagaattgtgtacaggctatgaccttgaacatcacactcaatcgcagtactgaaatgatgatgccttggatttgtgattgtgtattttcgaccaagcctttatgaacctaagcacgtgcggcacacggagagcttgcaagcagactcttacaccggtgtctccagcctgtaagatctgaacagggatgtattgcagaagctcttatgaggctaacatgacctcaagtgtcccttccgatagagcgttacgttcacgatatcaccagttacattgacgcagtatgaagcattgaactatgcgtctttgaacggttcacctgcccatgggcacca

SEQ ID NO: 39589 - DNA, 364 bp, Glycine max
  Clone ID: PAT_MRT3847_135748C.1
gcgggtttattcgggtggttgcatttccgaataccattgagcacattgaaccagacatgaattcaagggttcagcttttgagtaccactaccaatggggattttgttcaagggaaagatctcgcaatggataaagttaatgtagcatgtgctgttgtaggcttgacatgaagttacactacaactctatagttggaatctggcttgcaaaaagacagagggttaattgtggattatttcgggaggatgtcttacgttgctcatcacgagaatctgccccaagagaaagatttgttggaggcacatattgtctttgatattaagatctcgctcttgatcgcaaaaagttttctctactaaagcac

SEQ ID NO: 39590 - DNA, 267 bp, Glycine max
  unsure (1)..(267): unsure at all n locations
  Clone ID: PAT_MRT3847_135749C.1
aaacaaacatcaagcccattaattcatttcgcatgcgaggttttataaaacacaaacagcaatttctattttttctgacatacactaaatacccattcctacccaaacaacttatcatctattatcatgataaaatcattctaacaatctctccagagagctacaataatntttctgtttgttccacacaataatacttttctttcacaatccaaggttcatcatccttattaaacttgttcctcaaattcttaaacatctttttaa

SEQ ID NO: 39591 - DNA, 418 bp, Glycine max
  Clone ID: PAT_MRT3847_13574C.1
tggatctctccctctctgttcttttctgtctgtctctttctctttctctctcttcggggagcgagatcaatcaggtacagcttccccccacagaagccaaaaatcagataacccagataaaaacaactcccaaaaacacaaaaaaataattaacacaattaaaaaaatatctagagttctgaataacaaaattccctcttcgttttttgttttctttctctttcaactttttccttcccaccaaacacacaccattcccgctcctccattctttcattccaagaaagtcaggattcaactgttctcagattggtaccagctggtgcaccttttttttttcttcaatttttttcgaattttttttgggtcctaattttatccggggaagctaattttcccggaaaattgtgtttttttt

SEQ ID NO: 39592 - DNA, 512 bp, Glycine max
  unsure (1)..(512): unsure at all n locations
  Clone ID: PAT_MRT3847_135750C.1
aatacatctgtaatctccgcaacctggagaccctggacataagggaaacaaatgtcagcaaattgccaaaggagttttgcaagctaaaaaagctacgacatcttttaggtgataacttggatttgtttcaattgaagaatggtctcggaggtttaacatccctacaaacgctttgcgatgtatcgatccctgtggatgataatgacaatggagtagagttaataagaaaactgggaaagttgaagcaactaaggaacttaagcttgaatggtgttaaggaagaacagggaagcattctatgtttctcattaaatgagatgacaaacctggagaaactaaatatttggtcagaggatgaagatgaaatcattgatttgcctactatttcatctctgcctatgcttcggaagctntgccttgtagggaagttaagaaaaattccagagtgggttccacaactccaaaatcttgtcaaattaacattggaaaattgcaagttaactgatgatcca

SEQ ID NO: 39593 - DNA, 269 bp, Glycine max
  Clone ID: PAT_MRT3847_135751C.1
tttgaggtagaatctgaatcgatagtggtttcaccggacctcctcttgaaccgccgcaactactattacctgcgcgcttacggagctgccgtacacagcaacgacgatgccaaggctttcgcatgtagatacccgtggtgcgctacagcctgcggtcacgcgctgctgctatgggcctgttgtagagtacaggacgccttcgtgcgaagatccacgatgatgcattcgctatccactttcaagcctttaatagtactgagtcgtcatat

SEQ ID NO: 39594 - DNA, 596 bp, Glycine max
  Clone ID: PAT_MRT3847_135752C.1
ttcccacgcgtccggagagagaaaagccagatagagaaagacagacagagagagagagagagaatgctccgagtttctctttcagagactagtagacagagaaagagagtgtgtgtgactctgtgagagtgtgcgatgatgatgcgaagaagaaccaaacaacgaaaaaacaaaacgacattcacaaatctgcgcgaacctctcaatctcatttcctgagaattctctctcactgcgctgcgctgcgttttgtctccgccaccgtcgtcgtttcggcttctcaaaagcatttcgcgcgcgagggagataaagatatgagtcgtttagggttcaagcacgaggtttacgacggcgacaagcacgttggcgaactcgacgtgattcctctgtcgtcgtcgtcgacaacgacgccgtttcacaatagcttccgcttcccgaacaacgagattcgcatccaccacttcagcgcgaagagcgagcgctgccctccgctctcgatcctccaaaccgttgccgcattcaacgtccgctgcaagctcgattcctcagtcgccaccgagcaaaaggaactaatcgccatccacgccagttgcttc

SEQ ID NO: 39595 - DNA, 409 bp, Glycine max
  Clone ID: PAT_MRT3847_135753C.1
cagaaggcagttgattcataattatttcatcattcaaagagaggaatttgtttgataagggactagagcacccgtgtctgggggctaacaatgcttacgttgagggccatccaagcactctacaaggtctgaccttacgctttctattctactatactcacaccaactttcttacgatattgcgcctataacataccgacttcagccttcttacacaattgctaaaccctaaactaccatgcgaaaatcaatgtggtctcttcctactaccaaagaagtctggtttgactcctccaaaaccgttgggtgttttctaagacacggtgtggtactatccaacccaggcggcgaggctttttggccggaaatgaaagggatctccatcgagagggggccgtctcttcaacat

SEQ ID NO: 39596 - DNA, 352 bp, Glycine max
  Clone ID: PAT_MRT3847_135754C.1
gcttttgtgaaacctagccagccagcgattgccgccatttgcttctcctccgaacgatccaacaattcaacggccctgtgtttgttaattgagattttagattcaacgctttaacattggtacaatggcttccaacatctcaccttctgcctttgataaagagcagatatttggaatggctgaaaaggagatggagtatcgggttgaattattcaacaagatgacccagacatgtttcaataagtgtgttgacaataggtacaaggaatccgagctaaatatgggtgaaaatagttgcattgaccgctgtgtttcaaaatactggcatgtgactaatctaattggtcagctg

SEQ ID NO: 39597 - DNA, 308 bp, Glycine max
  unsure (1)..(308): unsure at all n locations
  Clone ID: PAT_MRT3847_135755C.1
ttgatgaagcgtangtaagctcggaattnggctcgagntctcnttctcgntctttcagctttgacgttnnatnggnaannaaggggctaatnanaatggtgaagttganagntggangagntangtngtattatgggatataggntaatattcggaatatgtntgtnatggncanggttgagangggaaantnnaccntaatggtttntgtnntggnggnngnnggtataattgggcaagaagttgncnggngatggtcgggatgnctgnnancggtgaggntgaggtnnngggtgnnntaanatnca

SEQ ID NO: 39598 - DNA, 894 bp, Glycine max
  Clone ID: PAT_MRT3847_135756C.1
ccgccccttgccagggttaccccggctccccggaactctccccagggttccgacatctaacgccgttccccgggaaactaggactccaccactgacgccggaatcttctcctcttcaccacggggattgattcccttttcaccctctcggagtggaaaaaatggatcggagctctttctcaccgggaaccggaaaaacccgaaccaaaccggacatatactctaccttcgtggtccacgacgacgaagacgatgacggaggaggaaccttccggcgccggaaatccggcggcggcgcgcagccacaggacgatccgtacgcgacaatggtgttcaaagacaacggccacgacgacgaggacgacgaagactcctctcttcctccgctcctcaagcgcctccccaaggacttcggcggcggagcgccgctggactacgacgacgaagacgatgacgccggcgacttcggcacaatgatcgtgaagtccgaccggagccggcagcgcgaccggccttcttccggcgtggcttcgccagcgtggaaggctcggagtcctctgaacagattcggtggcggcgatgacgacggcgatgacgacgacgacgacggaggaggattctcgacgttcgtagtgcgatcaacggtgaagtccggcgagagagagtcggtgagcggaaccgtggttcgacggaccagtggcggcggcagcgtcggtgtcggtgtcggtgtcggctcgacgatggagagagcggtggcgagcatgcaagggatgggagagttcggattcggaaagcagaggaagggaagtggatctcctcagaacgatgaaggaaggcatcaatcgataacgacgaagggttcgacgagttcgatccctgattgtgttaccagaga

SEQ ID NO: 39599 - DNA, 170 bp, Glycine max
  unsure (1)..(170): unsure at all n locations
  Clone ID: PAT_MRT3847_135757C.1
gacacaacanaccatcatacctattttatcttattccaaccgcgactcaaggtgccttgtgatcatacactcggggggggcactttcctatacatagatctactttgtagaatttagctcatatacaatcatcacactctcatatgtaagcacattacacgagtcacaga

SEQ ID NO: 39600 - DNA, 543 bp, Glycine max
  Clone ID: PAT_MRT3847_135758C.1
gcgctcgaatttggtgaccattttcttttgaacccatagtagaacagagaagatcttcatcaagagaaggaataattttcaatttgaccaagttatctcatgaatgaatttttaatacaacttacaaactgaagatggctagataccagtagacccgtatactcgtcgaacagctaaaaactaaatcattccagcatgatgcataatttcccaaaagatgctaatttgaagcataacaagggtcctcctgccatacagaaccccctcactttgtgtaaagaacatcctcccatgggtggcggtagagtggttgtttcaacctcttctggtcaaaggtatgcccaatcagaccaatggagcgtgccaaaacaaaaagcccattcagatagccaatctccacaatttcatcaacctcttgtttggtgaacattccgctaccagcaagaagatccaagaaaagtgacccgattgcaccatctacgtttagaactaggttatttgccttggtgagggtgtagttttcaactttaacagcatactcca

SEQ ID NO: 39601 - DNA, 455 bp, Glycine max
  Clone ID: PAT_MRT3847_135759C.1
gaaaagaaacagggaacattgaaggtagaaccaatcgtcatacagaactattttttttgtcccccttgtcatctacaagcaaacgcaggatcgttcaaaaacaaaatattgtacccatttcattcaatacattgcaggggaaaactatcactatggtgaaggatatgatatgatatatacaagataagtgtctacatagacaaattaaaacacatgcacaagaaaattgtttaccgcgaagccaaaaaagaaaaaacttaaatcatgggtcatctcatatctgcagtatccattgcaaggagctgagctatgtttctcatagttggtcgagattgagggttagtttgcagacacgaaagtgctaggttggcaatcaatgccaattccttcaaaatagggctcttgacaggaggcgggaggcgagggtctaaaatctctttgaagtttattttctg

SEQ ID NO: 39602 - DNA, 2300 bp, Glycine max
  unsure (1)..(2300): unsure at all n locations
  Clone ID: PAT_MRT3847_13575C.1
cccacgcgtccgctttcacatcatttctcaatcttccttgcttgcactctcatcagagaaggaaagcttttgataaagaaagaaacagaaagaaccttgtaacttttggcttgaaaagccatggccagggagcaaattcaggtgctaaatgcgcttgatgtggcgaaaacacaatggtaccatttcactgcaatcatcattgctggaatgggcttcttcaccgatgcatatgatctattctgcatatcccttgttacaaagttgcttggccgcatatactatcacgttgatggcgcagcaaagcccggaacattgcctccaaatgtttcagctgctgtaaatggcgtggctttctgtggaacactctcaggccagcttttctttggctggcttggtgataagatgggaaggaaaaaagtctatggcatgactctgatgctgatggtaatatgctccatcggttccggcctttcattcggacatagggcgaaatccgtcatagcaactctttgcttcttccggttctggcttggatttggtattggtggagactatccactttctgctaccataatgtctgagtattctaacaagaagactcgcggtgcattcattgcggcggtgtttgccatgcagggttttggaattttggctggtggtatctttgcaattataatttcagttgcattcaaggaaaggtttgatgctccaccatatgagcttgatccagctggctcaactgttccacaagcagactacatttggaggataattcggccgaggttatggtgggagcactcccagctgcattgacttactactggaggatgaagatgccggaaactgcccgttataccgctctagtcgccaagaacacgaagcaggctgcagcagacatgtctaaggttctgcaggttgagattcaagctgaaccacagaaagaggagcagaaggctaactcatatggcttattttcaaaggagttcctccgtcgccatggactgcatctacttggtacagcaagcacatggttcttgcttgatattgcattctatagccaaaatctattccagaaggatatcttcagtgcaattggttggatacctcctgcaaaaaccatgaatgccattgaggaggtttacagaattgcaagggcacaaacacttattgccctatgtagtacagttcctggctactggttcacagtggctctcattgacaagattggaagatttgctatccaattgatgggattcttcttcatgactgtcttcatgtttgctcttgccattccttatgaccactggactcataaggataaccggataggattcgtggtgatttattcgttgaccttcttctttgcaaatttcgggcctaatgccaccacattcgtcgtgccggcggagattttcccagctagattccgatctacttgccatggaatctcatcagcatccgggaagctcggggctattgttggtgcatttgggttcttgtacttggcacaaaacaaggacaagagcaaagcagatgcagggtaccctgcaggtattggtgtgaagaatgcccttattgtcttgggtgtggttaacattttaggcttcttctttacattcttggtgcctgaggcaaacggaaaatcattggaggagatgtcaggtgagaatgatgaggatgttggaacccaggaagagtcagagcaatcacattctcaaaacaacaatagaactgttccatatgtttaggatatgtttatctgtaatcttgttataaaaataaagtagtggcttcaattaggcttggaaagcacaaaagctttccatgctcctctccaatatttctgttaaattttgcctgaacaacatttagcaggaagaactaagagttatttgttctacgaatattggcaaatttgagttacaattgatggtgtaatcattattggagtgtacagtactttcaatatttcacaaaacgactgtgttttgcatgctatacaactcgagacnnnnnnnnnnnnnnnnnnnnnnnnnnnnnnnnnnnnnaaacctccggggggggcccggaactgaaaatccccctcaaaatttccccaaagggtaaccctgggggaaaaaattttgagctaggagggttgcagccccaaataaatcttcccttgttatggggtacccaaaagggcgcaaaatttccatggctaaacaaacgggtgaaaaaacctttcaatttttgaactgggtaacctgaaagggcttgtccccaccctggttttggacagaacccccccagcccaattg

SEQ ID NO: 39603 - DNA, 469 bp, Glycine max
  Clone ID: PAT_MRT3847_135760C.1
gatcaagctctctatggatccagataaacctgatgaacttctagacaagcaactctcagagcacattatggcaggtcgggtagctgtctctaataaggaacaacattatttattgactgaactatgaatgctatagacaattgatgttttcattgatctcttcaaagaactagctttcttaacaaaagagagggatgcacacagtttgtgtgggttgctgcctcccacattcagcagtcaacaacttcaggagaataaactgatgaacaacatcagcctatatcaggttcccttgcaaaagtatgtggccatgatggaccttcatgtatgaatttcaactcatctaatgatgaaaaccgtcattgtttggcaacccaacatgagagggaaaccagagaaaaaaatatttggaggaatatatgcatgagattagtcatgtctatgcagagtgagctccttggattagttg

SEQ ID NO: 39604 - DNA, 752 bp, Glycine max
  Clone ID: PAT_MRT3847_135761C.1
gtcatcgctttgttggcggtttgatccccgagcacatgcgcgaaatgggcattgaactgaaaaagggcttttcgcgcctgaccgacctgtttacccgtttgactgacctgctcaaggaaggcatggacggcgaggtcaacatcggcatcgccagcaaccaggccgaagaatggtacccgttgttcggcagcctgctgtcgcgttcccaaggcaactgggagctgtggaccgccttcaccgttgaagacccggaagacaacccgccgatggcgcgctggctgaccttgtcggaaagcggcgcgctgtttgatatcgaggtcaacgccagcccgatcctcgccgccgaaatgctgcgccgcaatctgtggaacgtggcctacggctgcctggtaacgtcggccacgctgacggctttgggcacttttgatcgtttccgcatgcgtgccgggttgccgaaaaaagccgtcaccgctgtggtcccgagcccgtttcatcacgccgacgcgggcgtgctgcgggtgccggacctcaaggccgacccgcgcgatgccgcggcgcacacggctgcgattatccgcgacctgccggagttggttgaaggttcgcgcggtacgctggtgctgttttcttcgcgtaaacagatgcaggacgtgttcgacggcctcgaccgcgactggcgcaagcaagtgtttatccagggcaacctgtccaagcaggagaccctgaacaagcacaaggcacgggtcgatggt

SEQ ID NO: 39605 - DNA, 231 bp, Glycine max
  Clone ID: PAT_MRT3847_135762C.1
ttgctacgtccaaacattcctacctttaaccctttcctcaacccttctccctttgggttcattcttacaaatagttctctctcataattcggctcctaatactcatcccctccctttccacttttatttatcaaaaccacctttattaacccttatacccacaataaccttataagtcatatacttcctatcataaaaccaccccaacaatctcattcatcttttctaatt

SEQ ID NO: 39606 - DNA, 421 bp, Glycine max
  Clone ID: PAT_MRT3847_135763C.1
cgtgaactacaaaagtacgattaagagcacgaggttgctgtttgtacagcattggtagcatctatcagacaagagctaaattgcgatcggatacagaagctaacaatgctacgtgcaagtggtggaaatgtagtcagagctctactagttattgaggatgtctaacatatggtccatggtcagttgagttaggagctacttgagaatcagggctgcataggacactcgatgcttgatgacaaagatgtgatcttgaataagaaccctgtaggactatctgccaagaactcacagtgtgcaataaatcatctgagcgagctggctggatggcataatgtgatagacgattcagtcatagagctaagggtctgaaaccgctaaggtatagtgtcagagatgtctacgcatcttgccaagccat

SEQ ID NO: 39607 - DNA, 177 bp, Glycine max
  Clone ID: PAT_MRT3847_135764C.1
tactgtcccctgggattggctttttgcctctccaagcagcttatgcgaaaagccaagaacgccctcttccgggggggcccgagccatcagtgagataccactctaggaagagctgggattataaccttgtgacagacccgcaggccatgggacaggctcatgcagacaatttccatg

SEQ ID NO: 39608 - DNA, 524 bp, Glycine max
  Clone ID: PAT_MRT3847_135765C.1
tcgcccacgcgtccgatagaatattagattgatccagaaaaactaagagcatcacgatgatgtcaaggtagataggtgataatatagtatataataaaatactggttttaatttgtgccatctaacaaagctgtagccaagaattacaattgcatatattggatttgaattaacctcattaagtgacctaaaacaccattgtcacttgatacataataaccttatattataattctggacacagtagtcaatagtctgctatagcagagaaccggaaaggagtggccctgaactgctgtgagattcagatagtggagtggtactcaatagtagccattgtggccggcaataaagggttaagggggggaaatttatgtgctatagaatttttatcacgatattgaggttggaaaccattttcttcgtgtgattactaggtgctatcacgatacttattttaaaaacccatttttatacctctgttctgtcctttgttcctttacactttgaaacttttttttttt

SEQ ID NO: 39609 - DNA, 606 bp, Glycine max
  Clone ID: PAT_MRT3847_135766C.1
cagtgattcaccacggttcttgttcgttccttgtttgtgcctgttcctacctggttcacattgacctattcttttctgcaagctcttttccttgtcttgggaagaaaatgaacccagacatgaagtttgggcaggataggaggggttaatataattgatttatttaatttgattatgttgctgatcgatcttgggaataaaatgaatcaggaaatgaatggggttgaggcggagagggtgaaagtgaatgtgcatgacaaattgcattaagtgttttctgcggtggtgataggggacccagcagtgggtaagactcaaatactctcaaggtttgcaaagaatgaattctgctttaactcaaagtctaccattggagttgagttccagactagaagtgtgacaattaatggcaaagtcatcaaagcccagatctgggatactgctggccaagaaaggtacagggcagtgacaagtgcatactacagaggtgcattatgggccatgctagtgtacgacattactaaaagacagtcttttgatcatgtggctaggtgggttgacgaattgcgagcacacgccgacagttccattgtgatcatgctcatt

SEQ ID NO: 39610 - DNA, 491 bp, Glycine max
  Clone ID: PAT_MRT3847_135767C.1
cagtgattcaacactgatcttgttcgtttcatttttttttcttttcctacctttttcatattccttaactttttcctgcttaattacctccacgaccattagggaagattgaaccaatgttttagattagacgctatagtttgggcaagaagaagtgttttacttaattttttccaagctattgctgatcttgggaagaaaatgaatcaggaaatgaatggggttgaggcagagagggtgaaagtgaatgtgcatgacaaaatagattatgtgtttaaggtggtggtgataggggactcagctgtgggtaagactcagatactgtcaaggtttgcaaagaataattctgctttgactcaaaatctaccattggagttgagttccagacaagaactgtcacaattaatggcaaagtcatcaaagcccagatctgggatactgctggccaagaaaggtacagggcagtgacatgtgcattctacagaggggca

SEQ ID NO: 39611 - DNA, 300 bp, Glycine max
  Clone ID: PAT_MRT3847_135768C.1
cataccaaaaaaaactcttggatattttagtccttttttataacaaatttatatcacactttataattccataaaaaattttttttattttttgtaaccacattcataaacactttttttaatactttttttactttaatttataaaccataccccatttctttaacaaaccaatatatagccttacaaatttatcttttcttaaataaaaacataattcttcccatcccataaaccttatttctttatcccaatattcttcatcactcatattttttttttgatctcatataatttttt

SEQ ID NO: 39612 - DNA, 369 bp, Glycine max
  Clone ID: PAT_MRT3847_135769C.1
cttggggggggggggggggggggtagggggggggggggggggggggggggtgggggggaggcgcggtcccgggaggggggggcgccacacaaaatattgcgggttaaaccaaagagtggccaatatgagccactaaatccccaaaccaagcacatatggttgtatgaccgacgcactgaccaaaaaaacaaccgtatcccgataaggggaaaaaagacaaattttagcaaaaggtaaaccaaccctaaataaatgggagttccaaggactaaaagtggcgttttggggggggggcaataattttggcaagcctattttatcgtagaaagggaatttttttgccaacccccccctatgtaaatttgaaaa

SEQ ID NO: 39613 - DNA, 401 bp, Glycine max
  Clone ID: PAT_MRT3847_13576C.1
attggccaaaaaattgacacctattaacacatataaaaccctggacacaacatgtctcctggacgtgtccaatctagacagcatttataaagatttgagaaattcttaaccatattcatggtagatgactgcttcccatgtattgtattttaaaaccaacggggcgagacatatattgagttaaatataaataactttttaaattttgcacccctactattaggatttaacatcggtgtcctaaaaaggaggcatgatttactttgtttccccagcatgttaaaaaatggtcaaaacaaggttgaacatcctgggaatcctgttaccaaaagggtttggatgatcaagggtggacccaaaagtacggagagccgtctcaaagagttggagaacgaactcct

SEQ ID NO: 39614 - DNA, 374 bp, Glycine max
  Clone ID: PAT_MRT3847_135770C.1
gactcgactcgactcgacttcaacccaatccatctcaactcggctcgaccaagtcaccgactcggctttgaatactcacctcggcctcgcttgaccaccatgcgattcgccctcgccctcctcggcctcatcgccgtgccgttcgcgtctgccgcggcggtcccgcgtgagcaacacgacatcgccaaacgctcgcccgacgagcttgacgcccggctgctgggcgacctcctcggcgacctcaaggacaagtgggacaacaggcactgcggctggaaaatcgacgactgttccaagaaggggcagaagtgcaacaacaagtgcgaatgcgagcacgagccagcgccgacgtgcaacaagtgggagaaggacga

SEQ ID NO: 39615 - DNA, 350 bp, Glycine max
  Clone ID: PAT_MRT3847_135771C.1
aagaaaccaggtggggttaattttatacttcctcaacaaattctctacttagacttataacccacatcttactagcacattatttacaatttcactacaacaaaaaatccaacggttcaatgcccactacaagcgatttcagactacattcctagaaagacgctactgcatcgtacaagatattttgaaggaacataaactgtcttgctaccaaaaatactacatactatgattctcacacacaggccaaatcctgcgactcggacagcattctcttatatactttgtacaaaacaagcaccaacgaacatttggtttatgcaatgaatacctcgttctaccaacaccct

SEQ ID NO: 39616 - DNA, 458 bp, Glycine max
  Clone ID: PAT_MRT3847_135772C.1
agccttccggcgaaaagaccacagaagggttattggagaagcgttggggcctttgaaaatgcttaatgggttttcattcaaaccagttttgtttttgttttgggtacctataatggttgttgctttggttaatcttttggttgatccagggaatactttttttgaggttccaagatttcttgtttttttaattcctttaatttttttgcctttaccacccaattcaagtgaaccagggtcagttataattttggttagtcgggataaaaggcaaactgcctaattaactttttttgacctatatggaccagtgacaatgaataatgtgctttgcctatcagtttttttggcccttgcttatgcaaggggatggacatggaactttttttcaaaagtgttggtaattttcgtcgttggcatggccgttggcgtctttgccagctggcccactgtcttcc

SEQ ID NO: 39617 - DNA, 528 bp, Glycine max
  Clone ID: PAT_MRT3847_135773C.1
cagacttcatcttttcaaaggacatttaacttgaatctttatgctttccgcccaagtgtcattgaagcaagatatgtacttattgtggcgagttcttgatcaagctcttgattttcagctttcaaattcgttgggacaaggtgcagattcggtgtgacaactctttagattctttcacttataccatatcattctttgttgttgcgaaagtccaatagctatggtgagctttagtttgcaactcttcattcctttaaactaaagattgcttttgtaacatcaaaatttaataaacattaaaatctatatttttattttctgaaattaatttatacaagtttattcacaagaatcataaaaaaacaaaaataattaaaaccatgtcgctcatccccctgtcacgtactattcattcccttcaaagattcaagcttttctctccctcttcgtgcttttcggatacccttttgacccatttgcgtgatcccctgattgcatgtctatggggttcgcatgctccccaccctc

SEQ ID NO: 39618 - DNA, 1478 bp, Glycine max
  unsure (1)..(1478): unsure at all n locations
  Clone ID: PAT_MRT3847_135774C.1
cttntttttttttttttttttttttttttttttttttttttttttttttttttttagaggaaaatggttttgatttcatgtgttagaatacttttagtagaacacaggggcttgcttacatattaaaaagaaaattggggaatgagagatgggtgacaaaggagttatggaaaaatggattcttgacccaccggtcgttgaagtgatgcatcagcaaggaattgcaacaaggctttgaaaaaataacctttgaatcgaaagcaaacgttgttgggtttggcaactcatacttcaatttcaaaagtaggacgagaaattgaaagaatgaaattgccaagccaaaaaatgctgcgaggacgtcggcaatgtgtcaaatacttcggtaaattgcacgtttctaaagtaacggaaccaaaacacatcacttacaacacaaaaagagtttcctagagtttttacctattttacataaatattacaacgtaattggcttgcaagattagtctcagtcatggactattgagatctctgttgtcgagtatactcccagagagcaattgcaccactgacatgaacattgagagatctaacaactccaaattgcggaatttcgatgcaagcatctaaaatatgaattatatccacaggtataccttctttctctcggccgagaaccaggaccatttttttgggaaagatatactgatcaaggggtacactgtttgcagtttgttccaaacccaagatggaaaatccttctttcttttttttctgcaagtaaatctttatgctatctactgggacttctattataggaacccacttttcggctgttacactgattagttggaactgtttgtcatttatgatttttgtatcagcaatggccagccctgatgctctaaatacctcacatgtacgagccaagccagcaagatccgcgtgccggactcccaatgatgcttctgggtcgaacttcggccctcttgcggttgattgctctgggcatgatcttcttgactgcaatagttggtcgagaaggagatcatccctctctatctcagccaactatttataggtttcatcattgccataaaggaaacctgcttcgttgccccccttgtcatgtttggtaaaagtaacctttttctggaaatctgaagacatatctttaagcatggttccttcaatgccaccagataaattttcgatgcaattcttatccccattgaaatttagagtctcattcctgattgtcaccacatcctttgccattgaacaccgcaggtctcctctagttccattattaacatcacatcatcatagcttacgtggttttacccagttacttgcatatcaaattctacataaactgtttccattgttgaattatggatcttctgagatgctacctttagagaagaggtgctttgtagatgtgaaaacataccttgcaagaaattctgattgtgcacgct

SEQ ID NO: 39619 - DNA, 699 bp, Glycine max
  unsure (1)..(699): unsure at all n locations
  Clone ID: PAT_MRT3847_135775C.1
ccacgcgtccggaaggaaccatgcttaaagatatgtcttcagatttccagaaaaaggttacttttaccaaacatgacaaggggggcaacgaagcaggtttcctttatggcaatgatgaaacctataaaaagttggctggtatgtttgaatttgttcagcaactaataaaagaaaaaggaactgactatctaacactatttttgttgtcattatgaccgtgtactgtgtttgtagtctgtgttccaccttttgtgtgattcatagttttgtatctaccattatttaatttcaagatcaacatgacagagatagagagggatgatctccttctcgaccaactattgcagtcaagaagatcatctctagatcaacaaaaagcaagtcgacagaattttatccttgttgcatcattgcttgaccgcatacccaatcttgctggcttggctcgtacatgtgaggtatttagagcatcagggctggccattgctgatacaaaaatcataaatgacaaacagttccaactaatcagtgtaacagccgaaaagtgggttcctataatagaagtcccagtagatagcataaagatttacttgcagaaaaaaaagaaagaaggattttccatcttgggtttggaacaaactgcanacagtgtaccccttgatcagtatatctttcccaaaaaaatggtccctggttctc

SEQ ID NO: 39620 - DNA, 348 bp, Glycine max
  Clone ID: PAT_MRT3847_135776C.1
ggaacatcaagggcaacaaatgttgtgctgtgccgccacttccgtaagcagtatcaatggcctcaacgcccatgactttgacctttgaagacgtagctaagcacagcaacaaaaaggattgcaggattattatcaatggaaaggtgtctgataacacaccatttttggatgaacatccatgaggtgatgaaattttgctgacgtcaacagggaaggatgccagcattgattttgaacatgtgggctacattgattctgctatagaaatcatggaaagatacttcattgggaaagttgacacttcaactcttccacacacatttatccataatctgcaacaccctatac

SEQ ID NO: 39621 - DNA, 486 bp, Glycine max
  Clone ID: PAT_MRT3847_135777C.1
aaccagggtgtattgggcgtttatatgcaaagttcatttgccaaccattgcgtgcggctgtcacagtggccgtactagcatgtgcgaacaagagcatcctaactgctccataaatagcctctgacggataaacccgacatgtcacaaccggccttccaccttgagcatggcttgcaacagtcgagtggcccaccagtctgcggaaggaggactacgcatatttaagaactggatcagcgctggcaacgatttgcttgcgaacatcatttgcctgagaagaccttgattgatcaacgcaaatggacgtcttatgatgtccagtgctccctttaatgacatcaaagtactgaagaggatactgaaaaaggccctgatgcgccaaaaccaatagaccatacagtgcctaggcaccacgttgtttagatccacctctgttgccacacgtgtactactagatggactcaggtgccatctcaagggtttcct

SEQ ID NO: 39622 - DNA, 335 bp, Glycine max
  Clone ID: PAT_MRT3847_135778C.1
ttctcgaggcgataaaaaacccacataaaaccactcttctactctctctcacccacaaaaaggattgcgtggtacatacaaagattcacgcgcactccacctagacataattcactcttctgcattagtttctatgtgatcccaagatcaccccaaagaatgggtattactccttaaattacatggacattaaaactcgcagcaacattaacagacttgcacaccttttataattggtagccaactctattttaaccatttacctcccaactgccttggcgcttttacaaagcccttaataagaaccacatgtaaaaacttaattatttattggc

SEQ ID NO: 39623 - DNA, 710 bp, Glycine max
  Clone ID: PAT_MRT3847_135779C.1
gattataatcattataacaataattataatcgattatcgaaataatctaatgtttgtagctattccaaacacactcattattccaacgggaaaagggcataaatggataaatactttgtagcaagttgccctccaacaatactgacatgacattagtctcaaataacacaagattgaaactatttttccccacgagttgggttcttactacttacataacatgaaaattggtacaaagaacaaatacatgtaaggcctggtctataaacactcactgcacaattaaaaaaccctagcaagcagcaagtaactggaaccactaaacctcagcaatttaatagcaacttcaaaatattacacgaccttcttaacttcaaaatatttgttacacgatcttcttaaggcaaattgtcccccaaggattgcttgaatagtgaacactggatacctgcaaaacatctattatacattaatgagtcttcttccacaacactccaatcttcttcaacatgtttgtatttttctttttgggagagtcatcatcatctgtgtcttctgaataaggtgaactcatcttggcagtaacagaattgtagctactgtcaagtgaacctgttcgttccacaaactttccattgtttccagaagaaatcatagcagcagctgcttcggccgcttttcctcgagccgaatcggctcgaggtcgagcc

SEQ ID NO: 39624 - DNA, 547 bp, Glycine max
  Clone ID: PAT_MRT3847_13577C.1
aacaaagcccgggggctttgcaaaaatatgcctcaattcaacaaaaaacaggggtcccggccccaaattcgggccctaaaaaaccctgggccccgccggctaaaccgcaaaccccccacccccattaaacggaaaaagcccgtttaccacaaaatcccccatgcttttttaacaacaaaaaagaaaccgggcccctgaacccttcccccttcccccaaaaccggaaaccccctatgttcttgaccttccccccggggaagggatgcgaaatcttccaaattccggaccccggggtttcccaaaaaaaggacccttgccccttccaaaaaaggacccccgcccccccccctacaccgggaccttgggggcccgccctaaaaaaggacccccccccgccgggtgggggcccccaccattggccccaataaaaaacaggggggggggggccccaccactgagaggggactgggccgccgcggggaaagggggggcggggaaccctccaaaaccccccctcttcaagaagaaagaaaataattgccccccc

SEQ ID NO: 39625 - DNA, 273 bp, Glycine max
  unsure (1)..(273): unsure at all n locations
  Clone ID: PAT_MRT3847_135780C.1
acttccacacctnaaatcaaccatttcctaattctaataatcaacaccttctactccaacaagaaaattttccttcttaaactcatcaccaactcctccaatgcttttaacaaaattctatttaagagtttaacaaataagagcaagctctatgctcagccatattttttcattcatattattccatacaatactaacaatacacttaccattttttacaattttattttcatgaccaaatcttatttgttgaacaactttgttacaatttct

SEQ ID NO: 39626 - DNA, 675 bp, Glycine max
  Clone ID: PAT_MRT3847_135781C.1
attccaaacacactcaatatattccaacgggaaaagggcataaatggataaatactttgtagcaagttgcccaccaacaaaattgacatggcacaggattgaaactaattttccccacgagttgggtttcttactacttacataatatgaaaattggtagaaagaacaaatacatgcaaggcgtggtgtaaaaacactcactgcacaattacaaaaccgtagcaagcagcaagtaactggaaggaaccactaaacctcagcaatttaatagcaacttcaaaatattacacgaccttcttaacttcaaaatatttgttacacgatcttcttaaggcaaattgtcccccaaggattgcttgaatgatgaccaaaccaaagggtacctgcaaaacatctatacatattaatgattcttcttccacaacactccaatcttcttcaacatgtttgtatttttcttcttgggagagtcatcatctgtgttttctgaataaggtgaactcatcttggcagtaatagagttgtagctactgtcaagtgaacctgttctttccacaaactttccattgttcccagcagaaatcatagcagcagctgcttcggccgcttttctccactggtctgactgcactttcaacctccttaattcagcttctacttcggaattggcagcct

SEQ ID NO: 39627 - DNA, 293 bp, Glycine max
  unsure (1)..(293): unsure at all n locations
  Clone ID: PAT_MRT3847_135782C.1
ttattttaaataatttttttttttttaagcccaatacatgggcacataataattatctgaagagacatacataatagatgtggggtgcgcgcattaaattaacataattaactccacaagacatggtcttttggaataaaacattcaaaaactcttttaacatgtatccatatagtgaaccttaacattatatacattcagtgctgtttggatacaaatcattaatatgctntgaaaaactctcaaaaagcacttttacctcttccttttatccaaacaaactttaatcatta

SEQ ID NO: 39628 - DNA, 238 bp, Glycine max
  Clone ID: PAT_MRT3847_135783C.1
gatttcacggtctcattactcatccctgtaattcaaggttggaaatccagacatcaaactgacattaggatggcctcagtacacacctattggaccattgcctccgtacatcacctccgtgcctctgctctcgttcatctcgccatgtcttagtcacaccccgaagatgcaatgtatgattcagacaccgcaaatgtaatcgacgctgctgatgaatcagttgataacttcagtgatg

SEQ ID NO: 39629 - DNA, 730 bp, Glycine max
  Clone ID: PAT_MRT3847_135784C.1
tataagcacatctagtacatggacagcccaacattttaatttccaatggctttttctagtctttacctgatgcagatatattcgcgtctgtttcatttacagcccaacatggtcaacttccaaaaggcttttacaagatcttactcgatttcaggccccgctagattttccttctggtttcaaattacccaatgctacactatcacttcagcagcagatcgttggtcccgtcagttttagagttgattcaggaattacagttgatctgaagaaccctgattggccgatacatgcaccggaaccagtatttgctttggaatatgcattgcaagtacttggttcagcaaaagcagttgcatggtattgccccaaacgccaagaatttatggcagaacttcgtttctttgaaacataagccatagcctgataggcactatagaaatatcttctgttccttaaattgcaaaagctagttggtaaaaggtccattaatttttatgttgccctgtggcttgtcaatagatttgtgtttttacaatttctcttgtttaactactattggagttgtagttatgaaagaagagaactatcaaatttcactgaataccgggatgatcaatgtaaacattttgtatgaaaaattcttgcaaaattggtgtgaaactcttttgttactaattttgctaggcatcaaattcagctaggaagtgatgtcatgtcagcccgagcc

SEQ ID NO: 39630 - DNA, 921 bp, Glycine max
  Clone ID: PAT_MRT3847_135785C.1
gagagaactagtctcgagttttttttttttttttttgtctctaggagaaattatatcatttgttcattttatttattttgcatttaccaaggaaaaccttacatgaggatcctgataaacattgaaagaacatgcatcgttattagaaaggaaatacacttattcatatatagtttttatgcattaatgttagacttagaggagcattaagcttgtttaggcttgttggaattgaactttgaggggaacatcagtgagagcaagacgcttgttccctttctcatccacaaacaacccaacattcttgcacaaatgctttggacatttcaccacgctgggacaatagaccaatttgtaagcaccatcgtacttctcaatcttgaaccagttgtggatggtttccaagctagggtttcccacaacaccaccagtggtcacaaaccattgtctctttgagaaatcaaaatcatcaagtttccaaaccgtggaatattggcggggacaactagtgcgagcagagaacttgatgttcaaatcagttgagacacgaatgacccctttcttaggattaactggtgagaatgtcactggcaagccatggtatccattcacaaccacaacatcaagaggacaataaggttttccaacactggctaggccaaggcctctagtggttctaattttggtgtagggaagagatgggacaatatagtaattggttccaactcggagcttcttgcctaatgtgtcaaccacttgctcgggtgaggcttcagctcctcctagcagtggttgtgaactcaaggctaagacaagggcaaatgctagcagcattgtgctcttcattgttttgtatgcttttggttaattagtttgtgtttgaatattgggtgggtcgacgccgggaattccggaccgaaa

SEQ ID NO: 39631 - DNA, 467 bp, Glycine max
  Clone ID: PAT_MRT3847_135786C.1
gccaataataaagattaaaacttaaaagttaaaaatgattgtcctaagttgaaagtcgaaacacagtctatgacttgcaactaaaagacaaaagttgctaaagtaaaaacaaaaatacaatacattgtcgtttagggttaggccggttagggctgtgattctgatcatctcttttctctgaacagctagatgcaagtgcagccatgagtggaacagaagttaggatagcagtgcagcgtgacttgcccactccgcttaagccaggcataatggccctttgaggagcagcagggtgccgcaactccttaggcctaacagatcctacgcaataatcgtgtaatttttcactagattacaattcaggtctgattcatgcaattcaagcgccgaaacgattagctcactgattcatatcacaagctgctcaaaccgtatcatatcacagatcgtgcaatactgataactac

SEQ ID NO: 39632 - DNA, 189 bp, Glycine max
  Clone ID: PAT_MRT3847_135787C.1
acattgcttcaaaaactatcaagctgagtaagactgaggctgcctttcttgcttcaccttaaaatgatcctttggacaaccacctcgaaaactaagaaccaggaggcaattgcgcccctactccatgcagcctctcactccttcaagctaccgttaaaaaagtgagcgcgagctgtctatacaacgagt

SEQ ID NO: 39633 - DNA, 833 bp, Glycine max
  Clone ID: PAT_MRT3847_135788C.1
acaacaccaccctctttataataacacccattttctcttcctatcaccaagccccaccatgaacccgccggaatttccctccggcagctgcggaacatcatcgccgccaggaaagaaagagctccagctccaaggtacacgcccgccgcctctcagagtcagcaaagactcccacaagatccgcaaaccgccgcttccccccaccgcgcaccaaccggcggcgctgccggagcaccggaagccggtgatcatctacgccgtgtctccgaaagtcctccacgttcccgccggtgacttcatgaacgtcgtccagcgcctcaccggaccctcctccggcgacgtatcgccagcggcgagactcgcgtcgatcgagagaacgagcccgtcggagagggagaaagttcacagcgaagacaacgacgtgaagttgatgttagaaggagtggaagtgggtcaattccccggaatattgtcgccggcgacgttgcctccgatatcaccagggtttttctcggaaccgcaaacgacgtcattttggaatgacttgagcccgttttggtcaacgaacagcttcgtggcgagtccgtcggggttactttccggcgctttggtttctccgctgccgtcgccggacatctttaatctcttcgactaattttcgttttcgttttcattttttttttgcgtgtttgatgattaatggggaatggtttgagggaaagggtgacggtggaaaattcaccgtttcgctgactattgtgccacgagttttgtagtgtaatgcgtatattgttatactgggaaaagaaaaatcaatgaggactcttcaattc

SEQ ID NO: 39634 - DNA, 253 bp, Glycine max
  Clone ID: PAT_MRT3847_135789C.1
gtcttacggcacgatcgctatatcttttctttttctttatctctcctctatagaaagaggggatgatacgtggcgtggtatacctgatcgtttggtcaacgagacgtacgtaagtcgacatagctccatttatctttttttttctttcacttagcccgcctctcccatgaccggaccaacccggatctgccctcgaaagtctctcttcattttgggagcagagcatgcaaaatcgagcaattaatcttataaa

SEQ ID NO: 39635 - DNA, 2474 bp, Glycine max
  Clone ID: PAT_MRT3847_13578C.1
gcgtggtgtcggctccgatgcctacgagagcgcgaagttctgaaagtgctcgttttgagatgctgaatgatcaacatagtgctattgttctacataatgtaaatgctagcattcacagtgttgccaggctcgctcctttacttccaaccatgcagaaggagcttcctatttttcctctgttgtcgatgcctattctcccctgcccgagagtgtgtctgtggtgtgtatcatgctgtggtaatcctcctatgtacaactaatacagctatgtactgccctcaattcccgtgttaagcggtcccgaaccgccgagtactcggcccaaagtctctgagtggccagacctggattttgaggcaagacaatacacagcacgaatcttcggtgatgatccaggatcagaatcaatacaccccccatgatcaatccaaggacttgattagggaaggttcatcgaatgaggacaggcaatccagggctgagctttcaacttggggcagatggggtgcacgttgacattgataccagtattctagcttccttctcgcgttcactctcggtctaatatatcggcatccatatccaaacacctatgtgataacttctgcgagtgcaaggaagatttgtagcctcagctggccaattttctggtcgccaacctcgggtattagtagaggaaactctaatttaaggtcaagcgttgatgggattcagattaaacaatcatcaaaattcattattattaatgatttacggggtaaagtagttcatatggatgtagtgaaaagaaagggaaaggaacatgagaaattgctgatttctgatgatgatgctccacaagataagaagaaagaaagtagctggaattctaacttactgaaatgggcttctggtttcattagtagtaatgaacaacctaaaaatgctgaaaccaattcaccagagaaaggaaggggtggacgccatggaaaaacgattaatatcttttcaattgcttctggacacttatatgaacgctttctaaagattatgattctaagtgttctaaagaatacacaccgtccagttaaattctggttcataaagaactacctgtctcctccttttaaggatctgattcctcacatggctcaagaatatggttttgaatgcgaactaatcacctacaaatggcctacatggttgcataagcagaaagaaaagcagcgaataatttgggcatataaaattttattccttgatgtcatctttcccctttccttggagaaggtcatttttgtagatgctgatcagattgtcaggactgacatgggagaactctatgacatggacataaaaggaaaacctctggcatatactccattttgtgacaacaatagggagatggacggctatcggttttggagacaaggtttctggaaggatcatttgcggggaaaaccataccatattagtgctttgtatgttgttgacctgaagaagttccgagagactgcatccggagataatctcagagttttctatgaaacccttagcaaggatccaaatagtctagccaacttggatcaggatcttcctaattatgctcagcatattgttcccattttctctctgccacaagaatggctttggtgtgagtcatggtgtggtaatgctacaaaatcaaaggcgaaaacaattgatctgtgcaacaatcccatgacaaaagaacccaaacttcagggtgcaagacgaatagtatcagagtggccagaccttgatttggaggcaagtaaattcactgcacggatcttaggtgatgatctagaacctttgcaatcccctaaccaatcaaaggatttgactagcgaaggtgcattgaaagaggacttggaatccaaggcagagttgtgaacatgatagacaaaagttttgtgcaagtcaaagttcctgaaaaaaaaaactgttccttgatgcaatttggcaccgcatagcatcatgatatctttctgatcatggactgcctggctgatatatttgcattcccaccaaacacaattaacaacagtggagtgcaatgaagatttgccttctctgttggccagttcaaggatcataaagaaaattttgattagatagaaatgttagtgaatttttaatcttgacataaacgcaattaaagccaacatggttgcctatccatgctgattaagccggtacaccggcaggccgcaaccaatgcctccaaccccctgccccattaatgccctttgttttacgttcttatcaacaataaatattttctttacagtaggggaaaactgggatttagcaatggccaatataagaccgctatagacttgtagtgtaacattattctctttatttgctgattattaatctctcccttgcaatgggtggtgcattgcaacgacctccggctacctcccctatttcacccctttataaattattataattgtccttaaaaaaaa

SEQ ID NO: 39636 - DNA, 338 bp, Glycine max
  Clone ID: PAT_MRT3847_135790C.1
ggaaatggaagttccatttgatacagaacattatagtaataatacacgccaaatttgttaatcaaactaaaacagcatgcttcataatgaaaaaggaccatcaacaaactgtcgatatattgtaattccttctaacatgatctgaatactgtattaaaaatccattctggcaaattactgtaccgttgtcttggaatccacactaagaagccatttaagcaaaggtttggccttttttaatatctaaaagtccttgtaggttccattaagcctttttagataccattgtactatattgtcttccttccaacaaatcagaattataaagtgccctttaa

SEQ ID NO: 39637 - DNA, 537 bp, Glycine max
  Clone ID: PAT_MRT3847_135791C.1
cggacgcgtgggcggacgcgtgggaaaaaaaaaaaaaaaaaaaaaaaaaaaaaaaaaaaaaaaaaaaaaaaaaaaaaaaaaaaaaaaaaaaaaaaaaaaaaaaaaaaaagggaaaaaaaaaaaaaaaaaaaaaaaaaaaaatacacataaaatgaaataaaataattattatataaaaaaaaaaaaaaataagataaagggggggggtttttaaaaaatataaactggaaaaaccttggcgttaccaaatttaattttttaggaaaaaatccaaatttaatcacctggcctaaaagtaaaaaagcctgaacggaaaaaattacccaacatttaaacaatttttaatggcaaatggaactcggcttttgaaacggagaataaaaagaaagagggggcggaggttatcgcgcaaggtaaacagataaatttgccatagcttaaacgccccctcctttggctttaaaaattaagttttaaaagagggtagccgtttttccccgtaaagttttaaattaggggttcccttaagggataaaa

SEQ ID NO: 39638 - DNA, 274 bp, Glycine max
  Clone ID: PAT_MRT3847_135792C.1
acattaacgccgaaactttaattaactatggaaaaaaagaaggggcgcaaagtcccaagaaaacactgttttaacacctggaaatgaggggcaaacacagctttttgtctcgccataaaaacttctcaagagctctacctctttttgtgacacgcggagaaccccctgcaaatctgagatctctgaacagtctcccgcttagacctctctcacatgtgtggagggggaacaacactcatcagcgggagcggcggcagcagcgacaacagatgta

SEQ ID NO: 39639 - DNA, 223 bp, Glycine max
  Clone ID: PAT_MRT3847_135793C.1
gcgccgtatctctttagtcatcctaagccttggcgactatactgctagcatcacctgctgcactctacccgcaatcgcacagttccacctctcaccttaacttctttcactcccaaactctctcttcaccactctacacttccttcgataatctctcagcctatccaacctacactctttccccaacccatcctgagcactgtggcaaacgtgaccccaaaac

SEQ ID NO: 39640 - DNA, 296 bp, Glycine max
  unsure (1)..(296): unsure at all n locations
  Clone ID: PAT_MRT3847_135794C.1
gcaaccaaacttttgggtagtaataaaaatgatggcctaaanaaaagttcattcccactatactaaatatgtttatatacaatacttaatcggcctcctaccaagacaacattcctgaaaaagctgatcacattttcaccaccaaaagtgttttccgggatgaaacatcatacaccaattatgtgaattacaacaatttcgagacattgtcctctttctaattagctaaacctcttgtaccccaccagcgccaccaccaccgcacaagatgtttttttctgttccttcttccattg

SEQ ID NO: 39641 - DNA, 646 bp, Glycine max
  Clone ID: PAT_MRT3847_135795C.1
tacggctgcgagaagacgacagaaggggattccttgcggctcgtctcttgtttctctcataaccttagggaggacaatcaatcaagaagagaccttgcttggttcgttctcccacatctaataatctaataaattgaaacatgggcaactgtgctagctaccccaagaccaacgaaggtgaggccccagtgcctgtgccggtgccagaacctgtcgccgaggaggtcaaggttgagcagcaagagaacaaggctgaggaaaatgtcgtcgaggccaagacagaggaaacccctgtcgcctctgctgacaactctcttgtcaccttgctcaatgagaatgaagaaaagaaagaagagcaatttgaggccaaggaggtgaaggctgaagccccgaaagaagagaaagcccaggcagaggatgcaaagcctgaaaccaatgaagagaaacccgcagccaaggctgagaactgagaacgtgcaaacgttgttagtttaaacctaaaaggattgtgatactccaaatatacaaatgtgtttcttttccattttgtgcttaaagaggattcattaaatcaatttattgtggagatccgttattttttttaaaaaaatatttaactatattgtatttacatgaccacacagct

SEQ ID NO: 39642 - DNA, 601 bp, Glycine max
  Clone ID: PAT_MRT3847_135796C.1
actagtctttgaagtttctaagatgacttctccctacattaattgttcagtctctctcttcatagcatttggaaatttggctgatgacaccattacttctgaggcttttccgctcaagctggcgcactgtggagagattcaggaaaaagttgtattgaaattttcacatgaggactttcttacagcttggccaactcaggtgcgtcctgccacaactctgctggctgatgggtgtccatatttgcatgctatggtgcatgatagctcaatgtctacaataccacgtgattatgtcattggtgttaagttggcaaccataaacactatgtgtgcatatgggctcaatcctgctatttcaggttctcgtgttttgggctccattcctcactctatttcacagcaaactgtctggcatgaagtggctacagtgagaacaccattgcatcatgatcctagcaagcatagctgctgtcacttttctattgaccttctgggtggaggaatggtagtggacaagactgcagatcggatcacacttatacactattctccaattctgcactgtgtgacagtgggtgcttggctgaaagggctgattgtg

SEQ ID NO: 39643 - DNA, 562 bp, Glycine max
  Clone ID: PAT_MRT3847_135797C.1
cttaatctaaactttgatgtaacaaaactatgcactcttcatagctctacaaatacaatagaaactcttgctaacatctcaagctcttgcagacacaaaataatcacaaagattattgagtaacatgtataagatgtggacacaggcagggtcactcatggcctcaaccatgttcatatataccatgttcatgcgcttttttccctctcctcttcaagcccgtgttcgaaggtacaccaacaaattcaccagctttgtgtacccttacatcagaatcaggttccacgaattcaccggtgaacgcctcatgaaaagtgaggcttacaatgccatccaaacctaccttagtgaacactcttcccaaagggcatcaaagctcaaagctgaagcgatcaaggtgaaagacacacgcaccccgttgatgcttagcatggacgataatgaagaaatcatagaagagttccaaggagtgaaagtgtggtggggttcatacaaaaccacctctaaaacacagtcctttccttggaactcttcttcggatgaaaaaaggtactacaaactt

SEQ ID NO: 39644 - DNA, 172 bp, Glycine max
  Clone ID: PAT_MRT3847_135798C.1
aacaatatattcataaaccaaatacccatccattatctctaaattaatcatcacaatatcaaatataacactcctaaataccaactttaatctctctttaacaacatctacattcatctacaaataatatctactaacattacccaccatttatatcttactactacatatt

SEQ ID NO: 39645 - DNA, 249 bp, Glycine max
  Clone ID: PAT_MRT3847_135799C.1
agaaactttggagtcggtggtctgcagataaccactttcatgatgctgttctagctgattacaaccctgctgatggccggcatgcattggtttatgatagtaatacagtaaatgagtcttgagaatgggtcgatctcaacgagatctcacctgaggatatagaatgggaaggtgaacatcctggcattctccatagaagtggacatggtggtcaatgtggtggtggtatgagattctttggtcatcgtg

SEQ ID NO: 39646 - DNA, 679 bp, Glycine max
  Clone ID: PAT_MRT3847_13579C.1
aaatgatatgaaaatggataattgtttgaatgtttacagtttacatgtatgtatgtgtactttggggtgtcctcactgagtctaagtagactccctcttctattagggatgtgaagaatgttgtattattccaattttatttataaagttgatagtagttttgttaacccttttgctttgaattgctataaactttgacatttatgattctgtttcaaaaagtcattattcatgaaggttattatcaagttttgaaaaagtgacttgtaaattgggaggaaatgataagctttggaattacgaagatgtctctaatcttggctagtcatgcatggacagatttagactgtgataataatggagaaatatgaaggaaggatattgttagatatggaatcattcattagcattcaagcaacagcttaccttggtgcatattttgaaggtcttgtgtgcttaacttatattttcataaactaatttctctcatggagttatcttaatgataattattcctacttacgagatttacatcaagttttggaaatgaaatttgtctgtgtggaataagaatgcatggcctgataaatctcgtttaagttctggtggtttacacatggatgtctcattgatgtttttatttttttgcatggatgtctgatgtgtttgacatgagttt

SEQ ID NO: 39647 - DNA, 198 bp, Glycine max
  Clone ID: PAT_MRT3847_1357C.1
cggacccccaaatgttgacacactgtatgccaatccgctcaatttacaacttgggacgacccagcaatgttgtcaccggatgcttacgcgttcctcctttacctcttttaagacgtgttcaaacttggcggaatcaaaatcctaactgatgcccgcgaaaacacgttgtttgttgacacttttatgcatcttacatgc

SEQ ID NO: 39648 - DNA, 2066 bp, Glycine max
  Clone ID: PAT_MRT3847_135800C.1
gtgagctgcctctgctcctcctttccatcttggtggcttcgcccaccgtgtcctccgcgggcaagcccgtgctatggtggctgtccatcctactgcttctgccatttgtggagcgctgcccctctggcctgattcttccctgggcggtctcgttgcagtaattggagcttggagagacaggatcataatgtgcacagggacatatgggcctactcctgccctggtcttggccgtgcgggcctccgctgccgatccggtggtgggtgcttcaagtgcaccgccaccctcgctgccggtcactcttgatggtcgcttcgagccggttgtggtgcgctgtgatatggaacttgatgagacagatccaactaactggctaaagttggaatctgcgattgaagaatatatacaaaagaatcatcacgcatttgaaaatgtgtgtgatagattgcttcttcctttccagcatgaggagaagtggtcagaaaatctgagatctaaattacccaagacaaaggaatcacttgagggtgctgatggccccaccttagggtggaggcgtaatgtactacttgttgaagcttcacataatccagattctggaagagtgatccaccatgcccgggaacttgagtcattttgtgctcgtaatggcatacgtttatccctaatgcagggtttgtctgggattgtaaaaacagtgccatcaacaacattcccaactccatttcaatcacctctgtttacaggaagcttcccttcgagtccccgcatgtttagtcctgatcttggtcagaggattggacgaattgatctggtcccacctttaagtttagatggtcaattagggaaaacaattgcatcacctccaatgtctcctcgaggacttagacagctctcttttcccgtgaaatcattgcatgagaaattgcagaattcaccgcaagtgggtgttatacatttggctcttcaaaatgactcggatggcttaattgtgagttggcacaatgatgtatttgttgtggctgaacctggagaactcgctgagaaatttctgcaaaatgttaaattcagtttgttgtcaacaatgaggagccatcgcagaaggggcgcatctctcctggccaatatttctactatttctgatttagttgcctttaaaccttatttccaaattggaggcattgtccaccgttatctaggccgtcaaacccttgttatggaagatgatcaagaaattgcttcatatatgtttcgtaggactgtcccttctatgcacttatcccctgaggatgtacgatggatggttggagcttggagagacaggatcataatatgcacagggacatatggacctactcatgctcttatcaaggcctttctggactccggtgccaaagctattgtttgttcttcaagtgaacctccagagtctcagtcgatcactgttgatggttacatagagtggaatgtgatggaaaatgggaagtttgaaattggggaagatgaagcagatgatgagaatatacccgccagtccagtaagcgactgggaagatagtgacgctgagagaaatgtggaccacactttttctttttgggacgatgatgaagaggaactgtcacattttgtttgtcaattatatgattcattattcagggaaggtgctagtatcaatgttgctttgcaacatgctcttgcctcatatcgaagaatgaggtatgtgtgccatctccccggcgtacaataattttgttcacttaatctttcccaataaaaaaagcacgaaaataaaggatgagagggggggaaagatgagtctgtgtgagagaacatgttcttataaaattatacggtcgataaccaatttgaggcttataaagatgtgcatttatagttgtttccgatgtcccttgtacttgttcagttgttcctatgtaactgtaatgacattcggaggattagggcttcggagtatttttattatagtagattgccatattttcttttttgacgaatcaggttattctaagactcagatttataaaatcatttactttccgatgtag

SEQ ID NO: 39649 - DNA, 307 bp, Glycine max
  Clone ID: PAT_MRT3847_135801C.1
agctatctcttctgttttatattttcattgcacttgcacttgcatgcattgcacactggtaacttggttttaaggtactaagagattacttagtgggcttatggttccaacttcataataataatagtaggtattattattattattgatattattatcgttgatgctatgatgctgttattccttttttctgcttaggctttttcttgttttttttctacccacaccttttcttttctcatccagctagcaggaaggacccttattaagcatagtaaactgggcctagaattttgttcctgtagac

SEQ ID NO: 39650 - DNA, 459 bp, Glycine max
  unsure (1)..(459): unsure at all n locations
  Clone ID: PAT_MRT3847_135802C.1
accagcatagtctaaacgatcaaaataaggtaaagcttgaagataagttttgtactctattaatttctcagtccctctatggagtaatccaatatgtggttccgcacgttccaccacttctccgttcatttccaatactaatcgtaaaacaccatgagcagcaggatgttgaggtccaaaattcaaagtgaaatttttgatttgcccgttcctagtcgtcatgggaaaaaaggaagaaataagaaagagattattccctaagagcttgtccagtaccagaaatgcatctccttgcgtgcgagagacttctatgccagccgttattcccggctctgttatgaaataaagcggcagactcatcttacaggtgttccctaatgagggattttaggggattanggttctcctttatctnctccacccatccgcggagggtttcaatagaaatctccgcagata

SEQ ID NO: 39651 - DNA, 992 bp, Glycine max
  Clone ID: PAT_MRT3847_135803C.1
ggctcgagagggcctggagcccatatagtgaagcctaatatgatagagcgtgaggatcatgcccatggaatgaagtaactaacccagtcccttgacttggctcgctagttcgattcgattcgattctcggagatgaagaagggcttgtgttggctttgagtttgtgtttgggttcatcatcggagcaattaaattcgcgagaatgcgagaatctcggtttcatcggacttgtcttgtgctccgactgcaacactctctctgagtacgtcaaggacaaagtgattatttgaatcgtctaaatcaatatcgccagagggtttggacttgtaaaattactggaaaatctggcttgacttatgaagattatctggtgtcagagaagcatgcttatgtagatggtctttcgagtaatgtctttcaataaaaatccagataattttgattaagtaactgcatctaattgattaagctttgtagtatttgttatttcctgattactatgtattaaaggtttttctgaattactaatttgtaggtgcctgtgtatattggtgcacaagttttggcatcagtgagtgctgcatttgctctgaagttaatttttcatccattcatgagcggtggagtgacggtcccttcggtgggatatgggcaagctttcgctgcagagttcatggtcagctttactcttatgttcgttgtcactgcagtggccggcggcacatgagttatgcgagagttcccgggaatcattatggtgcaggtgcgagagttcccgggaatgatggtgggagccactgtcatgatcaacatactcatggcgggggcagcaactgggagttcaatgaacccggctagaacactgggtccagcaattgctgcacacaactacaagggcatatggatctatctcacagctccaatacttggatctctatgtggggcaggtgcctacactgtgctcaagctgcctgatcgcaacactactatgc

SEQ ID NO: 39652 - DNA, 323 bp, Glycine max
  Clone ID: PAT_MRT3847_135804C.1
gggcgccccttttttttttttttacggcaggaagttcccctgaggaaaatccctctcgatgcaccatatttcgtgattatccccctgcattcatcacgtcaactctcggcccagtcacccaagttttgcatgaccgtcatcgtttttttggcttggtgtgttggccctccaggttaccattttatgtagtggtatctgcattcgtcatatccgcaggcctcaaatcgaacgggatacgagcaccaactattttggtcacatttacagctggccagcagtgttgaattcctccacggccgcctgggcacgcttgctcatgggct

SEQ ID NO: 39653 - DNA, 668 bp, Glycine max
  unsure (1)..(668): unsure at all n locations
  Clone ID: PAT_MRT3847_135805C.1
ggctcgagggatcatgtccatggaatgaagtaactaacccagtcccttgacttggctcgctggttcgattcgattcgattcgattctcggagatgaagaagggcttgatggatagctatggcgttgctgtgattgtgttggctttgagtttgtgtttgggttcatcatcggagcaattaaattcacgagaatgcgagaatctcggtttcatcggactcgccttgtgctccgactgcaacactctctccgagtacgtcaaggacaaagtgattatttgaatcgtctaaatcaatatcgccagagagtttggacttgtaaaattactggaaaatctggcttgacttatgaagaggctctggtgttagagaagcatgctgctgagaaagttcaacagattccggaagaattagtggcacctgctctaaggattatccattacaggaatagaaagaatcagagtcatgacactggcaagaaagaaaatcatgaagttcaagccaaccaggncccccccaaagaccaaaaaacataagcatcaaccacttgcaactcacacattttcactgctatgttaatgtgaatgtgactaatgtcctgtgcatacataagtaagttgcatttgaaattcgtcagattntgcaataaataaccaaaataaaggccttctc

SEQ ID NO: 39654 - DNA, 190 bp, Glycine max
  Clone ID: PAT_MRT3847_135806C.1
caaagacgagcccgaagaataatacggcctgcgtcaaaggcgcgtccgccgtcctccccttccgcggcggccataatcgtatgtaccgaatccgatccaccgaaaagtcactagctactaaggcacgaacacgacgaagacctaaaatcaagtcgcgactctcgtacgcgtatatgtctaacgttcctcc

SEQ ID NO: 39655 - DNA, 370 bp, Glycine max
  Clone ID: PAT_MRT3847_135807C.1
ggacggcctccccaaaattttaatttaataccaaaataatctgcaatcccaattacaattgataaaacataagctttgacaagcaagataaaaaaggccgtgattgatgacccagagggggtttcaacagacaagtttaccaacccagggggaatttttgccagaaaaaatgtagccagggggttccaattgaatgctttttaaagtattgaagttttacttccaggaacaaaatcggctagcattaaaattgatagccgctgtaaattgtcagccactaccataggaacatatggaaaattgcaagttctccgaaaaattgtttgagaatgccctgctaaaagcacaggtaataaccaaaacagggggg

SEQ ID NO: 39656 - DNA, 364 bp, Glycine max
  Clone ID: PAT_MRT3847_135808C.1
gccagagaaattcctacgagatattgcaacttgggacaaagctgatagtgctcttacagaacctttacatgattctggcaagctttggcagatgaatgaaggggatggtgcatactacgtaccaaagattgacatctatgtatctgatgcattgattcggaaattccagtgtgcagctttgcatctcgacttccaccttcctgatcgttttaagacgcaattcttaactgaagatgaagccaaaattgagagacctgccatgatacacatagccatgctatgatctgttgaacgcatgtttgccatacttgtatagcactacaggggaaaatggcctttatggctcagacctcgtcaagcgata

SEQ ID NO: 39657 - DNA, 1307 bp, Glycine max
  Clone ID: PAT_MRT3847_135809C.1
atccactttgattcccattactcatttccaccatttcaccttctcaatctgtttctctgctttactaatttgtcccaaatcagaaccagattgagcttctgcacaaccagaccagagattcaacgcagaaactgtgcttatccctggtccataggatctgatttggttcataagagagtagtacacgtttcattgctcgaaatagagttgaaaaatctggagtttccatgtctgagaaaccatcttcatcgttgacatctaccgtagctgctcgagaagttgatcccttgttgcaggatttgaatgaaaaaaagcagagctttaggcgcaacgtggtgtcgttagcggtggagttgaaggagctacgtagtcgcctagcttcgcaggaacaatcgtatgctaaggaaactcaaaccagacaggaagcagagacaaatgccaagaacatggaattgcaaattggaagattgcagaagaacttggaagaaaaaaatgagcagcttcaggcttcaacctcgtctgctgagaagtatctgaaggagttagatgaacttagaactcaacttgtagcaaccagagcaactgctgatgcaagtgctgcatcagctcaatcagcgcagctccaatgtttagaacttgtaaaagaattagacgagaaaaatggttcactaagagagcatgaggatcgtgtcctaaggctaggggagcgactagacaatttacagacgtatcatcaggatcggaaggcatttttgcggtgatctataaaattacattgcgtaaaaaaaaagaaaaaaaggagggtgctgaagaagaaagtgttgaagttagaattctgagagcaggaagctcgtattcagacacgaaaactgcaaaggatgggtgaacgacgggacaaagctatcaaagaactgagagatcaattagctgcaaagcaacaaagagaagttgcagccgcagataagctaaaccagaatttctgggacacttctggattcaaaatggtggtctcgatgtccatgttgatcttggtggtattttcaaggcggtgaaaccattcctatatccaaaacaattcttgtatatagacccatatataccttcaaattctaggagtctagacaagttgtagaagccattttgcgcggcagtttttatagataatctactagctttagcttgtgcaaaatgtacgcgtagcaccaggatcagaaggcatttttgcggtgatctataaaattacattgcgtagttgcatttatacatttatggccacatcattactctttgttgggccagttgatgtt

SEQ ID NO: 39658 - DNA, 648 bp, Glycine max
  Clone ID: PAT_MRT3847_13580C.1
tgcataatatatcatcaatcatttgttgtgccgcaaactctctcagttgaaatgattttggcccagatattgatcaacctaacattcgatgaacaagaagctctatattggaggcttggggaaattttacaacaggggattacaaggaaatcttagattcatggcgaggtgtatttgttctgtcaccctattgtattcctttacatacagggggaaaggaaaagatactctgtacatgcgttttctatcttttgggtgagacgattcaaaggttcagaagctgtcaagatgtgcatagtgtatgttgaccgttagttccattctgtttttctcgcccgtgtttgaatagttgattgatggctttgcttgaacagctaccgttcactcgtgatcttaaataattgacatggccaatggcagtaattgaacgcctgtgatgtattcaattcctggaggtgaggggtgttaatatttttcaattaccttaaatgtagcttgaatcacgttttgataatatattctgttctaatgcgatcaacaattatttttcttcttctatcaatgttgcctatattgtgaatggaagcgcagattgtaatgtgtgaacaaattatatgatgaataggatataaattgttttccatttct

SEQ ID NO: 39659 - DNA, 309 bp, Glycine max
  Clone ID: PAT_MRT3847_135810C.1
aaaaaaaaaacccaaaatatgcaaaggcccattttttttttcccttgatatattaaaaggccctgggcaaactcctgggcaaaaggagttcaaaaactggacaagcaagctaactttagtagtataccaaggccgggggattttttaactaagttcaaaaacggaaaaaacaagctagctaccatttttgactggagcagaataccaaattttgaaaaaacttaacgaattcaattaaaacatcatcaggggattgggataccgggggaaaaaaaaaatataggtagcttggatgttcaatttttggtg

SEQ ID NO: 39660 - DNA, 264 bp, Glycine max
  Clone ID: PAT_MRT3847_135811C.1
gacacaccgtttgttctattcttaactcaacttctgctacccactctcttcttcgaggtccaaccacgcttttctctacagtcatgggcaaggtcaagatcgggatcaacggatgtgggagaagtgggcgtttggttgccagagtggctcggcacagagacgatgtggcgcgcgttgccgttaacgaccctttcattaccaccgaggacatgacatacatgtttaaatacgacagtgttcaggggcactgggagcatcacgagg

SEQ ID NO: 39661 - DNA, 404 bp, Glycine max
  Clone ID: PAT_MRT3847_135812C.1
agagagcacttccttaattagttttttctttaattgcttgattttcttgtgtaattgatcggaaatggcaccacaagcagattttggaaaatttgggtttgaaatagaaaagctctttggcaggcaaaagagttttggcaatggcaacgctccagccactcatcaaaatctctgccaatacaaattttatccaacgtatggtgctaccaaggtggttcacatgcatgtagaagatgtcaagtgcaatgaagctgcttcaagattcatatcagaaaagagaacggagcttcagatgaaaggtttgtttgggcagtgattattaataatttaatattgtagttctactgagaaatatttagcagttttttttttttcctttttattataaactttaattagatgtc

SEQ ID NO: 39662 - DNA, 338 bp, Glycine max
  Clone ID: PAT_MRT3847_135813C.1
gttgcagttcatgaatcagtcgcagtatgatatttacatctgcgattagctatcttgtcgtgtctttgctgtgtagctttcgttcgcgggggtatgcgtttctgtcttgcatttggatgcactttcacgtgtctgtctcggaacggttgtggtggttcagattgtactgactgcttttatccatgttttaagcttttcttgctccgagaatgtagtccagttttataatgtattgtgtctttcacagtgattctatgtaattattttgtcttgtgaatccaatgctctgtatacgatgtacaaacacatgcctatgcacctttgtgtgataatataac

SEQ ID NO: 39663 - DNA, 659 bp, Glycine max
  unsure (1)..(659): unsure at all n locations
  Clone ID: PAT_MRT3847_135814C.1
gtatttttggatggttggatttgtttggagttaggggaggtgaagtggggggtagtgccatgggagaacaggatgtggaaaatgaacttttgcatgtatgatgaagatgaagagactaggtactcgaggagagcactccaggtgccctgaagaaagatgtgaaaggatcgtatgtgtacattgcagagttttggtttgcgggactttttactgatggccgagctgctgagaggtatagttgagtgggggtttgagcatccttgagaggtccagaatgagtgtatttgctaggccattttgggtatggatgtcctgtgccaggncaagtctgggatgggcaagacaggtgtgtttgtgctgggcantttggagtagattgagactgttaatggtcaggtatgagtgctggggatgtgccagaagagggaggtggggttggagatgaggggggagggtgaggggttgtgtagggacatgggcaggggtgagggtggtggggtgtttggagggctgtgggttgggagggatgaaggtgggggggggaaggagtggggtggtggggggggggggggcgagggggggggtggtgggtggtgggtgggggggggggggtggtggtggtggangggggggggggttgtggggtgggatgggggggg

SEQ ID NO: 39664 - DNA, 346 bp, Glycine max
  Clone ID: PAT_MRT3847_135815C.1
cggctcgagctggaaatgccaatggcactgacctagagaatggtaaagggattcctgtaatgatacctcctgttgagatggacgataagtgggtacagtgtgatcggtgtcagaaatggcgtcttcttcccgttggaacaaatcttgacagcctacctgaaaagtggctatgtagtatgcttgattggctgcctgacatgaatcgatgtagctttagtgaggatgaaaccactaaagcacgtattgcattatatcaagggcctcctcttgatagtcaaagtaacctgcagaatgtctccggcagtgttatgctgggaggaaccatggcaatgtcccagcatcctta

SEQ ID NO: 39665 - DNA, 184 bp, Glycine max
  Clone ID: PAT_MRT3847_135816C.1
tgatattgagccaaaatttctattactgtcctctgaaggcaaggacggctaaatatcgaggttttctgtagaccaatctaaggaggccacaaccgaaatagcatgactcttatacaaagtagaacaattcaatacttgataatagtggctgcttgtaagaaaggcctgttaatggtcaacattg

SEQ ID NO: 39666 - DNA, 642 bp, Glycine max
  Clone ID: PAT_MRT3847_135817C.1
atatgtagcccaggggatgaccctgaacatgtgaagaccaagttaaggcattgggctcaagccgttgcttgttctgtgatgcagtcttcttgagagagaaaaaagtgggggaggtagtttgttttgtacagagaggggaggggaaaagctagaaaaaataaaataattaagaaaataagaaaaaaaaggggggctggcggattattcagaaggggggggttttcgttgaaactaacaaattcaatatggttggaagttgcttaattagaggacattatggtttatacaatagccaatcaccccatttttcttcaccttttttctcttcgagttgttttaatctcaagctgtctcgcgcagggtgtattcgtcttatagtaatttttgggtcacaggccaggtaaaatacaatagcattcgggtcgggtggttaggagatatggcctttccttaacatgtattgtcaagatatattcaagagacgtcacaccaatcatgagtatatatattgagtagatgagttctacccatctttagcttaggacatcctttgacttgtcgtgacttgattgtaaaagataaacatgcaaaatgtaattgttccctctgattctctctttccccacaataaaaaaatcaaaa

SEQ ID NO: 39667 - DNA, 370 bp, Glycine max
  Clone ID: PAT_MRT3847_135818C.1
agcagtatattttcctgattttctcaatccaaaaacagtttcctggtgggttgccgagattcgtcgcttccatgaactagtgcctgttgatggcctatggattgacatgaatgaagcttcaaatttctgctctggaaagtgcacaattcccaagggaaaagtgtgccctagtgggacaggacctgggtggatatgttgcttagattgcaagaacatcacaagcacacggtgggatgatcctccctacaaaattaatgcttctggagtacaggctcctataggcttcaaaactatagccactagtgcagatcactatgatggagttttggagtatgatgctcacagcatttatggtttctctcaagcaatt

SEQ ID NO: 39668 - DNA, 255 bp, Glycine max
  Clone ID: PAT_MRT3847_135819C.1
gccggagctgaaagcggagagcggcaccaaagaacgttttttttttggcgaccgcaaaccgaccggtaggggagctaggaggtaaagaggaggaccactacaattttttttggtttggaaaaaaaaaactgaggaaatagtaaccggcataatctgacacaaaatacaacgaaagcgtaaagtgcaatcccgaatgccacagagaatctaattagaaaaacagcggaaagcaacgttgggaaaaaaaccaaaaac

SEQ ID NO: 39669 - DNA, 542 bp, Glycine max
  Clone ID: PAT_MRT3847_13581C.1
cattccacatctgggttgaatggagggaacattcaaataggacaagcaagtggaaaaatgaaagtgatactgagcatgaagatgatgactcatgttgtgaaggatcaagttctgatagaactgttctgggtctgcctccaacaggtccattaaagattgaagatgttaaaaatgctttccggttatcagctttaaaatggcatcctgataagcatcagggcccttcccaggcagctctgatggtcaatggttttcaatgtttgcaaagggacaactgaaaatttattgtcatatatgaaggatgaatgacaaatataggcaatggctgaagaaaaattcaaactgtgtgtaaatgcatacaaaacattatgcaatgctctctccccatcttaggtggcttgttacagcttcaagtcagtaaagatatccatcacaattgatcaatgttgtacgattaaatttattattttgggttggcatttaattcacagtaaggtcataattgcactctcttagtggaaaagaagttaattttttgacgc

SEQ ID NO: 39670 - DNA, 237 bp, Glycine max
  Clone ID: PAT_MRT3847_135820C.1
acgatacattctggcgtatgcccgaatgctacattcacggtttttccatccagtaccttatgggtcctctggaacttattgacagagtccaggaagaaacaaagagccatactgatcgcaaaccccttgttgtgggactgtcgaacattacagaagtatcctatgatgcgtcctggttgaccttaaccaaaatgaattgttacctgccttaattaatgtgtacctaaagtacaagga

SEQ ID NO: 39671 - DNA, 677 bp, Glycine max
  Clone ID: PAT_MRT3847_135821C.1
gtccgctgagagtaccgcagagacgtatgaggacagtgaggtgcaaattgcaggtcaattgcaacttcttgggagtcctgagagattgaggaggacggtttgctctgcggagaaagtaggacaggtccgatccttgcgtctccaagaacttccacgactatcatggcggacgcggcggcagacttagaagatgccggagggtccgcggtcatcaaggatgtcttcgccggcgcggtcggcggcatggcgcaagtgttgattgggcaaccctttgatatcctcaaggtgcggctgcaaacctcgcccgtgccaaccaccgcacttgcgacagctcgcaatatctacactcacgagggcgctcttgccttttacaaaggaaccctcacgcccctcatcggtattggagcctgtgtttcagttcaattcggcgctttccatgcagcgcgacgctggttcgaagcgcgaaatgccgccgcccacaagggagcagggctcctaagatccaaggatctttcgtacacgcaatactatctcgccggcgcattcgccggggatctcgaatactgttctatctgcgcccatcgagcatgtacgcatccgactgcagacccaaccacacagcatcgcggccccgtttgtacagcggaccagtcgactgcgtgcggcagctctgttcg

SEQ ID NO: 39672 - DNA, 286 bp, Glycine max
  Clone ID: PAT_MRT3847_135822C.1
gtcgaccacgctccgacacgcgttcgaacacatcgaaggactacacattttacacttacaatttaaaagggagctgtatttttaacggagcaaccgtatgtctaaagtagtttggtcaccctaccatgacactatccatcatgtatagtactactctcctcatcgtgcttacactttccatgcctcctttcaagatatcacttatgataacgagacataacatttctaataaattgaatgctcatatactcatctacattttttttaaatgtatcattattgacat

SEQ ID NO: 39673 - DNA, 403 bp, Glycine max
  Clone ID: PAT_MRT3847_135823C.1
tcccacgcgtgcgatcgagataactagaaacagtgtgatgaaattgactgcgcttggtctgttggttgctacaattttggcagcatggccatggcatgcgaacgatatgttgcctatacgaatgaacactgtctatggggcccagactgcggaggcgagatgcccatgatggacgcttgctgaggaagcacacaacatgtatggctttgagaccattcctaaagagtgcgctgaaacaccaaaggaatacatgcatggcaaacagtatagctcagactacaatacaggtaaccaacacgcttacttatatgcgagagacctcatagtacatcccaaggacacattcgtgttcagtatagatggccccgtactgtctaatattccatactaccaaaaacatgga

SEQ ID NO: 39674 - DNA, 223 bp, Glycine max
  Clone ID: PAT_MRT3847_135824C.1
tacggctgcgagaagacgacagaagggggtgcgatgacactgatggattcagagacagacgattagtggaagatgtcactcccgattctcttgagtgtagcactttacatactgatacctcgctgctcataccaccacaacattggaagacatggaaagatcggattattacgctcttttctccgagatatatagcactctgacttggctctatatacccttt

SEQ ID NO: 39675 - DNA, 475 bp, Glycine max
  Clone ID: PAT_MRT3847_135825C.1
tcctcttctccttctccttcttggatttcaattcatttctgttgatggttcagctgatgaagaattctcggaagcccgaaacgtcttcgtgcggcgaccccgtgaagttggagatcgttgaggacccactggaagaagagcatgggcctcacaacaagcgctgcaaaccctctccctctccctcgcctcagcctcagcaatggagtgcttccgatgatggttctgtcagttctccatcccatctgaacatacttgacgagccgagcccgttgggtttgcgcctcaggaagagcccttcactgttggatttgattcagatgaagctttctcaaggaagtgcgcagccgagcgaagatttaagctctggagccaaaagggagagcagggctgctgctgtgtccggtgccggtggtgctgacaagctcaaagcttctaacttcccagcttcgctgctgaggattggttcgtgggagta

SEQ ID NO: 39676 - DNA, 297 bp, Glycine max
  Clone ID: PAT_MRT3847_135826C.1
ggctcgaggggaagtgttcacagcaacatttttacctatagttgaagggcaggcgcgcgcgcggggacgagggagcagggaaagcaacgaacaaccccagacgaaagcgacggagatcctttacgtctctggagggctaaggggcatcaaaatcggctcaacgtctggtgggtgaacgacccccagcacggaatctgacccactgagctacacgaactaaactggcacccccagctgctgcgccgtgatcggggggacaacgagtgttattacagaatgtaagggcaacgcccgcag

SEQ ID NO: 39677 - DNA, 384 bp, Glycine max
  Clone ID: PAT_MRT3847_135827C.1
ggctgatgatgacagagccgtcgatcctctgtgatgataaacttgagctggctaacacacatgaattctttgctggacattctccagcggattcttggttaccaatttttgtgaattgtctttatcctgtaagtcatttaccttcagaagctgtcgctgcaaatgttgcatgtcgtaatgcacgtggtgatttacctaccactgctaacttgagttctgcagagcacaatcaggcctcctatatcgacattcttattctcacagcactttggcaaaggtaagaaaatggtgattattactacagttgatccttttccagtacctgtactggctgatctttttggcgttatgaatgaaattctgagttccaacgccactaaccct

SEQ ID NO: 39678 - DNA, 1190 bp, Glycine max
  unsure (1)..(1190): unsure at all n locations
  Clone ID: PAT_MRT3847_135828C.1
aaccaaacgattgagccaaattctgcgcttgaaccgtactacatttataaatcttgttcattcaaatattggagatggggcaatagttatgaacaattttctccagcatttgcaagaatcaaggtatccggggatggatgttattttggcagaaacggaggccatgcttgctcggggcaaaatggacatgcccattaccacatgctttgcagtaaccagaaatgatgatctattgttgcatcgtttgcttaagaggggttcagatccaaatgaattagataggagtggaaagacagcactggtttgttgattttctctcgaatgaacacatgcattagtatatatgtataataaacacaacactagatgcttacaactttattttctaatgtaacagcatattgcagcttccaaaggcaatgagcattgtgtaaatttccttctagaatatggtgctgatccaaatagcaaagatatggatggaagtgtcccactatgggaagcaatgaagggtaggcatgaatccgtgatgaaaattctcatagacaatggtgcagacatatcttttgccgatgcangccatctagcatgcagtgctgttgagcaaaatggttggaattgcccaggaaattattccatgtggcatggatgtgacacaacctaaaaaaaatggagccacagctcttcatactgcagtagttgaaggaaacactgagatgattaacttccttgtagaccaaggagcagacattgacatgcaagatgttaatgggtggacaccaagggttttggcagaacaaagtgaaagcgaagaaattaaaaatatattccatgacattaaagatagcagaaaaccaggtgttattccaatttcaaagaatgacaacaggagtgggaggtttcaaattgatccaagcatgcttaccataccccaagaaagcatgctactgccaccttatgatgggaggagaaggtcttccagctcttttgataattccatttttggaatgatgtcaactgccaatcgtgctaagaaagatctccaggcatctgaaagcagaagcactagaaggagtgtgaatggattagccagagtgacccttagttgtcctgaaaagggggaacatgctggaaagcttgttttgctgcccaagacccttgaaaaactgctagaatttggtgccagaaaa

SEQ ID NO: 39679 - DNA, 456 bp, Glycine max
  Clone ID: PAT_MRT3847_135829C.1
ctttttcatcagaatccaaattccaattccgaaagcagccaccaacaagaacccaaccggtgtcgctgctctctctctctgttacttccctatcctcgtgtgtggttcgtactatgaagaggactatgccatggagtgacgacgatgagtcatcgtcttcacattcagattctgaacgtgatagtgaaactggaggggaaaactccaaaggtattatttcatcttcatcctcttttctctgtctagttgtttttatgactctgctgattgctctcaagtttgattcattcaatgtgaaagttatatacatttttcttgtgttgaaatttgctgattttgtttgagttatgacaataattcatgagtgactggtgcacatggtatcttgacaaatttactctcttgaattgaacaatagatgtacgtgggtgcttattgtgatatgtcccacatctt

SEQ ID NO: 39680 - DNA, 527 bp, Glycine max
  unsure (1)..(527): unsure at all n locations
  Clone ID: PAT_MRT3847_13582C.1
acgaggaactactctcgagttttcttttttttttttttttttttctagcacaaaatgatcattaaattaacttataagaacatttccagatcatcaaccatccatccaattatcaacggtcacctattcaacaggaaagataacacaggggagagaaaaccttactctgataaagattccggataaattcaatgatacacattttttttttttattatttgcatttttcccctctaataancagtgctgggaaactgctcgtgggtgttgctgatgagaacatccttgtatataagcccacaagttccatctccgatgagagggccttcccattagatccaaaggttgatccatgtcctgtttacgacagcaggcccaaatgtcacagcagggttcatggctgctccggagaaggccccacccaacaaaatgttagcgccaacaatgaaaccaatggcgatgggagcaataattcccaaattgcccttcttggggtcaacgggaatggcctagactgtgtacaccaa

SEQ ID NO: 39681 - DNA, 1420 bp, Glycine max
  Clone ID: PAT_MRT3847_135830C.1
ctaacctcgattagagcagtaaaattttggtactaaaaaattacgaaaaaaaataagtttgttttaattataatttaaattaacatcttaaaaattccacacatttcactcgcattaaaaattataaaaaagatatttatttaaaaagatgagcaaattgaatcttttagcgttttacgagttaaatagtgccgaagatccctaatcccaatttcgtagttgagaaatccctaagatctgaaaagggttatttcttttgcatcagaatccaaattccaattccgaaagcagccaccaacaagaacccaaccggtgtcgctgctctctctctgttacttccctatcctcgtgtgtggttcgtactatgaagaggactatgccatggagtgacgacgatgagtcatcgtcttcacattcagattctgaacgtgatagtgaaactggaggggaaaactccaaaggtaaatctaggaagcagaaaactgagaaaagtggtgtaattgactttgaggctttgaagcgacacgggtatagaggtggaccttctgtcctaaaagtacccgcaccaaaagaagatgactcaaagcaagattggtcgtggtccactggaaaagaaaagcgtgtagacaaggaaattgaagaatcatatgaagaacgaaagaaaacaagagaggctatttccctaggagaggagctgccagctgctctgactaggaatgacaagaagaatatttctttctcacagaaggaaaagaggaagagagagctgggtcaagctagcagaggcaaaaattatgttgaagaagagaagaggttgttgagagagaatggaatctattctggttttgatgcttaagtgtgccagcctagatagaatgtccttcatcttgtacaaaggcattgcctcattttcttgtactgaaaagacttggttctaacttgtaattgtggtttcaaatttgacacatgaattgggggagaatctacaatggtctcaactcaacttaatgactgagcttaattaagcccctttttttgttgtaggaaaaaaaaagcttttggaggaattgcttccgatgtttaatgtatttagatgaggtgacttttgaaccaatgcaaattcctcattcaaatacaaccttatgaaattatgtatttatatataaggagaatagcaatttcctaaaaatattacgaagcttttattgcatcttcatcctcttttctctgtctagttgttattatgactctgctgattgctctcaagtttgattcattcaatgtgaaagttatatacatttttcttgtgttgaaatttgctgattttgtttgagttatgacaataattcatgagtgactggggcacatggtatcttgacaaatttactcttctgaattgaacaatagaagtacgtgggtg

SEQ ID NO: 39682 - DNA, 793 bp, Glycine max
  Clone ID: PAT_MRT3847_135831C.1
ctgcggtagtggagagcctaatcccaattcttagctgagaaatccctaaaaactaaaaagggttttcagttttgttttgtagcagagaagaacgtaatcataatccaaattccaattccaaaacgagccaccaacaacaacccaactggtgtcgctctgtcagttcactttcctcgagtagcattgttggggcttgaaccaaccccttgttttattcgtagtcattgagctgtggcattgtttgtgtgtattagcagtgtttggttcgtactatgaagaggactatgccatggagtgatgacgatgagtcatcgtcttcacattcagattctgaatgtgatagtgaaactggagggggaaattccaaaggtaaatctagaaagcagacaactaagaaaagtggtctaattgactttgaagctctgaagcgacacggttatagaggtggaccttcagtcctaaaagtacccgcacccaaagaggatgactcgaagaaaaattggtcgtggtccactggaaaagaaaagcatgtagacaaggaaattgaagaatcatatgaagagcgaaagaaaacaagagaggctatttccctaggagaggagctgccagctgctctgacttggaatgacaagaagaatctttctttctctcagaaggaaaagaggaagagagagctgggtcaagctagcagaggcaaaaattatgttgaagaatagaagaggtgttgagagagaatggaatctattctggttttgatgctaaaagtgatatgccagcctagatagaatgtcct

SEQ ID NO: 39683 - DNA, 649 bp, Glycine max
  unsure (1)..(649): unsure at all n locations
  Clone ID: PAT_MRT3847_135832C.1
gcaaaaggtaagattaagtccatgaaagaaaattacttgccagagttgaatgaaatgtaccaaaaatctgctagtaaacttcagcggcatacctcccttccacaacaaccgaagtcatataaactcgaaaagttgaagaaatttatgaagatgttggaatgtgctatagcattccttcaggtttcaaaccgcgcgtccgcgcccgcgtgcgggttgaaactggattcatgtgagaagcagattataaagatcataaatataaatagacctaagaaaatcgtgcctccactgcaatatggacaatttcccccacctcatatgcagtctcattaaaatcaagtgaactctcaattgcaaacaacaaatatgcaaggaggctttgtagcagcaacccagtagaataatatgacaagcatgcaacatatttatctatttggtgtatctataggacaacaaagttagatggattcaatgcagccaattaccaaatcagattcagaaccagaaactgttcttaactgcctgcaacagatttcctgtgagttcactttgacaaaaccctgatagtgttacctaggaaattcgtttttgcactttatttaattgtcatgtggattaatcatttannntgagagnnnncgacgtgaca

SEQ ID NO: 39684 - DNA, 511 bp, Glycine max
  Clone ID: PAT_MRT3847_135833C.1
tttgtgctcttcagattccacgttgggcccgggtggcctggacctctcccaggccttcttcaggcccataaacaacgccgtccctccctccccgaccaagcgccacaacaagatctccgacctgtgcatcgtcaccggcggcgcccgccagatctccggcgagtcacgcctcaacctcctacagaggaacctgtccctcttccgcgccattattccccctctggtccgttactaccccgacacaactctcctcatcgtttccaaccccgtcgacgtcctcacctacgtcgcgtggaagctctccggcttaccctccaaccgcgtcatcggctccggcaccaacttggactcttcccgcttccgtttcctcatcgccgatcaccttgacgtcaacgcccaggacgtacaggtcaatcaatgacacttcccctgtgtcctttcctttaaatgataaaatgtggacttatatatgaaactagtattttagtacaaaattaaaaattctatggga

SEQ ID NO: 39685 - DNA, 572 bp, Glycine max
  Clone ID: PAT_MRT3847_135834C.1
gtttaggctccttgagtcaaaatttaaacgtaaaattcatcattagaagattatatggttatattaatatgatattactttccagtttattatatttggcaatacataataataatgtgaagttgtagaacaggggagttcataaattgagacataatggctgatggggtatatattgtccttaaggtgaattttgttatggagattttcctttcagatgtatcccttagagtttctgtgctttcatacataatacgataatgcttttagttaatttaggagcattgagtttcagattggaaatctaggttcaattcttgttgggtggctttcatttattaatgatggtaaagagaaatgctccttccagttattcttagcttccactctcaaaatgctttgtactggaactctttacttttatgggaaaattttaggttgggttgaatttagagttagtataagagatgtctgtcttaatatacagttgaactgaactgaactattttttttattttttccattttaggattcttaatgagctttttatcctcctttcaattgtatatata

SEQ ID NO: 39686 - DNA, 1291 bp, Glycine max
  Clone ID: PAT_MRT3847_135835C.1
gttcttctaatcaaatcctcatttttacacaaacgtaaccaaaaaccctttcgctgtttctctccagtgttctccaaggcttgcttccttctccgatggcgtcgtctctggccattgcttgcggcggaaacaacaacgccaacttagggatgcagaagcagcggtgcgctcgggttctccagccgccgggctccgtctcgatgggccggtctacggcgagggccgggaggatcacagtggcgatgccgacggtgaaagagcaagagactactccgatgatcatgatgggggcaatggagctgctcgggaagcgcgagcgaggaggagcgaaaaacgacgccctcgagggacaggagaggctggacaggtggatgagagagtcggtggtggagatcgtgaagaatttgaaagaagcgcctctgctggtgcaggtttttcccaaatcggcgacgatgacgacggagaagaggacctctcccaggccttcttcaggcccataaacaacgccgcccctccctccccgaccaagcgccacaacaagatctccgtcatcggcgccggcaacgtgggaatggccatcgcgcagaccatcctcactcaggacctcaccgacgagctcgtcctcgtcgacaccaactccgacaagctccgacctctgcatcgtcaccgccggcgcccgccagatctccggcgagtcacgcctcaacctcctccagaggaacctctccctcttccgcgccattattccccctctcgtccgttactcccccgacacaactctcctcatcgtttccaaccccgtcgacgtcctcacctacgtcgcgtggaagctctccggcttcccctccaaccgcgtcatcggctccggcaccaacttggactcttcccgcttccgtttcctcatcgccgatcaccttgacgtcaacgcccaggacgtacaggtcaatcaatgtcacttcccctttttccttttctttaaattataaaatgtggactaatatattaaattagtattttagtattaaaattaaaaattctatgggattgatacaaattgtttagtgcatgtttgcttattatgtttgaggcaaaaaaaaaaattcttccaactatcaaaatcttgattttgcattcattttgtttttatattggaatgcgtattgtagtattttcaacttcaatctaaacatgcaattaagcttaagagtgctatatttttagcattattggctcacttggtaattatgaaattcttaattcaaatcatgaaccaggaattctagcctaatta

SEQ ID NO: 39687 - DNA, 1513 bp, Glycine max
  unsure (1)..(1513): unsure at all n locations
  Clone ID: PAT_MRT3847_135836C.1
ctcgagcggctcagccgcgcgtccggtgaatattactattactaacactattcttcagccacacgctctctatccatctattataaaatctaccctcatcttaccttctcttctacatttgcagcaacaacacatttaatcatcttcgttcttcataataataataatgcacaagagcgcttcaggttccacgttgggcccgggcggcctggacctaacccaggccttcttcaggcccataaccaacgcggctcctccctctccgaccaagcgccacaacaagatctccgtgatcggcgccggcaacgtgggaatggccatagcgcagaccatcctcactcaggacctcaccgacgagctcgtcctcgtcgacaccaacaccgacaagctccgcggcgagatgcttgacctccagcacgccgccgccttcctcccccgcaccaagatcaactcctccgccgattcctccgtcaccgccggctccgacctctgcatcgtcaccgccggcgcccgccagatagtcggcgagtcacgcctcaacctcctccagaggaacctctccctcttccgcgccatcattccgcctctcgtccgttactcccccgacaccattctcctcatcgtttccaaccccgtcgacattctcacctacgtcgcttggaaactctctggtttcccctccaaccgcgtcatcggctccggcaccaacttggactcttcccgctttcgtttcctcatcgccgatcatctcgacctcaacgctcaggacgtacaggcatatatagtaggggagcatggggatagttcggtggcgttgtggtctagcattagcatagggggtgttccggtttctgagctttttggagaagccaaccacattgggtatgagaaagagacgtttggagaacatacnncaagtcagtgatagatggtgcctatgaagtgatcaggctgaaagggtacacttcatgggccattgggtactctgtggctaacttggcacggtccttcatcagggaccagaggaagatccacccctgtgtctgttctggctaagggcttttacgggatcgatggagaagtgttcctgagtttgcctgcacttgttggtagaggaggggttctgagtgtgaccaatgtgcacttgaatgaagaggagacacagaggcttaaggactctgccaagaccatccacgaggtgcagactcaattgggtatttgaattttctgtgatggtcacgtggatatccggttactgcttttttgtccttaagttttcttttgttcttctccccatgatgatatggtttgacctaaattattagtacttgctgctgttagtgttagtccctgcccccttctggcagtgcaagtgtttttgtgcgtcaagtgctggcccgtgtcttgtgtgatgtgttttgcttcctctatgattttaattggccaagtaaaaattcatttttatatacttgccaggtaaaaaaaaaaaaaaaaaaaaaaaaaaaaaacaaag

SEQ ID NO: 39688 - DNA, 1014 bp, Glycine max
  Clone ID: PAT_MRT3847_135837C.1
tccgggtcgaccacgcgtccggaagttttggtcaacgtgccttggatgatgatatagcatatcatgttttttattttgctcctaattttattcttaaccttaagagctgattcagttcaaactttgtttcccaagaggcttttactcctctattgattattcacaaaataatatattgagtatttaatttaatttgtattctttttaaatataatctcttaatataatttagaaattaaataatttttttcaataatattttgtggtcttaatcttcttgttgaatgtggaaaaaaatctaatctaatttaaaattcgatggagaggtaaataaattttgaattttttattattattaaatattaacttgacttcattaaacatatttatttaattacttgatttttgtttttccaataatatgattcgaagtgggcgtgtaaaaaaaagatttcttagggtgaaggttggatctagttatgatttaggtatctcaatttgccgctcttccgctgcgccgcccccttatcgtcaccacaaaacctaagacactcaatagatcttaacttggtaaccactttctcacggcaagggctgtttgaactttgaaccgccgccgtcaaccgtctgccactgccagagttcatttggacaaaagacaatgggggagtagaggattctataaaccttgggagctgtcatctatacagggattatagtgttacttgcattattaatttacttagataacaagacacataggatggaacccagtagagagcaaagaaaaaaattagttcgtcacagaccaaaggaaggtattaaaaatactatgaatactgagtcaactgtattagatgaagcaaatagtgataaacaaccccgtagagagaaaagaaaaagaaaaagaaaaaaattagtttgtcccataccaaaggaaggtataaaaaatactatgaataatgagtcaactgcattagatgaaacaaatagtataaacaaccccgtagagag

SEQ ID NO: 39689 - DNA, 1738 bp, Glycine max
  unsure (1)..(1738): unsure at all n locations
  Clone ID: PAT_MRT3847_135838C.1
ccgcgcgtccggtggattggtgcaattcttccttcagctcttgtttagtcctaaaccgctcctctttcgcttattttattatcgttttcctttctcccgaagtgttctcctttcttgcttccttctccggccatcttcctccgtctgccgcagccatcacaatcttcatcatgcacaagagctcttcagattccacgttgggcccgggtggcctggacctctcccaggccttcttcaggcccataaacaacgccgcccctccctccccgaccaagcgccaccccgcaccaagatccacgcctccgccgaaacaagatctccgtcatcggcgccggcaacgtgggaatggccatcgcgcagaccatcctcactcaggacctcaccgacgagctcgtcctcgtcgacaccaactccgacaagctccgcggcgagatgctcgacctccagcacgccgccgccttcctcccccgcaccaagatccacgcctccgccgactcctccgtcaccgccggctccgacctctgcatcgtcaccgccggcgcccgccagatctccggcgagtcacgcctcaacctcctccagaggaacctctccctcttccgcgccattattccccctctcgtccgttactcccccgacacaactctcctcatcgtttccaaccccgtcgacgtcctcacctacgtcgcgtggaagctctccggcttcccctccaaccgcgtcatcggctccggcaccaacttggactcttcccgcttccgtttcctcatcgccgatcaccttgacgtcaacgcccaggacgtacaggcatatatagtaggggagcatggggatagttcggtggcgttatggtctagcattagcattgggggtgttccggttctgagctttttggagaatcaacagattgtgtatgagaaagagacgttggagaacatacacaagtcagtgatagacagtgcgtatgaagtgatcaagctgaaagggtacacttcatgggccattgggtactctgtggctaacctggcccggtcctttatcaggaaccagaggaagattcaccctgtgtctgttctggctaaaggcttttatgggatcgatggagaagtgttcctgagtttgcctgcaatgattggtagaggagggatactgggtgtgaccaatgtgcacttgaatgaagaggagacacagaggcttagagattcggccaagaccattctcgaagtacagactcagttgggtatttgaattttctgtgatgggtactgcttttttttttcctttaattttcttttgttcttcccaccagcatgatgtggtttggcctaaattattagtagtacttgctactgttagtgttagttcctgccctcttcttgcagtgcaagtgtttttgttgcgtcaagtgctggctggatctcgtgagatgtgttttgtttcctgtatggttttaattagccaagtaaaatttcatatttctgtagttgccgtgttttgtgcctctattcagtcaattacggaaaaagatcttcatttctttttctttccatttctatgattttagaaaaaataatgatactctcctattaatgtgtatcatgccagtttcatttatttgtccaaaatttgagtaatggaagaaacagagaggatcttaacccgtgaataactcaatggtaatgcggcacatcgaataggtgcacaagcatgcaattnngctccctcctttctctctttt

SEQ ID NO: 39690 - DNA, 462 bp, Glycine max
  Clone ID: PAT_MRT3847_135839C.1
caaacgcatgggtttaacactgcgctcttcaacttattgtatgaatcagatggaaaccatagctctcaaaattactgacaacgcccctgaaataaatagggcttcaaaattcaagctatcatcatcattgttacggctccaggcaaacaattccatgcaagaagctcatcacactcgtgacaaatgtgagaacgtgctggctccatgagtctgacatagccgcaatgagtcaaagatagtccctgagcatgtgagggtgccattacacacagatacaatgggaggacgcttgaacatacccaaagagaggaatgcaaacatgatggccctgaagagtgcactggttgaaggtgtaatggtggatgctcgacggggttgggctgagaaagatgggcctttgaagtacaactgggaaccataggctgaactggcgcatatgctgcaagtgcatggctagaagct

SEQ ID NO: 39691 - DNA, 2109 bp, Glycine max
  Clone ID: PAT_MRT3847_13583C.1
aagaaaaataatatattttttccctttttttcaattattggtatttaaaataatagaataatttcccctgaccatttttataagtaacagcaatcttttttacctacatctagttatgttaaaagcgaactgttgtattccacttttgtaaaaagaatgccacctccaacgagtacattggtaacgctctcatgctttataatttacggattccaggacgcccatttaataatattttgaatccactttttttcttggctttctacacaaacgatctgagtctatatcatgattataagctgatcctagtttcatgaaagactccctattcctactacttcttcttataataatcgtagtacaacctaacttgctatgatgttatgttgttgtaaaagacagacgcgaaacttctatccctcgcaagcctgctgcgacgggagaaaccgaaccatttcgttacacatcgggtagaggcgcgtgtacccaattgaagggatgagattgggaaagatgtgtcataagtaaaagtcatacagactcaacacactccaccaaccgtaccctgaaacagaaaagcaaagttcacacacgcgcttgttgattctcggaggctatctgcacaacaagaacatatttcgatgttgctgcttatgatggatgaattgtaacaagacgaattttctgccagaatcctgttcaattacgaaaagtaggaaaacatggagtccaaggaagataagcagtcagtggagaagaatttggttacattgtccccggcacctgaaaatttacgtgttgagcttgcttgtgttgttagcggactttgggttgctggtctgtctggttttgcggatgggccttatggaataatatttggtagcccagtgggttttcctgatgcatataaagctggatatggtattgttgacctgactgttgccgatacaagtcctgtcactgcgcggtgtgctgccaagtgaaactcgcttttggtgttcttcatgagtcgtttttgaaattcaagcagaagctggagggaacgccgagggttttggaccacattgggttcgatcgaccggataagtgtgcactcgagtttcgtcggctgttcggtttccggtaaagtgaatcacggttagcgtggatgacaggcgctggattggatgatgcggcttaaattttcagtgttcgccggtgtttatgtacggtgaaggtggtgttggtgtgcacaacaacttcatcgtctcaaaagatgccgtatttagacttctttaagcaatacaatcgttgtctaagattaaaaaatgacacagtacttgtaaaaagtagaagggccttcaccagggttgttatctccccttctatctcaactgtcagatccatcatcctttcttgactctcagacttccctccacatttcatgcattttatctttgatagaaggtaacctccaaatgttaggcccattaaattagtttcctctttcaatgaatctgatgtgttatccccagattccataaggcaaacagattgcattgtctcaacagcaagccttagaaattcatgtgcatcttcttctcttccattaccaagttgactcccaatattctgtagttgggagattatgcccataggagacatggcagattttgtgtcctttgacttcaatatcaatctttcaaattcgcaggtgaaacaccattttttatttgcacatgatttcgaatgtgatccttgaagcaaataagcagtcaggggaggtgtaaatgccaagcactgaagtacagcattagcataacaactgtttccacaatttataagaccaaatgggcataactccaccttgttcgagttataaagcttgacaaacaattcataagggaaaaaactcttgtcattatgtcttccagcaatatcactcccaacagctaatggaaagtgctttgacagatttgatcctctaaactgatcaacaactttcaaaacagatgttttcaagccactcttagaatttgcagaacagctagcaacctgagaagaagtgacagtttgagtgccagattcaatgtcattattcccttgttttgtactggaatgagaatgttc

SEQ ID NO: 39692 - DNA, 141 bp, Glycine max
  Clone ID: PAT_MRT3847_135840C.1
acgacccagaggctgatagcaaatatgccaaaaattacgaaatcccaccaaagtaatgttttatctgtggtaaaatttaaatgttctgtccctccgggcagaataatggatcaggaggttggtttcttaatggaaggaaat

SEQ ID NO: 39693 - DNA, 1355 bp, Glycine max
  Clone ID: PAT_MRT3847_135841C.1
tttgggttttttttttttttttagtttaaaaagtcaaaagggttattgggataaaataatcctgaactatgcatcaaaaatttcaaaatctgagcaacattgctacgattctgttttaagtttcagtggccttaccaagcttgttccgtctaaaactcagattaaacgaggatttttctgcaaaatacctctttgatcaacattctgaatacaaaccattttgtaattcttttgcgaagttaatggtttgcatagcaaaacttgacggagtctttatagtaactaataatcattcactcagtcctcactttcctctggtttcacaaagaattcaatatgagctattctacttggttgctgatagccaaccgaatcagcatatgggtgtgacacagatggtttggcaattgaaaccagatgctggacttttaacattccacctctcccaatgcttaacttacttcctctattttctttaataacactgctaggcatattagaagttgttgctctgaggaacttatatttgtacttgaaagaagcttgatgatcacactgaaatgccaccaggagttcggaattcacataatacatgaagtctatctgcaagtctccatgtccttcagctcttaatgaaacagaaggaggatctggctctagagtaatcttgatgcttgatccaggccattcaagatcctcaatagcttccttcagagctgcagatttaacagtaaaggttaaagggtttgcccctgcaggttcaaaattgtagtcccatgcaattgtatctggaatccttgtcctgatctctgcacaaatactggcatccagcgaatctacagatttgagaagaagctgcatgtcaggacccggatattgaatctgaacaaggcttgatattgattgaccagcaggaaccgagaaggcgttcaagcaatctacgaaatgccccaaactcactccaaaacgaggtcgtcctcctcgtgcgttgtaatcgtaacgaatgaataactctcgtttgagataaaccttggcttggaggcaaccgctttcttcgacgatcaaaacaatgccgtgttcggacaactccaacacggcgtcctgctggcgcttccaccgaacggcggtgagggcgtccactaagccttgaacgttttccagctcgcatataacgtctggggcttcttcctcctccatgagtgagttgtgcaaaatcctaaacccccccttctgtcgtctcgcagccgtctttctactaccctggggcttcttcctcctccatgagtgagttgtgcaaaatcctaaacccttctcttctatcaaccctctttccctttctactactgtctacaaac

SEQ ID NO: 39694 - DNA, 1153 bp, Glycine max
  Clone ID: PAT_MRT3847_135842C.1
cgatcgagtagataagaaagaaagccaaattttgagtaaactagtgtgcacactatcccttcttgatcgatcatgcctagtggaagtagggaccctctcgttgttgggagaatgattggggatgttttggaccctttcgaatgttctattcctatgagggtctcctacaataacagagatgtcagctttttatgtgaattcaaaccctcacaagttgtcaaccaaccaaggataaacatcggtggtgatgacctcaggaacttctacactttgatcgcggttgatcccgatgcacctagcccaagtgatccaaatttgggagaatacctccattggttggtgactgatatcccagcaacaacggggccaagtttcgggttcagtttattcaagttttacaatttcgtggctctgaaactattagatggggaattgtttgcgcaaggctcatgcggatgatgattctgatcatattgtggagcttgcttctgggaatgtgcaacttattactaccaaagaatcttgggaccaaaagttggatcaagcgaggaaggagagtaaaattgtaattgcaaatttcagtgcaacatggtgtggtccttgtaaggtgattgcaccacattattgcgagttgtccgtgaaatacccgtctatcatcttcttattagtcgatgtggatgaactagctgacttcagcacttcgtgggacatcaaagccacaccaactttcttctttcttaaagatggaaaagaagttgacaaacttgtaggagccaacaagccagagctggagaagaagattgttgtggttaatgatgtagtgcctcataagcaatagtgattgttgtggtatatctattcatagaagctttgctcttcccttctctcttcacatggtagtgcgtattctgcatgtattcccgtgacattgtcattgcatttctttttaaatgtaaatatgacgtatcaaatgaatgtcttgtacttaaaatttcaacatgaattgatgtcgttggtacctttgaaatataatgaattgatgtgccttatggttatttgagtcattattgttataaaaaaaaaaaaaaaaaaaaaaaaaaaaaaaaaaaaaaaaaaaaaaaaaaaaaaaaaaaaaaaaaaaaaaaaaaaaaaa

SEQ ID NO: 39695 - DNA, 325 bp, Glycine max
  Clone ID: PAT_MRT3847_135843C.1
agaagcaaatatattataccatatgtaggtaatctagcgatgatgaaattcacccgtacaattcaagccaagcccataggtcatgtgcatcactcatgatcacactgaaatattcaacctgtccctttcagccattcattatctgcaccaacccatttacactttctatattcttggcaaaatcaggaattttgtcctggtaaaattcctgactttccattatacccaaccttgacaaaaaccaaaatcaaaagggtcaatttagattagaaacttgaaggtttcccctcaagtatttgcataggccatgcataatattcccaac

SEQ ID NO: 39696 - DNA, 222 bp, Glycine max
  Clone ID: PAT_MRT3847_135844C.1
ccgggtcgacggcacgccgtccgcgagcggtcacgcttgttgattcttgcggagtatattttaaagattgttttctttgttgctgcagcagtttttgttgcatggccatcccatgacgcacgctaccaaaaggtttctcttcgcataaaaaactccttttgggggcgcccttctgagggggaaaagcgcacgttttatgctttctgttgaaacacacaacat

SEQ ID NO: 39697 - DNA, 422 bp, Glycine max
  Clone ID: PAT_MRT3847_135845C.1
cttaaaaaaatataacgaaagaaaaaaaggaatttaatccaaagaacaaagttaaaaatcatttcctagttttcttttacacattttaaagaaaaattaatttttttttctccctacataaaaaaaataacaataataaaatgcaatcaaaaatgaccaccatgcaattattgaaaaccgaacaatcaagacgttcgtcatcgacttctaatgctaataatgttggtagaagacatttgaccgtttcaagaagggcaaacacccatccttattatagaaataagataaatagcgaaaattgttattaatgtgatcaaagtgcagattgtttcagcattttgaatgccaaatttgcaagaattgaaaggttagtggaaaattttaataaggccgttaaagccacaggcatgaacttgaaaaat

SEQ ID NO: 39698 - DNA, 285 bp, Glycine max
  Clone ID: PAT_MRT3847_135846C.1
cacacggagaggggggatcggtatagagcgtcgccggcgccagctttgcaccactcgctaacttcgacggcagctagtaaggtgaataacgtgctggggctcggaacgacttttttttcgacgccgagtagccagcgcgcggataccacctgggagttggttagagtgcagatcatgatttcagagcattatgataccaaacttacaatagcgtcattcaccctttctgcgggccatctctgaatactcatggagtcattgtttcttccactagagcttatacaa

SEQ ID NO: 39699 - DNA, 1731 bp, Glycine max
  Clone ID: PAT_MRT3847_135847C.1
ttagatatttttctatatcgaaccaatataactattacttccctgattatgttttataatttgaattgccaagaggttatagggtgcctaagttttcaaaatttgcgggagaattagaagaatctactatagaacatgtagcccattttcaaataaaatatggtgatctagccatttatgagtttctaaaaataaattattttcctagttctttaatgaaaaacatttttacttggttcaccagattaccaccaaattggatatatacttcagtacaacccgaaagagtgttccatcaacatttctttagaggaaagactaaggttagtctcgtagatttggaaactactaaacacttcaatagtgaaacaatcaaagattatttaaatagattttgataggtgaaggctcgatgctatactcaaattcttgaatatgaactagtcaggataactactgcaagtttagatttttcaattcaaaagaagttggtgaatcaacaggttagagatatggcacaattagcaaaaagagtaaggagaattgagaaaataaaatatgaaaaaaaggataatgataattctataaattatcaagatttagatgttaatcaagaggaagatgaaatatgtgtggctgaactacaacctggacctccctataattgtcaaatgttaaaattagatgaaaaatagaaatttcctaactcaaattacaattttgatattactaaggcaaataaaatatttgatctgttgttgaaagaaaaacaaatttccctaagtgatgatcatataattcctactttcgaacaaagaaagggaaaaagatattgcaaatttcataatatttttggacattggactaatagttgtttacgttttagaggcatggtccaaaaggctataaatgaatgaagactaaaatttgagggaatgaaggatccaaatcacattttaaggagtttaaagtgaatagtttagagcttcgaaggggaggaatcattgagggttgttcaaggaaaggatattatgactatcaaaatcctcattgggtgaatcaaaatatgtcaaaaacctaatggagaaggcatcaaaggatgaagagagatgtgatattagaaatgcaacataaaaatgcagcaagattgccattctttgacagaattagtgaaggtctacctcctgggttcgaaaagaaaatgtcaaccaaggaccgagaggagaaagaaatgataacagagtctttcaatcgaaatgttgcagctttcgatccatccactaatgatataagatgccatatgaagccactccatttgattgctctggtggaggaccaaattattaataagatcttagtcgatggaggggacacatttaatatcctgcccaggtctatgctatgcaggtttgggaggactattgaggatttgattcctcacaatatagtagtgtcatacttttatggaaaaccttcaaatttagagggagtggtttgtttggatatttcggtaggcagtaggaggaggcctatggtgtttttggtaattttgtcacaagctaatttcaatatattgttgggaagggaatggatccatggagttggtgttgttcctatgacggtccattaaaagttgttcttttagaatgaggatggcaaactcataatggtcggaggggatcaatcatcattaatttctctattacatgagttcaaggactatttcacatg

SEQ ID NO: 39700 - DNA, 565 bp, Glycine max
  Clone ID: PAT_MRT3847_135848C.1
tttttttttttttttttttttttttttttttccccccaaaaaaaatcttctactttatatataacctataatatattaataactaaaatttttaacagggatttttacatttggacaaaaaaaaaaaaaaaggggccaaaccatacatgcccccccaaacccgtaaaaatccccgggttccagttttttcctaacaaaaaatgcacccaaaaaatgcccccctgacatgagggatccccagttaaggaaagggcctatgaccatcatcatcggaggaatggttttgtctttttccaacaagtcctgaaaggggttgggaaaccatagggttcactgggacaggaaatctatgggctgaactaaccagggttctctaattaataattccaacttttttgcccaccctatcaaaaactgtaaaaaagtcttttactaccatgaaaattctaaagggaggagctttttcttttgacaagttcccatggaaaaactccgggatctccttcacaagggaaaaggcaacacttttttgggctgggactttaagaatctcctcctaacccat

SEQ ID NO: 39701 - DNA, 505 bp, Glycine max
  Clone ID: PAT_MRT3847_135849C.1
ccacgcgtccggtcaaatagtcatgaatgtcctttggacaagactgggtgaaactggaaaagattggcgctatgtatacaaggtaatgctttccaaagaaccatgttatttcttaagattttaagatacatagagaagaatttttggtggcattttctatgttgatagatacacaacttacttttctttcaataacttgaattacttttaagtcaggcattagctgtcatagaatatttggtagcacatggatctgaacgtgcagttgatgacattatagaacatacttttcagatctctgtaaggaccattctcttgtatttagttaatttattcttgcaattaacaacagtgctgacaagtagaataagagaggatttgctgataattgactgtggatggcgcaaggcactccctagctgggaatatggtgaacctagtgcgaaggatcgtgtacctattgttcaggaataaggttgtgcacattgcattccctctcgaatga

SEQ ID NO: 39702 - DNA, 1271 bp, Glycine max
  Clone ID: PAT_MRT3847_13584C.1
cggttctgaacttgtaatagctatagatagcaatacatagtgacagaagacacaatagaagaagaaacccaacacggcccaggcaaacgcactcagagagagagagagagagaatgaccaccccaagaggaaaccaccacccacagcctaacggtgagcgaagaagacaatggccaccgccacagccaccagcagcggcaccggaagcggcagcggcaccgacagcagtagccgcaaattacaatggataccgacagtaccacccgacaacgccagctcgttcgtcgtcgtcggcgtcgttcaaaggatgctgttgctgtctgttccttctattctcgttcctggcgctgttggtgctagcggtggtgctggtaataatcctagcggtgaagccgaagaagccgcagttcgatctggagcaagtcggggtgcagtacatgggcatcacacccaattccccctccaccgcttccctgtctctcaccattcgcctcctcttcgccgccaccaaccccaacaaggtcgggatcaggtacggccagtccagcttcaccgtcatgtaccgcggcatccccctcggaaaagccaccgtccccggcttcttccagcaacctcacagcacccgacaggtgatcgccaccatcgccgtcgatcgcgtcaatttgcttcaggcggacgcggccgatttgatccgagacgcctccctcaacgaccgagtcgacctgagagtcttgggagacgttgctgccaagatccgcgtcatcaacttcgattctcctgctgttcaggtttcggtggattgtgctatagtgatcagtccaagaaagcaatctctgacttacaagcagtgtgggttcgatggattgactgtttgatgatatcattcttggtggcagtatcaatgtccttatcttccactcaatttctcacttgaccctcggtttattcgactaatttaaggaagaaatgagaagggaaaggagtgagagaaaatttgggtggggatggggtgttagagggaatttagaatggttattggaggagtcacaacaaattgttaaactgcaaagttgaggaaaaaggttttggaatagatatcaaattagggacatttaacatttttctcaaagaattttgccaaaattttatttggaataggttacttctcttggaagacagaaatctgcggaacaacgtgtaaactgtaaagtacatccaatgagtgggtaaggtatcctcatgggcttttcttaattaacaagttctctgac

SEQ ID NO: 39703 - DNA, 109 bp, Glycine max
  Clone ID: PAT_MRT3847_135850C.1
cagctcgagccgctctattgcttcaatttctaactcaggggcttctagttttacttgcctgaagcgttttacaacttcaattttgctcaagttcatccaaacacgactt

SEQ ID NO: 39704 - DNA, 228 bp, Glycine max
  unsure (1)..(228): unsure at all n locations
  Clone ID: PAT_MRT3847_135851C.1
ggggggccgggggcggtctttgcgncttataggacgcctgtgttggtgantgcgccgtttactgctgtgcnntttccgacgtctgaggccgcgaancgaggcctcatggnggtctcgccggagagtgtggntgatgagaggctggttgtgcacgccgggccgggggctgctgtttttttttttgctgctgcggcttccncgccgcttggtgtcgtcgcgactgctttg

SEQ ID NO: 39705 - DNA, 383 bp, Glycine max
  Clone ID: PAT_MRT3847_135852C.1
attcttcacggggtgaccttacagaggacgggttcttgtgccataactggtccttggtgtgatcaggtcaatgtgcatgggatgatgtaataagacataatgattagcaggctctatccatacacagaacgtattgtttatcttgcaggggctatgcctcgtatgactgcggaagagggattgatctgcatcgatttccagatcacacactattgaacggagagagcaaaacttacggatttcgctgcatagagatgctagacgataagcctgagctaacttcaagtggatccatatggcctttgtgctgtgtgccatatgatgttgcataacagctatatagaagtcgacaaataagaacaatctgatggtagctacatgta

SEQ ID NO: 39706 - DNA, 455 bp, Glycine max
  Clone ID: PAT_MRT3847_135853C.1
aattcggctcgagattcctgcatcaccgtaaacgctaataattcactctacaacctatcgtaattgcagcaatgcaccgatgacttgacaacaatgcggagtccgaacgaaaagcaaagccaactcatgatatggagactctcatgaaggaacctgatgcctcatgttaacattcaccgatggcagatacatagtaagcatcgtatgcaccagcagaacacatgatagaatttcaactggaggccttgacggaatgacgatcacatactacacattcgagaactgacgctcatgaacgagagatgactatgactagtaactactatcactacgctcacgggcatattactgtatatgacggggcaggtgaagatagcttggctaatgttgaccatggcctaagtgcaatggcccgatatgccactgctaatggtgacactgtacttgatgctaac

SEQ ID NO: 39707 - DNA, 353 bp, Glycine max
  Clone ID: PAT_MRT3847_135854C.1
tttttgtggagaaagtcatgtagaaatgacattactcactactcataaattgactacattggtatgtgaacaaaatgacaatggtttgtcttcttcatctaaagaattaaatttctccaactatctacctacctagagaatataagctacaatgaccccaaatagaccataaaagatggcacatagagctgtgaacaaaaagtatagaccagaaaaacaatcgatgaaattgcaatttaaaaccgtgtgacctttttggtcaagacaacaccagagctaaaattacactaataaacgatgtcaaatactgaaggggggacacttgcaagttcaaactagcaccaattggactt

SEQ ID NO: 39708 - DNA, 832 bp, Glycine max
  Clone ID: PAT_MRT3847_135855C.1
atttctttctcttgtggatgcaggcgtttatcattcttggtcttgtgatatcgggtaagttagattgtttccacacctaaagtgtatatcttgaaaatttatacttgattttctatgtttgtagtaagcaggtctgtcagaagatgtataaattatgaaaatcttcaataattatagaatacaaagttacttgttgcatgtgggatggttcaatcatgcctgggaacctgtaatgttacctccatattcttgtgatgcaccaattcacctcattttgtatggcatttttcatctgcaacatgcacaacatttaaatcaggaccagactttaaagtctcccatttcaaacttcatcaacaaaattttggaagcctctgatctcttaaaaagaaatttccaatagcctatggcttcttacaaagtttcttttctcttttgttttgctgtatattctttgaatgggaaggctggccagctttgtctgccaccagtgtagtgcctgcctggtatcaagtgggtatttgagagacacacatggtctgtttcccgggtctctgttttttgcatttgtgcaaaggcaggaagaaaaattaccttaagttttaataggtgaatcttggaataataaaattgtctgtctcatattgcaaaaatatataattaggtgactttaaattgtcatgattttatactgaattgtttttggatttaaattattcacgagtgctgagttctgtcatcagtcaagtttttcacttcaattattattgttattttttattttgcatgcttgttattttgaatttaaacaatgtggtgcactaagtataag

SEQ ID NO: 39709 - DNA, 195 bp, Glycine max
  unsure (1)..(195): unsure at all n locations
  Clone ID: PAT_MRT3847_135856C.1
ttcggctcgtgcgcctggcaacgataagcaaaaacaaacagacaaactaagggataccatcaatagtgcaacatcaagctcatccatcatatggctttggcacgttaggcttagaaaaactagcaacatagggtgagtgcttnctctttcttgagtggcaatgttctctagcagaggagaggcattgagttgctg

SEQ ID NO: 39710 - DNA, 480 bp, Glycine max
  Clone ID: PAT_MRT3847_135857C.1
ctgggttttgtgtttttttttttttttttttttttttttttttttttttttttttttttttttttttttttttttgtttaatttcggcgagatttccacgttttttgcgttgggggaagaaaaattttctccctcccccttgggttttccctctttttgggaagttgcgcaaattttttttaataacagaccctcgaaatttgctgaatttccatgggggttatgccttggtggcggttttcatcgggtgggcatccttcggcgctggtttttttctggcaagagaatctagcttgggcggtttggtgaacatttttgcataaaattttgccttttttttgtgtggctccttcattttttccttccaaggcttgggctcaagcttggcctccctgttggttgggggaatcttaagcgctttttttttttcaaattcgggcaagtttaaatccccgccctgggtttttgcctgggcccttt

SEQ ID NO: 39711 - DNA, 420 bp, Glycine max
  Clone ID: PAT_MRT3847_135858C.1
ctattaatatgctgactctgtctaacttagcgacagaggatgcgtttttgggccttaccgaaatatctctgggcaagtttttttcattctcccgcactatgcattccatgtgggactactagagagcacagcaccggcccactatattgaattcctcagacccaaagaacagcaacaaaaggcttctctggaggatggcagtgatgtggatactcatgctgaggttgccaacatggacaagaacactgactcatgttctccagcgaatggttcgagactgagaccatcctcgaaagaaaagacgtgtgttgcaatcactgcttcctacgggatcaacagataaaacccactccagttccatcaaccttttgtgcatggcgggtgatggatacaacagcaggattcactggatttattggg

SEQ ID NO: 39712 - DNA, 210 bp, Glycine max
  unsure (1)..(210): unsure at all n locations
  Clone ID: PAT_MRT3847_135859C.1
cgcangcacgcgtacgtnagctcggaattcggctcgagaatgcatagaaaatatgtaaatttggatgccaaaaagctccaaattaaagcctttaaaagaacatagagtttatataaacacaaagtatgcattaaagtctatttctaccagtacaaaaaaaaaaaaaaaagaaacttgattaaaaaggaaacaaaagaatgaaaaaatgat

SEQ ID NO: 39713 - DNA, 1127 bp, Glycine max
  Clone ID: PAT_MRT3847_13585C.1
gcttgatctttcaattgggatgtgttcctggcgcccttctatctgaagactattcacctcccattgctggtgtgcctgtgtctgttgatccaccagtcattgcctcaaactgccctccatccgtaactagtggctccaatcagcaaaataattcatcgcatgcttcaatgtcctttagtgttcaaacaccatgtcctctaaaggcagagacaaatacttgccagggttctgcattgacaccccaaacccataagctgaaccagatatccaataacccttgccaaccaaaggttattccaacgagtaaaacaaactttgctagccaacgagagaatagagctgtggaagctgaagtaataccctcagatctagattcatgcctgcagcagcattctgtttcatgcaatgcaagatctgctttcaataacttgattggttctgggtctttcggtcaatctggtataagtgctgataatcttacattaatggagcagcaaatcatatcagccattgggaatcgagataatgttaatcctcgtgtaaatgcctcgagctcgttgaacaagtctcaactaagaacagatggaggccatctacttggccacaatatgagttctggcagtacttcaatactaggaggaatcccaatacatggtgggatgagtactcttttgaggtcaaatctgattaccagttctggttcaaaatcttcccaagcatccacagctgatttttctggagtaggagttggaattggacctcaaaattgtgattcttcaactaaagctttggcaaatttgactagtcaatcagtaacctttcccatacatgtagaaggttctaatcagaagattcttgttttagatttaaagtgtgcttcatcaaatcaaaagatagactatgatttgcttcaggcccctaacccccccacttttcatgttgaggaacaagtgccctttagtggtcaaaaccctggttttacccacgattgccttcataaagatggtagtagtcaatctatgatgacaaaggatcctaaagacaaactagattgtgctaaacctccatcaggtgatgacctgtttgatgttttaggggtggatttgaaaaccaattgctgaatggaa

SEQ ID NO: 39714 - DNA, 447 bp, Glycine max
  Clone ID: PAT_MRT3847_135860C.1
ggggaaaagaagcttttactttttttattacccccccccaaaacttttcaatgaaggaaatatacccttttgggaaatttttttcaaaacacattttttagccctttacacgggggcaaacatgggttttttttttaagccaaagggccaaacaaacaaaattttaagcggaaaaaccctgggattgggtggttggaacattttaataaatccctgccctaagggattttcaagcaaaatttggaatcctgggggccctcctttgagcaagccaagggttctccagttctggatcaaagaaaggatgcgggaggaactggtcaattttttaatccaaaaattttttacaccacgttacttgttttgatggacagaaaccaggtccaaaacacctgttttcataaaagcaagcacttttttaattttccattttcccccagttttccc

SEQ ID NO: 39715 - DNA, 433 bp, Glycine max
  Clone ID: PAT_MRT3847_135861C.1
ttttggtccaaagggaaggggccccagtttggggaaccttttccgggaggggtgggagggggttcattccatttttttagctggcccccctccggccggtttaggaaaaatggttaatttttaccaacctccattggggttcgggccaaaatgggaaaccctttcccaggtcccattcttgccgggtttaaaaggccctttccatttttaaaatctgaaggaggggcggttcttggggcctaaccggtggagggggcttccttttggccaaccccaaaaagggggcatttttggatggcttccaggctgttggttttaaggcgtttcagccccctaggcctttccctaaaatttggaccttggtttgtggttttagtgagggtgggtttttccaattccaagggtcccagggattcaggccattccttttttg

SEQ ID NO: 39716 - DNA, 1593 bp, Glycine max
  Clone ID: PAT_MRT3847_135862C.1
gagtggctctcccagttcgtgaacgacgaggcgacgtcgtttcacaacatcccaccacccgcatccattggatcccacacgacgccgtttctttccaacaataacaggaacgataataataacgaatatcccaaatcatcatcatcttcaccggtgttggcgggaaaatcgagagcaagaagggaagggtcggtgaccggcgacggcgtgcggcgctgcagccactgtgcgacggataagaccccgcagtggcgcacgggaccgttggggccgaagacgctctgcaacgcgtgcggcgtgcggttcaagtcggaaacaaacacaactctctctatcaacaaaaccaaccaacacaagaaagaaagaaaaacaatggacttgtacggttccttttccaccccttcagattgcttacatattgatgattttctagatttctccaacatcaccaccgacacccaccaccaccttcctcctccgcaaaactctccattaatctcccacgacgacgccaatctcttcttcaatttcccttccgttccgaccgacgaagcggcggagctggagtggctctcccagttcgtggacgacgacgcgacgtcgtttcacagcttcccagcaaccgcatcgattggatcccactcgacgtcgtttctctccaacaataacaacagaaacgataataacgaatatcccaaatcttcattatcttcaaacattccatgttcttcagcggtggcgggaaaatcgagagcgaggagggaagggtcggttaccggcgacggcggcgtgcggcggtgcagccactgtgcctcggagaagacgccgcagtggcgcgcgggaccgctgggaccgaagacgctgtgcaacgcgtgcggggttcggttcaagtcgggtcggctcgtacccgaataccgacccgcggcgagccccacgttcgtgctgactcagcattcgaactcgcaccgcaaggtcatggagctccgtcgccagaaggagctgctccgccaccaacaacaacaacaattacaacaagagcaatgccaccgtcacactcacaaccaccacgatttcaaagtttgctgacgtgtcctttgtcggtgcttccttcttttataattaatgatgactaatgtcttcagaatattatcagtaaataaaaaaatgatttttttttccatttttactagtttcataaggagaaatgctggtaatctacatcacaatgtttttgccttaaaaaagaaatatcacgaagttttgtaaatctaatttgttatttaatgaattttactcgtaattttttaaaaaatgagtgccataaacggtgaagcagagatagcgctatttgtttcttggctgtttatttatgctctctctctgatctcaaattgagtgaagggttgatttttttttttttcttttttatgtcgaggagaagagaagtgaccttcgtgggaaagggaaaaaaattgccttactgtacggttttaaagcttcaactgtcatttgctgcattttcactaggagtgattgcaggagatacgttctgaatttgaattaatttgaataaattatttttatatttgagtt

SEQ ID NO: 39717 - DNA, 581 bp, Glycine max
  Clone ID: PAT_MRT3847_135863C.1
ccacgcgtccgacggtggcaaaaaaaaacggaggggctcacaagctctcatttacgctctcctaagcacgagcatgaaagcccccaccttacacccctgatgcctatgaggatcggcctcgaacgagccataggatagtttccatgacctgagaagtaactataatacctggactatagaccttcacgacgagcgcttactacctgactagacgaaaaagcacgctgtatgctatgccagacgcaagctaggtctggaagctggggacagagattctgcattacctgatctgcatctgaagagagaggtgtcacgctgctccatcctgagtgttaggagtggcatggcatgcctatactaaaaaaggattgctgaatgactgttgtggatgcggacccttgaaaaataggcagtgacatattcttggccatatttagggcatatgatgtatactgcctgcataccgaactacccgagagcggaatgtgaccactgtgttggtgtacaaccctgggcggggatagggaccatggcgggatgcataagatctgactaagatgctcttctgaacgtgtggcatt

SEQ ID NO: 39718 - DNA, 340 bp, Glycine max
  unsure (1)..(340): unsure at all n locations
  Clone ID: PAT_MRT3847_135864C.1
caggntcatccaccttcccctcnttatctacnnttctntctntcntctantagtnanacccctttctcactcttctctttccctcttttcacacgtattntctttntaccccaacaccttcttcatcattcccctgtnctctctgtntcnctgtgccccttnggctcttgtngtngcngcacttacccatntncnnaattcccgtcaaaacgcaaactttcacctttcccatttcgggttgaacccatggactcccaaccgggtctctctctcgggttaagcgccactctctcatcacccgcggctccactcagtgacaccacctctgttccgtggcgtt

SEQ ID NO: 39719 - DNA, 111 bp, Glycine max
  Clone ID: PAT_MRT3847_135865C.1
tctctctggcactggtttctggttctcgttaagccatcatatggaggaggggcttttcaggtacaaagaagtgcaacagcgtgctatctgactcataattctgcgacactc

SEQ ID NO: 39720 - DNA, 267 bp, Glycine max
  Clone ID: PAT_MRT3847_135866C.1
tacgtaacatcagcattgtgcaacatcatagtgcaatggcttccaaggctgcacttctcttgtgtttcaatgttctcttcttcaccgtggttagctccacatatgtgccatacaacccacaccccaaaactccaaaacacccacctgtcccaaagccaccgtccccaaagcaagcaagttgccccgaagacactattaagttgggtgtgtgtgctaatgtgttaggttgatcaacgtgcacttggggagcacaaagacccatgtgca

SEQ ID NO: 39721 - DNA, 693 bp, Glycine max
  Clone ID: PAT_MRT3847_135867C.1
atgaggcgaatcaataaccaggtgcgacagcgctgcagacaggcatggcttgacctgccagcacacgaggtaggccatgaccaagcagcagaaaccgacggcggaagccgtgaagcaacgacggaaacgcgagaaagcagccgagaaagccgctgcattgggcgtcgaaaaatttacggttgaagtcgccggcgtcttcaaggcagacctcaagcggttgatgaaagagcacggcttcaacagccagcaagaggtctaccagaacctcatccgcaacgtgatcgccgccgacttcgccgtcgccgcccagatgctcaagtgtgtcacgacaccttttgtagttacagaaaaggtgtcgcggacttttcgggatgagagtctggccgagctgaaacgcgacccaggcgacgagataattgttccggaagttctacatcgggagaccttgaatgtgatctcgccctagtgagtgaccatgttcaaaagcctgttcgagagtggcttgaggctcatgagagctccgcagttcggtcaaggctacgccatctttcaatatctgatactgaactgcgaatgtttctgcggtttttgaagaaggccaatgcaccacgacgtctatttgatgatcgctgaagagaacgaccgattctcactgggaggtaaatcgctcatcgctgcacctgatgggtggtg

SEQ ID NO: 39722 - DNA, 419 bp, Glycine max
  Clone ID: PAT_MRT3847_135868C.1
ggctgcgagaagacgacagaaggggatcgcaagctcgatcattttcctatacttcgttttttatgagtctgatctttttgttctccgacttatgcatcttcttgtgctaaaacaaaaggtctttggtctaatttcttcgagctgagaagatcgatgcacttcacgagggattcaaaagcactgacacatacatgcttacaaacaaagttttttttccttgcttcaagatctttttcaatatttcgctctccagctcgttttctgatgatcaacgaagttgtttctccttgaaaagtgttataagttataatctttcatttgagctagtgtatatatacatacccttttacaagatctcttggttccttgactcccaaaaaaaaaaaatagaattgacacatctatgaaggatctgagtc

SEQ ID NO: 39723 - DNA, 213 bp, Glycine max
  Clone ID: PAT_MRT3847_135869C.1
aatacgactccgcactacctgcatttcttaaaatacaaacaaaaaaaggcgttttttttttttcaaataaaccaaaccacaattccaattataaattaaaagaggggtgttggccacctccaacttaataaataatctctttgttactgaaataaaccgccccattatacacaaataaacgataccccttcttcttcccaattcatcaaaaat

SEQ ID NO: 39724 - DNA, 314 bp, Glycine max
  Clone ID: PAT_MRT3847_13586C.1
cccacacatacggtcagagagtttgaaaaacggagcgcactggatgatgtgggaacatgacctataaaatggaaagacgtacatgaaattaacactatatacgtcgtgtaccttgcatcctatgcatcggataattgggagctgaacgaatggcgatgtaccataaagggcaacatgtacaaccaccaaagtgagacctaattattgactacagaattatttacatgaccttaaaagacccactccgattcaaatactcaggccaccatcaagggccaaaataccaggtccacagacaaaataaatggcggcca

SEQ ID NO: 39725 - DNA, 205 bp, Glycine max
  Clone ID: PAT_MRT3847_135870C.1
aaaggggggtggggttttaattaaagtggcgtttttactatatgtaggaagcttattggaacaagatatttctacaaagggtattaggcaaattcatgttcaaaactgaatgcctcagatcttagtggacgtaactataaacgtaggtggttcacatactttatcaaccgcagggtgtaactttttttcctggagcttgtgtatt

SEQ ID NO: 39726 - DNA, 295 bp, Glycine max
  unsure (1)..(295): unsure at all n locations
  Clone ID: PAT_MRT3847_135871C.1
aaattaaaagagggattaaaggggggagcgtagaaaaatgtgtttataaattggcattattcttgatttagcatttgaacacaagtttatgagatccggaaaagaaagagtattcactgttgcactggagggggctgaaaaaaaaaacacactgtcgaccactcaatgcagtcttcctctttagaaagacacggtcagtcgcctgtcgcgcgagttctattctatatatgtggccggaagggaggattaattaggtgnannattttgaagcacataacgaccaaatcagctgaaa

SEQ ID NO: 39727 - DNA, 304 bp, Glycine max
  Clone ID: PAT_MRT3847_135872C.1
tgtttttttttgttttgcttttaataccttaaacttatacatgaataaaaaggatacctgtagttttctgcaaaaagttgtccatgcaatggatacaccttataaaaacaggataggcttgggatttaccaaccgagaaagaaacaacaaacatctgtatccacaagaataggcttgagattatagctattgcacttatagatatgaagcctaacaaagactttcatctacataaggatgatatacaacccttccacaccacttaataaaggatattgttgatatcaaccttgccatggaaact

SEQ ID NO: 39728 - DNA, 571 bp, Glycine max
  Clone ID: PAT_MRT3847_135873C.1
ggctcgagcggctcgagacgatggtcatcacaaccgcattccaccattgcacacttacaagagtcaaggcccttgcatagaacatctttatatcctgacagcagcaggaattttctcatctttctagtgaaccaattttggtaccgaactcctcatttacttcttatcctccacctggtggtagatctcatcaggcttctccaagtcagaattcaggccacttaaaccttccttatcatgctacaggagctcagatggcattatcaccaccaaatcgatctcatttccccaattctgcattacagttgagtggaataaaccatgggccaccttttggtggaaacatgcgtcaattttctactggttcccctcttaatcagataattcagaatcaattggtaaaccaggcagggttatatcctggagatcaccccaatatttcatcaggtatacccatgattaacaaatatgaccagatgcttgggctgatggacatgagggatccaatgccaaaatcagctcatttaggtagacagaatcttcggtttcccccacagggttttgatatggg

SEQ ID NO: 39729 - DNA, 285 bp, Glycine max
  Clone ID: PAT_MRT3847_135874C.1
acggagacgacagaaggggtaggattgaattactaccactcaaatcccgagttaccaacaatgatgcactcgataatgggtctcggttcaaaggtcataatgtatgtattcattctaattttaataaattttcgtcccgtttaattttatgcgtctttctaaactctttactctttccaatctccatttcttctctaaactatgcttttatcctatctcctttgcttgttatcatcggtttcataccgagattgtatgattagaattattataaaaactattact

SEQ ID NO: 39730 - DNA, 279 bp, Glycine max
  unsure (1)..(279): unsure at all n locations
  Clone ID: PAT_MRT3847_135875C.1
cnaagttattcagggtatgcttanatatgncctaacttagtntccttnnatgtgattggttcttgtacctgttgccattgcattaatccaaatttgatgcatnantaaatgtggaanttggacangnnctggatctnnattttnttgcccanncctcnagtcttcnaatgagtanatattgttcatttnattntaaattngccatntgnattaatngcngtaagtngatagtggtagacacaggtcaangagtatatctnggctccagnggncgaggtc

SEQ ID NO: 39731 - DNA, 836 bp, Glycine max
  Clone ID: PAT_MRT3847_135876C.1
ggctcgagtttggttggtaacatatagctacctttctcacgaacaaattttgactcactgaggtttgttatttttatttcttctttccatctccatggggaattgcttgttcagctcgtacgaaacgacgacgacgacggtgaaggttgtagttcacgacgggaggatggaggagttctcatacccggtgaaggtgtcgtatctgctgcagctctatccggcgtgtttcatatgcgactccgacgagatgggattcgacgacgtcgtaacggcggttcacgaggacgaggagttgaggcccggtcaactctacttcgcgctcccgttgagccgcctcaagcgtcacctcccgccgcaggagatggccgctctcgccgtcgtcgccacctccgcgctcgccaaatgcggctcccgccggaagcagattgtgtttctctcctcctgcgatgtaaatacgaagcctggccggaaagttgcgccggaaggtacggtcggtaataatgacgtggcgaggaaaggaaggagtaaaattggaggtaggggtatgggcaagttcacggctacgttgagttccataccggaacaagggtagttttggaaagagataaaaatatgtgttcgctggtaattttttgtatggttgtatatattaaaaaataaaaaagaggaaaaatatatattaatttttgaacattgtagatctgtttcattaaaagtttagaacaacaattgaattgaagtatacgcgtttgattaattaagagcggtgttgctaaagaactttgcgaaatcttacgtgagaaaactcgatacagttactcctattataccaactt

SEQ ID NO: 39732 - DNA, 310 bp, Glycine max
  unsure (1)..(310): unsure at all n locations
  Clone ID: PAT_MRT3847_135877C.1
atcccccagcgtccatggggagagggggctgctnagattcccgacccaagagagggggggcctgtgtnggttnggactttcancactgctgagaaagctgcgaaagcttaccatgctnaggcaagggggggccctgggaanagagccaangtgagtttccctgaggagccttcaggggctgcttcctcaaaacgtgtcaaggggagtccagaggggcagccaatgaggaaaaatcccagctctgtgaggcccagaataaaccagaggtgcaattttngggagaatcgtnaggggctactacaggcctata

SEQ ID NO: 39733 - DNA, 322 bp, Glycine max
  Clone ID: PAT_MRT3847_135878C.1
ggctcgaggccgtgagagagagggacattccgtgagaatgaagttctggtcctggtcatagaatagatgaagaaagaaggatcgtcaacggcgggaaaaacgacccagtatgatcccctttttagagaatttgctcaagatcacaccgaccgctttgagttggctgattccattctgcataactacatatactgtctcttgatgaagttccatacgaaggtgttcatccttacaaatcaaaaactcaacaatacgcacagatctaccatgggttacatctctcgacttccctttctttcttttccaaatggaagtgctagtc

SEQ ID NO: 39734 - DNA, 808 bp, Glycine max
  Clone ID: PAT_MRT3847_135879C.1
ggaaaacaccaaatcgcctggacctgaacgtcatcgcaagctgtcccatagcaacccactttgaacatccaccagaaaagatgtctttctccaatgcaaacacaggcgacaagccggccgacccctacaccaaggccaatgccgacaccgaggtctcagtcgatcagaagatcagcgacttgaccaagttcatcgacgccagtaagttcggcatgatgaccacacgagacgccagctcgggaaagctcgtctcacgatgcatggccgtcgcggccaaggagtccggcggaatcgacctgctcttccacaccaacaccgagtccaacaagacagacgagctccaggacgactcccacgtgaacatctcgttcctaaatgcctcaggagagtgggcctccatctcaggaaccgcaactgtgcagaccgaccgggagctggtcaagaagcactacagccctactctgaaggcgtggctgggagacctcggggatggaaagcatgacggaagtgaaaacgaccctcgtatcggtgtgattcgtgtcaagacagccactgcgacatatgctgttgtggcgaagaactttgtcagccgggcggccgacatagcgcaaggcgctgtcactggcaagcccgctgctgtcaacaacctgagggagatcacagaggcagaggttacccagtggagaagcgtgcattagggcggaccagaacgcatgtcgtcgagagccgatgctgcatagcacgattagattttgatggtcggttgtggcggataacctgacaggctctaattgaccaattcaccatg

SEQ ID NO: 39735 - DNA, 157 bp, Glycine max
  unsure (1)..(157): unsure at all n locations
  Clone ID: PAT_MRT3847_13587C.1
aagaaaagaaaaacattcgcatttgatcttgagatttgaaacgacaatgatatatataccagtacatattcaagtgtaatacagcgttaatacagaagaacagttgtaanacttcactactctcatttatcttgctgtaaatcaggacgctgtgggc

SEQ ID NO: 39736 - DNA, 258 bp, Glycine max
  Clone ID: PAT_MRT3847_135880C.1
aacttgtatcattctttttgatactgttggtgaaagacacaacggacggtaaacacatagtactttttttagtttctcatgtaataatattcaaatgtaaggcaggagaaacactattatgatgagatctacttgtgatatcacaaatcaagtggtatgtgttgtttggtaattatacattataagggcatcgcttaaaaactactatcacattctagtataatgaatgaccttatgccttctcatatttgaggggct

SEQ ID NO: 39737 - DNA, 403 bp, Glycine max
  unsure (1)..(403): unsure at all n locations
  Clone ID: PAT_MRT3847_135881C.1
attttcctcaataatttttgcagaatgtcagtgcagcagttgaaccacaagcagaaagtactcacaatcatcttcagtttagaactgtggagggccaacaaacagaatatccatggaacggactctgagctgtggccttatggctacaaatatgaagtttgactcaaattactgctgtttttggctctttattccaaagcattcttgtcctttctttcaatttttccatatgtatgaactagtaaaacatgaaaaatgttgggataggtagtcaaatttgtacagcaatttacatcctgctttacttagtccttatattgccttattagcagttaggaatagatgnanccctgaacacgccgctgacggatgtggcagcagagctggggaagtggcttgacat

SEQ ID NO: 39738 - DNA, 605 bp, Glycine max
  Clone ID: PAT_MRT3847_135882C.1
gattttgttatggagatactctcaaaacttgtgtctagacaggtgtggcgtatgccaaaactttgggttggattcttaaaatgtgtatatcagacacagcctcgttcttttcatgtattattgcagttgccacctcaacagctggaaagtgcactcaacaggcatgctaatctcagaggtccccttgcttcttatgccagccaaccaactgtaaaatcatcacttagtagatcaactttagcagttctcggtcttgcgaatgaaactcatgagcaacatttgtcatcttcgttacactcttctgacacaagttcttcagttcacggagcaactctgacgtgatagtaaagtgaccaacaggaatttagtaatcagaccaattcaaaattgttgttgaggaaattgatcgactgcgagggtttcttgtcatccaaagagatgatacacaatttatgtggtgacttttgaacctgaatgccgcctttccaaaatctgtgaccctgccgacataggggcatgcatccagtcggatcaagttttcaggcaatccacccccagcctgcttgtaggaatgtatcatagatttctttcttttttgttatttt

SEQ ID NO: 39739 - DNA, 318 bp, Glycine max
  Clone ID: PAT_MRT3847_135883C.1
acaccaagtaagtggggttttaggggttattggggaccaatatccaacccccataaactattttttgttacatgggacaacatctttccaggggtttgatttcaccgttttgcctaaaaaaacacaagggttttataaactaactcctccatcccccaaaataacaaaaaaggtaattcattggcaagaaatgcactctggccaagggttattccttttcaggaattcaaacacctggttgggacctttgggcatttttccagtgcaaatttttctccaggaactttttttgtgtcaattaggaaaggggtgcccatt

SEQ ID NO: 39740 - DNA, 319 bp, Glycine max
  Clone ID: PAT_MRT3847_135884C.1
cattattgtttcctctcatcccactatcaaggatattaatttatattagacccatgcccttgcagatgccccatcttatccaagagcggagcatgtccgaggaaatatgtctgacactgcatcacaaactaaagatattcttatcaaatgcatctgccaccattgcactcatcagcactgcttgaagttatttaaaaaatgctatgacgcacttccacactatggcaacgctattaactcacaatgcattcttccaacggctccaaactctatcttaggctcaaaaggtgcactccacatcgatgtgactatgttgagc

SEQ ID NO: 39741 - DNA, 629 bp, Glycine max
  Clone ID: PAT_MRT3847_135885C.1
gttaccaaaagcacctgagatccctaaggtccctgaatttcctaagcccgagttgcctaaagttcctgaattgcctaagccagagttaccaaaaatacctgaaatccctaaggtccctgaatttcctaagccagagttgcctaaagttcctgaagtgcctaagccagagttgtcaaaagtaccaaagctacctaagtctgagttacctaaagtacctgagattcctgaattgcctaagtccgagttgcctaaaataccggagattcctaaggtccctgaattcccaaaagttcctaaagcattttcaaccaccaatccttgagtttgaattatgtcttttgcttacttgtcctcaggtcataactggatgtattccagtgcctagttcatgttgtttgatgggtgtgctatgatatatgttaattgtcacttgtgtataatatgttgtagctacttgagtgcaattgagtcggtttactagtattttgaaccatactatagattatgtttagtttgaagttttttaaattgtcaattgcattgatatcattgcatactgatagacatcctctcatgtgttaaatgttgtgaatttaataagattgtaatgtctgagtataattctctag

SEQ ID NO: 39742 - DNA, 176 bp, Glycine max
  Clone ID: PAT_MRT3847_135886C.1
tttcattattgtgtaccacttttcaaacttgctggagtttgtaacaccaccaacaaaaaaaaaaaaaacgtggtctagagtttgtaattgtgtacgtttatattcaaataatattacatgttcgatggccttttatcctaatctcatgataacagacattttgctgatgatatatt

SEQ ID NO: 39743 - DNA, 646 bp, Glycine max
  Clone ID: PAT_MRT3847_135887C.1
ataaggaaaactaagttttgaaattgttggtaggaaatcttgaaagattttcaaaatgttatgacaaaatagttgaaatgctgactttgcttagtatatacagattacagaaaaaatgaagggaacaagagagattgaacaggtcgctctcatctactctgtaaatgaaaatataacaattcattccatgtatctggaacccccggaaggcaccaatggctacaatcttgaatcctagacgaccgtgtttttctcccataaattgacgggtgaccatcgatcctatatgctgacaaactagttatattcaacaatgtcacaggagttctcatttgctttattacctcctctgcgattatattcttctctggataagtagtgcttaaggttttattaagaggaagggtggcttctgtacaatgccctccggaattccaatcgccacccctgaaatgtgatggtgctgaacttcgaaagaaaacgtgggtttttctatgattaatgtgtttggccacccatgaagcccaagtcttcaaagcttttctgaaagctgtagaaacatttagctggggatgaactagacctttttcttggtagtaataaatcccggcttgtgtttttgaatgtgaccaccaatgtgcagtgt

SEQ ID NO: 39744 - DNA, 455 bp, Glycine max
  Clone ID: PAT_MRT3847_135888C.1
atatttttttaaaagaaaatgaaaatctgaatagtaaaaaataaaagctaacggaaccattatacatccaaaccctccttgccttgacaactcaatgataatcaaaaacataagaagcagggcaccagatagaaaagataacctgctgataaagccctaaagacagactcagataacgaaaaaaaatacattagaatgatttatgactaggaagatctaacaaaaatggcagaggcccatccaatatgatgaatctcggtggcataaaacaataactcaacttgtaaagagatatccccaattatgtaagaatttactaatcctataacaaagccatatagaatacccaagcagacattgacatgttaagagacaataagaaaagctacaggagagagctgcaatggagaaatcatagaaaaagagaaacacaaaaggagtggcaaaaaaaagca

SEQ ID NO: 39745 - DNA, 784 bp, Glycine max
  Clone ID: PAT_MRT3847_135889C.1
gtttgagcttggtgtggggtcttacaatgccatgcttgattgcgtttgcaagctttgtcgccaaaaggatccgtttcaacttcactcggaagcagagaaggtgttggtggagatggagcaccgtggggttccaaggaatgtggagacattcaatgtgttgataacgaatttatgtaagattaggaagaccgaagatgctttgggattgtttcgtagcatgggagagtgggggtgttaccctaatgagactacttttcttgttttgattaggagtctgtatcaggctgctaggttggaagagggggatgagatgattgataggatgaggtctgctgggtttggtgagtttctagataagaaggcttactatcagctcctcaagattttgtgtggcattgagagggttgatcatgctttgagtgtgtttgctatgatgaaggatggtgggtgtgaacccgggcttataacttatgacttgttgatgggaaaattgggtgctcccaatcgtatcgataaggctaatgctctattcaattaaacgaaaagtaaagggctgcctgtgatgctcaaaaagtatgctgttgaccccaggtattttaaaaaaaaaaaggttgtcaagggtgtgaaaaaaagggaaaccctgcctgaaaaaatggctaggaaaaaaaaccccctgaaacaaattcggttgagttttgtgaaaaagccccaaaaagtgatgggtcgttgatccttttttgtactttataaaggtttcggaataaattttcctattttttcctcc

SEQ ID NO: 39746 - DNA, 304 bp, Glycine max
  Clone ID: PAT_MRT3847_13588C.1
ctcgagccgctcgagccgaatcggctcgaggaagaaagtgcctccacacaaaacgacctggcccactaaggaaattcacttgaccccaaagaaaatcaaaataacttcgcttctccctcttcttctctggtctccatcacttctacacgccagagttgttcccaactttgctgctgagagtatggttccaaaagggacagaatggggtggtggaaactgggaaattaaaacacctactgctgtgaaggatatacctcagtgggagcttgctgcaaaagtgacaacatacatgaaaactgatgat

SEQ ID NO: 39747 - DNA, 1223 bp, Glycine max
  unsure (1)..(1223): unsure at all n locations
  Clone ID: PAT_MRT3847_135890C.1
aatggatctctccatgatcgcctatactgtagtgatgtgaaaaaggaaccactaacatggaagcagagactaaagatctgcataggagcagcacgtggactacacttccttcacacaggtgtcaagcgaaccatctttcatcgtgacgtaacaccttataaaattcttttgggtagcaacatggtggccaaacttgcagacttccggctttcccgagcaggaccgcattatgcatcaaagccaaaaccaaagacaatttcaaaagatggctttataggtacatatggttgtgtggctcctgagatttccgaaaacaatacaataacagaaaaatgtgatgtttattcctttggggtagtgctactggaactggtatgcaaagacaagctaaaagatgttgagaagcggcagaagcaccctgttgaggagaatattgatccgaatatcaaaggaaagattgcaccagagtgttgggaagtatttatggatatcacagaaagatgcttgaagtttgatccgaatgagcgaccagcaataggtgaagtggaggtgcaacttgagcttgctctgtcactgcaggaagaagcagatataataaatactggcgatgattataccctattatcgatgatcattatgaattaatcctcaaccagaataggtaccatctttagctggaaactaaactgatggattatagaacttccaaggttgtctcaatgataattgataacagttcaacagattgttcaatcacagtagagcagatgaatgggaagtcatgggaaaatattttttttagttcaagaatgaaattgagttatttgccagttttgtcactcaaggcattttttgtctctctagtaagattttatgaccgcaaagacaagaagattgttgtgactggtgtatgagaacactggcactgccaatggatctctccataatttcctaaactgtcatgatatgaaaacggaatcacttttgtggatatatataggctgaaagatccttcaaagctgcagtgcatggactacattacattcacacaggagtcacgtgcaccgactttcatcatgcagccaatatcctgcaatattttagcccttcattagtcattgcacagaaatgaaggaacagaaaaatgtaatgaatagttcctatttagctatagagaaaattttgatggagagnnnnnagaggatccatacttgttttggata

SEQ ID NO: 39748 - DNA, 1288 bp, Glycine max
  Clone ID: PAT_MRT3847_135891C.1
gaagctttgaataaatcactttcggatttacttgatggaattcaagaagacttcgctgctgttgtggattgggcacacaaaattgatcctttatgctgcatatcaatgcatggaactacagaacgctatctctctggtcagaaagctgatgcagcaggatttgtacgtgatttgcttcgtgacctggagtctcggatatctatgcagttcaaccgatttgttgatgaagcttgccatcaaattgaaagaaatgaacgcaatgttcgccaaacgggtgtcctatcctacattcccagatttgcaacccttgcaactcggatggagcagtatatccagggtcagtctagggatttggttgaccaagcatatacaaaatttgttagcataatgtttgcaactttagaaaaaattgcacaaacagatccaaagtatgcagatatttttctttttgagaactatgctgcttttcagaatagtttgtatgacctcgccaacattgtgcccacattggccaagttttatcatcaggccagtgaagcctatgaacaagcttgtacacgccatattagcatgattatctactatcaatttgaacgccttttccagtttacccgaaggattgaggacttgatgttcactgttgcacctgaagagattccttttcagcttggactgtcaaaaatggatcttcggaagatgttaaaatccagtttatctggggttgacaagtctattgctgcaatgtataagaaactgcaaaagaatttgacttcggaggaattgttaccctccttatgggacaaatgcaagaaggagtttcttgataagtacgaaagttttgcccaacttgtggctaagatttatcctactgagacaatcccgtctgtagcggagatgagagaccttttagcttccatgtagaggtttatgtatgtatatatctttttgttttttccatcttatgtaaggtataatctttcttgtgctctatttaattttatttattcaataaagtgtatctttgtagttttaaaaaaaaaaaaataaaaaaaaaaagaaaaaaaaaaaaaaaaaaaaaaaaaaaaaataagaaaaaaaaaacgtaaacaaaacgaaaaacactttgaaagaaactgatataaaagcccgaaataatacaaaatgggggggccggctttaagaggtccaatcttcaaatcccctatttggaaaatgaaattgtttttttactggcccctaaaataaataccttggcccgggtgttaaaaccgtgagaggggaaaacccc

SEQ ID NO: 39749 - DNA, 551 bp, Glycine max
  Clone ID: PAT_MRT3847_135892C.1
cttattcttacgtaatcaaacgcaaccaccaatatttcgattaaaaaactaaaaattttggctcataaactaaaatctggatattatcaaactaacactatagctctcgaaaaagaattttaattatgcttaaaacctgacctcggaacataacactggatttttcttggtcctgaaactctccttcatgaagcgcaaatgtttttccttacacatgattcacactttttaccacttgcattggatgcaacacgctccaatctctggcttgattcctttggaaagggttttaaagcttgaactaaggctctgtcctgtaacgaacaccacaaatgctgttctaaactagaataaactccattaccagggcaaatcctgatcataacaactctttggtgtactagtcttttgccttacccgtacaggacgcaggagctcgctctcccaatccttcatggaatgtcaacggtaactcagttgatttgcaccaggatttctcttttaaaaaatgacggaaaagcttgtgaccaaaaacgtttctgaaggagcac

SEQ ID NO: 39750 - DNA, 306 bp, Glycine max
  Clone ID: PAT_MRT3847_135893C.1
aaaaaaaaaaaaaacgaaaattttattaacaaaaaatggttaaaaaaaaaaaaaatccctttatagttaaaggggaaaaagaccacggcaacgggggaattgggaaaaaaaaaaggggaaaaaaacacttgggaccccaaattgggataaaaaactaggggcgccaaaaacttgtgtgaaacaaaaatttttaagggcgtatgggtttaagaacctttttaaaaggataaaaggaaaaaaatgcttggaggaaaggtacttttaaaagggtgggaaaaggaccatttttcaaaggggaaaaaaaca

SEQ ID NO: 39751 - DNA, 182 bp, Glycine max
  Clone ID: PAT_MRT3847_135894C.1
gaccgacgcggccgcaagagatcatgatgaatacagtgtccaactcttctaatgtacaagttagtttggtggcacaccgatgtgtattttttagtgaagaacaggggggcaacaacaataataatgtggatcatcaattagtctttaatgttacatcctattacttaatctttccatttatt

SEQ ID NO: 39752 - DNA, 289 bp, Glycine max
  Clone ID: PAT_MRT3847_135895C.1
aaatgccgatttcagcgctccccattgcatgggaaccactctcatcggcgtcacttacaacggaggggtcgttctctgagccgactctcaaaccagcaccggagtgtatgtgatcaaccgaccgtcggacataatcactctgctcactgataatgtctacgtgtgtcgctctgtatcggctgctgatactgagattgcgtttgcttatgtgcgttactacctccatcaacacacaatacttctcggacaccctgcaccagctaaagtctctcgggaccttgtccgactt

SEQ ID NO: 39753 - DNA, 418 bp, Glycine max
  Clone ID: PAT_MRT3847_135896C.1
ggctggggtccataaggcttttttttttaaattatttaagcttttctgaagtcaatacacgaaaacatgtactaatgactcccatgttgatggcccttttatgccttttgagagccatcccatcaaccatgattttcttacaggagaaaacattgcagaaaataaggaatatgtggcttaaagtgttgctcacaaatttttgtccatggcagatatttaattccaaaaaaaaagtagccaattaaagattcctaattataagacttgtaacttactaaacatgtagtagaggagaaacatgcagaaactatacaacttaatgacgtacaatactaagaaataaatgagattagatagatttcaatgaagaaacatctcacttaagctggctttaaaaaagaaaagtgatgatattctc

SEQ ID NO: 39754 - DNA, 397 bp, Glycine max
  Clone ID: PAT_MRT3847_135897C.1
attccttttttttgggtaaaaaaggggggaaaatacggatgcaaatgcttacttaaaggcctacctttctaccccccgcactattacaagcctccgtgccaacttacggtgcttgaaactttactggacaggatatacaatacattatggtttagagtgtggcttaaacggaaacttctgcggaaaacacttactttcactccagaaatcatggttggagttttatgggggggcaaatcccggagcttgacacggctattcacacgccctgaaacaatgaaaactttgttaaggccaccggtgccgttacgcctgacacatggcaaaaccccttgtgaaaaaaatttttaaaaaatggtgaaagaccctctcataaaccctgggatcccggggggga

SEQ ID NO: 39755 - DNA, 261 bp, Glycine max
  unsure (1)..(261): unsure at all n locations
  Clone ID: PAT_MRT3847_135898C.1
cgctcaatcttgatgcttactacaggcatcaaatgtttaaagagatgaaaaaaggttttaaaaaagccgaggcttcaaagcgcactgggttcaattattaanaacancgcatgcaataattgttgcaagctctgaaaagcacaaggaggaccaagtaatggcattgaagcactctatgcaaactggaatgccacacgcaatgaaagaccaaactcaacttagggaggaaatggtttaccattacaaccttgaaaactttaa

SEQ ID NO: 39756 - DNA, 343 bp, Glycine max
  Clone ID: PAT_MRT3847_135899C.1
ttttttttttttggacggtaagtgaggtcattgggttatttttcaaagacacaatttctaattttattttccctaggtaaaaagaagttaaaaaagcagaacaaaccttcagtttagacataactaataaacacaccaaaccagaatttttgaaatttaacacaaacagacacatcatagtctacttgattaagatatgaagcccttaacatgtataacaatgttatgacaggcctgtgcagaaagataaggaaagtcctataaatataatgagccaaggaggagttgccttaacataacccaagaatggattgcctaaaaccagatgttgaggccccccttc

SEQ ID NO: 39757 - DNA, 280 bp, Glycine max
  Clone ID: PAT_MRT3847_13589C.1
accagcggctgagccatggtcattattgccgtgcttgggaatgcatctgtcagaaggtgtcattgcaccttattgtgacgagagttttatacacacaacgtctgtgccgagccttttggtgcatgatgctgggctaaatcagaaccacattcatgggaactgatcttgctaatagagggatgtggttctaatgatgcttttgaaatatagcgttcttgatgatcaactgaaacttcatggcattggagcattcttattgacgatgtcaaacaggctacat

SEQ ID NO: 39758 - DNA, 328 bp, Glycine max
  unsure (1)..(328): unsure at all n locations
  Clone ID: PAT_MRT3847_1358C.1
cacgtcgcangcncncgtacgtnnaactcgtgnnttcggctcgagctganatcaggcaagtnaaaaccnngtantaaaatggncttaacanncnggtgaacncctanaganttggcgtccnccggagcanggancagtngtttanncnggannnnccngnaannggngcggnnctgagcacntcaanaatngcngtntacccncntgggnngnggaaaagcngcgcncnagngagggnccngtnnggnnnannngtnnggaantngtcgcatnaantcngtnngnnnggnnnnagtnntntagnnnananggtctncnncgtggtnnc

SEQ ID NO: 39759 - DNA, 371 bp, Glycine max
  Clone ID: PAT_MRT3847_135900C.1
ctcgagccgctttcctcgaggacctactcccaacctagagtagccagatgggaaagtaaaattaaaccttgctcatatatggatttctcggatataaaatgagccacttcaaaagtttattattttggtccaaaatactattaatctccataggctacatgggtccctaagtttgccaatagattgataagtcaagcattcctgggccattcatctattttcattgtaaaaaaaagtggaccttatatattcataacttgtttcgcaacacaagataagcaattagaggttcttgcgattagtgctcatacaggaaatggaatgcagtctctaacagtggttgggaaactagataaatacagggggcgggc

SEQ ID NO: 39760 - DNA, 253 bp, Glycine max
  unsure (1)..(253): unsure at all n locations
  Clone ID: PAT_MRT3847_135901C.1
cnatcgtgagctcctaggttcgagcttcgttggttgctgccattgtaaaanaacaaaaannnnnnnnnnnnnnnnnnnnnnnaaccgagtgttgttgtattttgttcgatggtttctgaggctgacctagaaaacgacgatcgatgttttttactgtacttcatcatgggaacctacttgggccccgacatcaaaggcgaaccaccaaaaaatcaatcttgcaaagagttgcggaggggcttcctccttacac

SEQ ID NO: 39761 - DNA, 295 bp, Glycine max
  Clone ID: PAT_MRT3847_135902C.1
taactaacatgaatttttgtgggactggatctataggccccaaaaaatacaaattatgacaataagctccaattgcgtttatgatggggcaacaatagtatacactacttgaaatgtctgattggcaacttggcactggcaaagttaccgattccaaactagtgagagcttgagcgtccaaacctgtcctccaacattgtgtaatttgttatacatagacctccttttgagtggatctacccattggaggttatattatagtttctcaaaaaaactgaaatgtcatcaactctta

SEQ ID NO: 39762 - DNA, 125 bp, Glycine max
  Clone ID: PAT_MRT3847_135903C.1
ctggctgctaaaatgagggcaagcacttcctatgcaatttccagatttgggcaatattatgattgggcatagaacaactcataatactttgagacgcgatgagatggacatagatagtgactgag

SEQ ID NO: 39763 - DNA, 243 bp, Glycine max
  Clone ID: PAT_MRT3847_135904C.1
aatatctggaaaaaggggacaatatactgtttcactttacaaaacaacacgggcaacagaaaaaacattcagggggacggacattagttctcccattcccaccttacaaagatagaaccggataataggaagcgcaaaggccctcctgcgtttcaccaagaacaaatttttgtctgtaaaatttagacatgaaactttttgagaggtacaaacactaacgggctttttctagggtacaaccat

SEQ ID NO: 39764 - DNA, 385 bp, Glycine max
  Clone ID: PAT_MRT3847_135905C.1
gggggcaaaaaaaaaaaatttccccattttaaactttttttaacaaactttcccttaaacaaagcgtgccctgggtttaaacccccattcacccgaaaccaaaagttccccctaaaaccctgttttttttgccccggccccttgggggaactttccttttttgggcaaaaacggggccagggttttttttttttttaccaataaaagggggggggaaaacccccccccttggggtttttcacccaaccctgcttccaaatacagggaaatccccaactaaaaaaaccaaaactggttaaggcaatccccttaattatgaaggaacccccttttctgattgtccccggaaaaggacctttttttttgaacattgggatttttaggg

SEQ ID NO: 39765 - DNA, 503 bp, Glycine max
  Clone ID: PAT_MRT3847_135906C.1
ggaaagataacttacaaaaggggaatatgaatcttaagggcaagatacaaagctttggaaaaacaaagattaaaatatttgtgcatagagtatcgtccattacatgtataatagtatcagtatgtaatggttgcttctcttcattttaagtcttttctttatagttaatgaagaaataactctttaagaacttttttggttctgatgttgcattaaatacgcaatatgttgttcacattataagaaagatatggcttgtcctttctaaaagagagagaaaaaatgacagactcttagactcacaatgataactaaacggtgtttttgacataatgaaagtgttttctactactctgcttcatatatattatcatagttgataagacctgtatgcttttgatagtactatgtaacatacaattattctttataataaaaaaatgagagcatattcaaaaagacttgacaaatataaacgttgaaacacttaccgtgtgtttgga

SEQ ID NO: 39766 - DNA, 240 bp, Glycine max
  Clone ID: PAT_MRT3847_135907C.1
gaaagtatgatggcattatcacgtgttagggaggacaactaccggtcatatttgcgcgaagacactgagaagaataccaaatggatatatggtgcccctccacattacgacgttgctcacacgctatatgaccatggcagagtcattgtttgggctcacggttcacttgactagcacgtgcagtctctagtgcatttctgggacatggagatgttccacagtgtcggactgcatgatttc

SEQ ID NO: 39767 - DNA, 475 bp, Glycine max
  Clone ID: PAT_MRT3847_135908C.1
gaaaaggcaaaagtaaaagatggcaccttacatttctagagatagagcctctatttttgttttacttgcctcactagtccttcccttgattctcctagactatttttcttctgcgttgtttgcaagtgcaaaattcccaaaatccaaagatgctgatctgttagaatttgctctcaatttggaatacttagaggctgagtttttcttgtttggggctttggggcatggattagatgtagctgcgccaaacctaactgggggaggaccccctcccattggtgccaaaaaggttgaactagatagtcttaccaatgatgtcatcttgcagtatgctttatacgaagttggacacttaatagccataaagatcaatgtgagagggttccctacgccattgctggatctagacacaaactcttgtgccagactaatggactatgcatatggtaatccgctggttgctgctttaatacct

SEQ ID NO: 39768 - DNA, 510 bp, Glycine max
  unsure (1)..(510): unsure at all n locations
  Clone ID: PAT_MRT3847_135909C.1
gctcgctcagccgccgcctnnnnanannaannataaaaaggagatgctaccccgttggatgttgatctttttttttttcccccaaaattcatatttgaaatcacttttttcaaattttaaaggactttttacatgaggcctgataaaccccatttggcctttttgccaaccccaattgaccagcctttttaaaaaacaaatatttccctaaaaagggacattttttttgaaacaggggtcttttatgaatgaaatttagttcgggcaaaaattcatcgttgactttgggggagtaatatgcaagtgggacagtcccactttcccttgaaccttgttttttgcgttaccccaccccccaaataggggaacccttcccctccttggcaatttttattggcccaagcatttttttttccaaaaaatacctgagaacaaacacaggatgtgggttcttttggatcaagggggggatcaacatccatcgggggagcatactcctttttataactt

SEQ ID NO: 39769 - DNA, 558 bp, Glycine max
  Clone ID: PAT_MRT3847_13590C.1
ttcttgtgcgaaaagacgacagaagggggcagacacgaataacacacaaatcattaatcaaccaccaccttaacacaacaacacgatgatgtccatcttcagccacttcgagatcgcgcaggcccagaactggagcttttctttgctcccagtaaaaagcacgaattcgaagcccaacacagaagccacttcctcctccgctgagtccaaaaccgccagaaaagtttccaatctatcacaacccggtggatccaagcaaaacccgccccgtttgaggcccagatttgcgccggagttggacgggttacactgctttgaatccattgtaccctgctagatggatttcttcagtctccaatctcaattcagatggcataaaaatcatacgcgattcaattcaatttatttttactgaatagtttaattagtagttgagaaagctatgtactgtacgcgaaagatgaaatgaagaataacaaaaattgaaattacaatctcccacctgagaatagggtctttgaattacctcaatttggatttttatagattggttttatc

SEQ ID NO: 39770 - DNA, 408 bp, Glycine max
  Clone ID: PAT_MRT3847_135910C.1
aacaaagcaatatatatatatatatatatgggtaccaagggatatatagaaatgaacatagacatacgtggatatgggtggcgaggtagagactcacacgcacccatataagcagccctaaatatatatttatggggtggaagattgggggaatctctctcaatgagggtcaaaaacccagggggggggcttaagaagctttattgacctaaggtaaaccttattacccagccctcctccccaaggggggaatggaacttttacacaatggtaaagccagaaaagggtgcccgaacactgttaagctggggaaaaattataaggaccttcctgaccccctggaaaaaggggggaaaacagatggggggctaaaggagtttttggggcaccactcctttcttgggcggc

SEQ ID NO: 39771 - DNA, 223 bp, Glycine max
  Clone ID: PAT_MRT3847_135911C.1
ttaaagaagactcctctgcttcttcatggaaaatctgatcaggctctggatctacgaaaatgacctcctcttaacaagggaaaggaaattaccatcaggctagggggtgtgccacatcacttgctgaaagttgccaccggatgtcctgcccgtattgtaaatgaccaagaaatcgggacttacacagtgctcctttacaaagtccgacttgagtatgcacccc

SEQ ID NO: 39772 - DNA, 385 bp, Glycine max
  Clone ID: PAT_MRT3847_135912C.1
gagagagagaacacacggtgtgagagaaagaaagtttttggttagggaggaacccacctacattctagttagggagaaagtgtgagagagaaagaaagggatcggaagaatgaagctctagttttctctgagagtaagtgaagaaaaactcaaaatagaagatgtttatcatgctgatggtgatgagagagaaagggtcagcaacaagaacagaagaaaagagattcatcacactaatatagattgtacttgattggagcaggattgtccataaaaatacaagccttcagttgtggctactacaaggtggttcccttcggattccggtgcctttgcggactggtcggcccctccgtctgctgtctccggccgcggcgacgatctc

SEQ ID NO: 39773 - DNA, 652 bp, Glycine max
  Clone ID: PAT_MRT3847_135913C.1
agcgtactatgctggaacttctcaaccagttggatggatttgaagcttcaaataagatcaaggttttgatggccaccaatcggattgatatcctggatcaagccctccttagaccaggacggatagaccggaaaattgaatttccaaaccctaatgaagagtctcggctggatattttgaaaatccattctagaagaatgaatttaatgcgtggcattgatttgaagaagattgccgagaagatgaatggagcatctggtgctgaacttaaggctgtttgcactgaagctggaatgtttgctttgagggagcggagggtacacgtgactcaggaggattttgagatggccgtggcgaaggtgatgaaaaaggagactgaaaaaaacatgtcattgcggaagttgtggaagtgattctcatttcatgtttgtggtgcacattgtcctgcgaagatgggcagagaacacacattagggttatttcaatttacagtggcattggctttcgttttgcttaactttacccaatcatgattctttcctcgagttcttccttgtctgtgtcttaggacggcacactacatttatagagtatttttaaaagatttatattcaagaccactaagtattctaaaactagtgaaattattggc

SEQ ID NO: 39774 - DNA, 1895 bp, Glycine max
  Clone ID: PAT_MRT3847_135914C.1
ctcgagccgaatcggctcgagggctgcgagaagacgacagaagggggtgtttgttctgctctctaccgacctaacacgagaggagaggagagaagagaggaagttttggggtttgaatctatagaatagaatcaaaccaaattgaaagaagatcgatcgatcgatcgatggctctggtcggagttgaagtgaagcatgcggcggagggcgcaccggaggagaattgctccgccaagcccaccaagcagggcgagggcctccgccactactattctcacaacatccacgagcatcagctccttctccgtcaaaagacgcataacctcaaccgtcttgaggctcagagaaacgagctcaattccagggtgaggatgctgcgcgaagaattacagcttttgcaggaaccaggctcttatgttggtgaagttgtcaaagtcatgggcaagaacaaagtccttgtcaaggtccacccagaaggaaaatatgtcgttgatattgacaaaagtattgacattacaaagattactccatccactagagttgcacttcgcaacgacagttatgttcttcacttagttctgccaagtaaagttgatccattggtcaatctgatgaaagttgagaaggttcccgattctacttacgacatgattggtggtttagaccagcaaattaaagaaataaaagaggtcattgagttaccaatcaaacatcctgagctgtttgaaagtcttggaattgcacaaccaaagggtgtcctgctctatgggccacctggtacaggaaaaacattgttggctagggcagtggctcatcatactgactgtacattcatcagggtgtctggttctgaattagttcagaaatacattggagaaggttctagaatggtcagggaactttttgttatggccagggaacatgctccatcaattatcttcatggacgaaattgacagtattggatctgctcggatggaatctggaagtggcaatggtgatagtgaggtacagcgtactatgctggaacttctcaatcagttggatggatttgaagcttcaaacaagatcaaggttttgatggccacaaatcggattgatatcctggatcaagccctccttagacctggacggattgaccggaagattgaatttccaaaccctaatgaagagtctcggctggatattttgaaaatccattcaagaagaatgaatttaatgcgtggcattgatctgaagaagattgccgagaagatgaatggagcatctggtgctgaacttaaggctgtttgcaccgaagctggaatgtttgcattgagggagcggagggtacacgtgactcaggaggattttgagatggctgtggccaaggtgatgaaaaaggagactgaaaaaaacatgtcattgcggaagttgtggaagtgatttttatttcatgtttgtggtgcacattattatcctgcgaagatgggcagcgaacacaccttagggttatttcaatttacagtggcattggatttcattttgcttaagtttaccaagttatgtaccgaatcatatgattctttctttgagtttttccttgtctgtgtcttcggacggcacactacatttatagagtatttttaaaagatttatattcaagaccactaaatacgtagtctctactctaaaataatagaaaattattgaggcagccccaagtcaaaacaaaatatttttcaaacatcggacaaatggtagtaaaagcttaccaaacaaaaaaaagggtttggccgtttaaggggacccaggttaccgccccgggccgggcaaggaaaaactttttttttggggcacccaaattcaatttccggggccggggttaacaaccgggggggggggaaaacccggggg

SEQ ID NO: 39775 - DNA, 304 bp, Glycine max
  Clone ID: PAT_MRT3847_135915C.1
gtgagatagtgaacccattttgcttccagcagctctgaggctctcctgtggatgcatcaagacaacagcatgatggcgccaaacttgaggtcagcattgggcaagggcaactaccagagcagagaaaccaaataatataccatacctaactgttcgcctggaagttactcttcatggcaagtgtttgaattttctccttgttactgcgtgtccgaacaatcatgtagctgtagatatagtgattgtggaaggatgaagttgccaattgacccgggcggtcctcctcctgacaggaaaaatctga

SEQ ID NO: 39776 - DNA, 758 bp, Glycine max
  Clone ID: PAT_MRT3847_135916C.1
cttttgggctgagcttgtgagaaagaagctgaagggagaaatgaccgaatgctattcacttctaaatcttcgatttccatcgtttcccgtcattgatttcggcgcaaaaatcttccccaaacgtttccccaaatccatttcattctcacacccttcatcgaagtttcaactttgtggaatttcccgagctatggaagtggtcgaaggaagtgaagagagtaaagggtcgtcatcccctctaatgaagctcttgttcgtggaaatgggtgtcggctacgatcaacatggacaggacataacggttgcagcaatgagggcttgcagggatgcaatctcttctaattcaatccctgctttccgcagaggttccattcctggtgtcagttttgatcagatgaaattgcagattaaactaggggttcctcattccctccagaattccttggatattgagaaagtgaagtcagtatttccctatggagaaattttgaatgttgaagttgtggatggtggtttgatatgctcaagtggggtacttgtagaagagatgggtgacaagaatgatgattgttacattgtgaatgctgctgtttatgtgggctattaactttcaggttttgcagagctttgctctgtttgttctcttgttaatggatgattactacatttttgtgctgtgtaataacataataacaaagttgtacattactacatttctctaaattctgttcttgctcggttatttttgggttttgtcg

SEQ ID NO: 39777 - DNA, 321 bp, Glycine max
  unsure (1)..(321): unsure at all n locations
  Clone ID: PAT_MRT3847_135917C.1
ngtcgcangcacgcntacgtaagctcggaattcggctcgagatgggacatggggggggggggggaggnncgnaagagntacgcaattntncagttnggatttcggggagttttcaggtcacttgaanaactngnagnatctntactttnnantttaanggaattctagcgantcatctgtgggtaaaaanntanaggcaanaatcattttnacccggngaacccnaaanccncanttgcaatgccaangtnggtananncctttggggnaggnttngngtnnaaaatgacngtttccccngngatttgaaattncggnanc

SEQ ID NO: 39778 - DNA, 187 bp, Glycine max
  Clone ID: PAT_MRT3847_135918C.1
gatcatcactaggtgtttacatttgggattacctctcgtcatggtgggacaccctcataacttgcatcatccatcttgcgtcaatctgtgctttcctagtcttttctaatccagtgctgtgtactgataatgaggacagtcttttccatggaatcaacatctacacgcaaacacagagcccggtaac

SEQ ID NO: 39779 - DNA, 109 bp, Glycine max
  Clone ID: PAT_MRT3847_135919C.1
ggccacacctatatatagaggtgaggtgaacacgatagtaactgcgaggaggtggagcttataagggcacagctctgaacattagaatcagtcaggaacagtgcatggc

SEQ ID NO: 39780 - DNA, 392 bp, Glycine max
  Clone ID: PAT_MRT3847_13591C.1
cttttatgtaagggagacaaataaaacatggaataaaaagctcgcagtggccagtaatttgagagagcttttgttgattaattcctagtcatcatcttcatcactggacttgcaaggtttgtagcagaagtcggtggtgtcaaggcaacgacactggcctggcatcgagcgtgtgcacgcacagcgatcacaagctgagtgacatgaattcaacctaatatctgcacaatggcattgaggtggcattgaggctgtacacttgacagaaaaacagtaaagatgggtttgaagaacaacatggtggtgctaaaggtgtgtttcttggttcttttccttgtgggggttactaatgcacgcatggaactgaacctcttcaaaagcgatcactcatc

SEQ ID NO: 39781 - DNA, 452 bp, Glycine max
  Clone ID: PAT_MRT3847_135920C.1
gaaaaaaaaaaaattccttgctctactttatttaaaagattccaaatgttttccatggtccggatccgattgccaaaccccaaagggtccattttagaatttcttaccaaatttaaaaaccaaacccttaatggggtggaaaatgttggtccacttattaccccccggacctggggaaacaacccgttaacccccaatggaccttccagaaaaaccaacgggaaaattgggcctttgcccccgtttccttcaaagaatcttaggcgaaccccgttgaaccttttttccaaccattcttttcccggcaagattaaggagctgaaaatttggacccaaccccgcttgctttctttggttggagcctaaggattccaacccaaaaaccacccgcttctttggatttaacccttttgaaggtgactttttttactttttaaaaagtctggttttaa

SEQ ID NO: 39782 - DNA, 229 bp, Glycine max
  Clone ID: PAT_MRT3847_135921C.1
attcgcatggttagcttatagacagcctcacctgctacttttgggtgagccaacgaatcatttggctagtgggacaattgactcattgagcgaggcattggctgaatgggatggtgggatggggcttgttacgccaggagtttgggctcataaatcaggtggcccatgagatgatcgtgtgtgctgctcaagctgtgaccagagaggaaggtgacattatggatttcaa

SEQ ID NO: 39783 - DNA, 508 bp, Glycine max
  Clone ID: PAT_MRT3847_135922C.1
cttgagagcacaaataaatgtgaatgtacaactgcagcaaaaacagcaaaggccataaagggggaaacctatttagtggctatataaatgaaaggttaccatccaactctgattattaaaaaaacatttttcccccacactttgaccgccataattacccatgttatgtgagcgaggaggggggtcctaaacggagagaggaaagacttgcctatacaaaactcgagaccaaattcctatcttgccttctcgggcatcctaaggaataaccctttttttgtgtcaccgaggaccaatttactggccgcttttttacaaccccgagagtgggaattccctggagaaaaccgagttattcgccctgccacctttcctaaattcgccatctgcactcacttggggaacaggccctctccgtgggttccttccaaccccttaacaacccagaatggctaaaggaacacacccccctgcggctccttaatatttgtgggagagctgtttaaaa

SEQ ID NO: 39784 - DNA, 134 bp, Glycine max
  Clone ID: PAT_MRT3847_135923C.1
aaaaatcctcatgccataggttttgtcaggaacccttataatgtagggcgggcccattgcattctgttatttattgatttccctaattgatgggaagattttggaatttgaatttagtagtgtttcatttaaaa

SEQ ID NO: 39785 - DNA, 263 bp, Glycine max
  Clone ID: PAT_MRT3847_135924C.1
atttgcaatcaattcaatcatatatcagaggatgaagattgttgtgatgctattgctaccgcccttgatgtttgcactgtttttttcatgcacgagttcattggcagtatccacaaatacaagtaccacatgccccatggacttgaattacgttctgagaatcccatggaacacttctgcctgccataacttccaacaaactctggcggctaaaaacggaaccgacgctaacacatgttgcatctctctcttgtccctcttcg

SEQ ID NO: 39786 - DNA, 2147 bp, Glycine max
  unsure (1)..(2147): unsure at all n locations
  Clone ID: PAT_MRT3847_135925C.1
ganaatgattgatattagcctccaaataggaattaagatctaggttagggtagtagtagggattaaatatagagaaaaaataggattaattgaattgcacagaagagtaactcanctcaactcaagtgtttgttattgtttatcgagttgaggctcaggacccgacgaacgacggagaaacagagattaactgggcaaagctcaactgatgtgtttgttttgtttatcgagttgaggctgaggtgaggccttgtttgcctgaccctgaccctgaccctgacccgacgaacgacggagaaagaagagagattaaccggggaagggtttagggtttgggagtggaagaatcgaatcgaatcgaattgagaatgtctctgacgagcgtgacaatgtcggaggaagtgtggttaagctgcgtgactcatgcattgtccactgagaccgaagagattatgggccttcttcttggggacatcaagcattcgaaaaacgggagtgtgactgcattgatatggggggcgtctcctcagactcggtctgatcggcgaaaggatcgagtggaaaccaaccctgaacagttggctgctgcttctgccttggctgatagaatgaccacatccactggaagaacaaccagagttattggttggtaccattcacaccctcacattacagttctcccttcccatgttgatgtgcggactcaggcaatgtatcaacttcttgattctggatttattgggttgattttttcctgttacagtgaagatgtaaacaaggtaggaagaattcaagtaattgctttccagtcatctgatgggaagcagaatcacaggtcaagacctatacctctgtctcctgtaaatagaagccctgttattgatattgattcatcaccaagttcctccgagaatgtatcaacaaagcctggttacttcgaggcagagaatgccgagcaggatactggcgattcaagaagtgttgttgttagtaaggatggggggagatcagacttggggaatttctttgctaatgctgatgccaactatctagggagagataaaagtggaggaaactaccatcccaacaattcagacaccaacatagttgatgttgatcccatggatatgtcagaaagtatgcaagaggctatgcatcgttcaaatttggacatgagtggtgcagagttcgtaagaaaagaaattcccctatatgttttgccagccttgtctttaatcaacattgattcgccactatcatcatacactgatctgcaacatgtactatttgaagaggagcgaaatgcatataatcaagccatcttacaaaataagagggatgggaaagtgcatccactgactttcatacaccacacttcaacttatcaggcttccttgtgcaagttgattgaatattgtttaagtcctgctataaatgcacttcaagatcgactgagagagaatgaaattcggttagcagttctgagggaagaagccaaaagtctggaagctgaggcatatagagggagtgaagcaagtgtaggaactccccgtcgagttgcatctcctgtacatcgaggaggttcctctcctggtctgagaaacttgcatgactcgcctgaatcactcggttctaggaatgtagcaagtcctggtagcaggagcagaaaaggatattaaagtgacaccctctttgggagtaatgctccaagcaatataaacgatgatgatggtttacgatggttttgctaaaatgggatgtttaatatgtagaatgtacatggaaatggtgttgcctcagcaaagtttgctagttgaaaatgatgctaaattaagtattatgctagtgagagtctaatagtgtagaaatggtggtttggtgatttcattcacttggaagaacacattgaaatgatcaaatggcatgcacggttggattagaagcatgttaaacagccccctactcatatggccaccgtttgaccctgatccttatgctaaagttaaagcagggttagatgatgagggagaaaaaaaaattgtacacagaaatacagaatcttatactatcgcaattgctgctgctattttcaacgtggaaaaggattttggttaaaaataaaataaaagattaatgacttgtgattt

SEQ ID NO: 39787 - DNA, 732 bp, Glycine max
  unsure (1)..(732): unsure at all n locations
  Clone ID: PAT_MRT3847_135926C.1
tgaaaatgatggatattagcctccaaataggaattaagatctaggttagggtagtagtagggattaaatatagagaaaaaataggattaattgaattgccaagaagagtaactcagctcaactcaagtgtttgttattgtttatcgagttgaggctcaggacccgacgaacgacggagaaacagagattaatcggggaagggtttagggtttgtgagtggaaaaatcgaatcgaatcgaattgagaatgtctctgacgagcgtgaaaatgtcggaggaagtgtggttgagctgcgtgactcatgcattgtccactgagaccgaagagattatgggccttcttcttggggacatccaggtaacctgacatttttttcttatcaattcaattcagcaaatacacacagtaacagtagttagttagtgagtgagcgtaattgaataatggttgtgtggggatgtatccatggattggattcagcattcgaaaaacgggagcgtgactgcattgatatggnggggcgtctcctcagactcggtctgatcggcgaaaggatcgagtggaaaccaaccctgaacagttggctgctgcttctgccttggctgatagaatgaccacatccactggaagaacaaccagagtcattggttggtaccattcacaccctcacattacagttctcccttcccatgttgatgtgcggactcaggcaatgtatcaacttcttgattc

SEQ ID NO: 39788 - DNA, 419 bp, Glycine max
  Clone ID: PAT_MRT3847_135927C.1
gaataatggtctatatgtggaaacataaaggggtcatcttctactttgaagtcaagtcatgtgcaccagattgttaaaagttgaagagattcacatggttcaaaatatgcatagaacacaggtgcatgcatgcttgccatatgaatcctgtcctgttatttacttaggagggtagatttttactgccacgtgtatttttgtagcttttgcattgtaaaattatttaagttgctcgaatcattactttttcttcttgttcttttttcctttttagaatagttaattgatatcttagcactgtgatgaatttaagcaaaaaaaactagttatcacccactactcctttcgggtggatggcttcagtgctttgccatttgtactttgatatgcctgtacttatcatcttgctatttctgctt

SEQ ID NO: 39789 - DNA, 385 bp, Glycine max
  unsure (1)..(385): unsure at all n locations
  Clone ID: PAT_MRT3847_135928C.1
accaacnaccgacaagggccaagcgggaaccaagcacacnaacaagcccccacgccagagcggcagacccaagaannccaggagcggcgccgccgcagcaaagaacggagacaagagagagaacacggaaccggaggaacaaggcaacacaacaggtcttttttttttgtacggctccgatgcaccttcaccctacaaccctcttcagcacaagatctacgagaaattcgccgctccattcacaaagaggagatagatactaaagattttgatcctgggaggtggatccaccctgacatacttgagtggaacaaagacaggtgacagtctaccaatcaggaagggcccacaacttccaccaaagcgaggctaccgaggaaagatc

SEQ ID NO: 39790 - DNA, 626 bp, Glycine max
  Clone ID: PAT_MRT3847_135929C.1
gatctcacaaagctttgctcttctggctcgagcttttctttcaatcgctcattatatccctctctttctatagatatctacactgatatcatggataagaatgccctctttaggtttcttcttgttcttctgactctttcctgcgttgtatttgttgctgctgttcctgcaatcagaagctccatgattgggaaaattgatcctttagtgcaagatcttctggctaaggaggatccagttatgcggttaaggaatagcgaggaagaaatgaaagaagggattgtagagagcagaatgttgatggatattgtggactaccccggaacaagaccaaatccagcccatgatccaaaatctcctggaaagccttaacttcttgtatgatcttggaaagggttttgattagttatttagtttgactggaagtgtctagatgatgtgtggtttcggtttgtaatgttgaaaatgtgtttgtatgataaatctctaatctctaagtcctattgttaagttgttggtttagcttaagtgctttggtgttctacatatatgggtcataaaagacttgctgtaagatatatgaaaaggtgtatgaattaaagttgaggcttgtactggttgatgat

SEQ ID NO: 39791 - DNA, 263 bp, Glycine max
  Clone ID: PAT_MRT3847_13592C.1
ctaactttcacactcatcgaggcagcctcttcttcttccgttggtgtgcatcgatgtgagcaatctctacatactctgcgatgaaccccacaaaacccgggttggaggattcccaacaacacatccacaaaataaggctcacccttttctccaagcacgtcaaaaacctcgagaaagtttcagcttatttgattagcggtgcaacggataatatactcagggtgaacggacctgttacgatgcccactaaggttctccacatc

SEQ ID NO: 39792 - DNA, 326 bp, Glycine max
  Clone ID: PAT_MRT3847_135930C.1
gaaaaaacataaaacctttcattattatgcagcaatgatatttctatagtgcagtggtataagcgtgtaatgtttactactacatcctatacctccagattgacctaatactcgtcagaatcacctacttggtgagggaaaaaaaaagacattactagaaggaaggaacagtggccatctaatttgtgacagctgagaacataactcccgtagtaagcttggggaaaccgcgaacaggatgctgtgcaggggctgacaccacaggctgggcataggattgatgaggaaccgacgggtgtgcagtaaaagcttaagggtagtgtccg

SEQ ID NO: 39793 - DNA, 596 bp, Glycine max
  Clone ID: PAT_MRT3847_135931C.1
ccgtccgaaaaataaaaaaaaaaaaaaaaaaaaaaaggaaaaaaaaaaaaaaaaaaaaaaaaaaaaaaaaaaaaaaaaaaaaaaaaaaaaaaaaaaaaaaaaaaaaaaaaaaaaaaaaaaaaaaaaaaaaaaaaaaaaaaaaaaaaaggggggcccgttttaggggccccagtttacctcccccggcctcccaagggggggggggggttttggggcccccaaatttaattcccgggcccggggtttaaaaccggggggcggggaaaaccccgggggtcccccaattaaaccccttgggggccctcccccttttccccgggggggttattgccaaagggcccccccccgtcccccctccccaccggtggccccccctgagggggaatgggccccccccctttcgcgccccttaacccccgggggggggggggtttccccccggggggccctttaacttgcccagccccttggcccccgctctttgcgttttttcccctcccttttcccccccgttcggggttttcccccgcctggcttttggcgggggcctccctttgggggtcgtttttggggttttcgggcccctcccccccaaa

SEQ ID NO: 39794 - DNA, 473 bp, Glycine max
  Clone ID: PAT_MRT3847_135932C.1
cgcgttcgatttatgtaactgttctacccgaaaaatattatatcactatttccgctggaataccggctcaaaaaaacaacccgtgggccggacacaaaaaaaaaaccaaaaaaaacaaaccggttcccgggggggaaccaaccaaacccgggccccggcgccccagcccggggccccccccggggaagcccccccccccccggggggggccccccacttcccaaggggggacaacataagccccgggggcacaaaggggaaaccccggcccccccaagaaaggggcccacccccccaactcccccaaaaaaaagggcccggcctaaaagcggggaccccggggggcccccggggggggcgccccccaccactcgcggggaacaaccagtaccccttctcaaagcgaaaaacgccccccccgccccccctgaaaaaaaccccacccgcgggggggagacgcccgggccctcccc

SEQ ID NO: 39795 - DNA, 440 bp, Glycine max
  Clone ID: PAT_MRT3847_135933C.1
gcgcgattccggcgacggtgtagaactggggataaacgaccgcgattgtcatacaggaagttcggccgcctgctgcgggcagcggcgctgctacgagttggaaatgattgtattggatttcgagcggaagcccgtgcgcaccggcgcgtcggcggtacagagcctacacactcaacactagatgcgcaacgtgctggacaacgcgaacaagtgtatgcggatcatggtcctcgggctgcggggcatcccgaacgtcgagggtggtgttgaaacacacgcacaacacctctatcccaggttgtcgaatctcggctgtgaggtcgaagtcatcgtacgctcaccgtatgtcgcggccggccagcgctcgaccggatcgatacgtctgcggcgcttgtgggcaccgaagaaacagggcctggaagcgctcatccattccttcc

SEQ ID NO: 39796 - DNA, 772 bp, Glycine max
  unsure (1)..(772): unsure at all n locations
  Clone ID: PAT_MRT3847_135934C.1
cacgcgtccgcttaatttctctctgtctcgtttacacatctctccaacctttcactttcgtttctcagttttattcgaatccctctctcaatctcctttccaatggccagcgttgaggtaattcaaagacacagtttcgttgtttataattttgcctcagctggttttgtacattcctttattactccaacgtgtgtagcagtggtagtactttatatggttcctacgtgcacacggtgaaactcaacactttagtaactaactgtatatatacaactgtttcttcactttcttactttctttgttgtgattcattatcgatcaaagaaccagtttggttttttattacgtgcgaacgtacgatctagcaagttatgtatgcgatggtactagctagtcttaatataccgcactttgattttaatttctttttggtttctcccgatctatctttgtttttgttgctgcggtgtttgataaccatcattatatacgaagcataaattatatatntactgcggtcaaccacttaaactacacgagatttgaggggatcaacttgtttcatagctttcttaattgatcattgattaattgaatatatataaatcacgaaccattttccagttgatgatcaacatttgaaaattcatcggtgtgtggaattggattgtattagcagttctatgtggacctagttttttggtctttgttatataatcacagttgcatcatcagaaacaaaaacattgatcaatttattacgtaagct

SEQ ID NO: 39797 - DNA, 425 bp, Glycine max
  unsure (1)..(425): unsure at all n locations
  Clone ID: PAT_MRT3847_135936C.1
cacgcgncgnaagctcggaattcggctcgagattgacatggccaatggtgtgttttaaggattttgaaggcttatgaatttgactttgttgatgatagtaggaacactattcatgttattgaagtacttagttgtcatgcttaagcttgcttatggtagtttcctgcagggaattcctacaagtttttgtagatcgttatttaatttatcatttggatttttagttgctgtctcagtgatatttgctggatgatgaagtgtcttcatgggcaatacaggggccaatgttgaataaataacaattacttgttttgaattgttatgatatttacataaattaatgtgacaagtttatttgttctggctttgtggtcaagatgttttattattgttatgctttttctgagaattgttgactcataact

SEQ ID NO: 39798 - DNA, 197 bp, Glycine max
  Clone ID: PAT_MRT3847_135937C.1
atgagattcacggttatcttgaaacggttattaagatgctacttagagagttaaaaattagaatctctgttgaaaagaattggtacttcagaagtaggcatatagatttttattaatagttttcccattccacaattgacaattcagatatgtttgcttagaagttgatagtcttttttttttttttttttattttg

SEQ ID NO: 39799 - DNA, 292 bp, Glycine max
  Clone ID: PAT_MRT3847_135938C.1
aagaggcttaggtatggccactctatgaagagaacctcatctgctgtggacctgaggatactcgtgctacagacgcatgaacagcatgtatacgctgtagcgcaaactgctacctacatgttgaacataactaaagattgttccctgcggcacgcattagacgtacacacctgaaactatactagataaagggtattatataacacgggtgcgtagaaagggctgattgttatcaatgatcctcgcaggcacattgtgcatatatttgactctaatgctaatggttgaatag

SEQ ID NO: 39800 - DNA, 224 bp, Glycine max
  Clone ID: PAT_MRT3847_135939C.1
ccgacgcgtccgaggaaatctcatggtatgacaagaaattcatcctcactcggggaggggtaaaacatcgaagtgattgctctatccaaagacatgtctttagattgctaatgttgtattcatctgcagtgattagcataattaccctacttatagtgtgttctttatgagttctatataaatcatgagacagtacgtacatcttcttcaaattactgttctct

SEQ ID NO: 39801 - DNA, 373 bp, Glycine max
  Clone ID: PAT_MRT3847_13593C.1
gggagggacccttttaattaaaaaagcaaagcaccaaaaggggaataaaagggacaaaccaccttgtatcggagggggggtaaaggccatcggaaacaaaaaaaaaagggggttggattttgttaaaagggaccaccccctttggggacaaggctgcccctgtgaaaaaaaaactgccttgtatgtttcggagtaaaaaacctccccgcccacgggggggaaaatctctgaaataaccatctaaaaggccattttcaggttgggggagcccaacgctgacgtttccaaaaaaaacaaaccttccgtttccgaaaggttacccccctcggaaaggctcaccgcccttatattttccaagacaaatttgtccccc

SEQ ID NO: 39802 - DNA, 479 bp, Glycine max
  Clone ID: PAT_MRT3847_135940C.1
cctgcacgggttgcacaggtgatgccgacatcttatctgcgagattctgcggcccgctcctgatgcatcctctgctgttgctgctgtgcggcctgctaggcttgcgagcgaaggccctgctcggatagaagggatggcctctcgaggatggtacttatccttctctctttgcggtgttgacaaatgcttcaatttctatgcctaaccatggagttggtcttgttcgccatggttggattctgactggtccctttgcgctctctgaggcttttgggtctgcagcagatttggctgaggagggcttttttcgaaccgtctccctgtaccgacctgtgcttgatctcacgcatattgttgcttcagtgctgcctacaaaggcttcccacctctccgttgatggggtgctcgcttttgcggatatctttgcgatggaccacttggtgccaactatgtttgccgactaccggaggggcgtgcag

SEQ ID NO: 39803 - DNA, 247 bp, Glycine max
  unsure (1)..(247): unsure at all n locations
  Clone ID: PAT_MRT3847_135941C.1
attccggcccacgcgtgcgttttgttcttatttatggtnttctgcttactgattttttttttcagcacattngcacgatatgccggggatgttttaaatgctcatacccctcaccccgtatctccacatttccattctcctatacccattacacaaacatcaaaaaacatgatggtccacagcaccacccaattctgtaactttcttgacttcaaacccgcgaacaaacccgaatccttagattttg

SEQ ID NO: 39804 - DNA, 274 bp, Glycine max
  unsure (1)..(274): unsure at all n locations
  Clone ID: PAT_MRT3847_135942C.1
tttgtaatnttggccaggggcaattttttatactcgaatttttaggaaggcaaacatgcccaaccccacaaccgtttgtagagttgctagggtcttcttattcagttcatacatattattactctagcgggcaagctagtcactttcattacctagctttgggctaaaccgtcccccaaagaggattatcaccaacagagatggtcttgaattcctgaacctccttgatgttaaacccttgggttttccaacaccgtagttttttaagcctttt

SEQ ID NO: 39805 - DNA, 267 bp, Glycine max
  Clone ID: PAT_MRT3847_135943C.1
caattcaactcataacaattcataatcaaattccacattcaacattctatatcaatttttgattttcattcttctattgatctatcttttcgcataaaaccaataacccaaaatttaaccttttaatacaacaactctacctctctttctttacattaatatatttttctattatttatatataatttacattcaattttatttttcttaatacttttcaaccttacatatcctttatacactcaattaaaattcctttccacaaat

SEQ ID NO: 39806 - DNA, 1191 bp, Glycine max
  Clone ID: PAT_MRT3847_135944C.1
tccccacgcgtccgacggctgcgagaagacgacagaagggggactctgatgcgaacgtaaccaggctctggttttgcggttagggtagctctttctactcaaaacaaaacaaaacatcaatttctgtttcagttcgcggagatcaatattttatctaggtccatcgtcgatagaagatacgagaaaaggcaatgtttttgtgggattggttttatgggattctagcgtcgctcgggctgtggcagaaggaggccaagatcttattcttgggcctcgataacgctggcaaaactaccttgcttcacatgctcaaagatgagagattagtccagcatcagcctacccaatatcctacatcagaggagttgagtattgggaagatcaagtttaaagcttttgatctcgggggtcatcagattgctcgaagagtttggaaagattactatgcccaggtggatgcagtggtgtacttggttgatgcttatgacaaggaaagatttgctgagtcaaaaaaagagctggatgctctactctctgatgaatctttagcgaatgtccctttccttgtccttgggaataagatagatattccatatgctgcctctgaagaagaactgcgttaccatttgggcctgactaacttcaccacaggcaagggtaaggtaaatttgtccgactcaaatgttcgtcccatggaggtattcatgtgcagtattgtgaagaaaatgggttatggggatggtttcaaatgggtttcccagtacatcaaatagtccgttagcaagagatggcttggtatctgatttctagaggtttgtttttctagttaagatttggaggtgttgttgggacaaaattgctgttaaagaaattgcagtatatttgaactattatttatataaaatcactgggacccttctcctgtacgcagttgtgcgcaattttattttccacttaagcagtttatcctgattttatttatgatttgaatgatcgctgtatttcgcactagaaacataatgtgaatcttggtcatacctggagcgcactctggttgatccttacatcgtttttgtttacgctccgagctttatatcagcgttagagtttacatgtcgcatgtttttattttcttttaagttggctgacatttgaggaaaatatacctttttgagttggtcctccgtttac

SEQ ID NO: 39807 - DNA, 505 bp, Glycine max
  Clone ID: PAT_MRT3847_135945C.1
tagaactactcacccgttgtctctttttcaaccatggtttttcaggttattgttgtttttgtttttttattattcaaaatattaagatacaccgtactgtgttgtgctcgtgcagataagtattaataggccagagagaaggaatgcgttccgcccccacacggtgaaggagcttatgcgtgctttcactgatgccagggaagatagctctattggggtcgtcattctcactggcaagggaaccgaggcattttgtagtggtggtgaccaggctttgaggactgacaatggctattctgataatggaagtttcagtagcctcaatgtgttagacttgcaggtgcagatacgccgcctccctaaaccagtgattgcaatggtagcaggttatgctgttggaggagggcatgtattacatatggtctgtgatctaactattgcagcagataatgctatctttggccaaactggtcccaaggtaggaagctttgatgctggttttgga

SEQ ID NO: 39808 - DNA, 826 bp, Glycine max
  Clone ID: PAT_MRT3847_135946C.1
tgcatgcctgcagctaagatgcagaatcctatgtgaagctgtaagcagaagaaataagatgattagatttcttacagttttttgaagcagagcttatgcacattataaagtacaatctatttaccagataaaacaggaaaaaccatccaaatttcaaagcactttcattcctgaaaaaaagagcagcatattcaagatcaacagtaaggcaaaataaaaagatgaaaatatgcatgcatatttgcctattgttctcatgaatgcttcaatgtataaagcaaaattttctgtagggactggatgtcttataaaaaattgtcaacaacaatgtctcacacttggatgaataccccattattgaattaaaaagaaagaagggaatataaatggaagaaaaagtttaactgcgttaaatttattgttggaaagctgccttaattatggttacccctagcccgccttaattacgacttggcagagttggtgagttggttccagtgtctcgaaaaaggttacctatggagggaatgactagaaaggttgagtgaaatgtcgtagagtgtagccgccagatcattggctctcaagggtagaaattccacatcaactagagatatacccaatgtaatccttataaagcttaggcagtcctcacattataagccagttatgtgaagttaagccctaagcccaaattctaatatttatttacttcaagaattcaaaacttctactgtttacattaatatggacacaaccaaatgtgataaaacatgatgacactcataaagccctgaggttgaatcactaaaacccaaacatgccc

SEQ ID NO: 39809 - DNA, 349 bp, Glycine max
  Clone ID: PAT_MRT3847_135947C.1
aaaaagctttggcattgttcttatgctgtggttttttggcagatttggttgggaagtattaatcgaaagagagttgcatatgaaaattgtgttctcatgtggataattctgcattaaggactgcttacatcatctgctatcgagatttgtgcgtgttggagccggtcgactatagttgctagtcatcacttgggatagttcacctacgagatattacaggtagttaattcatgtaagatccgtggcttcgactgggtaagaggtctatgctcatcatatgcttcgtgctgtcagttgtgcgaatttatcacctgtcatttgctagacccatccatttaactctcacctc

SEQ ID NO: 39810 - DNA, 377 bp, Glycine max
  Clone ID: PAT_MRT3847_135948C.1
agcaagctcattctaatttaaaaatggcacacctccggcatgcgctatcttccccatgcttgggggccaaggcccttaatcttttcccatcatccccctaagtcgggagggtcagcatgatgaagaccgtcaccaatcattccttcttcttaagcccatggtacttcccataccgcgtcaagtacttgtgcccattctctgtcgagcccccgtcctacctcactgtctagttcccatgtgactactgctgttacactgtttgtctttcttcctacccataaaccttctccataaaccgttatctcgaattgatccactccatgtgtgccattctctttgccttgggcttcgtcttcccccaactattgtccctcaac

SEQ ID NO: 39811 - DNA, 508 bp, Glycine max
  unsure (1)..(508): unsure at all n locations
  Clone ID: PAT_MRT3847_135949C.1
tgtttctctagcctttgatttaataacgaaagaaaaggtgaaggcaattattggacctcaaaaatcagaacaagcaaggcatgtaataaaccttgggcgcgagcttggcatccccattatctccttctccgctacaagtccatctctttccccagcccacactcccattttcatacgaatggcacaaaatgattcttctcaggtgaaagccatagcagccattgtggaagcatatggatggcgagaagttgtccttatatactaaaacactgaatacggaaacggtcttgtcccacatctgatagatgcattggatgcagtggacacaaaagtaccttacagaagcgtcattgaccccatttttgaagagtcccacattttggaagagctcgaacatctcaagganaattcgacaagaatattcattgttcacatgacgggtgaacatgggtcgagattctnttcagctgtatagaaagctggaatgatgagtgaagggtatggatgg

SEQ ID NO: 39812 - DNA, 368 bp, Glycine max
  Clone ID: PAT_MRT3847_13594C.1
tcaggtcgatcccacagctctctatattttttagaagcagtaccaggtatttctattgatgatattatatagtgtctactggttgtgactgcctaccgatatgcattgatgttcgaggtttcaattagattggaggattctcctcattaggaatgtaggtcccaggacctattgagttttaaatccacaaaattcttttgtgttaaataagtggatggggaaactgtcttttcctcaatgcacttcccgaagtgtaaaaagaatgcctctttctatatggggaggagctaggtgcaatgaatgctattctcatgaatatgtcataagtttgttcttttaatgttgtgatatttttgttggaaatctta

SEQ ID NO: 39813 - DNA, 403 bp, Glycine max
  Clone ID: PAT_MRT3847_135950C.1
caactaacacttaaatacagggttcaaagtcgtcacaatggcacgccgtccagcccgctgctaccgctactgcaagaacaagccctaccccaagagcagattcaaccgtggtgtacccgacgccaagatccgcattttcgatctcggtcgtaagcgcgccaacgtcgacgacttccctctttgcatccatcttgtctccaacgagtacgagcagctgtcctccgaggctctcgaggccgcccgtatttgcgccaacaagtacctcgtcaaggtcgccggaaaggaaggtttccatctccgcgtccgcgtccacccataccatgtcgtccgtatcaacaagatgttgtcgtgcgctggaactgataagcttcaaactggtatgcgtggtgcattcggcaagccc

SEQ ID NO: 39814 - DNA, 612 bp, Glycine max
  Clone ID: PAT_MRT3847_135951C.1
tgaggggacaatagaaggctatgaatatgaagatgtcatactctgccttgctagttttgttcctttcgcttaccttcttcaccccttcgacgcttgcttggttgtggccatggtattctcctttgcgacctccttcttgtcctgatggtggttgtaggataccacggctactccctacttataagcccccaccattgtatagatctacttccaaggggaaaccactccctacttataagcccccaccattgtatagatctacttccaaggggaaaccttaagatcgatcaatgtccctatagtactctttgcagcagcagcagcagaatgtgtctacctcatcttcagttagtgtgcttattagaataatttaactttctcaaatgcattagtgaatatcgtgatgtgtcttaagcttgtatctggatgtggctgatttataataaaatttaaaaggaaaaaaaaaataacggacaggacacatataagggctccttataatttcacaatcgtcctttgcttgtttttctgttttattcatatttctcttattttgtacttgtttattatggctttacattggtaatcaataaagtattatatctatttgcc

SEQ ID NO: 39815 - DNA, 142 bp, Glycine max
  Clone ID: PAT_MRT3847_135952C.1
ttgcctttctttttttttacaacttgaaaagatatttttaaacatttttatggcattaccatttttcgccttggggtgcagggaaatattccattacccatgggcgtacaagcccgtactattgacttgaattacccatttg

SEQ ID NO: 39816 - DNA, 555 bp, Glycine max
  Clone ID: PAT_MRT3847_135953C.1
ggctcgagcgccatttctaactaagcaatcgacgcgccctgcagtgcagacctagagatagagagagagagaaatttttttcccggaaaattgagccacgagaaattttcccgacggaagagaaagaaaaaaacttgaaggcgcatggcgacgccgctgacgggactgaacggcggcggcggcggagtggcggtgctgacgaatccggtgaacaaggtggattcctccgccaatggcggtggcggattcggccggtcgctgtcggagtcgccaattctgatattctcgttcttccacaaggcgattcggaacgagctcgacgcgctgcaccgattggcgatggcgttcgccaccggaaactgctccgacatccagcccctcttccaacgctaccgtttcctcagatcgatgtatagccaccactccaatgccgaagatgaggtgatttttccagctctagatatgcgtgtgaagaatgtagcacagacatattcccttgaacaccagggtgaaagtgatctttttgatcatctatttgagctgttaaactcttct

SEQ ID NO: 39817 - DNA, 387 bp, Glycine max
  Clone ID: PAT_MRT3847_135954C.1
acgcccacgcgtacgctatctctgactacctagtgctctacgtctatgcctctctctcaaaaatggatgcggttcgattctacggttttgttttgctgctgcctacgttccccccttctcataaacaacgcgtcttctcttctgcttcgtatctattcttggctttggctttgggtggattaaaggcctcacagcattcggtgcggcattttaatccatttattccaacaaggcttaatgaacctatggagtctaaaggtgggaaaaagaaatctagtaatggtcgtactcaatcattggtctacgaaacttccctctgataccgcattgaagaccttagaccaaacggtggaatcaagaaattcagatctgctgcttacttcaact

SEQ ID NO: 39818 - DNA, 1284 bp, Glycine max
  Clone ID: PAT_MRT3847_135955C.1
gttatatgcctatctgaagattagagagatgatgtagctgttgaattgcattctaagcttctaaaggagttcccaagatgatctgctttctctaaagagagccacaagtcttaatgcctttctaccattgggttcttgcccttgggtccctttaccttttaatccttcttaatttcaagcaagatttcttgccctcaccaatgaaggagaaaattatatatattggcatgcttgcttttcctttgttggagcttggacggatggaggaagctgaggaagctgccaaaaggggatttgaaatcaataagcaagactgctggtcacagcatgctttatgccatgtccttcagtataagtgctgttttagagaagctgttaagttcatggaagaatgttcatcatcatggggttcttcttcatcttttatgttgacacacaattggtggcatgtagcactttgttacttagaaggtaatgctccgagacaaagagtgctagagatatatgacaattatatatggaaggagctagaaagaaatgattctatgagtgcagacgtttacttaaatgccgcggctctgcttttgcagttgtatgtacgtggtgaattggatattgttgggtgatcgtctcaagattctatcagaatgcctaactaatcaagaaaactggtatatggaatggcactttgatgtattgatagtgtggactttggcaaagaccggagaaatttcaaaagcagaagatcttctaaagggcttaaaaaacaggcttttgaggatgactaaaaagaagcaacaacgaatgcagagaggaatgatgcttgcagaagcactctacgcttatggaagagatgacgacaatcgtggactggaactacttgatccaaattttgatgccactgattacaagatcattggggcatctgatgaacaagtcgacgtattcaatgaagtttggtataacatgttgctgaatactggaaaaccgttgaaggcaattgaagtgttagagaagcaaatcaagaagagagatggcgtcccctacttgtggcgtctactagagagggcatacaaactagctaacaaaaaagaagaaagaattgcgaacgagaaggccacggctttggagagtcgttacttcaattaagggaataatcatataataaaaaaagcatttcatgtgtgtacatcaccattgcaaaacccaatctttcattggttaaaatagcattcggaataaatgtgtaacaaaattcatcaaaactaacggtcccttccaccg

SEQ ID NO: 39819 - DNA, 300 bp, Glycine max
  Clone ID: PAT_MRT3847_135956C.1
gataaatctgaaaattaacacactcttttttctctttttctatcatgtctagtgtttgttgatgttggatttggttgttctccttattactgatcaataattcaactattggacagtggtaataattagaataagctgaggagctgggattagtggttgttgttgctacttgctggcaagatgatggttttactatgggaatagcaacaccgtcacattcaagaacagtactagaactaaacaccattggttttctcttggatcttgtatcaattcttgcaattctatgtcccaagattt

SEQ ID NO: 39820 - DNA, 650 bp, Glycine max
  Clone ID: PAT_MRT3847_135957C.1
gggggtggatttattatttgtttttacttttagcttatatacatttagagtttagttatcatggattgctagtgagaaaaaattatatcgtcatgagaatttattttcggcataatctttaaggtaagtattataaaaagaaataacaaacttattatatttcataatatatgataaagtaacaatataaaagcttaaacatgtcagtgcattaaattaaatctgtatatttaataataataataataactcaaaacaacttatttttatattttcttaatgttctgaattaaaatattattttcacaatctccttcacaatttttgaaaacaaaattaaaacaatttaatatttctatcaatcgttacctactgaaaatgtaaacataaaataaataaataaaaataccacattaaattaaatttcaatttttttatttacttctctcacgaaattttcaaaacaataaatcaaataaaattatttttataattattaatgaaaacataataactaaaaaaaaggataaaaacaaaccaaattaaatacttttctcgtattatttccttgtttcactttttttgtttggcccatgaacattcaaatgtttttattttttttggaaaccgacgtttgtattattagcttg

SEQ ID NO: 39821 - DNA, 230 bp, Glycine max
  Clone ID: PAT_MRT3847_135958C.1
gcaggtttgaattcaaaggatggtagcaaagaagagaatgattttagcggtttaagcagcaaggtgtcctctgtggctatgcttctaacacctgagagtgaggatgagatattgcaggccagcaatttgaagaacttcacattcaatgagctaagaactgctacaaggaacttttgtccggatagtatggtgggtgaaggcgggtttggttctgtgtttaaggggtggat

SEQ ID NO: 39822 - DNA, 276 bp, Glycine max
  Clone ID: PAT_MRT3847_135959C.1
atccaaatgcgttctgatacacagatattatttagttgaaaggggacgcgcggcccatacttgactatggctgtcgagatccagcatgcaacctacttatgactaacgtgtctcttatcttcacaacgaactcatagaccttgtgctgatcaggaagagactctgcaacactatgtttctgtgggcaccttttggcccaagcgcctagcgtggcgcgctcattctcaatgttgatgcctccaagagtctgaatactttgaacgaactgtatgatgg

SEQ ID NO: 39823 - DNA, 172 bp, Glycine max
  unsure (1)..(172): unsure at all n locations
  Clone ID: PAT_MRT3847_13595C.1
ctacacagtacanacactagaagnatantggcttccatcntncactactttttagccctntctcttncttgctctnttctnttcttcttatccgactcagtcacccctanaaaaccaataaaccttgttgttctacccgttcaaaatgatggttccacagggctccattggg

SEQ ID NO: 39824 - DNA, 192 bp, Glycine max
  Clone ID: PAT_MRT3847_135960C.1
aattcggctcgagggataattgtacagttggaagtcaacaccatactcacatggacatcgagactggtatcgatcaatagattactcgatgcagggcgacgatattctgtgttgcgattatgcatagctttgatggtgtgatgtaccaagcaagttatgagcaagatggcttaaatgatataacagtctttg

SEQ ID NO: 39825 - DNA, 435 bp, Glycine max
  Clone ID: PAT_MRT3847_135961C.1
ggcctggagggccgtcgacccacgcgtccggcgcgggacccggtttgtgtaagctggagctgtcgccgggtccgcggggaagtcttggcggtggagccatggtcggccagctgagcgagggggccattgcggccattatgcagaagggggatacaaacataaagcccatcctccaagtcatcaacatccgtcccattactacggggaatagtccgccgcgttatcgactgctcatgagtgatggattgaacactctatcctctttcatgttggcgacacagttgaaccctctcgtggaggaagaacaattgaccagcaactgtgtatgccagattcacagatttattgtgaacactctgaaagacggaaggagagtagttatcttgatggaattagaagttttgaagtcagctgaagcagttggagtgaagattg

SEQ ID NO: 39826 - DNA, 375 bp, Glycine max
  unsure (1)..(375): unsure at all n locations
  Clone ID: PAT_MRT3847_135962C.1
taaaggccatttttgagcagacccacaaggcggggactttaacgagatagaccgcngccccccgagaggcgacaangcagaagagaccgaccaaggcccacacacggacaacaagcacgccgggaccaaccccaccgaagacaccaaacaagccgccaaggccgaggaaaaacacaagcaaaccnaaccccaacgagagaagaaaaggacgccaacacgccccgaccggcccggaaggagcacacgggacgccacccacaccgacgccacagccgagggcgccgaggaaggccagaaaagacaaacacagggaggcacacccccacgaaaccccaaacaagaagagggggggccacagaacgaaaacaaagcaaa

SEQ ID NO: 39827 - DNA, 274 bp, Glycine max
  Clone ID: PAT_MRT3847_135963C.1
ggcgatagaatgattcacaggcaattatttgataagggcccttttgaacaatggtaacctcttgctactattgcacacaaatgttgccacagatcccctatgaaacgccccttcattctatatggttctagggtgtattgaggattaggaaaagatgccacctgaatgcacactccatgtgctttgcaagcatcaatttgttgcgaggcgtgatccagatgcagtagctccaatgcgaattgatatgaatagccaccatggaccacacggaaat

SEQ ID NO: 39828 - DNA, 215 bp, Glycine max
  Clone ID: PAT_MRT3847_135964C.1
ggtgggaaaacaaaactcacccgttaaattttgttttaaaactaatccctgaaggacttaaaaaacttggggcttttcccccctccaaatgcagtgggaggacattaaaaggccccgttgccaacatttttttctttgaaaacaattgcaggggggaaattccatgtgacttttcccgaactaaatttttttctaaaaattgggggaattgaatt

SEQ ID NO: 39829 - DNA, 125 bp, Glycine max
  unsure (1)..(125): unsure at all n locations
  Clone ID: PAT_MRT3847_135965C.1
ggcagnacaaaatanaccttactccaccatcgttgcancnccctggnagccgactgaaggntgntttgngtgccagggctctgnagatggagntggaacngctaggtctagagagccctgctcgc

SEQ ID NO: 39830 - DNA, 108 bp, Glycine max
  Clone ID: PAT_MRT3847_135966C.1
gctctgcattccgttccaggtcagcccccgcagaccggtcgtctgctcacatcgctatgccagtaacaaatattcaaatgagcactttgaaggccgaagaggggaaag

SEQ ID NO: 39831 - DNA, 283 bp, Glycine max
  Clone ID: PAT_MRT3847_135967C.1
aatggtaatataataatggtacttgaaggggaaacgtattctttatagggggggggattaaaggttgatataattatggtaataggtgttttctgtttgaaactattatccttttataattttacataacaaactagtgggattattaatgtgaaaagacaggggtgcctaaagagtgagttaactcatattaattgtttttggatcactgaccactttgcagtaggaaaaataggcgtgccaattttattaataaataggccaaagtcctgggggaggaggt

SEQ ID NO: 39832 - DNA, 436 bp, Glycine max
  Clone ID: PAT_MRT3847_135968C.1
atgaacaggcgaaaacgataaagttgcgggcacgggttcgctgaattccagccatagacactgaaccgcaatctcttgaagagatccacagtggctgtgacctacgttcacttgttccacccttcatgtgcttctgccggtgcgaacagatcttgaaaattggtgcctcaactacgaacgaagcgccacgcgagtgggcagatgccgcaagggaatgccgccgacgtagcagcgctgctggaccacgggggcgatgccggagacgcctaaatggcgcggtggttgcagatcgctggcctgcaacagctagcctctgccctagcttgcaccgcccattgatcaatcgactgatgcattacctgtccatgcaagggtatgggacgcagtttactgaggaaaagcagaggcttttaaagctaatgagaaaccttcaatt

SEQ ID NO: 39833 - DNA, 353 bp, Glycine max
  Clone ID: PAT_MRT3847_135969C.1
attcgacccacgcgtacgcccacgcctacgctctagaatatgaccctgactaaaatttacaaaacataatcatttattatgaaagatatattatataatgagcataacctaaccatacaatcctattcttcatttcaataatatacaacactacaatttaatcatatcatataaacgatctacttataatttatgtatatcaattaaataccacataattcatgtaatatttcctacctcaaacacttactcttcatacaacattcagctacatacatcattaattacttcattcagcatatataccaacctatatctaacatacgggaaatacactcacttttacatacata

SEQ ID NO: 39834 - DNA, 637 bp, Glycine max
  Clone ID: PAT_MRT3847_13596C.1
acgagggagagtgtgataaatttaagagagagagagaatatggtttccagagttcacaagagaatagccatgtacaggaacctacacctgcttcgttcaatcagatactcacactcgcgccctaaagcctcagtgttattccaggtgtcagattacatacaaggtttaaagcaaaaactggaagaattgaaccagttaacagtggcaacggcacgaaaaatcgttgactatgatccaatgcctaagcttgaagttgaaacacaagaagagggttttgtgatcaaggtgctgagtgaaagcagttgccaggggttgctggtgtttatattggaagcctttgaagagctggggcttgatgtgctccaagctagggtttcttgtgcgcacagcttcagtttagaagctctcggaaacaaagagaacaatgaagatactcgcccattggatgcacaactagttgagcaagtagtgtctcaagctattcaaaactggagggaagtttcacagatataatgattcatgccccagcacctattgtcataattagaaattaatattatgcttgcttgatcagtttcctgcttcttgtaacaatgtttactcctttaaatagaacgagaagttggcctttctgatg

SEQ ID NO: 39835 - DNA, 414 bp, Glycine max
  Clone ID: PAT_MRT3847_135970C.1
aattcggctcgagaattcatcaccttggaaggagataacctcactagtctgtttcctggtacatccttagatttgggtggtttcaagttagactctatgcatatgtttggagtttggctgaaggatcttcgtataatctcttatctatcaggtggaggggttgttgcaacaattttgattatgatttgcgtgttttgtgttgggacaatagacagtgttggattccatcacacgggtcaattggtaaaatggaatggcattccatttgctattggtgtctatggattttgctttgcaggacattcggttttcccaaatatttaccagtctatggctgacaagaaacaatttaccaaagcactaataatatgttttgttttgtgtgttttgatatatggaggcactgcaagcatg

SEQ ID NO: 39836 - DNA, 980 bp, Glycine max
  Clone ID: PAT_MRT3847_135971C.1
ttggtcttgtgtactgatactcttcttttccctttatatcctcatgtaatcgaacgtgttagtgaaatgcccaatgcataataattgcatataaaaactaaacagtattgttgattaggtgtgacagaacagcagaagggaagaagatggacttactggagttatgggcaattttcggccccggcgtcgccggcgctgtcttcggcgccggatggtggatctggcttgacgcggtcgtctgcagcttggtcaccgttcccttccttcactaccttcccggaattttcgcatcttttgcggctttgatgttcaattgcgttagaaaagaagacatcgattattctccatatgacgaaggcgagtggagactgaagctgtggctcttcattgcatatgttgtatcctttgtttctttagctggatcagctggcctactgatccaagattcacttgataaatctgccccttcagtttggactggagttgcaggtgttttgcagtgtgtttttgtcttgatcagtgggcttctatattggacctctcatcctgaatcagtggcaccaagatatgactcggagcttcaaactataccaggttatgcccacccatgtattgtcttgtttgttttatgtgatgttaagtagccagcgacttaacatcacataaaacaaacaagacaataaatgtaaattgtgctaacaatcttgagcctctgggtagatttatctctcttgtttcgtatagttgatcaagatctattaccaatttcagtcgcttggtgttgacatctatgaagattccccccacccctcgttttctcagtagtttgaactcacagcatacaggaaaggaaaccctttatggttataactgagaataactctgttgactgcatctatgttttgactagaaaaacttactcgagaattcagattggttatgtacgaaagtttgtgtaaataacattattcgcttaacaa

SEQ ID NO: 39837 - DNA, 487 bp, Glycine max
  Clone ID: PAT_MRT3847_135972C.1
ggctcgagggaaggtggcggcgccttggaattggatttggaggccaatggcttctccgcctctaactgccttcacatgccaaaatctccacacgctaaaccctaggcctcgatgtcgcagcttcaagcttttctgtcgaccttctttttccgccgtcgcgcagccctcgcctcctctctccggcgaccttgaccgctacctccgctgctccatgccgcagaactcgccgcttcgagtcgccgttctcgtcagcggaggcgtcgatagcagcgtcgctctccggctgctccacgccgccggtcactcctgcaccgctttctacctcaagatatggttccaagtacgccttccttcttcccattcaaaattgaattaggtcattgttattgtggctgttgctttctcacgcgtggtttttctgtaggaagatttcgagaacttttggtcggagtgcccctgggaagaggatttggagtatgctaaagat

SEQ ID NO: 39838 - DNA, 2861 bp, Glycine max
  Clone ID: PAT_MRT3847_135973C.1
gggcgccgcgactaccacagcagcctggaggtcatcaacttaactgtcgtatgctgcataagcgttgttggcaacgagatggacttactggagttatgggcaattttcggccccggcgtggtgacagaacagcagaagggaagaagatggacttactggagttatgggcaattttcggccccggcgtcgccggcgctgtcttcggcgccggatggtggatctggcttgacgcggtcgtctgcagcttggtcaccgttcccttccttcactaccttcccggaattttcgcatcttttgcggctttgatgttcaattgcgttagaaaagaagacatcgattattctccatatgacgaaggcgagtggagactgaagctgtggctcttcattgcatatgttgtatcctttgtttctttagctggatcagctggcctactgatccaagattcacttgataaatctgccccttcagtttggactggagttgcaggtgttttgcagtgtgtttttgtcttgatcagtggactggtatattggacttctcatcctgaataagttgcaccaagatatgactcggagcttcaaactataccaggttatgcccacccatgtattgtcttgtttgttttatgtgatgttaagtcgctggcttcatgtaaatcagtaaatgtaaattgtgctaacaatcttgagcctctgggtagatttatctctcttgtttcgtatagttgacaagactataccaattcagcgcttggtgttggatcaagatctattaccaatttcagtcgcttggtattgacatctatgaagattccccccacccctcgttttctcagtagtttgaactcacagcatacaggaaaggaaaccctttatggttataactgagaataactctgttgactgcatctatgttttgactagaaaaacttactcgagaattcagattggttatgtacgaaagtttgtgtaaatatacttgctacatactgttgcaacaatatggtcgtaacgaaagcagcaacaaagagaaggataaagacctcgatcagtttttgtttgatcggaacgacgatgatttggtcgatgaagaacaacaggagattgaaggtgtgaagtacgagagtgagagtagtagtgatggtgacgacgcaaatcggagagcacagcctgactctttctcttctcagcaatggcctcagagttacaaagagactacagattcttacacgatagctgctgctccaaattttgagtcagttctacgggggccaagtttcatatattcaagttttgacaatcgttcaaagagtaacttagacatcgatggaaagacaccttttctatctgctgcagaaggcattagacaatcaacttggtgggagaaagcctcggtacaacggcttgtttctggagaattgcccattggatatggatgcagcttcactcaaacaattttcaatggcattaatgtgatggctggagttggtcttctatctacgccatacacagtaaatcaagctgggtggatgagcatggcagtgatgcttctttttgcagttatgtgttgttatacagccacccttttgagatactgttttgaaaatagggaagaaatcattacctacccagatataggagaagccgcatttgggagatatggtcgaattgctgtctcgatcattttgtacactgaactatattcatattgtgtggaattcatcaccttggaaggagataatctcactagtctgtttcctggtacatccttagatttgggtggtttccagttagactcgatgcatttgtttggagttttgacagcacttattattctcccaactgtttggttgaaggatcttcgtataatctcttatctatcagctggaggggttattgcaacagttttgattattatttgcgtgttttgtgttggaacaatagacggtgtcggattccatcacacgggtcaattggtaaaatggaatggcattccatttgctattggtgtctatggattttgctttgcaggacattcggttttcccaaatatttaccagtctatggctgacaaaaaacaatttaccaaagcactaataatatgttttgttttgtctgatttgctatatggaggcactgcaatcatgggatatctcatgtttggtgatggcactttgtctcagataacattgaatatgccaccaggcacatttgcttccaaagttgcattgtggacaacagttattaacccgttgactaaatatgctttgttgatgaacccactggcaaggagtctagaggagttgctgccagatagaatttcatcctcatattggtgcttcattcttcttaggacaacacttgttgcatctaccgtttgtgttgcctttttggttcccttttttgggcttgtgatggctttaattggttctctctttagtatacttgtgtcagcgataatgccaagtttatgttttctgaaaattattgggaaaaaagctacaaggacacaggttgtactcagtgttgcaattgctgcattcggagtcatttgtggaatccttggaacatattcctctctgttgagtatcgctgatagttactgagagtctgagaccttatagtctttctgtactgggaggttatgatgagtgttaaccctttctgcatggaagtacagctctttggataatactgtggtgacaagttaatttagttatatatgcgtttcacttgtactgaggttttaataaacgctccgcgacggtgatcaatatttaaaatcttatatatgagaactcatgtatatttatgaatttaataaagtaattgttaaataagatccaacaagttaaagct

SEQ ID NO: 39839 - DNA, 280 bp, Glycine max
  Clone ID: PAT_MRT3847_135974C.1
aagtcaaatatctacattttcacaccatgatggttggggagacgcaccgcccagatctagccgtacacgtgccaccgtgggcgccggcgatcttctcaccgtacaccggtagtgccgcttaggcgccgtactccacgcaagatgcacttagtgcacgttcggcactacgactccatcgatgctgagtcagactcggatcgttccgtcgcgggacccggaagtcccggtggtcgcatacgcctgccaccatttccgcatgttccagttctacgttcggtga

SEQ ID NO: 39840 - DNA, 303 bp, Glycine max
  Clone ID: PAT_MRT3847_135975C.1
actcaacaccattctacccactgctaatgaatctcttcaaatccgttttctcagatgacccggaccctccaagacccgaatccggatccaacaatgcaccgcgagacaaatcccgggatcccgattccccgccccgatccagcgccatcgattccgccgccgccggagtaggcggcgacggttggaacttcggcggcctcatcaagaccctgacaacgaaatcggaatccataatcgagacctaccgtcgcgatctgcaggaattcggcaccggtttgaagaaagagatcgaggtagcgcagg

SEQ ID NO: 39841 - DNA, 447 bp, Glycine max
  Clone ID: PAT_MRT3847_135976C.1
gcaccaggaatattcatagaaaagacaaagccaagctcaagcaacaacaatcttcaaaccaaattcaacaggatcaggccaagtcttatggtgaagatagcaacaaacaaaaatggaattggaatgtgtctctacaagaacatgccattcacaagaggcagcagcttccactctttgccgaatcaccaactagtagtgaaacacaaaagccacaacaaggtcaaactcaaactactactgaacaggcttcgttatctactcaagattcctcatcggagttagaccttgaactgagactaggacctgaaccacaggactcgtcagcagcagaaacgggtacaagaaattttttttgaattgaattctctcaatacgtaattatttgtagatgttcatgaaccgcgcgcccctttttattggtgaaaagaattcatatactgtttgatt

SEQ ID NO: 39842 - DNA, 329 bp, Glycine max
  unsure (1)..(329): unsure at all n locations
  Clone ID: PAT_MRT3847_135977C.1
tcganagtgtatgcgcactaagcctgactatctgctctctctgcccggcagaagactgtaccagagaaagactgccttggtgcggcctgtaaggtcctcagcggatgccagaagttcactgcagctgccacgactatggtcaataattgattgattctttcatctgctttttccgcgaccatgtagaacgtacaatctttcttctccactgaacatagactgggatctgattcttcctatttaacacctgctggaatgctgacttggtgcagaccgttccttgtatgctacctcgctctgtgggagcaacaccttctttcagcccttga

SEQ ID NO: 39843 - DNA, 678 bp, Glycine max
  unsure (1)..(678): unsure at all n locations
  Clone ID: PAT_MRT3847_135978C.1
caaggggcgaagaaaggagccacaggacatcttggcccagtcctagtccccagagatgttgccaccaccgctgctgctgctgctgtgcctggtgctgctggggaatttggagcctgcggccacactgatccgagtccctcttcgccgaatccaccctggacacaggatcttcagcccactgtatggatgggaacagagagcagagctttctaagacccccacctccggcggcaagaccgcctttgtgcctctatccaagttcatgaacacccagtattttggagacattggtttgggaacgcctcctcagaatttcacagttgtctttgacacgggttcttccaacttgtgggttccatccacgagatgtcatttcttcagtttggcctgctggttccaccatcgttttaatcccaaggcctccagctcctttcggcccaatgggaccaagtttgccattcagtatgggaccgggcggctgagtggaatcctgnagccggataatctgactatcggcggtatccacaatgtttctgtgacctttggagaggctctgtgggagcccagcctggtctttgctttggcccgctttgatgggatcctgagcctcggcttccccactctggctgtgggaggagttcagcctccactggacgcactgntggagcaacgactgct

SEQ ID NO: 39844 - DNA, 457 bp, Glycine max
  Clone ID: PAT_MRT3847_135979C.1
gacattaacgtgctagaacttttattttctctgttctaacagagaaaaagatgagatgagagagaccttgacttagttaaagaaaaaaaaaaaaaaacaagggtgcaacattttgactttgtgtgaagggggcttttgtttttaagccttcctcttcgtctctaaagccatcttcttcgatcatcgttgttgcaaagaagttaaagcaattgaagaagggaaaaaacagttctctttcgttccttaatttcaaaaaccgcgaaaaagtgcgaaacgcaaaacgatggctgtggtggttagcgatatgcattgcgctccgaaaacgacgtcgtctctgcgaaccgcattgttatgaactgaggctctgtactttgttttggttctgaggttgaaaggcaaaagccatgaggtggttgcccacgctttcgttctccccttcgaattcttcttcatcttc

SEQ ID NO: 39845 - DNA, 334 bp, Glycine max
  Clone ID: PAT_MRT3847_13597C.1
ggctttcattcatgagaagaaacacgtgcatggcaacgttaaacccagcaacatcttgttaaactcggaaatggaacccatcataagcgattttgggctggaccggctcctcttgaatgacgtaacccaaagagcgaacggttcggcaagacaattaatggggaaccaaagaaaccaacaagacctgccattcgtaacaatgggaccatccactagcggtggtgggtcaataatgcactatcaaagcacagaggcccctcaaaacatcaaaccccattaccatgggaaccggtacccttttgggggggcttggctggagctcctacctggaagg

SEQ ID NO: 39846 - DNA, 232 bp, Glycine max
  Clone ID: PAT_MRT3847_135980C.1
cttgcaagaggccacctaagggagagagtcacaccactaattgcatcaatgatatgggtaacttttgatccattcttcatacatcaacccttttctagttcagtcattaacaatctaaagaagacggctcctacatgcccaaacgccactaattctattcacttctaattttttaatcatgctaactggttcatcaatatattttcgttacaactaaataatattcttcttt

SEQ ID NO: 39847 - DNA, 3063 bp, Glycine max
  Clone ID: PAT_MRT3847_135981C.1
cggaattcgatcagcgcgaaattcgccaagatacatctcggacaccccccgggcccaccaggcgaacggccgtccttgaggtatttgaggtcactaaaattcgtgagcttcgagaaaatggtttaaaattccctctcttcgttgtgccttcccaagggtctaccctctcgtcagggctacagtctctatgccgatgccgaccttgctgcgcgcggtattctgctctttcccttgacttcaagtacgatacccatggtgtagctcctcctgtgcccttttgtcttatcgtactactgcccggtgcttttcctgcatcgcttagctggtggtgttttcggcctagcgctggtttaggatgtctgaagacactcatgttgcagttctgtatcccttcctctccttttccttttagttggctggtaagccgggctatagccacgagtcaggccgagctaacgcggctattccctatttttgtacttaatgtattcaaggtctcccctgaactgcattaaaaatagtgacgtatacacgtcgtgaccgattgggcttagagtttctgcaatctgctgccaatgcagttgggaaggataaattcctaaatgctattcctttgcatcacattgatagaactagaacaaatcttgaaaagttcatatgggggctttctaaaatgtattccccttgcaaagaagaaaagctatcaagattttccagactaaaccactcaatgctgatgtgggacactctcaagtactctttgacatcaatggagattgctgcacggtgtggaaagacttcttttacaccaaactttgctcttagtgcattgtatgaagaactgaaatcttcaagtggctttatattatccctgatgctgaaacttgttcaaaagacacgaagtaataattctcttcatgttctacaaagatttagaggtgttcaactcttggcagaatcaatttgttctggggtttccctgaattacgcaaataatgacgagtctgggagaggtgatatgttaagtatcttaaagcaaattgaaatggacttgtcaaacaccaacattagcttttggagtcaggcttcagatcctgtactcctccatgaccctttctcaacattgatgtgggttcttttttgtctaccacacccatttttgtcatgtgaagaatccttgttatccctagtgcatgttttctatatagtagccgtaacccaggctataattttgtattatgagaaatctaaagataaaccatcaagggaatcagctctttcagattgcctgattaccgacatatataacgttatggatgagtctggatatgcccaacagtactttgtgtcaaattattttgaccccaatgttgatattaaaaacgctattcggaggtttacttttccttacttgagaagatgtgcgttgttgtggaagatactctattcttctatcccagcaccattctgtgatgaggaaaatatattggatagatcatggaatgccccaaaggacataatggactgggccaatattgagatatttgaggtcgctaaaattcaagagctcgagaaaatgttcaaaattccctctcttgatatggttctcaaggatgaactttcaagatctacagtctctatttggtgccatcatttttgcaaggaattcgacttgcgcagaattcaacaaaatatgcatgtaacacctgctgttccatttgagttaatgagattgcccaatgtttatcaggatcttttgcagaggtgtatcaaacagcgctgccctgaatgcaaatcagttcttgatgaccctgctttgtgcctactgtgtggtagattgtgctctccaagttggaaatcatgctgcagggaaagtggatgccaaactcatgctgtaacctgtggagctggtactggagtgtttctgttgattaagagaacaacaatcctactacagagatctgcacgtcaggccccctggccctctccttacttagatgcttttggtgaggaggattttgaaatgcatcgaggcaagccactttatctgaatgaggaacgctatgcagctttgacttatatggtcgcttctcatggtctggaccggagttccagggtccttggtcagaccactattggttccttcttcctggtttagttcaaattctacatgtttattttgtgtgaagaatgttttactggacagatctctggaggatggaaatcagttctacatatgctaatttatcattagattgatacagtaaagattttaaacttgggtcctgtcggagaatctacctactggtcatggctgtacagattctactgatgctgacatagctgcaagctttcttctgctccatgcctttccataaagtaggtgcacatgtgtacatatatcatcatactagtgagaggagcaattgcttcaaggtatagtttgtggaattatgggcttatcagtggtttaggatgtctgaagacaataatgttggttctgtatcccttcctctccgtttctttttagttgggccatcccctctacccaggtagaggaagcaggataattcccttgggcatattgtatacaaggtatatatacatactgatttttactgtcaatatatgtttgctttttagtatatttcagcaacaatgctaatagactaatagtaaaatttgggctgttcattttcaagtgtcgctgtgataatattggttaattaggtaattgattgtattggaatgtaagactagatggtaagtatatgtttatctattatctggccattgttggaatgccctttgaaaaaaaaaaaaaaaaaaaaaaaaaaaaaaaaaaaaaaaaaaaaaaaaaaaaaagccaaagctggctgcctcgatcaaacaaaaaaatagcccacttcactgctaccccttataaatccacaaaaatccttggttctgggcccgccttttacgcggttgaacttggtctaaaccccatccccctgccccgtcgaaaacgtatttattttttttggtttggcccccatatttttttccccgcgggggttttac

SEQ ID NO: 39848 - DNA, 411 bp, Glycine max
  Clone ID: PAT_MRT3847_135982C.1
gggtagctgccgtaaatattcaacagggcggatcatccttaattattcccttaaaaagaaacaacttcaaccattggcaacagtaaaacattgacttgggttaacttagggaacttcaaaaaaatcttttaaaacaaacgcaggctaataaggggttttggtccattttaaaccaaactagcttgcttgatagggaactcaaaaatcaagtgaaatatccaggggaaaaattctgaaacggggccgttttggaagaaaaattgataacctcgacaggatttttctcctactattggatttcaaccccaagagagagagctttttcaactcttttgaaactttggagaaaaataatggatggccatttttatttaaaaaaggaagaacaaattgaatatccttcaggtaact

SEQ ID NO: 39849 - DNA, 657 bp, Glycine max
  Clone ID: PAT_MRT3847_135983C.1
ttcctggtttagttcaaattctacatgtttacttagtgtgaagaattttttactggacagatctctggaggatggaaatcagttctagatatgccaattatcatgtcatacactcctctgactaaacagaagatcactagtccatactgtgtcttatgctaaaaatggacgtctcattaagtagattgatacagtaaagattttaaacttggcacctgtcagagaatctacctgctggtcagggctgtacagattctgccaatgctgacatagctgctagctttcttctgctccttgccttaccataaagtacgtttccaatgaagtaggtgcacatgtgtacatatatcatatcatactactgagaggagcaattgcttcaaggcatagtttgtggaattatgggcttatcagtggtttaggatgtctgaagacactcatgttgcagttctgtatcccttcctctccttttccttttagttgggtgtttagctgggccatctcctctacccaggttgaggaagcaggacgattccctatttatgggcatattgtatacaaggtatatatattactgatttctactgtcaatatgttttctttttagtatatttgaggaacaatgctaatagactaatagtaaaatttgtgctgctc

SEQ ID NO: 39850 - DNA, 515 bp, Glycine max
  Clone ID: PAT_MRT3847_135984C.1
taaatactgcaccccccttagctgaatttattgaactagtactcaagatggtagactgcttgagtactagttcaataaatactgcaccccccttagctgaattgagtgaattgacttattcacttcgtctccatctaggcttaaggcttctgcaatctgctgccaatgcagttgggaaggataaattcctaaatgctattcctttgcatcacattgatagaactagaacaaatcttgaaaagttcatatgggggctttctaaaatgtattccccttgcaaagaagaaaagctatcaagattttccagactaaaccactcaatgctgatgtgggacactctcaagtactctttgacatcaatggagattgctgcacggtgtggaaagacttcttttacaccaaactttgctcttagtgcattgtatgaagaactgaaatcttcaagtggctttatattatccctgatgctgaaacttgttcaaaagacacgaagtaataattcttctcatgttcta

SEQ ID NO: 39851 - DNA, 785 bp, Glycine max
  Clone ID: PAT_MRT3847_135985C.1
gcgtacggctgcgagaagacgacagaagggtatactttatattatacgaacttggaatttaattattttttatgtgatttattttcagggattggtcggagctgctaaggaatgcttccgatgcggtgatcatgaacttgctggaggtagaggaagaaaggaagcacgcgaggaagcaacaacgttgaatgcttcaatgttcatacttcatagcgttggataaccacaatataaattcgtttattatttttttcgtatataatatgggatcttaatgagagagaccatatgtttgatgccttcaacatcactcaattctgtggcctgaattcgcttaataattggtttaggcttcagtttatatatttttttaaaaagcaaaatttattgaaataacagaagcacttctggtgctttgattaattcatttgtattacaaaattctttaattaattcatttgtatatctaattgtataatttcctttattctctgatatatagcaatttgcttggaaacccattttgcgctgtatcttctgtattttactttcatcccgtaattcgggatttataggacatctgtaacaatttcaaggacgaaatcaataaattgtagttgatttattaattgtattcttcagcatatattgttcaaatcaatgctgcaaaatgcaatcacaactagtattctatttatccattaatcgtatataatttctcttatattcagctttcatacaattttattatgataagtaatgttttatattcataaatattttac

SEQ ID NO: 39852 - DNA, 302 bp, Glycine max
  unsure (1)..(302): unsure at all n locations
  Clone ID: PAT_MRT3847_135986C.1
aaacntncnatnncnnccctaaacaannanacnccanncaantnnantncnnncannnancnntcnnnacnactacacnnnnncnccnnncnaaacnncnncnnnatncnactancnnnccanactccnncnncanncatcnnannnacnnncnannccnaacncnnncnnctcacncaacnannnntntccnatnnnaatnccnaacanananacnanncanacnaaantnacaaanancctnncaaantncaantnnnganacacanncattnananncaatnagcanttatcnncccac

SEQ ID NO: 39853 - DNA, 243 bp, Glycine max
  Clone ID: PAT_MRT3847_135987C.1
aaggaaaaagcagtttttattgcagtgtttaacttccaaaacaaggtcaaacattttactaaaggtgttaacaagcattttacaaacaggccaaacggctttaactataaaatataaccagggcaggtcagttacaacctactagagacgcgacataggggtgctcaagtaagcttttacaattcataaccgagttgcaaacaaaaacaaaaaaatcagattcctatactttctaaggcccct

SEQ ID NO: 39854 - DNA, 198 bp, Glycine max
  Clone ID: PAT_MRT3847_135988C.1
ggtcacattgtgtacgtagctctgcacaactaagacaacggggtgataatatacgaggcgcttatgtcactcggaccgaatcattcagtgtcaatcggagcgactagtatgtgttatttcatgacgactggtgatatcgctcttgcacgcctcaacttggagcgcgagtcatctaagaagtaccttccacatgttttt

SEQ ID NO: 39855 - DNA, 562 bp, Glycine max
  Clone ID: PAT_MRT3847_135989C.1
ctaacagacagacaatccattagagagggaaaatcatacttgtttacatgctgatggcactctaggattaaaaaaaaagaagatattcacaaatataagtacctaaaatccaactgcactacctattgctttcatattatataataagtccacttaaactagcccactaatctgcagttgctgtgaaagttcattaaaatggagcaacctatgccatcagatatatttcccttcccagaccccaaaaaaaaaggaaaaaaaaaaaaaaaactaagttgtctaaggcatgtgagactgttgagtctcatccctattctgggaatctggactcaatagaacctcttcaacctctgatgaaaaagcaggtagcttgcagcatttcatcttcttcaagtcctcccgtgaacaaatgaaaatcctcttcaccatgttgcagaactccctgcatgttaggtggcacgagaaaataaataaataggagaaaatagtttcccctatgaccattaaaaaaaattacattctcccatgatcataaattaacatgtgtgataaatttattatt

SEQ ID NO: 39856 - DNA, 330 bp, Glycine max
  Clone ID: PAT_MRT3847_13598C.1
catcacttattttttcccctatgcacaacgtatatttatccgtcttttctttaaagttgttgggccattctatcctctttctagaataatctattcatatattccattccaaattccatcgctttattttattcatcttgctttttaattataatgttaaatattctattattgcctttatttaattgttaaacctaaatgtactatttattcgtactctttaatatattcttactatcactattaattctcatcattacaattaaaaactacaatcactaaaatacaacatcaattttctccctataaacctttaaaacattccaactt

SEQ ID NO: 39857 - DNA, 196 bp, Glycine max
  Clone ID: PAT_MRT3847_135990C.1
tgcgatgcgacaacacaacggggaggggttgaagtcgagacagctcagaattcagcaagtgcggtatggacagcagagagcgaaatacttcgagatggcccgtacacaacaaactgctcgtaagtcaactggaggaaaagctcccatgaagcagcttgcatacaaggctgcacgtaagtctgcaccaacaactggt

SEQ ID NO: 39858 - DNA, 572 bp, Glycine max
  Clone ID: PAT_MRT3847_135991C.1
cggcgacatcggcaccgtctacctatgccgtctccacaacagcaaccaattgaagaatcaggatgaagacgaagaagatgtttcttgtttatacgccatgaaagtggtggacaaagacgcagtggcattgaagaagaagtcgcagagagcggaaatggagaaaaaaatcctcaagatgctcgaccacccgttcctccctacgctctacgccgagttcgaagcttctcatttctcttgcatcgtcatggagttttgttccggtggagacttgcactccctgcgcttcaagcaccctcacaaccgtttccctctctcctccgcaagattttatgcggcggaggtgctggtggcgttggaatacctccacatgctgggaatcatctacagagatttaaagcctgagaacgtgttggttagatcagacggtcacatcatgctttctgatttcgatctttctctttactcagaggcaatcccagccgttgaatcctccccagattccttaccatcttcaaatgcattaccattaccttacgcttacactcgctcgcattcttttatgagtccattct

SEQ ID NO: 39859 - DNA, 190 bp, Glycine max
  Clone ID: PAT_MRT3847_135992C.1
gtttgactctcagatcatagcctggttttgtccaccctgtactttattaatggtgactgcctgggcaagggataattcggggccttacacgaaccactcatacatggagataaacagaagatactctagcttacttcaattgcttaacccacaaacagcatgaccacaatacagatacatgaagatctcc

SEQ ID NO: 39860 - DNA, 480 bp, Glycine max
  Clone ID: PAT_MRT3847_135993C.1
tttactaaaaactacttatttgctttagaccaacaagtcattcactatcgaaatataatcttccaggaccaaaacacgatcactgagacctacgctacatatacagagtcccttttgagatattacaactattgcagcactaaattatagcaaggtggggcatagccaaattccgcagctcttactatgctaatatcttgcttagtagtacttattaacaggcacgtgcagcacaggcaatctttaaacatggggaggatgagaattgagataagcaaaataccaaggatgtgcattcatagccgacagattctgctggtgtagttccacaagaccacttcgtaatccacattcatatctaagcttataggcaaagccatcaccctgaaagtcaaatgatcggctgactaggccaagaccaaagctgaacagttgctgtagtgggatctacagtatactgaaatatgatgatcccgatga

SEQ ID NO: 39861 - DNA, 348 bp, Glycine max
  Clone ID: PAT_MRT3847_135994C.1
aaaaaaaaaaaaaaaaaaaaaaaaaaaaaaaaaaaaaaaaaaaaaaaaaaaaaaaaaaaaaaaaaaaaaaaaaaaaaaaaaaaaaaaaaaaagaaaaaaaaaaaaaaaaaaaaaaaaaaaaaaggccaaaataaaaaaaaatgaaaagaaaaaaaaaaaagcaaaaaaaaaaaaaaaaattgccgaaagcaaaaaaaaagtactgacgtacaaaaagctgaatacaacacagatatagagaggacaacgaaccaggtactgagtgtacgtggtggcatgcacatattggtaaagacaattggcatttacaccataacgctagactaagaaagctattggatcagccat

SEQ ID NO: 39862 - DNA, 407 bp, Glycine max
  Clone ID: PAT_MRT3847_135995C.1
ccacccaaaatataaactccttctttgtggaaacggatctatagtgggtgatgcggacccctggctgaaggagatttaccaacagaaaaagtttgttggacagggctaaatttttaagcgacccggtctgaaatacatttcaagggccccgtgaaaacttgggaatttataccacccttaagtcattcgtgcggggcatggacaacctgttttgctccaacaaaaaaaaactaaatggtcacttccaggggcttgcccggggtggtgggaacttcaaaaaaaacaaacccccctgctttaaaacccgccccctgttaaacaccaaaaactccagggggggctaaagaatggaacataacggggagggggtgggggacattgatttcccacatccctaaggttaaagc

SEQ ID NO: 39863 - DNA, 935 bp, Glycine max
  Clone ID: PAT_MRT3847_135996C.1
ccacgccgtccgaaaaatttgtatggtataactttggtgcttagttcatgtgtttaaaggcttcctttggtagaaaaacagaggtagctttgttgtgttcatgtttatatgcttttcctttaataaagtttcttttacacaaaaaagctttaataattgggagatgaaaggttttaaaagttttttgggcaagtcctccattttgggaacttgacattgaatcgtaagtatcaaatttttcaatttgagtttactctgattcgtaaagttacttgacattgaatcatcaagttttcttgtgacttccatttcaatatagttgcagtaggtacgaatgcattttttttcttcattttttttacatttattattttctctagtaaataaataaaagtcaaaccatgatacttaaataaataaatatgaaatatttatttaaagtaaagtcaaaccttgagccatgcatgtgttacaagcacaaaggaccaaacgagtaggttcaccttttaaaaatggggcaagtcaccagttcatacaatggagagaagtgaattattagaaaattcgcataaattagcttgaaaatatcttttgaaataaatgagtgtttagcatttgcggattattagggtcaagtcaccaaggtggccgtggcagcagcatatgcatgtggctcattctcaagaagaaaggctttggtggatccagtttccattgacaactcttgtagtctatcattttggtggatgcagcatatgccactgcctcaaattcctcatttttgtccccatcaacaacaaaaaattcctcagaggaggtaatggaagaaacatattctggtatcactaccaacatcaacagcgagcttcatagtaaggccaatgatttctttaaattgccaattgtcataatgacacaatgttgccaagcatata

SEQ ID NO: 39864 - DNA, 248 bp, Glycine max
  Clone ID: PAT_MRT3847_135997C.1
tttttgtatcaataactccaggcatattaatcataactggaatccatataagatgatccagggacatactagcgcgtctcacaaccgaaacatacgtcattatcatccaggtaaacatgatcagctttgggacatgcatgaaaccgaaactagcaattgaagcctgctcctttctttccttcaggaccggggattctcctgctggagttggcgctcgatcggccaacacccggaatggttacttgcag

SEQ ID NO: 39865 - DNA, 646 bp, Glycine max
  Clone ID: PAT_MRT3847_135998C.1
gcacgagattattacaaatcccctccacctccatctccatctccaccacctccttaaccatctccttctcctcctcctccctactactaccactctccaccaccaccatccccatcaccgccgtctccatattattacaaatcccctccacctccatctccatctccaccacctccttactactatcaaagtcctcctccaccatctcccacttctcatcctccttccccagctcctgctcccaagtacatttacaaatcacctccacctccggtttatatctatgcttccccacctccacctatctacaagtaagctcaaattgtgaaagcaccattcatgatgaatcatgtaagttcacgatcctgaagtaaaaatttatcatctatacatgtatgaattttagtaatggaaattcccatttaatttgttttcaggttctagttttcatcgaggaataaaggcaagctctattttgagccaagtgaaacatctatcttcctgtctaagttctttgaataaaagtctgaatgtgtcatctctatgctacaatgtttatgattcagatcaggttgattctatttgtttgatggccatcttgcacgtcctgatcttattgtgttcaagtgacggacaaatccaaaca

SEQ ID NO: 39866 - DNA, 497 bp, Glycine max
  Clone ID: PAT_MRT3847_135999C.1
cctccttccccagctcctgctcccaagtacatttacaaatcacctccacctccggtttatatctatgcttccccacctccacctatctacaagttctagttttcatcgaggaataaaggcaagctctattttgagccaagtgaaacatctatcttcctgtctaagttctttgaataaaagtctgaatgtgtcatctctatgctacaatgtttatgattcagatcaggttgattctatttgtttgatggccatcttgcacgtcctgatcttattgtgttcaagtgacggacaaatccaaacaggaaagagagatttgaaatgtaaatgccaagtaaatgtgaaaagtacagtccatttttagtgatctctttaatttatttgttcatagattaatatggtcgtgtatgattgcttttctatttattgtggcatttttgtgttgtaccctgttgttgtgtttgcaataattattagtaataaagcagcaaattcaattt

SEQ ID NO: 39867 - DNA, 502 bp, Glycine max
  unsure (1)..(502): unsure at all n locations
  Clone ID: PAT_MRT3847_13599C.1
cggaacccccggggcgaccccgcgtccgaataaatggatagaaaattttctaattctttcatttttatttattgtttcaataaatatttttttacttcatttttttatttccattcttaattatttttttctctcctctctcaatttcacttttaatgtaaagtgatacagaaaaatgagtcataaaaaatatgataaagacatattataaaattatataggtacgattcttgcttctaccaattttctcgcaaaagtttgatattgggatgaccttataaaatatcataggataatgacatttagacatcatttttcttaacaaatatctattcgacatcctattatctctatctctctctaggttatgatggtgatggacatttgggtctccaccaaacattatccaatgtcataagacacctctttgtatacgttcctttgttggttnttcatataaattatatctgtacgagagaatcctgctaaagaaatgtttaga

SEQ ID NO: 39868 - DNA, 260 bp, Glycine max
  unsure (1)..(260): unsure at all n locations
  Clone ID: PAT_MRT3847_1359C.1
gggggaccccggaaaagaccgacggagcaggaacccnagagggagataccccagccaacgcagcgcgcggaaacaaaaaaagaacgggggnggggcgaaccacagaggaaaaggaacggggaacgaaccggcaggcccggacttttttttggcgggggggagacaacccgcaaaagcgagcccggaaggaaaaaacccccacaggcgggggggaagggggaagaaagcgaccgnggaaacagacgcgcggcaagagaaag

SEQ ID NO: 39869 - DNA, 187 bp, Glycine max
  Clone ID: PAT_MRT3847_135C.1
ggacgctggcggaaagatcaagaagggcgccggtggaagaaagggcggcggccctaagaagaagccggttttaaggtccgtcaaggccgggctgcaatttcgccgtcgaggactttggccgtttctagagaaaggaagggtcgccagggcgtcggaccaggtgcccacagttgtcgagagtgtaatg

SEQ ID NO: 39870 - DNA, 1740 bp, Glycine max
  Clone ID: PAT_MRT3847_136000C.1
ggaaaaacaatggggtctctaatggcctctgcaacattgactcttgtattggctatagtgtctctaagcttgccaacacaaatcttagctgataactacttgtactgatggcgtgcaccacccaagaagtacccaccggtgtctcctccataccactatccttcaccaccaccaccaccatctccatctccaccacctccctattactataaatctcctccaccaccatccccctctcctcctcccccctactactaccactccccaccaccaccatctccctctcctcctcctccctactactaccattctccaccaccaccatctccatcaccaccacctccatactattacaaatcccctccacctccatctccatctccaccacctccttactactatcaaagtcctcctccaccatctcccactcctcatcctccctactactacaaatcccctctaccaccaacgtcgcatcctccaccttaccactatgtgagccctccaccaccttctccatctcctcctctctttttaccattacacatcaccacctcctccttccccagctcccgctcccaagtacatttacaaatcacctccacctccagtttacatatatgcttccccacctccacctatctacaagtaagttcgaattgcggaagcaccattcacgatgaatcatgtaagttcacgatcctgaagtgaaaatttgttatctatacatgtatgaactttagtaatgaaaatacctatttaatttgttttcaggttctagtttttatcgaggaataaaggcaagctctatttggagtcaagtgaaacatctatcttcctgtccaagttctttgaataaaagtctgaatgtgtcatctctgcactacaatatttgtgattctgaccaagttggttctatttgtttgatggccatcttgcacgtcctgatcttattgtgttcaagtgacagacaaatcagaacagggaagagagatttgaaatgtaaatgccaagtgaaagtgaaaagtacagtccagttttagtgatctctttaatttatttgttcatagattaatatgatggtgtatgattgcttttctatttattgtggcatttttgtgttgtaccctgttgttgtgtttgcaataagtattagtaataaagcagcaaattcaatttcagttcacgtattaattcatgtttctttcccacgactagcatctatactattgtcgctatttcaaatagctctggtggagcatataaggcttccaaatacatagagaaggttcacgtatctcaaacaacaatcagctttttttaaagttgcttttgtcttatcccagaagtggactaattgtaaaagaggaaaaatcagccacattaaaattactttaagatccctttgatatccaaaaattgtttaataacagacaagtgagaaatgttagagtaaaccaacaaaatttaggtagggccggatataaatattggctaagtaacatcctgtaggggtagttatgaagccttagaccatccgcatggggtggtggagggaggccccaattcgtagaacacacaaagttttctatgatgcctataaactcaaaatttttggcatgtttttttcttagaaaacgttatgggatatgatagtggccaactaaataatataaataatctaataaagttaatcacttcattttgcaatattacttaatcttctccatctattattat

SEQ ID NO: 39871 - DNA, 1104 bp, Glycine max
  Clone ID: PAT_MRT3847_136002C.1
acgagccctcctcctccttactattataaatctcccccaccaccttcaccatccccaccaccaccttattattatcattccccacctccacctaaagagcatgtacaccctccctactactaccactcaccaccaccaccatctccatctccaccacctccctattactataaatctcctccaccaccatccccctctcctcctccactctactactaccactcaccaacaccaacatctccctctcctcctcctccctactactaccattctccaccaccaccatctccatcaccaccacctccatactattacaaatcccctccacctccatctccatctccattatctccttactactatcaaagtcctcctccaccatctcccactcctcatcctccctactactacaaatcccctccaccaccaacgtcacatcctccaccttaccactatgtgaaccctccaccaccttctccatctcctcctccaccataccattacacatcaccacctcctccttccccagctcccgctcccaagtacatttacaaatcacctccacctccagtttacatatatgcttccccacctccacctatctacaagtaagttcgaattgcggaagcaccattcacgataaatcatgttctagtttttatcgaggaataaaggcaagctctatttggagtcaagtgaaacatctatcttcctgtccaagttctttgaataaaagtctgaatgtgtcatctctgcactacaatatttgtgattctgaccaagttggttctatttgtttgatggccatcttgcacgtcctgatcttattgtgttcaagtgacagacaaatcagaacagggaagagagatttgaaatgtaaatgccaagtgaaagtgaaaagtacagtccagttttagtgatctctttaatttatttgttcatagattaatatgatggtgtatgattgcttttctatttattgtggcatttttgtgttgtaccctgttgttgtgtttgcaataagtattagtaataaagcagcaaattcaatttcagttcacgtattaaaaaaaaaaaaaaaaaaacgcgagactagttcctggt

SEQ ID NO: 39872 - DNA, 1105 bp, Glycine max
  Clone ID: PAT_MRT3847_136004C.1
ggctcgagagacccttctcttccaacaaaatcagtgaggatctgagaagaagaagcattggccagaggcatgactgcaaggggcagcgaccccataaggggtcgtcttcggccgcaaatggccctggccttggccattgctttgatttctatcactttggtttccgttaatgctgatggttacccttactattcccctcctccaccttaccagtacacctcaccacctcctcctccttacctctacaagtctcctcccccaccctctccttcacctcctcctccataccatccccatctccaccacctccttattattataaatcccctccaccaccatccccttctcctcctcccccctactactatcactctccaccaccaccatctccttctcctcctcctccctactactaccactctccaccaccaccatccccatcaccgccgtctccatattattacaaatcccctccacctccatctccatctccaccacctccttactactatcaaagtcctcctccaccatctcccacttctcatcctccctattactacaaatcccctccaccaccaacgtcatatcctccacctccttaccactacgtgagccctccaccaccttctccatctcctcccccaccataccattacacatcaccacctcctccttccccagctcctgctcccaagtacatttacaaatcacctccacctccggtttatatctatgcttccccacctccacctatctacaagtaagctcaaattgtgaaagcaccattcatgatgaatcatgttctagttttcatcgaggaataaaggcaagctctattttgagccaagtgaaacatctatcttcctgtctaagttctttgaataaaagtctgaatgtgtcatctctatgctacaatgtttatgattcagatcaggttgattctatttgtttgatggccatcttgcacgtcctgatcttattgtgttcaagtgacggacaaatccaaacaggaaagagagatttgaaatgtaaatgccaagtaaatgtgaaaagtacagtccatttttagtgatctctttaatttatttgttcatagattaatatg

SEQ ID NO: 39873 - DNA, 318 bp, Glycine max
  Clone ID: PAT_MRT3847_136005C.1
cctttttcgaacaatggcttcagattgtcttggaaaaccagacaattcacttggtcaaaatagaataagtaaaatacctccaaaggcagaattctataatgggcagaatgcaattgtggctgttaatgtacatctgggatacaatcaagaggattcccttgtgatgaaccgtgcttcactgtcgcgtggtatgttcaggtctgagcacataaggagttacaaatctgaaatcgataataaggaatcttcagataagaagcgaaaacctgaagacattgtaaattttgcaaagctacaaagtaaaattggccgagttga

SEQ ID NO: 39874 - DNA, 256 bp, Glycine max
  Clone ID: PAT_MRT3847_136006C.1
aatttcaagtgtctatatatacatttttcttcttttatcaaagcttgtgattagactagctacctttgtaccgtacccttgtattattgcatggtttaaggtttaattaattaatttgtagctgttgcttagaactggttttggcaaagagcttgatcttcaagagatttctttgattcttctttctagtgtaaagtcatgtcctattagctaggtacaaaatgatgaaaagaatgggccaccaacgacgacaaag

SEQ ID NO: 39875 - DNA, 224 bp, Glycine max
  Clone ID: PAT_MRT3847_136007C.1
tccaataaaaaaaaaacttaaaaaaaaaaatataaaaaaaaaaaaaaaaaaaaaaaagggaagaaaaaataaaaaaaaaacaaaaatgactaccatattttaatgcccacatcttacctgggctgacattaaaaccctttccatttttacattcccccctaagcaatatttactcccctttattgtacaccttatagcctgggaaaaccccatttttacccaat

SEQ ID NO: 39876 - DNA, 483 bp, Glycine max
  Clone ID: PAT_MRT3847_136008C.1
gaacttcatttgagtatataaacacccattgtataatcttgttgatccaaagaatattaggtaagtgcctgtccaaacccttgctgggcatactactgactcactcactacaataggcaccataagcattaatatgatcaaaagaactgcctgattgggtttttctattcctttacatggttgcaccaagtccttcatgactccttattttgaactacacttaagctcaaggctacgtttaacaacaattcatttaacgacaacttttgatccgaacgttgccttggatctacctatggttaacaaccaagctccactcgaagatggacatatggttgtactttgggggccaacggagtcttgcaggctgtgccattccacatagtcaacaattcaagcgatgcgaaaaagataaatcccccacacagtcaggccaagggtgcatactttgcgacagagtttgcattacgatctatacaccgc

SEQ ID NO: 39877 - DNA, 331 bp, Glycine max
  Clone ID: PAT_MRT3847_136009C.1
tacggctgcgagaagacgacagaagggaagtttgtgctataactatgttgttgaccttaaagacaagaaagaaagaataagtgtgtttgtttttagctttgtttggattttggatgaagaggaaagtagtggtatttatacgtggtgatggtcggaaagatagaaggaggaagaatcgttcttggctccagaattttctcggcattaattaattacaaaacagcagatcgactttgaatctgcgttcataactttcgctttttcttaactactattattttaaaattttcttagaaaagggggacaacataattaaggggtaattttaatt

SEQ ID NO: 39878 - DNA, 317 bp, Glycine max
  Clone ID: PAT_MRT3847_13600C.1
tatacaattttccccttctttatacaatcccttaatcccttcttaatactgtcttttttaaaaatcttgagtcccttcacaactttccttaaactcttacccctactctctctaacttacctaaaccctataatactccttcccctcctcttcctacaccctactccctcttcataacctctcacttttctactaccaatccctcatatccactccatttccctctttactctactatcctctttctcttcacctacctattcttcatctctcaatccctcattcttcccattttccccaccatctttctccttact

SEQ ID NO: 39879 - DNA, 409 bp, Glycine max
  Clone ID: PAT_MRT3847_136010C.1
agttttttccttttatttgatgctgaagcagaagcacgagtgtgtcaatgtctgtatcttggcttgtatattccctttgagattttcttaagcttactgcacttcagttcctgcacaggttgtctttagcaatttagcttccttcacatattaaagctcaagattctgattccactgtaggatattaggtcttataatccattattaatatatattcctctgcaagggtaaggctgcatacaatgaccctcctcataccttcgcactgcaaggagcctttggcaccgggtacattaatttttttcatactcattgttgtcaaaattgtgagtaagatcaaaggattgccttctgattcccttgcgcgctctcactcaattaagcctaatcacattctctagtctctatt

SEQ ID NO: 39880 - DNA, 448 bp, Glycine max
  Clone ID: PAT_MRT3847_136011C.1
ccgaatcaaaataaggcccgcgagctcactatactacgcgcgccctttattttttttttttttttttttattttaaaaataacacacacttgggacattattacgacgggtaaaagatgtgtctaaatttttaatgactcaaaacatactcatcaagagggtcatgcctaatttcctttattgaattaaacaatcgaacatgcgaaagaaaacacaaattccagatcatgcataggattccgcattttcagaagatctggcagtagcctgtggaacagaaaaagctggcttaagagtattaccagcatttttaaattacagtgagatggccatgtgatattgcagtcacctgtacactgtttgggattgttaataaggaaactcaaatttccatggaaatttgttatgcccactcagaacttcacatttttaaaacctttttttagga

SEQ ID NO: 39881 - DNA, 346 bp, Glycine max
  Clone ID: PAT_MRT3847_136012C.1
ctcgcacgtacacattgctgacctgacgggagaaaatatcatattctcatacacataaaatggtgaattacagatgcatctcattaacctatccataccctaccacaaaagggagtacgataggatattgttctaggctattcatgatgctgaagaatcaaaactgctttcttcatcatcagaatcagcagcaatcttcttcttcaaaggttctccttttggatacttgggctgaaatatcttcccaagaattttaagaacagtacgccgaagtctaaggtgctctgtcttaacggtattttcctttagtaccatttgacacacatggacaagggttacttctata

SEQ ID NO: 39882 - DNA, 927 bp, Glycine max
  Clone ID: PAT_MRT3847_136013C.1
tgttccatttagctagatctattttattctagctacacaccaattatatatattcccagaagatttattcgcttaccaataagatttggagattctgaacatatatttggttcttattatatagactcatcttccttcttttttttccatttttcaattccatttctcggtgttatgaaacctgttatcagatcttggttgccccacctccatttcttgctgtgttgatgttcccctcctcataaggaccattttatacagattcttcattgaataacagctgtataaattgactgcacggttgtgttgttctctcctctttattggaaaccaataggagatagagttagcattattaagctactgtgagacttatttccaaggttcattcgtgtggttctctacctaatttattctgatctaactttggcctaggaggcccaccattgggttttggtgggctttcactgaaccaataaaaaacccatctttaaaaggtgctttgttttgaaggttccaatttgcttcctgtgtttctttccaacaaggaagggagggtggtgtgtcattaatttgtgtcaagtattttggttttgctttcccccttgttagccattggtgttgcacaattggcattaaggttctattatcacatatgccaaacttgacctttgaaagatatcctaattcctaagtgctaatgctactctacttaatcacttgcatctccttccttctgtttttaaagcctctcctctctctcaaaccactcccatcatgggcaagtgaattgaggttgatctcccctttgttttacaaagacttgtctgtgaagtccatctctaagttgtttaggaaccgcctttggcttggttttctttgtcaaattcccacaagaatgtctctaatgaagaagtcttcaaaggt

SEQ ID NO: 39883 - DNA, 337 bp, Glycine max
  Clone ID: PAT_MRT3847_136014C.1
gaggaatgatttttttttttttttatggaaattacatgttggattgtcttttaacaaatagcacataaacaacattagtttctatatcgtttatgacactaatcaatgtagaaaatcattttcttcatcgattctatgctcgatgtaggaaagtcccactttctatgatactcaatgactaaaatagtaacattctcatgtggggaagatttggcgacttgagcaacattagccgattttgactgttctcaaactttggatttgcattccacttggacggggccatagtagttactatattggttaatgacacttaatcaatggtaaaaaatcactt

SEQ ID NO: 39884 - DNA, 284 bp, Glycine max
  Clone ID: PAT_MRT3847_136015C.1
gagaaaaaccctggagtttggttttgaaattttttcttcatagcccatacatttttaaaagggacctcaaatacaaacttgctgggatttttttgcctaggctcaaaaacccccccgtaataccccctaaaaaaccatttcttgccaggggccagtacctaacttggggggattttaattcccctggttaataaacacatttgagctgaaaatatgccctatgatgaagaatgccacttgaatgaaaaggtgcccatactttccttgccatgcagaccgaaaat

SEQ ID NO: 39885 - DNA, 345 bp, Glycine max
  Clone ID: PAT_MRT3847_136016C.1
aaagaacccaatcatggatgacctcatgattcgtgcttttgcaaacaagaatgacatatgggcatagggccctgttatgaggctatgggagactgctcgtctcactactggttcagcctaaaccagcccatcaattttaaaaacaggatcgacacaatgtagaatctacgactgagcattgacaaggctacaacctaagcttatgctgaaatggccataattgtagaagcctatgctgatactctgggctgcagcattggggacttttatttaaatcaaataatttgcaaatcttgaaagtagcgtctctaatgccttgattgaatattgacgtctcttacatgc

SEQ ID NO: 39886 - DNA, 426 bp, Glycine max
  Clone ID: PAT_MRT3847_136017C.1
aagtgatgttacggaatgagttgtaaaatgatgtgaattgggctaagttgagcttggtatacttatgttatatatatgtgctattgtatatctctgcatgtttaggaatgtaataacttactccatgtgtgttgttagtgtctggatcctatgatgatatctgaccttgtgttcgtgagatcaaatgattagatagatgactataaagaaccttatgctaaatgacgatgaacactatactctgataggatatgacattagagcttaggattttacattgattttatcatatgctatgataagatatgtagttgaacatgatttatttttatatttctcattgaaatatcagttgtaatatcatcaagtttcacctcttgaagttctcaaagtagtagttaccctttcgtacatgtctactatagc

SEQ ID NO: 39887 - DNA, 433 bp, Glycine max
  Clone ID: PAT_MRT3847_136018C.1
gaggaaaaaaaaaaaatgggtttttcttaaaattccattccgtctggaatccatttggccttgaaaacaaattcccttaaaaaaaaaaaaaattggggggggtttaaaatcccctgggaagcggaaccccccgttgccaaatggggagggaactttttaaaaacccccttttccttttccttaaacaaagggggcgggccccccgggtgggccaccttttgctttgcagaaaaaacagtctcccctttttcaaccccccaaactttgggggccaccccgccgggggccgccttttttgacaccccaaaaagggcgctcccgtatgagaccccccccaccgacttggccaccttgggattgacctctgggcaattgttaaacgcccctcccccctctggaagtgttgccctcccctcggggaaccccacccccc

SEQ ID NO: 39888 - DNA, 417 bp, Glycine max
  Clone ID: PAT_MRT3847_136019C.1
tttttcgtaacaaattaacatcatccaattgatttggaaagttgatgaaaaaattattgacatgaggacatggtctacactttgtacttacttaccctgtgcagtgtgcacaaagcacgcccaatgtgactccgcagcctagtcaaaaaagaatatatttttttctttctccggaagaacaaaaaatcttaaaaaatcaacctatgcaaccaaagaacaaaaaatgactataaacactgatcaatcctcctcaccgctatacagggtgaccaattttgtcatgatcctaatcctaaaaacatgttcaatcttggtgtatgttgttttatcgggtcggttataaactaattgtaaaacaattgcgatacggatcgaggatgatgccgataaaacgtgctcaatctaataaataacgag

SEQ ID NO: 39889 - DNA, 478 bp, Glycine max
  Clone ID: PAT_MRT3847_13601C.1
gtgcttcacaatttttcaattttcgtattggtgcttggaacagatcttcctttggaatagtttggttgacttgaataaaccaagctaaagccaaatatcgaacctcataatttcctctctgatttctattcctggatttgttgttttgttttctggcttcatcacttgctaatttggttcctttctttcgttttctacatcgactgtttttaaatctttccctttgtttttggcctttctaatggttcggagcaccctttggaattgcatttgtcctgtttctggcatttaattttcggtatttattcatctgggtcctattgctagcaaaacaaaggagggaagatcacaacaccagaaaaaatattaattatgatattaagtcaaataaatataaaaaaaaaaccttaatttgaaggtgcagttttggctttatccatattttgcttctgcaatgcaatatagcattattcatgat

SEQ ID NO: 39890 - DNA, 1358 bp, Glycine max
  Clone ID: PAT_MRT3847_136020C.1
accgggccggagcacgagtggtggatcggtttaccgcagcaaacactcttctgagttctgagctagcgaggttgcaatggcgattatctccgatttcaacgaagaggagcagaaacccactcactcttcaccaccgcaaccccaatcctcttcctcttcctcttcctcttcgttcagtgctgcttttgaccggtcaaaccctatcgcttttctggagagagtcttccagttcgtctccgaacacagcgactttctggcgacggagagcgccgagaaggagatagcgttgctggtgcgcgccgccgggaagaagaagagggagtttctcaagtcggagagagaaaaggccgagaagaagaagagagaggacctcaaggcctcggaggagagggaaaaatccgacaagaggttgaaggaagagaaggaacccaaagccgaagacaccagcaaagacgaaagcacctccaaagttccaaacaaaggtaatggcttagatttagagaaatactcttggactcaatcacttcaagaggttaatgttaatgttccggtgccaaatggaaccaaatcaagatttgttactgttgagataaagaagaaccatctaaaagttggactcaaaggccagcctccaattattgagggggagttttataagtctgtcaagcctgatgattgctattggagtatagaggatcagaatgcaatttctattcttttgaccaagcatgatcaaatggaatggtggaaatgtctagtgaaaggtgatcctgagattgatacccaaaaggttgaacctgaaaacagcaaacttggtgacctggatcctgagactcgacagactgttgaaaaaatgatgtttgaccagaggcagaagtctatgggcctccctaccagtgaagagctccagaagcaggaaatgttgaagaaatttatgtctgagcatccggagatggacttttctagggctaaaatatcataaatgggtgcattactcttggcaaacttttttgggtctgatcttattgcatgcaggcaggtccagctattatactaatactggtgctacctttaatcgcagtttattatcgtgttatttctttttgggttttgaacacaatgaactttgttcatagtagtttttttattttgatatagtcagatctattttggaaatgatctttattgcatacaggctactggtggtacctttggttgctgtttatcttgttatctctttttggttgtgaatgcagtgaaactttgttcataatagcttatattttgaatggagaatttacggctagatttattttcaacgactagaataatagtttatccattggatatgaaaaaaa

SEQ ID NO: 39891 - DNA, 399 bp, Glycine max
  Clone ID: PAT_MRT3847_136021C.1
ggaaccaccacaaaaaccatggtttggctcagagccctgatcagcagatgaagcccttagctccattcatatcatcaacccagttcagcagacaagaagatcagtttcaagagagaacatccgaacagaaaatcattcgcataagaaagttcgtgctgtgctgcggttgtttcactgcccttgttgtgatactcgtggtcatactgatagtcttgagcttcaccgtttacaatgtcaaagaacccgaggtgaggatgaattcggttacccttctcagtggaacttttgcaaacggtggtgccactaacaacgttacacttgttgctgatatctttgtcaagaacacaaacgcttttaccctgaggtttggaagcaccagcaccattgtttactatgatg

SEQ ID NO: 39892 - DNA, 484 bp, Glycine max
  unsure (1)..(484): unsure at all n locations
  Clone ID: PAT_MRT3847_136022C.1
gctatctcgatcgaactgtccaaggtcctgtcactggcccggacccaggtgatatggctaagtgcttgggtatatttatttatttggtaattagggtaaggttggtttgtatttaaattctatgagtcggtggtcatatccgttgcgggaggaagtccgggccagagaacaagacaactcgaaaagccttggtcgactatagtaattgtaccgggcgggcgcatagtggttgtcacatcgggcttaccnagtaaaacatggaacggcacgtacagcgggaataaaatagtatagcaggccaacaatgcattcataggcttgacgaaaagcccaacatggcgggaacgggacccttgttgcgtggggcgcgagttaacggtaaattgggaaccagggtacgtggtaaacgtagtatttaaaagcagcaggtaccaagtacactgaagtccggcaacatatttaagatggtgcggacaggaccaca

SEQ ID NO: 39893 - DNA, 510 bp, Glycine max
  unsure (1)..(510): unsure at all n locations
  Clone ID: PAT_MRT3847_136023C.1
tacggctgcgagaagacgacagaaggggaccaaaaagaaaggaaaaaaaaaaactaaacataagaatgcattcaacgcgttgagttgttgtctggaagagcttatgctgtttgttcgcaattcgcatggaaccatcagtttcagctccaccaaaaccttgggagaaagcagcatcatcatctgggccagcaccttttaaacccccatcagcaggtagcacaagtgatgtagttgaggcttcagggactgcaaaacctggcgaaatagttccagcttccgataagactgcaactgtcaataggaatgctcttgggagaccccttcccacaaggccatgggagcagaataatggaagtaccagctatggaggttatggttccacaatgaattataattctggatatggatcttatggtggagtgggagggttgtatggcggaggaatgtatggcagcagtatgtacaggggaggatatgggggcctctatggttcctctgngatgtatggag

SEQ ID NO: 39894 - DNA, 374 bp, Glycine max
  Clone ID: PAT_MRT3847_136024C.1
ttaaactgatgacatgtagtgagattatttaacacaaaatgaacgattacacgaatgcataaccgtaaaatgtattttgggtttcctgctgtactaaacgaatacacaaatgcgagctacccgacgaattttcatgaacatgcctcctccttgaaagttccatgcatcgagctaactggatctccaccttcagaagaaggcacactaatgcaggccccacattataagagagattggagcaggacaaacagactccaccagtttaagcgcgggacccggttatgaatattctggccctacccacgtacctttcaccgctcagttttttgcagccctgagagccgctttcttattttttgtgagccccctcaaac

SEQ ID NO: 39895 - DNA, 303 bp, Glycine max
  Clone ID: PAT_MRT3847_136025C.1
cgcggctcatctttctgcgagtcctctgtcccgccccacgaagaggtttgtgccgatcgcgctgccagtaccaaccatgccttgacgaagcgacggtgctagatcgggccgcgcggctccaagtgcaggctctcaatctgattcagtgaaccctgcgcctccgacaaaggcagctgagagcgggggagggcctatgcctggaggaatgggatgcacgatagctcagcggcatggctactggcactgggagtgcaggcggcacacatggcgaaacggtgctgtcactggcaccacaaacattga

SEQ ID NO: 39896 - DNA, 522 bp, Glycine max
  Clone ID: PAT_MRT3847_136026C.1
aatccgaggaaacaaaggcgatgctggtcaccagatcttcatcggcgatttgttgatgcgcttcaacaattagggggcccacaagtggccactccaaagcagattagagaactgatgcaggtggtaggcctcacaaatgatgaagtgaaaagccatttgcaaaagtacaggcttcattttaaaagacctcaaggttcttcaattggccatgctaacagtggcttatgcaagatggcacaagataaatgtggagacgataaatctggctctccacaaggtccactcttcctaggagggtctggaaaaggtctttcaagctctggacgcaatagcatggacacagaaggagatgaggaatcagattgccgcaattggaaaggtgggattcatcaccaattgcaaccagaaagtgacgttttgtgagcttttacagttttcagatacatgagaattaaacatatataatgaatattcaaaatttggagaaattatttggtaatttaaaattattactttttcatt

SEQ ID NO: 39897 - DNA, 1628 bp, Glycine max
  Clone ID: PAT_MRT3847_136027C.1
aattcggctcgaggtcgtgccaaagaggcttattgaacacttgcagcagctagagccacaatttcaatgcccctgattagtttgtctgtccatcacagtacatagtataataatcataaaccctttttctcagcgaggcacacagtatcattactacactttttttttcactattgttttggcaagtcctcaacccccctccccccagcataaagagctataattcccttctcagccacaatatggctttgtaaaatgggaaggactccttgctgcagtcacgaggaattgagaaaaggggcatggacggttcaagaagaccagaaactaattacttacattcagaaacatggcacaggaagctggcgtaccttgccacagaaagcaggtcttaaaagatgtggaaagagttgcaggctgagatggtttaactaccttagacctgacattaagagagggaaattaagccaagaagaagagcagacaattatcaaacttcgggcggttcttggaaacaggtggtcaagtattgcaaagcacttacccatgcgaactgataacgaaatcaagaactattggaactcatatctgaaaaagcagttcgaaaagaatgctgtggatccctcaagttcaaaaccaaatagcactgatagttcctcagaatcaaaatctaatgacacgtgcatggttccatcagagaaaactgattgccatgaaccaaacaccagccaatctcatcagcacaacttatcaaggtcaatctcatcatcaactcatcttcttaacaaagttgctagtaaaattctggcatcagggtacctagaactaatcaaatcatgccaacctgttgttgctgggaacagcaaaagtgaaagtgtggttaaaactggtattgggttagaaagtgacaatattagagacccccttgagcctaatttgacctcaccaagtcattctataacttctgctaagttactgaacaagatggctacttccctccctcataaagttcatggccttgaagctgcaaaagctgtgttctcaaaactgatggaaaacagtgaaaaaggtgccactgctagtgatgatagctttgttggaggttgtttaaatgctttaagcccttttgaggataaaccacacataacaaaaacaattgactccccttctggtcctacactaatgttcaaccatgttaccacaccctcatgcttttcagaagataatgaagataactggcaatgcgtttcatctaactatgtttccttcaaaatttgtgctgcgaatggtggtgactgcagtgtctctgagatcaacttgggtgagtcttccagttccacatccagcttcctgtttgagaatgctgaccttggaacgtgtgatgatgagataagcaagtacatccagtattgtagggaaaaaaatttgtggacatccaatgctaataatgtaggtattacaaggccctatgatgtaagaggaagatatctaaagagagataatatatcctaatagagtgtttgatatatcaccatgtttatatagaggtgtttgacggaggaatttatgtatcatcactctatttgtaataagaaattatattcttccttataatttttttttactca

SEQ ID NO: 39898 - DNA, 258 bp, Glycine max
  Clone ID: PAT_MRT3847_136028C.1
taccacacgtcctcccaaaccctaaacgacaatttttaaaaggatggcggctgagaccacttctccatccacttccacttctgatacatacattttaaactttataacctttacctataggagctacatcacatttttacgcattctctacaacacaaacacccaataatccatttttaccctcataaatttgccatcttttcaaacataattaataaaattttattatccacaaattccttcattttacaaccttta

SEQ ID NO: 39899 - DNA, 1052 bp, Glycine max
  Clone ID: PAT_MRT3847_136029C.1
tttttttttttttttttttttttttttactgtccccccccccccgcctttttttttttttttgtaaacaaaaataacttggcccgccaatagacttatattcatccaacaccgaaaacgatcgcgtattatagttaccacaattgatttaacatagtattctcacgttgcatgcaaatatagatgcaactgttttcgtgtcatataaatcaaataacatacaaatactatttaataatttgttgcctacaaaattttatgtaagagctaaacggggtcaattaccccatgtaattgcaactttaagaagttcatgtaaaccattctatctgtgcaatcaataggaatgtgtttaataagggtctcaggtatctgcctacctccaagactccatgccgatctatgtcatacccttcccaatgttttccatcatacactttttacaacaacattagcaataaaagcatccaatactctgacactagagaatgcaggcgccaggtagtactggaacggcaatcagcctacaacttttcatggcaagaattaatcaacccaacagctcttccatgaatatagatgagaaaattgaatccatttcatcaagccctacacttattcagagaaaggctgtgaatccatgcatagatgcaccaactttctttgatattgccctaaatattcattaactgcaatgacatcttcattatttggatctaaagctcgcaagtttagtagctcatccttaactgatgaacttgattcttcgtcaagaatacctaggttagaaactacttctgcatgggtttcacggcatgcaaggataaacattgcagctgtgtcaggtaactgagcctcacgaagagcagccaaagcctcttgcagtgcaccagcggcaacatacaaaatcagggccctccagatgttatgttcagtgtgcaggacatgggtcgcccatctttgcaacactcttgcatagtctgatccctttaagtggctagcagctaaggttgcagcatccgtccagcacccagcatcttgtagctctggtgc

SEQ ID NO: 39900 - DNA, 241 bp, Glycine max
  Clone ID: PAT_MRT3847_13602C.1
ctaatttcctctcttctattccactcaccctatacactattcaatctcccagttgtctttccataaccactctcactgcactacttataatactctttcactcactccattctttctttactaaatcacttctcattttaaacttatttataacctcattttttattttctacatttataaccatccaatcctacttctttaatccctatcaacttcaattctataaacccctctcttttc

SEQ ID NO: 39901 - DNA, 159 bp, Glycine max
  Clone ID: PAT_MRT3847_136030C.1
agtcccatccgaatatggtaattcttggtgacgaagttgctgcatcaaagcttaacctttgctgcaattgtcaaacacggttactgaatgcaattcaggctagagctatagaagacaaataccatggaggtcatctccttccagaaaggctgatagaga

SEQ ID NO: 39902 - DNA, 762 bp, Glycine max
  Clone ID: PAT_MRT3847_136031C.1
tacggctgcgagaagacgacagaagggggatgaaaaaaaattcacctcacccatcagacccgtaaacttccttcttagacccgaaaaccttctcattaccccaacccagaggagtgttgattatgttggtggtttcgaatcttctgctggagaagagctcaaaggccgcaacgcccaagagctttctcttcggattcttgtcagcaacaaacatactgaatgtttcccaagcctacaaagacgcgctggagaagaagatagggttgtagctccacaaccaccaatttgtgttgggaaaacaaagggaatacacaatcactagaataagaaagttcaggtagaagaatcatttgctgcagacggcaatatctagatgctgctgtaccacaaaagtttgttcattattcacatcaggcaagagcagaagctgacataatgtatgtaatagataataatcctatgtgtgttgtatgtctagtttggctgtcataaagcatggaaattgacaaattttcctagtgactgacattaccaaactgtatgtggtattaggtttttttgttgttgtaaatttaagtaataattaagtgaatgatttagtttcatgttgcatttctaagtactaatatccgcaactgtatggtattaatcatttatatgttgctaaaagtagtgaaagtggtaatgtggtatacattgaagttacaatagtgatcctttttcttatatcactaaaaaaaaaaaaaaaaaactcgagactag

SEQ ID NO: 39903 - DNA, 738 bp, Glycine max
  unsure (1)..(738): unsure at all n locations
  Clone ID: PAT_MRT3847_136032C.1
aacatgacttccttaagctccttagtgctgctccttgcagctctaattctattccctcaagttcttgctgactatgagaaggccccggtgtacaagcctcccattgagaagccaccactttacaagcccccaattgagaaacctcctgtttataaacctccagttgagaaaccccccatttataagctctctgttatagaagccaccagtgtacaagcctccagtagagaaacccccaatttacaaacccccagttgaaaaaccaccagtatacaagcccccaattgagaaacctccagtttataagccaccagtagagaagccaccggttgagaagcctccagtctacaagccaccatatggaaagccaccatacccaaagtaccctccaattgatgacacccatttctgaaggatgtcaaggggtgtattaagtatatgctaaataagaggtgctaagaatgtagtttatagtttgcaaattattgcaaggattgctcttagcttcttcatttcaagcatttgtttacactttacagtgctatggcaaatataagagtatcatggatgtagaacggggaaaaaaatgttgcttcgtactccaaattatgattaatagaactttatattgatccttaaaaaaaaaaaaaaaaaaaaaaaaaaaaaaaaaaaaaaaaaaaaaaaaaaaaaaaaaannaagggcggccggtttaaaagaatccaggttaaggaaggggg

SEQ ID NO: 39904 - DNA, 332 bp, Glycine max
  unsure (1)..(332): unsure at all n locations
  Clone ID: PAT_MRT3847_136033C.1
tttgcgtgatacaacatttgatgttcaatatttnnatttttgggcatagaagccggaaacatcaaggccacagccttaggaagcaaaaacgggctctaaagaccgctccaccaacagttactggaatataacaaggttctgcggtcatctctccatgcactctactctgagaggggcaacatacacatgattttcctcacacgttacatggttactgggccacctataaaatagggactatgtgcatagacgctacaatgtaagggggaacttggttcatcagggctggtgggcggacctggtgaatcgcacctgcattccctgaagggcac

SEQ ID NO: 39905 - DNA, 1190 bp, Glycine max
  Clone ID: PAT_MRT3847_136034C.1
aacatgagtaacatgacttccttaagctccttagtgctgctccttgcagctctaattctattccctcaagttcttgctgactatgagaagcccccggtgtacaagcctcccattgagaagccaccactttacaagcccccaattgagaaacctcctgtttataaacctccagttgagaaaccccccatttataagcccccagtagagaagccaccagtgtacaagcctcctgtagagaaacccccagtttacaagcccccagttgaaaaaccaccagtgtacaagccaccagttgagaaccctccaatttacaaacccccagttgaaaaaccaccagtatacaagcccccaattgagaaacctccagtttataagccaccagtagagaagccaccggttgagaagcctccagtctacaagccaccatatggaaagccaccatacccaaagtaccctccaattgatgacacccatttctgaaggatgtcaaggggtgtattaagtatatgctaaataagaggtgctaagaatgtagtttatagtttgcaaattattgcaaggattgctcttagcttcttcatttcaagcatttgtttacactttacagtgctatggcaaatataagagtatcatggatgtagaacgggaaaaaaaatgttgcttcgtactccaaattatgattaatagaactttatattgatcctaaattactgtagagtgatgcttattacgaaagtgaaaccacaagaattgtacgaaatgtaaaatggacggtgaatgttgtaatttttaaaataaatattgattaaaatttttttaaaacatgtaatgtaggatttcgtggaaatcaactgtcgtgtgataataacgaaatccattttcttgacaaacaacattttccattactttttacaacttaagtataagggtgcatttagaatagttgattttgatttatcttgtgacaaatatttctgaaagagttttataaaatttttgaaaataatgtgatacccactgtacagaacttttacgtcagtgcttatgataaacagttagacattattggacaaattctaaattaattaacagctataagaaaaaaataataaaataagtcaaacttttacaataatttcaaattaccttatgcatctcgaaattcagagatgttatatggggaaactttt

SEQ ID NO: 39906 - DNA, 259 bp, Glycine max
  unsure (1)..(259): unsure at all n locations
  Clone ID: PAT_MRT3847_136035C.1
gttgtgtctttttttttcaaatcacgggaacttgtgaagtaaaactctcttgaattaaaatcgttgttgtacactctaacccccttaaaacccctgacatttgttcctcccatccacatgaattggcatttgttcccctaactagaacgttnnnacaataacgaggaggggctgcgatccttcaggatactttttcaccttttccgccctttccgccccccttctttgttcttaaacctccctttttccttggcccttt

SEQ ID NO: 39907 - DNA, 788 bp, Glycine max
  Clone ID: PAT_MRT3847_136036C.1
gagtaacatgacttccttaagctccttagtgctgctccttgcagctctaattctattccctcaagttcttgctgactatgagaaggccccggtgtacaagcctcccattgagaagccaccactttacaagcccccaattgagaaacctcctgtttataaacctccagttgagaaaccccccatttataagcccccagtagagaagccaccagtgtacaagcctccagtagagaaacccccagtttacaagcccccagttgaaaaaccaccagttgagaaacccccagtagagaagcctccagtttacaagcccccagttgaaaaaccaccagtgtacaagccaccagttgagaaccctccaatttacaaacccccagttgaaaaaccaccagtatacaagcccccaattgagaaaccttcagtttataagccaccagtagagaagccaccggttgagaagcctccagtctacaagccaccatatggaaagccaccatacccaaagtaccctccaattgatgacacccatttctgaaggatgtcaaggggtgtattaagtatatgctaaataagaggtgctaagaatgtagtttatagtttgcaaattattgcaaggattgctcttagcttcttcatttcaaacatttgtttacactttacagtgctatggcaaatataagagtatcattgatgtagaacggggaaaaaaatgttgcttcgtactccaaattatgattaatagaactttatattgatcctaaattactgtagagtgatgcttattacga

SEQ ID NO: 39908 - DNA, 135 bp, Glycine max
  Clone ID: PAT_MRT3847_136037C.1
atttgcaatcccttctagcagaaacaatagataactcgcgtcttctgttgtccattttgatcaagcatcttgcctcatgatgattgttgctgaaaagccgatacttcagactgatcttattaacaccaccacgca

SEQ ID NO: 39909 - DNA, 417 bp, Glycine max
  Clone ID: PAT_MRT3847_136038C.1
ccttcgcgtctgagctctgcgagatcttgagtcgccgatttgtaaagatgagtaagcttgagagtgttgctttgcgtgaagccatctcaggaatcatggccgattgcaaggagaagaatcgcttatttgtggagaccattgaactccaaattggtttgaagaactaccatccacatatggacatgcgtttcagcggctacgtaaagctgccccacattccttgccccaagatgaaaatttgcatgcttggagatgctcatcatgtcgacaaggcacagatgattggactgcactggatggatgtagaagccttgaacaagcttgaccaaaattcgaagttggtgaaggagctagctaaaacctaccatgcttttgtagcagtgtgtaacaggaaattaaacatattcctcgtttttt

SEQ ID NO: 39910 - DNA, 281 bp, Glycine max
  Clone ID: PAT_MRT3847_136039C.1
cctatacatccgaaaaaaaaaaaataaaaaaaaaaaaaaaaaaaaaaaaaaaaaagaaaagaaaaaaaaaaaaaaaaaaaaaaaaaaaaaaaaaaaaaaaaaaaaaaaaaaaaaaaaaaaaaaaaaaaaaaaaaataaaaaaaaaaaaaaaaaataaaaaaaacaaggccattaatttaggggcaagtcttaaagcttctgcctaatttacaccttaaaatttcccgagactccttttatgactgcatgtatacagtgacatgaattgacttttaaaacca

SEQ ID NO: 39911 - DNA, 301 bp, Glycine max
  unsure (1)..(301): unsure at all n locations
  Clone ID: PAT_MRT3847_13603C.1
aacttgccgcccgaaaaaaagccttttcacccctaatttttttgtttaaagagaaatattttgatgctccacaatataaatgcccagcaaataacaagactggagggtcattacacattatgggaacactaaagacgtacatgaaaaaaattttaaaaactccctcggcgaggggggggnnanccccacaaaaaaacaagagaaaaaaaaagccccccnaggggggggcagagggcccaaaatttctttgaaaaacccgggggccatctaaacaaccatgctatgcaaaaagcaccatggg

SEQ ID NO: 39912 - DNA, 473 bp, Glycine max
  Clone ID: PAT_MRT3847_136040C.1
aaggattctccacttggtttcttttctatttatttcttttaaaatacaatgttttcttttgctataactaacgagagaacaaaattatcctagtacaataaccacataggctcagacacttaatatttttttatggtgtttggaaaattatatttttatatgtattgttggatgaaggcagcacagtcttcagacttaaaatgggagaaactttcaatttcaataaaattgaaattttctctttacaataaaattgaaattttctctttacattagcattatgtttaccttttcttttctggtgtaaaatgaatatataaaactgatttctttccatctttgctaatgcaggtgttgtcttactgttaagggactgactgacaaattcaaagaaaaggatactgcgtattctggctctgcaaccttcacctatgaatcgtttatgctgacagtcctgccattcctaatagctt

SEQ ID NO: 39913 - DNA, 371 bp, Glycine max
  Clone ID: PAT_MRT3847_136041C.1
gacaatgagaaattgcattttcacagggcatgggggtttgaaagatggaaacattaacacaatttccaagcgtactggaagagttgatgatacataagtgatggcccatctttcaagataaaggccgaaaggcaacacaataaccaagttttttcctttcccatctatatttactagatttgacttttattctagatgggcaagattggtgctgcacaatgctccaatttctgagaagcagcacctgggatcaccttttgttgttggtggtgccaccttcccaattcacttttcaatttgcactttttggagaatatgacattttttcacttcacaaagccaattcctttgtaggctttgttttcttaatt

SEQ ID NO: 39914 - DNA, 426 bp, Glycine max
  unsure (1)..(426): unsure at all n locations
  Clone ID: PAT_MRT3847_136042C.1
ggnnntgcaaacatatgtatgaggaactgtgtggaatgccaataaactatataccgnnaacagagttgtcttgtgcttannnacctctccttatcacagatactctcaagaaatactgagagatcaaaattgctcttgctttttatactatataaatatatttgatggagtaagatnnatctactatccacactaccagcgagactcgctactcacccacattatatataactacgtatctatctgtacttttttgctttagccatctttttctttctattcttatcagccttaacgactttactnnnacatgctactctttactactacttcaccttcttcttatgctctttcctnncctcttttctatagactgcttttatctgcgggatcatgtacttcactttctgnngacgaatactcttg

SEQ ID NO: 39915 - DNA, 216 bp, Glycine max
  Clone ID: PAT_MRT3847_136043C.1
aattggtaagggcttccgaacaaaaggaaagagtgataaatttttgggccgaagcctgatgttgaagaaaataccccccttaccaatggaaccggccaaaagaaaacctggcttaaggaccctcaccttattttaaattttacccctggaggataattcctggaagaaaaaagaaatttaaaaccaaagggataccaatacccccttggcaataaa

SEQ ID NO: 39916 - DNA, 547 bp, Glycine max
  Clone ID: PAT_MRT3847_136044C.1
attttttggtatttctaactcatttgggtaattacatgaaaagtcataggattaggccaccatagttatcagctgttattgtagatatatctatagtttcaccaatgtaatcagatatatatagataatgcatgtgttgtcatgttctggtaagccattatgggtacggataacccatcattactcatctagaaatacaattactcaatactgaacaatggaagccgttgttattggacttggctcctaaggagacgtatattatagccatcattgattcattataaaaactcagagttagtgataaaatttagtgattattattattattattattattatttactaattttagggttattaaagttttaatggattttttttaaatgtaaataaattattttgttatcaattttaatctttctagtagtgattgttaattagtaattagaccctatcgctagttggaccaataaatcaggttcggggaattattactacaattaggtgtgaagtatataataggcatatgcgttagaaaaattca

SEQ ID NO: 39917 - DNA, 323 bp, Glycine max
  unsure (1)..(323): unsure at all n locations
  Clone ID: PAT_MRT3847_136045C.1
gtcncatntacgtaagctcgganttcggctcgagtggtcctgaaggatctgggtctgctgctggagaaagcaaacccgttttgactgaagaggagaggcaagaacagactaagagaatgttggaacttgtggcgcagaagcagcgggaacgtgaagaaagagaggagcgagaagctttagaacgagagattncagcggaggagacaagggcaagagctgtcagctgncacgacaganactacaggaagatgagacacgccctcagagcaagtaggtcctgttcctcttctccccgccagnagccccctacgaagaggnagttt

SEQ ID NO: 39918 - DNA, 759 bp, Glycine max
  Clone ID: PAT_MRT3847_136046C.1
gagaagaaaagcataacaagcagagcacattgtttagtgctagcattgccaggtcaaggccatatcaatcccatgcttcaattctccaagctattggagcgtcaaggggtgagaataacacttgttactactcgtttctattccaagaatttgcacaacgtgccttcttccattgctcttgaaaccatttctgatgggtttgatgaagttgggccccaagaggctgggagccccaagcctatatagatcgcttgtgccaagttgatcaagaaacttttgctgagcttcttgagaaacttggtaaatcaaatgaccatgttgattgtgtgatttataattcatgcttaccttgggcactagatgtggccaagagatttgggattgctggagctgcatatcttactcaaaatatggctgtgaatagcatatattaccatgttcaattggggaagttgcaagctccactcatagaacaagagatttcccttcctgccttacccaaacttcatcttcaggacatgccttctttctttttttatgaagatttgtctttgcttgatttggtagtgagtcagttctccaatatcgacaaagctgattggatcctatgtaacaccttctatgatctggataaagaggtaagaaaaaaaatatagatacattatatacttttgtatttaacttaaatgtctggtttttgtgtcaaggtacactaccaggatattaaatataaattctttgatcttattgatgtaaaaa

SEQ ID NO: 39919 - DNA, 516 bp, Glycine max
  Clone ID: PAT_MRT3847_136047C.1
tttttacaatttagcccttaatcgttaattatttatttattagtccctacataagtcacatgtcttttttcacatgagacattaattctaacaattagtcccttaacttccattcttttctcaaatccttcaggtagccatttctctcccttttgttctttcgtcttccccgcaacccaaatgaattgttgtcccgatgcctcaagtcccatagcaatctctcgaagctgagaatcagacaactttaccgcacttccaaaacacaagtaaacaactgaattgggtttctttgtgtcaagccactttaggcattcatgctcatcaatagatgcctcctttactctatgagctttctcttcgttatctttgttgcaaagggataagggaccaatgtgccgcgcttttcttccaagcacgttcctggaatgatctgcatagaccttctcaaggtcatagaagttgttaacaacaaccccatagctactcaactctgagtgctatgctgcctccatcaat

SEQ ID NO: 39920 - DNA, 271 bp, Glycine max
  unsure (1)..(271): unsure at all n locations
  Clone ID: PAT_MRT3847_136048C.1
gaaaagacnggggagaagaatcagttccattaaccccaatgaatccagtggttacaatcctgtatttataaactgatcagttagaacaactaactaactctaactgacttagtaactaactcttaactaaataagctaacctaactcaggttataaactacccaggactgcagtagaataactgcatgtcctttacagtactccaatatttccaaaatgcccatagtagtgtttctatttttagaccttattggagcataggacagcgact

SEQ ID NO: 39921 - DNA, 1896 bp, Glycine max
  Clone ID: PAT_MRT3847_136049C.1
ctcgagcgaatcaaagtgaaacagttagatgtttttggtggtaagagcctgtggttcttcttctgcacatattcagcccactctcacaccgcagcgtagtagcataaacgtcgtcgttagatgctccatcagcagcgtgcaggagaaagaagagaagggcactgaactggactcttcggtgtcattccctctgataagggcggcgaagagggtggttctggtgaggcacgggcagagcacgtggaacgccgaaggcaggatccaaggaagctccaatttctcggttctcaccaagaagggtgagtctcaggccgagacttcgcgccaaatgctcatcgacgaccacttcgatgcatgcttcgccagtcctttggctcgatccaagagaacagctgaaatcatttggggacctcgccacgaacctatcatccctgactatgatttgagggaaatcgatttgtattcctttcaaggtctgttgaagcatgaaggaaaagagagatttggttctgcttttcgccaatggcaggtggatgctgcaaatttcatcattgatggtcattatccagttagagagctgtgggaacgtgctagaagctgctggactagaatcttagctcatgatagcaggtctgttcttgtggttgctcacaatgctgttaatcaggcccttgttggcacagcaattggtttggggcccgagtatttcagaacattacttcagagcaattgtggtgttagtgtgctggatttcatcccgagatctgagggtgggtctccacatatttgccttaacggcttaaatcagacccctggttcacctattgctggtgggaaatctggaggtagagagtcaagtaagcggatcatacttatttgtaatggatcaacgcaaggaaatacagaggatgtttttccttttggtggtgatcaaccattgaacatgctcggagtcatacagtcccagaaatctgcagagctacttcttgatttaaaagtgaattccataattagcagtcctaacaaagcttgtgttgggacagccacgatcatctcccaggtacaagaagctgcagattgcttgggtgctgactgtgtgcctcgatatgttgagatgaagcagatggggaactttgatgttgaaactctcttcaaacaatccgaaatggatatatccaattttccgccatttcaacctgggtggttaaatagagttgatgatggattgagaacaacattatgggatcaatctggaaaaacctggcaatccctgttggatgaaattgatgaatcgaacacagaagttgtagttgcagttggtcatcctgcaaagcacatagcattgatggggcactgccttaatttgacgaaagaatggttgggatcatttcatctcgacgccgggagcgttagtgttgttgacttccctgatggacctaaggggaaaggtgtcataaggtgtataaattatactgcacatttggggagatggtccatacccattacaagatcaacagaggatggtgaagagttctaagtgtaaacttgtgattccaaaattgaattgaaatgacacccagcactcaattgaagagtttcagagggttaacgtggtcatgattgttgaaattttaaggcatgatgatagtaaaaatgaaatcttatatggtcatggggttgacctgggaatgggacaacactgtcggttttgcttgccttcctcgtaatgtatttcacttcaaagattagatattacttggtgtgatgatttgtgcagttcgcatccaagattacattgtcagttctcctgtatttatcttttctaatgctattttttttttatatatatatatatatataaaatcttttcttatagcaattcagaatattggtgct

SEQ ID NO: 39922 - DNA, 151 bp, Glycine max
  Clone ID: PAT_MRT3847_13604C.1
cgaaaatccagtttcacctcggcaaggagaaagaaccccacaagtttccacttgccccaattcactttcatggcttcattatttgttggtaaccaacacacatcatttaataatgataataagaagaagaagtagaaggagaaaaagagaa

SEQ ID NO: 39923 - DNA, 690 bp, Glycine max
  Clone ID: PAT_MRT3847_136050C.1
ggtttgattcactgcatcttcttaatcaaggaaatcacggtcgcgtgtgtgccggaaagaaagtggcctgtgatctccggtttctctttctcgaccgtgtttccttggttaacgatatgtgctggatcataggttatacgttcgctgaacaataatcgattctctttctctctttctgatgtaatgatccatttgattttatttttttatgcataaactataaatcatgtttttcttagtgatccactcggttgcgatctaatccttttacctctttcccttgtgttgtgtttgaaactcgctgaaggtccttgatctaggtttcacttcagttacttttcgcttttggttttatttcggttattggtaactaaagacacattgttgttctgtttaggctttactgtattcgattcggggaatttttttaatctgaatctagcctaagatttaatctccaatttcttatttttctttttttatatgtttattagaaatatatttcgtgtttacacagattcgattagggtaattctttgaaatctgaaactcgcgtaggttttaatctgacaccttgtcgttctgtttacgtgttttgattcggatagtttttttgaatctgaaactcgcctacgaatagaatttcctgaatttggatcttttttatttattagaaaaaagtatttgaag

SEQ ID NO: 39924 - DNA, 433 bp, Glycine max
  unsure (1)..(433): unsure at all n locations
  Clone ID: PAT_MRT3847_136051C.1
gccacggcaagtacatggcctgctgcctcatgttccgtggtgacgtcgtccccaaggatgtcaacgcctccgttgccaccatcaagaccaagcgcaccatccagttcgtcgactggtgccccaccggcttcaagtgcggtatcaactaccagccccccaccgttgtgcccggcggtgacctcgccaaggtccagcgcgccgtgtgcatgatctccaactccaccgccatcgctgaggtcttctcccgcatcgaccacaagttcgacctcatgtacgccaagcgcgccttcgtccactggtacgtcggtgagggtatnggaggagggtgagttctccgaggcccgtgaggatctggctgccctcgagaaggactacgaggaggtcggcactgagtcctccggcggtgatgccggtggcgatgccgctgagggcg

SEQ ID NO: 39925 - DNA, 354 bp, Glycine max
  Clone ID: PAT_MRT3847_136052C.1
cacaaatttatcaaccattctcatttatcgagtcatcacattatcgtgattgtatcactcacgcaccatgggcgctcaaacgcatttgcccctcttttctgtcaaccacctcatagagacctaaacaacaacctacatctacatgatgctgctcaacgacaacacgatccaacttacacacatggcacaaccgaattatcatcatcatcatctgagacccacactgagtactatacttgctcacactaccttgtacccttacaggatccacaagctcaaattcttagttccatgccttatacatattcaactatgtggatcaaggcatattaataacaccctgacgactttcgc

SEQ ID NO: 39926 - DNA, 295 bp, Glycine max
  Clone ID: PAT_MRT3847_136053C.1
ggcaaaaacgtatgataaaaatggggtgtttccatctcatagtggacagtccgtgctttgtagtggttgtggttggagtgcttcgagtctcgttacgatgcacaactagatcgctcgttttacagagacacgtgtcctaacgttcattccattgtgcgtgaagtggtgaggaacgttttcaagatagatcccggcaatcgtgcgattcgcaggagacgtcagctttaggagtgctttgttcagcgatctgacgcatcagttctgtggaacagcactgctatcatagatagtgagg

SEQ ID NO: 39927 - DNA, 337 bp, Glycine max
  Clone ID: PAT_MRT3847_136054C.1
gtgtgtggtttttttttaataaagcaatactcttgacacaagaatttgtttttggagaaaagtaatttccacttcaaatagaagttttttacaagttttcccattggatggggagggaaaaacctcccaaaaacctttttttccccctttttggtgttttttggcactttttgggcccgtccaaatcaaagtactggtttgaaacttgaatatgaaaattattggggttggcctttttaacctttttccaaatcccagataccttcttgtgacaaaatcacaagccttagagattgcgacgacaatgcagactttggcacatttttaatcatggggc

SEQ ID NO: 39928 - DNA, 327 bp, Glycine max
  unsure (1)..(327): unsure at all n locations
  Clone ID: PAT_MRT3847_136055C.1
gtcgcangcacgcntacgtnagctcggaattcggctcgagcggcaagnttanaggntncatgtgnnntnttgangtgcntggctgtgatgantgnancaangctggtgccgagccgnggtcatgtcnatgaatgtntcngtnaanctannnncgtgnctntcntacctgatncanggtgganatgtgccagatcgtnctgtagcggagtgaggaanattctgggttntgccagcagnacctttnannnncaaaccgtgtgcaaatgtcttcancnngctgctaatnnctatggcatcaacgacnantnngntcaggnantcgccgcc

SEQ ID NO: 39929 - DNA, 463 bp, Glycine max
  Clone ID: PAT_MRT3847_136056C.1
cgtactgactccacaccttagctcattttataaaaccattatttatccgccctggtacccaaactaatagaggctgattcttcagtgcatgactcggtgagcttcgttctagcatctcttgcgagtgctcgatcgtgctcgtacaccttcaggcgcttaacactgtgcagacttatactttgtcgttgcccatcgtgtctgcctcttatgaatacggagtgcgccgagccattcaacatgaacaattgctgggcgctctcttactcggatgggacatgcatgactgctttgtcatccgtcgtgatgcttatatgctgaaatatgatacgcgcagcctgcttgaagatgaagcggaacaatctaacagccaattatctggagggagcatcgcgagtacaagacttaaagacgctgtggaaaaagaacgacctagtgtaacgatctgtgctgatgtatttgcttt

SEQ ID NO: 39930 - DNA, 370 bp, Glycine max
  Clone ID: PAT_MRT3847_136057C.1
aagagagcactccctctgctgatagctgatatatacattaagctttaaaaattaaaaatagtaagaaaagaaatatcttaaagcaattggtttgtgtgtactgcagtgagtacagtctttgacttgacgaattctcacgtgaagttccgtttgaaacagaacacaccagaagagaaggccaaggccggcacactgtaagtttcgatttcaattccgcacccgattcttccttccttcttgatccgcacatttcattgttcttcacacagttccactcttccatcacgcggatcgcaccgcaataaacgacacccagattgatcgcgattcgcccaactgatttacaaagtggaaccgcaatggaggcagc

SEQ ID NO: 39931 - DNA, 103 bp, Glycine max
  Clone ID: PAT_MRT3847_136058C.1
gcgtatttgggcagcctaagttctattgaatgaggcattcatggagggtgattatcccggccgggtgatcatttgcgttttacgatacgctctctaagaatca

SEQ ID NO: 39932 - DNA, 523 bp, Glycine max
  Clone ID: PAT_MRT3847_136059C.1
ggctcgagtacgaatggtccgggcgtgctgcctaggacttatccttagtcgaatcgccgttatcgggccccagggaactccgcgcccagccgcggcaagttgcgagctcgtggctttatcgcaccgcggccgtgcgggcgcggccctatcgtcccgcgtacggcttaaccggctgcccggcgcgctggataccgcccggccccgccgagacggaaccgggaggcccgcgccgggaatcggccgcgccgaagcgcgagccgactctcgttgcctgtccgtgcagcgacggcggacggcaccgggaccgaccgaacgcccgaggacgctcgacggccccggcgtgactccgcccggggtgaaccgtcgtgtttctcgcccgtacgtgttaggtactgtcctcgctttccgctttaaaatagactgccccctctcggggaacccgtctccgcgttccgagactcggtacagggtcccgcttcagacgctgtcagaggtgggcccttctgacgtagtcgtgcaccat

SEQ ID NO: 39933 - DNA, 269 bp, Glycine max
  Clone ID: PAT_MRT3847_13605C.1
ggaagaataacatgcagtattaccgggggggggcggctacaagactccggttatttgaaaatcaatagattgcaacttgggttaaagcacccaccaagaacacactgagttctggtatctgcgtcaacctttactttcggttaccagttgatccactgattacctgaaacacagcatagagtagtgcttgaaattccttcgttccatacttaatgtacgtatcaacatgctttacaagctcaggaacaactatgaaaccttgcaacaaa

SEQ ID NO: 39934 - DNA, 1103 bp, Glycine max
  Clone ID: PAT_MRT3847_136060C.1
tcgagaactaaaactaaaacccagtatttctgaacatgctaatggacatgaactggttttatcggaattcaggggggcccaaatattaaacaatagaattttggctaatgccggaactggaatgtgaacaaacatacacataccagcagtaacagacacgtgtctgatttcttttttataaaataaatagaaaataatcggatgagtatgaatctagtggtgggggttctgcggccaccgcttattgcatttcggcgaaacaaaatctccataatctcgagagtgaattcaattgagtcgtcatcatcatcgcccatggatcagccgaagcgagtggttgtctgcggcggcggagtaatcggagtctgcacccgcctctctccgaagaactcgagggtccgcgaactttctggcggagaagggcgccgctgtcacgctcatcgagaaatccgacgtggcgtgcgccgcgtccggaaaagccggcggattcctcgccctcgattggtgtgacggaggaccgttggaagagctagctcgcgccagcttcaatctccaccgttcgctctccgaagaactcgagggtccgcgatcgtacggttacagagccctcaccactctcagcctcaccgtaacggaatccgaaggctcctcttctgctacctcaacgttgccgtcttgggttgacggaccagctcgtggtgctaaaacgattggaaccaccgaaacgacggctcaggtgcatccgaggctcttcactcgcacgctgattgatagagcggtggagaagcatggagtgaaggtggagattgcgaaattggaacggttggttgtggcagaaggacgagttggatcggtggtgcttgaaggaggacgagttttggaagcggatgctgttgtgttggcattgggtccgtggtccagtaagttagttctgttatcatcgctgtttagagtttatgggcttaaggcccatagccttgtgttagagcccagagaacacagttccataactccacacgcgctttctctcacttattatccctccggacgagaaacacctcttgttgacctagaagtgtatcctcgtcccctcgagccgaatt

SEQ ID NO: 39935 - DNA, 176 bp, Glycine max
  Clone ID: PAT_MRT3847_136061C.1
gcttcacagcaaaaacagcaagcaaagttgcgtttgaagattaccatggttgtgctaaaagtttctttgatgcgtcttatccttgtgggggttcaagctgaacttatgaaattaaacgtcgacatgactcatcagacgtcaagttataatgatgggaagtaatcacttgcatgctg

SEQ ID NO: 39936 - DNA, 1553 bp, Glycine max
  Clone ID: PAT_MRT3847_136062C.1
caatcttaatattaatataaaataaaataaatactttaactacatgaaaaatagccttaactctagataataatgatgataacttgttgcagatagttctggtcagaaaacgtgcagaataaaggagacaagtgtctggtaaaaaaagagagaaaaaaaataaaataaaaaataaggcgaatgaatctggtggcctggtggggagtggggactccgcgatcctcgacagtacaatttaattgagttcccatcagcagtgcgggagtccatggatcaccccaagcgagtagttgtctgcggcggcggagtcatcggagtctgcaccgcctactttctggcggagaagggcgccgatgtcacgctcatcgagaagtccgacgtggcatgcgccgcgtccggaaaagccggtggattcctcgccctcgattggtgcgacggaggaccgttggaagagctagctcgcgcgagcttcaatctccaccgttcgctctccgaagaactcgacggtccgcgatcgtacggttacagagccctcaccactctcagcctcaccgtaacggaatccgaaggctcctcttctgctacctcaacgttgccgtcttgggttgacggacgagctcgtggtgctaaaacgattggaaccaccgaaacgacggctcaggtgcatccgaggctcttcactcgcacgctgattgatagagcggtggagaagcatggagtgaaggtggagattgcgaaattggaacggttggttgtggcagaaggacgagttggatcggtggtgcttgaaggaggacgagttttggaagcggattctgttgtgttagcattgggcccttggtccagtaagttggttttgttgtcttcgctgtttagagtttatgggcttaaggcccatagtattgtattagagcccagagagccaagttccataaccccccatgctctctttctcagttactattcttccaaacgtggaaaatctcttgaccctgaagtgtaccctcgtcccacaggggaggtgtatatatgtgggatgtcgaaggaggaagaggtgccggatgatccagaggagataagaggaaaccctgaatcgattgcgatgcttaagaaagtggcgaagacggtgtcgagctatcttggggaaggagtggcacgtatgaaggcagagcaagcgtgtttcttgccgtgcacggatgatggggtacctgtcataggagaggttccaggggtgaaggggtgttatgtggcaacggggcataactgttggggtattctcaatggtcctgccactggtgctgctgttgctgagcttgttattgatggacattctagcattgttgatcttaagcactttagtcctgccagattccttgggcgtagaaaggcttagacaatagacaccctgagtgttagcttaataactatgaatgttgttttcaattaatttggatgggtagaaaaaagtgtagtaactggatcatcatttttatgatcaaatctgtaatttgaaataaaaaaataatgaatatatggcatatggtagagcccat

SEQ ID NO: 39937 - DNA, 1042 bp, Glycine max
  Clone ID: PAT_MRT3847_136063C.1
tcgcctgccggttcgcctcggatgcgaccgccgcgcgagaacgaagttccactgtcccgaagctgtcaacaatggcgatttccggcgatctcagagtctcagcaacacttcctctgtatcgctcccactcgcctccactccgaacctcttctcagtcttccccaaaggtagactttcatcgtttcttgaacagagcttgtagcatctctgaattcactccaaaatgcccttacctgacaattgtacgatgcaatatgcgtgggtattgcaagccagttgctgcggtccttggaggtcctaaatttacatcaaattcagttagccaagaaaccgagaactttctccttgatgctgttaaaatgaacttctttgagcggttaaatttggcttggaagataattttcccatcggcaacatctagaaaaaactccaatgctaggattgctaagcaacgcttgaagatgattctgttctctgatcggtgtgaagtaagtgatgaggcaaagcgaaaaattgttagcaatgttgtgcgtgctctatcagattttgtggaaatagaatcacaggataaagttcagctgagtgtctctgctgatacagatcttggaactatttactctgtcacagtgcctgtacggcgggttaaaccagaatatcaagaaatggatgaatttgggacaataacaaatgttgagtataaggacaccggagagacttctggttctgttgatgttacatttgatttctatgttccagacgaaaggtcttgattttgagttgaaagttcttgaattttgatttctttgtcaaaagttagtgtctgaaatgcctaccagtgaaagctaatctggatttctgtatatatttttaaattgaagcttacattagggtgacactagattttgatgagaagttttgtttttgtactatctatatctgttagtttggtttgttgcatcattgaactaaatttggtatgttgtcttttcttagcatttatgataagcttatgattgtatgaatcattattattcaaaaaccc

SEQ ID NO: 39938 - DNA, 320 bp, Glycine max
  Clone ID: PAT_MRT3847_136064C.1
atgtttgggtggtgtgtgtgcttatttttttttggtgaatgaagattggtgcttttggaggaggatatcggtcgttttataccgattgggattacgtgtgaagcaaaagcagcgggacaaaattgattctggatggtgactaaaagatcagcttttttttaaacgaggtggagcacaactcttgctttttctggaaaaaagaggacccccccacaaaaaaaaaaaggatggacaacccctagcgaccagatcggcgttatctcccccgacaaaaccaaggtctgtaacaaaaacatgaggacatacaccatccgcatgaa

SEQ ID NO: 39939 - DNA, 999 bp, Glycine max
  Clone ID: PAT_MRT3847_136065C.1
ctcgagccgattcggctcgagtacggctgcgagaagacgacagaagggggagaacgtcgaagttccgtttctgggagaacactatcccgaagctgtcaacaatggcgatttccggcgatctcagagtctctgcaacacttcctctctatcgctcccactcgcctccacttcgaacctcttctctcccttcccccaaggtagattttcatcctttcttgaaaggggcatgtagcatctctgaattcaccccaaaatgcccttgcctaacaattgtacgatgcaataagcgtgggtattgcaagccagtttctgcggtctttggaggtcctaaatttacatcagattctgttagccaagaagccgagaactttctccttgacgctgttaaaatgaacttctttgagcggttaaatttggcttggaagataattttcccatcggcaacatctaggaaaacctccaatgctaggattgccaagcaacgcttgaagatgattttgttctctgatcggtgtgaagtaagtgatgaggcaaagcgaaaaattgtaagcaatgttgtgcgtgctctatcagattttgtggaaatagaatcacaggataaagttcagctgagtgtctctgctgatacagatcttggaactatttactctgtcactgtccctgtacggcgggttaagccagaatatcaagaaatggatgaatttgggacaataacaaatgttgagtataaggacactggagagagttctggttctgttgatgttagatttgatttctatgttgcagacgaaagttcttgaatcttgatttcttggtcaaatgttagtgtttgaaatgcttaccagtgaaagccaatctgtggtgctgtatatattttaaaatctggttctgttgatgttagaatttttgtttttgtactacctatatctgttagcttggtttgttgcatcattgaactaaatatgttatgttgtcttttcttacttcttagcatttgcg

SEQ ID NO: 39940 - DNA, 914 bp, Glycine max
  unsure (1)..(914): unsure at all n locations
  Clone ID: PAT_MRT3847_136066C.1
accaggggtgccaagcgcccccccaaccccctggaccagcagcctggtgtgtctgccgggtggtccgggggcgcagtactgcgctgcttggccaacgggtgcagtgctgagcgctgtcctgcgctgggcttgctttcttgtgctctgggtcgtcttgctcttgtgggtagctgcggatgcctggtgctgctccttgcaccagcacctgctgctttgtgattgatgcccgtggtcgggaattgggttacggtgccgtttgcgtctccagtgcagttcataactcaggcatgaactgatctgtggttggctttctttcttgtgcacaagttcgtttatatcttgtgggtaactgcaacttcatggttcagttaattgcacaagcaacttctgtatttagattgaagcccgttatagaaattcaactgctagagttactacgaaggcgaagtttgcttgctggtgaagcccctcaaagttgtagttgacgaaagggtggatggcagcatgtacatggaagatcatgtaaaccaggacaccgattgatatcttttatgtagtgatctttttattcaacgtgaggtacaaaaggataaaaaaggggcaagcgtgggctagcaaggaaaaccatgcacgttggtgtttcttgatttccctggggggcatttcttggtgttgtaagcttgctgatcatcaaggtggcaaaaaatcgttgaactgaagcctgtggatggcctttgtgaaaggcttaaatcgagtgttctttataatgttgaaactattggtttatgcattagagaggggatcaaatgtgtaattttttctgaagtaaactttcatttttgttctaaattctcnnngcatggaannntgataaaaatatgnnaactattcttctaactactagnncgagagta

SEQ ID NO: 39941 - DNA, 515 bp, Glycine max
  Clone ID: PAT_MRT3847_136067C.1
ggctcgagggacacaacacaacaccccttgggaccgacacacaacacaccatcaaagagaagagagagagagagagaaaacgagagagagagagagaaaacgagagagagagcgagagagatggcaaacgaggcgaggaacagccaggtcttgggcaagatcaacaagaacatcgaagcgggaaacttctacgaggctctccaactctacaagcttctcaacagcaggttcgtcgggtcgaggaagtacaaagatgcgaacgacctcctgcggacgggcatcaccaccttcttctccaaaggacagccgacgctggccaccgagctcttcacgcagctcatcgacaacttcaaagccaacaaagcaccgctcgatcaaagccatttttggttgatcaagggctttttttctcattatccagccactcatgacacagggaaaagttcggtcatgagagtcattctaaaatgggcagaggactcaaagaacaaagatggggaggaagacttgcaggg

SEQ ID NO: 39942 - DNA, 434 bp, Glycine max
  Clone ID: PAT_MRT3847_136068C.1
gcaaaaatgtgttgaagtttcttgttgatatggataatgttgggattccactaccgcgggctgatcttgagcggcttgcgtgggcttgtacccgtgaagatcactacattgttgtgaaagagctgtacaaccggataagagaaaggtatgataagatcagcttgtctgtctgcaaccatgcaatttggttgatgggaaaagcaaagaaatggtgggcagctttggagatatatgaagatttattggacaaagggccaaaaccaaataacttgtcatatgaactgattgtctctcacttcaattttcttctcagtgcagccaatgagaaaggaatttggagatggggtgttaagttgttgaacaagatggatgataaaggcctaaaacctgtatgtagggaatgaaatgcagttattgtgggctgttctaaagtt

SEQ ID NO: 39943 - DNA, 268 bp, Glycine max
  Clone ID: PAT_MRT3847_136069C.1
tcgccctcgcgtccgcccacgcgtccgtcacttgttggggaactgaaaaatgtgggcatatattcatgatcttgatgagctcttcaattgttttatgcgacaagaacttaatcctctttaatcagaaactgcttttgaagtctttcgtctcgcatggttcatcatccaactttgtgattcagtttggcagcaaaacgaggcgtcttaatgggttcatttcaaaagcggaaaagcattcaaggaaaagcagttggtggcagaatttttt

SEQ ID NO: 39944 - DNA, 505 bp, Glycine max
  Clone ID: PAT_MRT3847_13606C.1
ggctcgagaagctctggaactggaaccctctccttcttcctcctcgtttttcttcactcaaacatgcttttccatcaacaactactcgcctcgtagctcacaattcagtctcagaaaccgttcccattcataaggaaaaggaacaaaccctaccttctgtcaaacctacttactcccccactcctcccaatcgaggccttcgaacccctcacagcgggtaccattttgatgggactactcgcaaattcttcgagggttggtacttcaaagtctccattcccgaacggaagcagagcttttgctttatgtataccgtcgagagtcccctgtttcgtaaaccattgacgcagctcgaactggcccaatacgggcccaggtttactggtgtcggggcccaaattctcggtgctgatgacaaatatgtttgccaacactctccccaatcacattttttctggggaagcaggcatgaactaatgttggggaacacgttcgagcccaacca

SEQ ID NO: 39945 - DNA, 223 bp, Glycine max
  Clone ID: PAT_MRT3847_136070C.1
aactgaacaactaaatgaaaacctgactcataaccaaaagcgaaaaaccaaaagaattgccttttggtgtattcaatagggcaattccaattttcattatttttaataaacaaaaatgtggtttacctgaaatttattagaaaatccattttaatgggggacagctcatctgaagctcccaattatcttcattattccaatctctttggttaggtttatttcc

SEQ ID NO: 39946 - DNA, 310 bp, Glycine max
  unsure (1)..(310): unsure at all n locations
  Clone ID: PAT_MRT3847_136071C.1
tnannnagtgnangtaaagnggagaattcggctcganctcgagnngattcggctcgaggaaaacccaaagtgnttntctccnctgtctatttntntcngantgntatgnntttngctaatngtagtnntgnaagtgnaactcnaagaagngnagtgtgaagnnataatgnntnaagattnaacagangngaatnnnnntnnannnaacacannatgngaggnanttgngcanaccangaagaagnaggagncanaagnatatgngngangaagangtatatgggntanatanattagagancatantgaa

SEQ ID NO: 39947 - DNA, 2031 bp, Glycine max
  Clone ID: PAT_MRT3847_136072C.1
gcgcaagatgcgaaggtcgagcgaattgctttatcctctttctctttctctgccaacctgcacactcttcacctcgatcaaacagaaaatggcaaagaatcgtggggatccttgccattgacatctacttccctcccgcttgcgttcagcatcgagcaacgctcactctgaaatgtaagagaatatgggggttctcgatatctacatcccacttccctcccgcctgtattcaggaagtagtgattgatgatggtgatagttgacagtagtagaacatatgctattggacaaggccacatttcattgtcgatttgtgcagaagtaggtgatgtcaatgaggttttgatggcagtatattcttccctcctggaaaagtttgcaatggaccttaaacaaatggttcgtctggaaggtgggaaggaagacgggaaatgacaaaagaaaagccatcaaacctttcatcattcaaatctcatgaaaaatatggaaatacatatattgatgtatttaaattaaactaatgcaagctattgagaaaccgctgtgttcttcgttgttgcaaatggggtggagagaagcccctgggatggagcatttgcaattgtcatttacattgaccgtgcagtataagctgtaggatttgctcggaatactggttgatctgctgtttttgcgatgctaattggtactgatgctcccatttcttttgaatgcatttaaaggggaagtcatatggctcatgcctatgatttttacaagcctaatcttgccagtgaatatccagtggttgatgggaagctttctcaaacttgttaccttatggcccttgattcttgctataatcacttaagtcacaaatatgagaaacaagagggaaaacaattttctatttctgatgcagaatactttgtatttcactctccatacaacaagcttgtacaaaaaagttttgctcgtttggtgttcaatgacttcttgaaaaatgccagttttgtggatgaggctgccaaagaaaagctggaaccttttgcaacattatctggtgatgagagctatcaaagccgggatctagaaaaggcatcccagcaagttgcaaagcctcaatacgatgcaaaggtgcagccaaccaccttgataccgaaacaagttggcaacatgtacaccgcatctctttatgcagcctttatttcacttattcacaacaagcatagcacattggatggtaagagggtaatattgttctcgtatggaagtggcttaacttccacaatgttctctttgctattacgtgaaggtcaacatccatttagcctgtcaaacattgataaaatgatggatgttgctgggaaattgaagtcaagacatgagtttccaccagagaaatttgttgaaaccatgaagctaatggaacataggtatggtggcaaggagtttgtaacaagcaaggacaccagccttttatctccaggcacattctatctcactgaagttgactccatgtataggagattctatgcaaagaaaactagtgaaaatggtttggtcaccaatggtcactgacgttttacttagagaacgtgtaatacctggaaaccaggaattcaactgtgcttagcatttagaaggctgttctcgtttggattagtttcttcttaagggaagacaaacgaacaattatgaaatctgtaggagccaggtgttgttagttcaaaaattttccgaaactcttcaagtttaaatgattccaccaaaaattgtttctagcaattatgcttttgaatatgtagagccctgtgaaggattggacgttataagtttgagtactcggtattctgttaacgaagggggtcccagtttccagttacagtgattatttctttttttttcctaaaaatttaagtctttgttaaatgtcgctagttactcgagtccaaaatttatctttttcgggttttttttttttttttttttttgcattttagtgaatggaaattagtctttgaataaaaaaagaagttgcaatagcttttt

SEQ ID NO: 39948 - DNA, 438 bp, Glycine max
  Clone ID: PAT_MRT3847_136073C.1
ccacgcgtccggataggcttgctacctagaacaagagcagagccggcggtgctacacccggtcgagcatgagtgacgtgcacctgtcatgttagggcgaggccgccctaggaggagtgacaactcacgactttgtgggattctcaccatatccacacacgccgcctaagatgaaagactaaacgcctatatatgggcgggtttgatgaaccgtccatatcatggaggagattctgccaagtttaacgcgttaggaaactgctctgaaggattcacagatacctgaaatgaaagaactgtgtgaccagaagtggccaaaatacccttaaggaacggatggtgagcgcaggaggcttagcatcataatccatcacctactcatacgaatgatacatgaaggatcaaagctttagaagaaggggatgactcccacgtagaa

SEQ ID NO: 39949 - DNA, 302 bp, Glycine max
  Clone ID: PAT_MRT3847_136074C.1
gatttaaacacaaccacagcagcgtcccaaatggggtcatcttctgttcccatggcgttgtcactctactctgttaacaataacatccaccttccatccgaagccttcttcatgctactacccctacacctaccaatgatgaccctcttcttcacaaaggcaggactaaactacaagcctcatatccatgcataatttgaatgacaaggcatctcccttactcacaacagcttatttgacaaaaagtatggaggttccagaatttgctcatgctgctacatatgaattgttactttaactaa

SEQ ID NO: 39950 - DNA, 420 bp, Glycine max
  unsure (1)..(420): unsure at all n locations
  Clone ID: PAT_MRT3847_136075C.1
gcaacatctaggagcctatgtcaatctgggagcgttttatctggtaggaattcctgtgggtatcctacttggctttgttgcacatttcagagcaaagggcctctggattggaattgtcactggctccattgtccaatcgattctcctttcccttattactgctcttaccaactggaaaaaacaggcaatgatggcaagggaaagagtatttgatgctaaaccaccagacgtaaatggatcatatcacatgacgagtgcttaaagctagtttggtcagctgngnctcacatagacatagatatataattttgattnnccgtaagaaataagtcaccaaactatggtttcgcaaagaaatgttacnanacacctacgtcaacatcttggggggccnnngaaataaatgaaagcaaagaaata

SEQ ID NO: 39951 - DNA, 133 bp, Glycine max
  Clone ID: PAT_MRT3847_136076C.1
ggctcgagcaagcaggttaagggctcatctgcagactccttaccacgcgcaggtcactcagttatggctatggggatttcactaaccctcaagcagccgcgagggcatggcctgtcgctgatatttacactcc

SEQ ID NO: 39952 - DNA, 285 bp, Glycine max
  Clone ID: PAT_MRT3847_136077C.1
gccacacggagacaaacgactcgctgagcgagctgataacacgctgagcgcgtgcctacgtgacagattcccttctagattcctcctatccactaagcgtgttgatgtctcgcttagcaaatgatactcgctaagcacattgagctcacttagcgagacatcaactttagcacttcttcaaaatagctcctttttgcctgaattgaagagaaattgacattaattccatacacaaggcttctactaagaatagataaaaacagcaaaatttatttacaatcctac

SEQ ID NO: 39953 - DNA, 255 bp, Glycine max
  Clone ID: PAT_MRT3847_136078C.1
gtgaagaaaactacccagtttttaaaattttatttggcccttttttagtggttataactaactttatacaaattaaaccttgtataaaaaaatatatttatgtaaagaaataataaaagagccttattttcctactaaaaaacattcgccaggtttaataagactactattacttatcaaattaaaaacttccttttgaatataaaaaatgcaccctaattttttgtggaacatattttaacacacccctttgta

SEQ ID NO: 39954 - DNA, 206 bp, Glycine max
  Clone ID: PAT_MRT3847_136079C.1
cgcatattgacttaatcctggtatttcagggggtggctttttgggcaccattccttactccattttacagcaaactgtttccaatcacatgacaacagtgccaacaccattgaactacgattctagcaagcaacgcttctgctaaaactctatctaactcatcgcaagtggctctttcttgagcaacactgtttctaccactcact

SEQ ID NO: 39955 - DNA, 291 bp, Glycine max
  Clone ID: PAT_MRT3847_13607C.1
cacttcacaaagtttttctgactagtaacaaatttcacacgtgctttttattttcacaccacatcatctttcactaaattaggatacattataaaggcatggtgggactccacatatgcattctatgccacttctcctgacaaacacactttttaatatcatgacacttttctttgaaagaacatctcttgatgctccacttgattgttttgtcttcaccacactgtgttgtgtaacattatcactgattatgcaaatatattatttgactgcccccctctattatactta

SEQ ID NO: 39956 - DNA, 220 bp, Glycine max
  Clone ID: PAT_MRT3847_136080C.1
gagacattactggttattatcatacgatgcctggtacagatggacatgactggcacggctcaggactaggcgttcatgcatggtgagggacctgtcacacgagcgtatcttactgggggtggggcgctagctactacaatgtaagctgctggtgccagtagagcactgcacatcgccgtgcacataagcactcagaacaagtatctgtcctaaactgata

SEQ ID NO: 39957 - DNA, 701 bp, Glycine max
  unsure (1)..(701): unsure at all n locations
  Clone ID: PAT_MRT3847_136081C.1
ttctcgcgtgcgcttattttagcaccaccactggggcttttagctcggctcgagccaacggtggccggaaaacccatttgagcggtgctgccagccaacttttctcctttctctcacaatcaactgggaattgttccctttcaatccctctttttggttctctggataagaccagataggaaatgcaatgccgctgcatgactcccctgttggctatgtgtcagacctgaaaatcctgtttatagtgaaggtttcttctcttatcagccttgcttatagtaggagttggtcttctgcttcttcaagtggtgttatggagatatctttgttaaaggtgctatctgatgcgatatcctcattttcgcatttatcattttctgaaagaatgaagtcagaacctgtatcaaagtattaccaaaaggcagagaagatgcttaagttgttgaagccgattattgatactactgttttttctgatttagcttctaacaaattgcttagtaagctatttgaggaacctagtctagctgttgatgagttgagggagcttagtctgaactggcatccattatctagtaaattttactttgttattcaagatgatcccttaatatcaacaatttaggatttgggactcagcattttacacagctgaaggcttcacctcaaagtctnnctgatatttacgagatgaagcatca

SEQ ID NO: 39958 - DNA, 387 bp, Glycine max
  Clone ID: PAT_MRT3847_136082C.1
gcgtcagggttgaagagcatatagagtttttgcgttgaggtggatcggaaggttaattagctagacggagaacgtaggtaaacggcgaagacggaaagtagggttagtttgtgatttgcacgtaagtgcgtgcaaatacggttaggtgcgagaagctcgtgactcgtgagagcgaaaatgcctcacagaaccacatacattttcccgcgtcagtttccggagcgaggagggttggatgaatcttccaaacagctattagatcacgagaaaaagaagatcgtcaactcaatcaaacatgacacgtttaccgccgaaggcgaccctcccaaaaggtcacctacaacacaagacaacgactgtgtcgttctctcctccgggaacacactg

SEQ ID NO: 39959 - DNA, 435 bp, Glycine max
  Clone ID: PAT_MRT3847_136083C.1
tcgaaacggaaatcttgcctatgtggagaggtttgacttaggtggcaattcaggaaacaaatcaaaagcaagagctatttgggtgggagttggagcaggtgtagcttctgtagctatagttgcacttatagttggtcttgttttctgtttctgtaacggcaggaagaaacaatcaagtgataccaagaacaaccctcagggttggagaccattgttcctctatggaggggctgctgtgaacagcacggttggtgcgaaaggatcagcaggtactcaaaagccttatggatctgtgggctcaacaagagttggcaagaagtttacattggcagaaatcaatgctgcgactaacaacttcgatgacagtttggtaattggagttggaggctttggtaagggtgttaaggggggggtggaaaatggggttccttgggt

SEQ ID NO: 39960 - DNA, 318 bp, Glycine max
  unsure (1)..(318): unsure at all n locations
  Clone ID: PAT_MRT3847_136084C.1
gttgttcaaaatatataaaaaaaaatgagggactaaaaatgaatagaacaaagactaaatttgagcaataaaaataaatgagacttaaaattggaaaagaatttgaggaccaaaaatattgacaaaaaattaagggaggactaacatttgtttaaaaacttttgaagaactaaaaattaaaatctaaaaaagttaaaggactaaaaatttaatctaacatttttttttataaaaaacaacaaaagtaacatacataattnttattgaatgacagtataaattntatactgnctatgcattctacttaaaatcatacat

SEQ ID NO: 39961 - DNA, 377 bp, Glycine max
  Clone ID: PAT_MRT3847_136085C.1
cggggaggaaggaaggcttttttaataaggtttttgaccggttaaaggtttgccgggggacctgaccaccttaattccttaaatgggaaaatcaggaagaaaaaattttaaaaccccgggttttttttggcattggcccattaccaaaccactttaggaggcagcctgggtttcttaagcagttgtttaaaaatcctggcctgaaccaggctttgggccatcgcaataataattttcctttggggcgggggttgaaccagtggttctttaaggaccctgtttttggaattgttcggccagttttttaaggttttccaagtaatctggccctaatggggggataatgctagggagtttatcctgcaacttttttgttt

SEQ ID NO: 39962 - DNA, 362 bp, Glycine max
  unsure (1)..(362): unsure at all n locations
  Clone ID: PAT_MRT3847_136086C.1
aaaaagccaaacagaaaaggcccaaaccaaggaaaagaaaaaaaaacgaaaggccccacggccaaacagaagnagagcaacaaaacaccaacccccgtcttttttttnggggggggcgacacaaanaaaccccacaaacngccaaaaaccacacccancgggggggcccaggaccaacaaaccnnagncaacaaccaccccccacagaaacgnacgcaacngccaccagaancnggaacggccagcagccaccaaggcacgaccaacgacaannacgaancaaaagcccaaagggcccaccancagaaaaagaaaaanaaggaacangnacccaaacnnaaggcgcgacaaaggagacaggc

SEQ ID NO: 39963 - DNA, 785 bp, Glycine max
  unsure (1)..(785): unsure at all n locations
  Clone ID: PAT_MRT3847_136087C.1
ccacgcgtccgggaaagggcgagagtagatcctaatgaaacaaagcgtttagaagttgagaagatagcggaagtgaagaagggaagggatccattgcaattccatggcggcgtcgtggtcgtcgtcgtcttcaaactgaacgccggagagagtcaccgtggtcacttgccggagccagagagagtcaacagaacagaacaatctcatccctttcctctcaatccaattttcattcctttgctcaactgtgtgtagcaaggtcgtattttgttagaagatgaaacgcaagcgtgggcataagaaagggaaggcaaaaggcaccactaaccatggaagcagtagtgctaatgctaattctaaggaagaagaaacctctgggttggatgataaagatcactctggaatggaagttgacacaccttcttcgacggggacggatcagcagcataattacaatgttgccaacataaatcctgatggttctgttgataaggctgctattgggcgtgttaaggtgaagctcaagacacctaaattactggactcccaacccacctcatctgatgctcccactcccacacaaagcgatactgagagaatggaagatagtgcanatttgttgcctgatatgaaactcagtactctgtctaagagagctgctagcatcaaaattaagtcttcatcaaaccaccagacattctcagcttccactcaacataataataagcaggaattggatgcttccttagtgggttataggaagggtaatgaaaatggatgcagct

SEQ ID NO: 39964 - DNA, 639 bp, Glycine max
  Clone ID: PAT_MRT3847_136088C.1
atgacaagtttctggattccacaattaggtggtcagaaatatgccatgactggtatgactatgaattggactttaacagctgatcaattaggtactttcagaggtcgtaactcaaacttcaatggtgagggattctctcgtcaaacatttaaagttcactctgtaagtcaaaatgattttgataagtgggtaaaagaggctaaaggtaagaaaactttaagtcaagatacttttgacaagcaactcttaccaagcacatctaacaaagaattaacatttagtggaactcatatggcgtttgttgaccctgcggctgatccagagtatatcttctacgcttacaaacgttacaactttgaacaaaaagatcctaacttcacagctgaagaggatttatacaaagatgtaaaagataaaccaatcaaacttgctcgtaaggttcatataacaaaccctaactatgaacgtcacggtatgaaacctatgattctcggcaacaatgaaaaatacgataatgagttcaaaaaagaagaggatcataactctaaagaaatggaaaaaatttctaagggagcaaaagacgaaaatgcgtctaaacttcacaaaaaagaacacgatgatcatggaggtggacattaa

SEQ ID NO: 39965 - DNA, 1139 bp, Glycine max
  unsure (1)..(1139): unsure at all n locations
  Clone ID: PAT_MRT3847_136089C.1
acgatatttctctccttctcccgtagctcatatccttcaatttctcgaattggatttggagccaacccttcgcattttcaggtacccatttcgcagatccttatcaatcattcaataaatcaatcattctgttttttctttcccttccccactctcaatttcatcgctctcaaaccctggatcgtgcgggagcctgtaatttgctacccaaagtaacacgaagtagttaagcataaattcttgcacttttagcgttttagaataaaacccaattctcaaaattccacctttttcatttgggtctctcttagaaattaggcctggttagccaatgaatgtgatgatgctggttttgtagcaggaaactggggttggtgtatgcaattgttgtgttaggatttttttggaagatatgagtaggtctccttcgttttcagtgagaacagaagtgagtccgagtgttgattcagaatcattgcaacaatgggttgttgccttttgtgctataaggtttgatcttgaacagggccagcttgtggaagagtgttatccacatgggtgtttttcccatgatgaggagcttgaaattgcttatagttcctttcctgattccgtttcgcagcaccaaaaccagaaccgatccagcattcatgattgtatcttctttttccgaattctcaggcaccttaagaagtccttagatgaaaagggtgttgctgatagtagcaatgcttctaaattcttgtatggttatgtgtttaataggcagagacatgacgagcggttaaagcgtggtggggagcagaagtccgtggtcattttgtcttatagtccttattcaagtgtgtttagacctttgctgcaaattttaggtcctttgttttttgacattggtaagaaagcattggagcatattgctgcttatgtttcaaaatggcctgctcctgttcctggtaaggtgatggatcttcctattggaaatgcaacccttaaagtgaatntgccaccagctcacagttttcctgtagaaggtggagtgtcttttgaagagggtgcttcttctgtggcaccttttctgcctaatagtcagcctgtccacaaggtcttttcatgattcagatatttttggttcgttccga

SEQ ID NO: 39966 - DNA, 327 bp, Glycine max
  Clone ID: PAT_MRT3847_13608C.1
aaaaataaaaaattccataaacggaaaccacgccttggcaacttgagttaaaaagcgctcctttatcacctaaaccgggggccctttggatttaaaaaataaataaacaatttccgggggggggggcaggttaggggaaaccttggtccggcggggcccccattttacttggcttgaaaccgaatacacggctccaagccccggaattttgtgggataatcgggcccattctttttttcctttagggagatggattttgcctggggcccaatagtgatactcatcttgtggccgagccggtgtgctatcaaatgggacaccattttt

SEQ ID NO: 39967 - DNA, 1031 bp, Glycine max
  Clone ID: PAT_MRT3847_136090C.1
aaccgttgaaaaaagtggcacctgaacagcggcaccctacagctacataaatttatatatactttttttttaatctttattttcgatacacgaatggccaaataatttaaatatatctttgtaagtacagaaatagagaaaaatcaatctagattctagcttcgcaatcaaattattactaatctgtacagagactaagtgtatgggaaaagtcctaaacacacgttttcccaatagcaagaattgattggttgcttctggagcattgaactcaagcttttcaatttcaacgggatatagaaacacaagctaagtcgaccaatctccctttttttccgttattgttgcttctcgtgtgaacacgtacactttgcatgacaatctgaaagtgtctgaacttgcttttgaaggtctttgatgtaatccacagccaagtccaacatatcagctgtgttagtttgcttgtccatgtttgggacaagatcctgaagtttcctcatacgctcactaattttagttcttctaaccctctctgcaatgcttcttgggtgagtggcacagccccgtttggcacggattttgcacggaacagaatctgaaaactgcagaaacttctcaatggcagctatttcagctgaagtatttggcaaactcaactgatgggccaaaggagcatgagtctgtcctgtttcattctgagtctcaaccgcatttaagccagaaaatggttttgaatcttcttcactaaatcttttgagaccaccaacgttgtcagacatcattgcagtatcatcccaatgaccaacttggaaaccggccataaaatcgttaccatcagcaaaagcttcactgtctggactactttctctataccctttgtccccaatttcagcaatggacgacattctccccgacgaagaatagttcggttgattcttcaacctcctcgaactagaaaatttcgcatcctcgatactgttgttaacagctcccaaactccccatgcctctcacaccagcatacacattttc

SEQ ID NO: 39968 - DNA, 1937 bp, Glycine max
  Clone ID: PAT_MRT3847_136091C.1
ttgactttgcacaccggcaccctacagctacataaatttatatatatttatctttattttggatacacgaagggccaaacaattaaatgtatttttctaagtacagaaatagagaaaaggcaatctagatttctagctaggcgatcatcaaattattactaatctgtacagactacagagactaagtgtatgggaaaagtcctaaacacacgttttcccaatagcaagaattggttgcttctggagcattgaactcaacaagcttttcaatttcaacggggtatagaaacacaaactaagtcgaccaatctccctttttgccgttattgttgcttctcgtgtgaacacgtacactttgcatgacaatctgaaagcgtctgaacttgcttttgaaggtctttgatgtaatccacagccaagtccaacatatcagctgtgttagtttgcttgtccatgtttgggacaagatcttgaagtttcctcatacgctcactaattttagttcttctaaccctctctgcaatgcttcttgggtgagtggcacagccccgtttggcacggattttgcacggaacagaatctgaaaactgcagaaacttctcaatggcagctatttcagctgaagtatttggcaaactcaactgatgggccaaaggagcatgagtctgtcctgtttcattctgagtctcagccgcatttaagccagaaaatggttttgaatcgttttctctaaatcttttgagaccaccaacgttgtcagacatgattgcagcatcatcccaatgaccaacttggaaaccggtgataaaatcgttaccatcagcaaaagcttcattgtctggactactttctcgattccctttgtccccaatttcagcaatggacgacattctccccgacgaagaatagttcggttgattcttcaaccttctcgaactagaaaattttgcatcttcgatactgttattaacagcccccaaagtccccatgcctctcacaccagcatacacattttcaatgttaatttgggaaaatagtcctgcgggagagctactatgcctggtaaggttagaattatttccactatgcctgagtcccattgaaaacgatccttgctccatagctgagggaaggttcgggttctggttcggcaagggaggtttggaggaggagctttggtagaaattatgagaagcagagtagttgttgttgttgttgttgttgtaattattgatgttgttattactctgctgtagcgcagccaccgccacgtgttcctcgttgataccctggtcttgttggttaaccctcttccttaaccgcagcagaagaagaagaagaatcagttgagagcttgtgatgatggagcgaatcttcttcttcactgtttaagctgttaacgaagcgtgagaacactcgctccgtttcgggactcgagggacggttgaagacgtgctcgtagaactcgcggtcaatgatgttcgagaaataagaactcggcgccgatcggtaccgagttaaacccgaggaattcacctgcggctgctgctcgagatctgactccattgttgcaactgtaggcacgtgcggggaagcacagagagaaggagaagcaggaaaattttgctcagatctatgcggaaccaaatccgggtaattcagggagaagaaaaagggtggtgaaggaaaaaggtagtgggaaaaataaatatatgttgtattcttttttctatcaataaaagcgacgatggctagcgtcaagggcttttctgttcctgaaagtgaatcattcaacgctcaagaccactagcggcaacaggagcagatagattctcgcagctcgctatgcaacacccattctttttttctttttcttttttgggtatgcttctatgttgttgttgttgtgtatggagtggtggagatggccataggcc

SEQ ID NO: 39969 - DNA, 381 bp, Glycine max
  Clone ID: PAT_MRT3847_136092C.1
tcaagaacctcggtgccctcgtccgcctcaacccctacgccctctccgtccgccgcactgagctcctcactcagcaacgccaggcctccgctcgcgctgccaagatcgaggctaagcgcaagaacctccccgcccccctcactgctgacgagaaggccaccaaggctgccaagaaggtccacaagaccaacaaggccaagaacttcgctcgcatcaacgccaactaaacgggtgtgtggttagaaatagccattgaatgtgcactatgaaacaacaactccaaatagggcaaacagcatgttcttacatatctaccaaactttttttcaaatggagtccttgatttgaaagtcaagtaaatcactttctatgcgcggaaaa

SEQ ID NO: 39970 - DNA, 480 bp, Glycine max
  Clone ID: PAT_MRT3847_136093C.1
tacggctgcgagaagacgacagaagggacgcccctcacgatccatatactcatggcacgtctttattctctaatgtacccacattaaggaaacacaatgttagtgatcttcataaattttctcttcctgaatatgataataattcaaacttcaataatatcaacaaggggtagtgttcaaagccacagttgcagatgcaaagttctgcatagaattgaaaggggcatggtattttaatagagcaccaaacagccacacaaataccagggtattgtcaaatcaaaccttttaccaaaaatttgtgaataaaatacagataattcactatggccatcaatatcagccatcaaccacaatagctaaggatgacagttccattggtccttcatgttcctatagttgttatagaatcattttgccagatacagttttccaaaggtacattcaccaactcccattatctgatgtaataaaatcata

SEQ ID NO: 39971 - DNA, 294 bp, Glycine max
  Clone ID: PAT_MRT3847_136094C.1
aaaaaaaccaacctcatgaatttttataagctagaaaacaatgacggactccaactttacattaaaagcaaaaaaaaaaaaaaaaaagggttaagcggggagatgaaaagaagggaaagccagaggttattacttttccccctttgttacagaacaaaaatttacacaaggggacccagggggggtcctggaatttaaaatcaacggcgcaaaagggccttcccgggggggggtaaaaggcttaggttttattaaaacccccccaccaccccccattaaaagggccaccccccg

SEQ ID NO: 39972 - DNA, 450 bp, Glycine max
  Clone ID: PAT_MRT3847_136095C.1
ataaaaaaaaagaaggaaaaaaaaaaaaacaagagggcgagggaaaagaggggggggggaaaaaaaaagattggtttaaaaaaaaagaataatggccttaaaacaaagtcgctggcgtcaaaaaagggagaacaaggggggggtccttccgggtgaagggtgtgaggggggaaaatagattggggtggaaagaaagctgggtacaattggaaacccaggggaacggttaaaaccaccggtaaactggttaaatcgctggaggagggggaaatcctgagggttgaaagaaacaaaaaagagttttatggtcaaaaagggggtccttttttttaaaaaaaaggctttctttttgaattatggaaacctttggggaaaatcttaattgggccggatcatcttggaatttgtgggggggttttttttatctaaaaaaaaaaaaataaaagaaaa

SEQ ID NO: 39973 - DNA, 176 bp, Glycine max
  Clone ID: PAT_MRT3847_136096C.1
ctttcatatgtttcaacatatcttcctccaaataaacttatgacagaataatacatccatatgtttcaacatatcttcctccaaataaacttatgacaagcaaaatctgtaaagacgagagatgatgaaacatatggatgtattattctttcataaatataaaattttgcattttt

SEQ ID NO: 39974 - DNA, 673 bp, Glycine max
  Clone ID: PAT_MRT3847_136097C.1
gcccgacgccaacgacatcgagtccctcgacgacgatttctacagtggcgagaccgaggacgctcccttggactactacagcgactacgacgccgacgattacttcgacgacgccgagaggatcgagtctcgccgccctgaggtctctctctgactctcttcctttttcgattttgttacgacgaggcacacaccaaagtagagaaattgtgacccaatctaatcaatttagtctttgaaattgtaaaaggccaagtttctgaaattgttgtgatttcaggaattaaactgtcaattgattggatgctcctaattccatgactaattagggaaattacgagttccagttgaggttttagggactaattcagcgtattaatcatttatttagttatggtgtgatagaaatgtatgctcaacttatcttcttagcactaatcatttctttatatatattgagagaagaagaggttggtttcaatggttagatgatttgttctccactttcaccagttggaaggggttattgcaggattccgacttgggagccctgtcgtcgtcgcgtttggcatagtcggcgcccgcgccaatcacaaacaacaacacccacaacacaccgagaccacgaaaaaccgtcgatagccaccagatcaagatcccccttctgtcgtct

SEQ ID NO: 39975 - DNA, 521 bp, Glycine max
  Clone ID: PAT_MRT3847_136098C.1
gcattttctttttctactaactaacggacgagtataaatttcgaatctcgagctaagtctaaatcagacctcacctcgtggttcagtgagatacaacatcacagcttaaacaccaactttgcagtactacaatcaatgtgtggattacatgctgaatgtctcttttcctaagagtaccaaatgttattaactgaagacaagtgctttgattcttaatatatgaactatgcaccattaagcatcgggatagcataaaataaatgaacaaacttaaagttgtcataattgaacaatacagacataatccttgtgtgatgcacaacttgaaactgatggcctctttatctactagcctgaacagatttgattaggagcggatgtctgacccttccttttttgatctgaagaacattataaacttatccctcaacccgtgtaaaaactagaaaacgtttgacaactctcacatgctaattgcctatgctttaacaagaattgaacagttaaacattgatggtagc

SEQ ID NO: 39976 - DNA, 222 bp, Glycine max
  Clone ID: PAT_MRT3847_136099C.1
tggccaattcaatataaatggctcctgaattaacacctgctagtagtggtttacttttaacggaggttcataaaactttacatagaaaatgatccctccacacaaattcacataagcgactgctttttaaaggaaaaaaaataaaaattggttttttatcaaagagtcctaactttaggaccttatattacccacccttgctttcttctttttttttttaaa

SEQ ID NO: 39977 - DNA, 185 bp, Glycine max
  Clone ID: PAT_MRT3847_13609C.1
cctttccatttataggatgaagaatgctcctgatacaaatgataatattgatctactgcataccattgattgtgaggggttacacggagcgggtcaagctttgccagacaggattgattataatgataagcttgtgttgattaacacacataaattctttgatggaaattatacagcggattctt

SEQ ID NO: 39978 - DNA, 339 bp, Glycine max
  Clone ID: PAT_MRT3847_1360C.1
cgcaattcccaaattcatttcaatcctaattctgcacttcttgataattcgacttttctcctcaagatgcagacactcgtacaaactttgaccggcaagactatcacccttgaggtggaatccgccgacacgattgacaacgtaaaagctaagattcaggacaaggaagggatcccacctgacaagcagagacttatctttgcgggtaaacaacttgaggatggtcgcactcttcccgtgcaaaatctcaaaagggactcagctctatatcgtgtgttgcgacacaggggggacatgcatctctgtgtcaacattgtgagcgggaagaccatcaccctt

SEQ ID NO: 39979 - DNA, 476 bp, Glycine max
  Clone ID: PAT_MRT3847_136100C.1
gcaaatatttttttgccgaggtgggctaatgttttcctagccgaataaatcggaacatgacagtttcggcagaaacaaaacgtcggttgagcttgcacaaaaaaacctagccgacctacattgtacatattttatgcaacaccaaaacaagaaaacttcctctgccgtaaaaaaaaaattgtcggcctgcaagcgtttttaaaaaaaaattgcgcaatgtcggctaaaaaatattagtcacggctatttcacgacctatgtcggctattaagttttcaattcattccgagaacgaaatttgcatgatgtaggttaggaaatgttcgatcagcgtcgtccgatgatgcatcttttttagaccccgatcattcatctttcctgaccgacgtcgactgtcattttttttttatcaatatcggtgaataatatttttttgccgagtagggctaatgtttttctggacgaataattgggaa

SEQ ID NO: 39980 - DNA, 477 bp, Glycine max
  Clone ID: PAT_MRT3847_136101C.1
cttgagtacggagaagacgacagaaggggttatgcatgcaggtatggatttcgatacaatttttttaaatttaagtgtcaaacaggttctatagttcaacgtagtattaactttgaagtgagtaaaattaattttaaaaaagtaatttttttgtatcttttagtgaataaagacgtttttatgtgcaagacctataattttgtgtgtggctataatgcattttcagtctttggataccgtagctgtacaattttggtttttcaatttttaattgtgtcaattaatttataataagatccctgcatcctgatttcattgaatgtttaagtcattaattttcgaagaatgaaaatccattcctttttgttattcattgttgttgtaaaaataataatttactagaagcatgtcaacacaacagttaagtcaatatatctcattgtagttcaaatattccatgtctttggctagtacacc

SEQ ID NO: 39981 - DNA, 936 bp, Glycine max
  unsure (1)..(936): unsure at all n locations
  Clone ID: PAT_MRT3847_136102C.1
ccacgcgtccgcattctctcccatacccaaaaccctcgccgccgcaatggaaaccaagaagctccaccctcgcttctcgctcggccgccaatcctccctcgcgccggagcgcgccggcgccggcgactcgtcggaggccctggacccggcggtccggttgatgtatctggccaacgaaggtgactcggacgggattaaggagcttttggacgccgggagtaacgtcaatttcaccgacatcgacggccgcacctcgctccacgtcgccgcttgccagggccgcaccgacgtcgttgacttgctgctccgacgaggcgcccacgtcgatccacaagaccgctggggcagcacccctctagttgatgcaatgtactacaagaatcaccaagttgtcaagcttttggagaaacacggtgcaagaccccctatggctcccatgcatgtgcagaatgctcgtgaagtacctgagtatgagattgatccttctgaacttgattttactaatagtgtttgcataacaaagggaactttcaggattgcattatggcgtggaattcaggttgctgtcaagacacttggggaggaattgttcactgatgatgacaaagtaaaggcatttcattatgagcttacattacttgagaaaataaggcatccaaatgtagtccagtttttgggtgctgtaacacaaagcacaccaatgatgattgtcacagaatatctaccccagggggatctcggtgcctacttgaagcggaaaggtgcattaaaaccagtaaccgccgtaaagtttgcacttgatattgctaggggtatgaactatttgcatgaacataaaccagaagccattatacacagagatcttgagccttcanatatactgcgggatgattctgggcatctgaaagttgcagactttggagttagcaagttgct

SEQ ID NO: 39982 - DNA, 344 bp, Glycine max
  unsure (1)..(344): unsure at all n locations
  Clone ID: PAT_MRT3847_136103C.1
aaaagcggaaaagcacccaaggaaaagcaggggggggcagaacagcgnccncaaagangaggggaaccggcncggncggagggacgaagaganggcagaggccgaggccgaggcngaaggcgagggngagaggacacaagagcnanccgagggcgacaagacngaggcacggaagcggagagcngaagcaacgggggagncgagggaagcccaagaagaaaggaggaaccaagacnanagaaaacgggaagaccggccncngganggggaaggggacgggaanggcaagganaacacggcggcncgggagcaagggacgaaggannanagggaaaangngcgag

SEQ ID NO: 39983 - DNA, 342 bp, Glycine max
  Clone ID: PAT_MRT3847_136104C.1
ataaaaacccaaacacaaaaaaagcacaagggggggagaaaaaaacaaaaggaccgacggccccccacaggacaggagaacagagggccaagcaggaagacgcaaaagaaggaaagacaaaaaccaacgacaaagaacacggaaaaaagccagaaaaagcccgaacaggcgcaggagcaacagaaacccacagggaagaccccaaagcggaacacacacaaaggaacaccacaaccaacgggacacaaagacaaggcagaaaccaagggcgggcgagacaagacagccacagaaagggacaagccagagggcggggacaaacgagagcaacagcgacggcca

SEQ ID NO: 39984 - DNA, 170 bp, Glycine max
  Clone ID: PAT_MRT3847_136105C.1
atatgctttctacaaattaaaagctgaatgccgccaaattataggggggcacaccaattaccccttaacccttaattcctaacacaaccaaatttaacttaagacctgaaaaatgccaaggttggaatctaagacctaattttaactttttccccataaaaaaaaaacca

SEQ ID NO: 39985 - DNA, 309 bp, Glycine max
  Clone ID: PAT_MRT3847_136106C.1
ggctcgaggaaccatgctaagactatagaactttttcgcacttacgctatcaacaaccggaaaagtgaagtttctgacccggaactaatcctcccacactaaataaggcctatcttacaatgttatccgctctagcagtgacgcagacttgctcaggacagcatcgaaccctattgcaagctaatcatggtctgactcataattggcggcctacgcaccatactgactaatctctgaccacagtctataaccctagtcgtcgtgctcattggcaccggctaccaacttaacttctcgatgggggagaac

SEQ ID NO: 39986 - DNA, 318 bp, Glycine max
  Clone ID: PAT_MRT3847_136107C.1
ggggcaataaaagaatccccttccattttctttagggagacctggcaaacatttacaaatttccacatatcagcgggtcaacacaagggtgcaactttagcccaagggaattgagtgtcttttaccccattattaataaaccggcgggcttcatgaaaaggacccgcttacccaaacctggggggggcccatggttttctaccttttaaggggcttcaccttatcaaggaaaagaccggtgacccttcccaacctatggacccataggagggcccatggtttcaaccggcgaacctgttccggtgggaaaacccgggg

SEQ ID NO: 39987 - DNA, 336 bp, Glycine max
  Clone ID: PAT_MRT3847_136108C.1
atcccaaagggaaccttaatgggggaaaacacacaaacgatacttgaaaaaaacaataaacactgataaagacaaaaaacccccttatttaaaaatttcccaaaaggcccttttgaaaaaaaaaattttgccccccggcaaaaaaggccggaccagcaaggggaacaaccccaaaggaatttattctcaaggggaccccttaacggggtggaaaaaaattttaaaccccctgggggggccactaaccccccgcaaaaatcccgagggggaatgagggggaacacccggggaagggggaatagctagaatgccctctataaaacggagccagagggg

SEQ ID NO: 39988 - DNA, 746 bp, Glycine max
  Clone ID: PAT_MRT3847_136109C.1
atatgatgcaactactggcccttaatgagtgataattattcaccaattaacccgaaaactgcaaccagattgaaaaggaaagctggaaccggtatttgcctctgacatgtaataataataataaaaaaggtaaatcctaatgctgaagcagataattctattatttttcccgcttgtaatacctatgttcagggcatgccctagcacaaccatgaagttgcatggttgtgccttggtcaccagttgttaatgggatataataataataataggcttaattaccaatttggtcccttagtttattaagaacattcaattaagtcccttagtttttttttttaattttgcccaattgggtcctttatgtccaattaagaaggatgtcgttagtttttgacaacttgaacagtgaaatcttcttcctactctttcgcagcgccttcccgatcaactcttgctagatccattttggaaggatgtcattagttttttccgttcgtcacaccttcaccgaatcacaagcaccccaaagacgtcgtgtggttggatctagtttggcctccttccattcccaatttcccaagcaggtttgatcttgtgatgactgtagcacgtgcattgcccagggcataaggacatcggcggaggagggttgagatgttgtgtgcgattgtgcggtgttcatcctgctcataggaatagtcaaaggtttttcatgtcatctcagattcctcacacgcacaccc

SEQ ID NO: 39989 - DNA, 373 bp, Glycine max
  Clone ID: PAT_MRT3847_13610C.1
aggagcctgagtgtgtgatacagcgaaagacgaaacgatttaagatcggaagacgaacactcggagggagagaaccctaactggaggaagtgatatattgcatgacacgactgaaaaaccttagacatcggacagggggcgcgatcgacgaccccgtagatcctagatgagagttggagcgaatgggggatctgaagagggtcatgcagatgatggtctacgcaatcgacagggacgttgcatactactagtgagagaaggggacccttaacaaagactggtaggcactggcctatgtgaagggggagcaccacttatcatctctgcatcgtctcgcatgcgatggaggactacatgacgccgattatcactg

SEQ ID NO: 39990 - DNA, 496 bp, Glycine max
  Clone ID: PAT_MRT3847_136110C.1
acctccaaagatatttctcagtccaagccgcaaaacaacgaatcaattcttgccatgtcatcacccccataaaccacgtcaccattaaatactcgaagaaagtcttgaacctaatctgctgctacttgggccccaacatgagtcagtaaattccaggtctgaagaaattccagctatttattatcgtcctgcagcgtgtttttgaaatgtcatcttcattaccaccggtgagtgaagaagtaaacacaagtgggcgccgagtttaactttaaacccgcttacgtgtcaaaatccaattggcgagaaaccctcgagcttctgaaggatctatcaagcttttcacttaaagcccttaggatctgccacgtggcatcccctttctggacctggctgttgaaaagtagggcactcctcgtcactgggtcccacaggttcctctgaatggtgctgaggtttgtcgctcgcacgcgctcgagtatcttcgcagcctcccacg

SEQ ID NO: 39991 - DNA, 515 bp, Glycine max
  Clone ID: PAT_MRT3847_136111C.1
tttaaaattgtgtattcttcttataacaattttatatttttatttacaagaaaaaatgatattacaaaaaatgatttagctcccgtcacacttgtacttgtattttttttttctttacctccaaagatatttctcagtccaagccgcaaaacaacgaatcaattcttgccatgtcatcacccccataaaccacgtcaccattaaatactcgaagaaagtcttgaacctaatctgctgctacttgggccccaacatgagtcagtaaattccaggtctgaagaaattccagctgtcatccactcgatgttaatatttctttatttatcaagtaaatgttattaagtgctcttggataattaatttttttttttactaagataataaaattataaattcttatgaaattttttttattttaattctttatccattagccacgcacctatttattatcgtcctgcagcgtgtttttgaaatgtcatcttcattaccaccggtgagtgaagaagtaaaca

SEQ ID NO: 39992 - DNA, 409 bp, Glycine max
  unsure (1)..(409): unsure at all n locations
  Clone ID: PAT_MRT3847_136112C.1
ataacaaatgtttaaaattaattgggtgtactaaaattataaatactataaaatatattttttgtcaagaaaatcaaattaaaatttgcataaaagtattacataaatatgtttaattatgtaattttatatttttcatctacttaaatagacaactttactaaatatttatgattcattaagatagtttttcaacttttaactattttttaatcatttgttatagttttttaacttcaaactaattttttaactttttaatttttcaactagttttggaaaacatagcttaacacttgggaatgggtcttttttatggttttacagncattaaatttttctcttaacaaacaattttttttgtaccaaataaaaaacaaatcggatatattttcttaaaatttattta

SEQ ID NO: 39993 - DNA, 1621 bp, Glycine max
  Clone ID: PAT_MRT3847_136113C.1
cccgcgtccgtttgatttgtagtaggcatgtgagaaattaatcagcaaacttgttggtcgggagtttggagatgtagatgtaattgatataaagccatgggttatgcatgctgaagttgctgagaggtttatatgtagtggcaaccgaatattacttgctggtgatgctgctcatcgatttcctcctgctggtggatttggaatgaatactggcattcaggacgcgcataatcttgcctggaaaattgcttctgtgattaagggtattgccccaacttcaatgctaaatacctacgaaattgaacgtaaaccgattgctttattcaatacaagattaagtctagaaaactataaagctgccatgtctgttcctgctgcacttggtcttgatccaactgttgcaaacatagtacatcaatttattgttgatgggattggttccatcttaccatctggtttgcagaaggtagctttggatggaatttttggtataggtcgtgcacaggtttcagaatttgtcctaaatgaaagtaaccctcttggatcctcaaggttggctaagctaagacatatatttgaagaaggaaaaagccttcaacttcagttccctgctgaagatcttggttttaggtacctacaaggagcacttatgccagagagtaaagatgttgaaagtcctccagaagtactaacagggcgtcggagggactacaccccttcagcacaaccaggatcaagactgcctcatatatttgtgagagtaaacccgttaagtgaggagactgtttctacacttgatcttgtgtcgggagataaagttgagttcattctcatcatagcacctgtggaggaatcttatcatctagctcgtgaagcattcaaggtggctgaggaacaagaaatttttctcaaagtttgtattttttggtctactgattctgttgaaggacttgagaaaggaagtaaagcagcattatcaccttggaagaattacctagatgttgttgaagtttggtcatcaacttcaaattggtgggatatgtgtaacatgacgaacagaggggctattttagttagacccgatgaacatattgcctggcgtacaagttcaggacttgctggggatcctagagtggaaatgcagagggttttttctgctatactgggagtacacggttcaaataaacaaatacacggatgattttgtattgattctttcaagaatatttcctggcgtacaagtttaggacaatgatggggatcctagaggagaaatgcagagggtttttttctgctatactgggagtgcactgtcatacaaatacacagaatattttgcattgattctttcaagaatacttttccttttcttttaaaagtagttcaactttttatggtcacaggttccaacaattaaaacaatctctctgcttccgagggttagacgcacacatctggccatgctcagtttctttgaccttcaatggtagtagcctccccgagctgtcctgatttaaatatttttttttattgacaaatgatagttgttttaattgttagtgaaataaaatggaacccatgatttttttttaattaccgtgccattccgaatttggaccga

SEQ ID NO: 39994 - DNA, 404 bp, Glycine max
  Clone ID: PAT_MRT3847_136114C.1
cccacgcgtgcgcccacgcgtccgctggtgtgtcttcgctgagaagattgtctgtaccgggtgaagtatgttagcccttgcagtaaagcttctagtgatggtgcaaggctaatgttgctgggtgaaagtggtagaatcgtcagcgaggtgaaaccggttgatgacagttgtctagtagctgagacctcacagatttgttctctgcaactgcttattacggtagctttatcgtcaatgctgcttacagtggcactgatagaaagggtattcttgctgctgatgaatcaacagggacagttggcttgcgtttggccagcatcagtgtagagaacattgaatccaacaggctagctcttagggagctgcttttcactgctcctggtgttctttaatatctcagtggt

SEQ ID NO: 39995 - DNA, 197 bp, Glycine max
  Clone ID: PAT_MRT3847_136115C.1
gcagatcatatggttatgctttgcaagccacaagaactattcgattccctccagcagatagcgactaaatatgcatgaattcacgaagcatgttttaattagttttatttcttgtctttgagtttgacttgtgctaaaattttaagatgtcgttttaaaccacgagacaaatcaataaagcggagagatatattgcc

SEQ ID NO: 39996 - DNA, 1975 bp, Glycine max
  Clone ID: PAT_MRT3847_136116C.1
ttctgttcccgtctggcccgcggcctgctttgtttggtcggcctccgccgggcctgtgcctggggatggttcctcctccgcttggtgtgttgctgacggctgggctgctcttggtgtcgggcctctgccccggcgtccgcgtccctggtccgcgtcggggcgtcttgaccccgtcaccttctccaccccgtggtaggcgtatggtttggcgggtgatggcgatgcctgcgcgtgggtctgccctgagatgttgggtcgtggggctaagcctaacatggttatttataacactctgttgcgtgccacgcggtgagccaagtgcccctggcgtaaagaagcccttttgcaattctctgattgatctttgtgtcaacctgaatttgttggacaaagcatgtgagcttctagacctggggttgacccttgaagcgaagatgctctctttgtttataaggaaatgaaggaaaagggaatggagatgaacactcatctttataatactcttctgggcatgtgtgcagatctaagcctagccaatgaagcatttgagatttttgaagacatgaacacttccgcaacttgcctctgtgacagttggacgttctcatccttgattaccatatattcctgcactgggaatgtttcggaagctgaaagaatgttgaatgaaatgattgagtctggctttcagcctactatttttgttctgacatcacttgtccagtgctatgggaaggttgggcgtactgatgatgttgtgaaaacatttaatcaactcttggatttgggcatcagtccagacgaccgtttctgtggttgtcttctgaatgttatgacccaaacaccaaaagaagagcttggtaagctaaacgattgtgtgaagaaggctaatccaaagcttgggtccgtggtaagatatttggtggaagggctggaggagggtggtggggagtttaagaaagaagcatctgaactctttaattcaattgctgatgaagtaaagaagcccttttgcaattctctgattgatctttgtgtcaacctgaatttgttggacaaagcatgtgagcttctagacctggggttgacccttgaaatatatttgaatacacagcaagtctcaaactcagtggtctctacatctaaagagtctctcgcttggagcttcgctgactgcattacatgcttggataaatgacttgtccaagactttggaatcaggagaggatcttccaccgctgcttggaattaatactggtcatgggaaacacaggtattcggacaaaggtttggcaagtgtagttgaatcacatttgaacgaactcaatgctccattccatgaggctccggataaggctggctggtttttgactacacaggtagcagcaaagtcatggctggagtctcgggaattggttacagcataatttcttatctctttatggtttttaggtattccaacagcttttctccattgataatgtaatttcagggaatgatatgccatgcagtttttatgcattttcctttgtcttttgaggaattttttgtatgccttatagagtaaatgaaggttctagtatggtggctactggctaggttctttgctttgtgatgtaggaaattgtgaatttcttctaaataaaggcaaaccccatggggcgtccgctttttagaagttactgcatgggttaggaaaataaaggcgattgatgggtttagctttattttgcaaaatgtgtgaaagtgaatgttcacataaatggataaatgtaaaaaacttgttggcacaacagaattgtcaaaaattcctattgatggctgttagaagcgttgattgagtaaacatgcaagtggaagtgatagttggcatagaccggtacacaaggtaaaatatggccttctgtcttcttatatgcattgttgcatgtgttcctcgttttatggaaagatcgatgtggcacatgttctaaat

SEQ ID NO: 39997 - DNA, 2483 bp, Glycine max
  Clone ID: PAT_MRT3847_136117C.1
aattcaatttgagatttacttgcgtgacataaagggttggcccctcttgttgcctagttctgccctttaatttcgggaggttattctttcattctttttagttttagtttcagttttcagactttcagatccaaaggccaaatcttagggtcatgactttggtgttgatgagtcttggatatgtcatatgattgtccaaccaaaccaaacaaaaacgaaaaaacagcacccttgtaactcaaaggtagcaacttgagacagttttctcaagttcgaacatctaagagaacacaaggtccaattggaatccgaattaagttgatggggttccaagaaaacgggaatggggaaatggggttgtctggaatccccttgggagcaaagaacaagtacaagaggatgacctctgagcttcctgacgacaacgatgatgtttttttgcaccaacagcaagtggaagagaggaggagcagtaccaggaaatatgttattgcctgtgccatctttgcttctctcaacaatgtccttcttggctatgatgtaggtgtcatgagtggagctgttatatttatcaaagaagatctgaagatatctgaggttcaggtcgagtttttgattggtattcttagcattatttctctattcggtagccttggtggtggaagaacatcagatattattggtagaaaatggacaatggccttggctgcagttgtcttccaaatgggtggactcacaatgactcttgccccttcgtatgcagtactaatggttggaagatttctagctggaattggaataggatttggagttatgatttcccctatatatattgctgagatatcaccaaatctaaatagaggctctctcaccgccttcccagagattttcataaatgtaggaattatgcttggttatgtgtcaaattacgcgttttctggcctttcagcacacataagttggagagtaatgctagcagtgggcattttgccctcagtgttcattggctttgcccttttcgttatccccgaatcaccaaggtggttggtaatgcagaaccgcatagacgaagcaagatctgtgctgttgaagacaaatgaagatgagaaagaagtggaggagaggcttgcagaaatacagcaagctgctggatttgccaattctgataagtatgatgataaaccagtgtggcgtgagctgctgtttcctcctcctcctcttcggcgaatgctgatcactggacttggaattcagtgtttccaacagatctcaggaatcgatgcaactgtgtattacagtcctgaaattttccaagcagctggtattgaggacaattcaaaacttctagctgctactgttgctgtaggcatatcaaagactatttttattttggtagcaatcattctcattgataaactaggtaggaatacggctgcgagaagacgacagaaggggatgacagtttgtttgttctgtatgggggctactcttgctttgcttggaaaagggtcatttgcgattgcattgtctattctgtttgtttgcgggaatgtagcattcttctcagttggattaggccctgtgtgctgggttttgacttctgaaatcttccctttgcgtgtgcgtgctcaagcatctgcacttggagctgtggctaatagggtctgcagcggccttgtggccatgtcttttctttctgtgtctgaggcaattagtgttgctggaacattctttgcgttttctgcaatttcggctcttgccattgcctttgtcgtcacactagttcctgaaaccaaagggaagtcactggagcagatagagatgatgtttcagaatgagtatgagattcaagggaaagaaacggagctaggagatgttgaacaacttgtgcagaaccaaactgatttaacaaattaattgattaattagcccctgcctttatgcgactcttatggatttgttattccatggttacacatctttcacttgttatgtctaaggctctatgcatgctacttgtgattcagtggaggatattcctggcaagaatatatgatcttctgcaccagaaaatttgagatatgtgagttggggacacaaggaaacatgaagataaaatgcactctaaacttttcctagttgaacaattattcttatttttttttttatctacattaaagtcaattatagcattgtatatggagggagatttttggtggagacgatcatgtctccatatggtcctttgggatgtcctgagactgattatagtgccattattacaatgtgttcatgaggaatgtctgtaattaagatggaaattctttaacagataatattctattattcaacttcggtatctgaattgtgataatcttgagatatcaaagcatatatataagttgcagttttataatgtgattggcaccaaactgtcgtttttcttttatcaaataagttcagtgaacaagtagtatttacta

SEQ ID NO: 39998 - DNA, 887 bp, Glycine max
  Clone ID: PAT_MRT3847_136118C.1
tacggctgtgagaagacgacagaaggggctttaaaggagacggaaaaaaagcctatttttttttttcaccaccgaacggataacatggataggagatagccaagtttcatgtcccttctgtttcaattcccaagaaacttgatcctgaattcatgtcataatagttgctgttgaagtaccctcttcaaatttctgaagaatcatggcctactacagctctgcctattctggttctgaaaattatggtgggtacaatttcaactcttatgctctcaattatgattatgctcaaattccatcctatatggcttatactagttatgagtacaatcaaaatcaaccatattatggatatgattcaagtttatattatgctcctaattaccctgctgagacttaccaaacccaaaccacatcttactcagccacaacgtatagtgacccaaaatctgttgtgtatgttcccaataacggtatgagtcagcttgtgatatcttattctaaagcggaattcaatgtgcctgaatttgatgactatgatccaacaccttatggtggtggatatgacattgatcagacctatggcaaagccctaccaccttcagataaaatttgctatcctcgttctgggtcaagtccaattactgaaccacaaccactcttttctgggcccatagttccattgcctactatagaagagggaattgaagagaaaccatcacaccccagaatggagctatcatccaaacaaaaaccgaagagaagcctcagtcacaagatagtggcaaagatcaccctaaagaagtagaagacaacaactttgacactgagagtgaggggagtgatgaccatgaaagatgatactattcagaatctggcattgatga

SEQ ID NO: 39999 - DNA, 289 bp, Glycine max
  Clone ID: PAT_MRT3847_136119C.1
gtttgggagggcaccgaataagatcgattataccatgtactacgaaatcctttgcgtctttaataacgctccgcaggatgatctgaagaaggcttacattaaagccgccatctataatcaccctgactagggcggtgatccctataagtttaaagagctggcacaagcttatgaggttctgtatgaccctgtaaatcttgagatatatgatcattttggtgaatttgcgcttaatgatcgaatggttggacgctgtagcctagatccgagagatatcttttcatctttc

SEQ ID NO: 40000 - DNA, 370 bp, Glycine max
  unsure (1)..(370): unsure at all n locations
  Clone ID: PAT_MRT3847_13611C.1
agccgaggaagggacacaagaccacagcaaggaagagcagacaaccaacaccaagaaagccanggggaaaggaggaaacacgcgcccaagagggcnaagaggaggaaagacngggcagacacaccaagncgagaaaggagaggcgaagcacangcagcagcancgcgccagaaaaggagacaagcnggacagggnggcgaaacagcgcaggcaggcaaaagaaaggagagggggaacgaagaaccngacaaaagaggaccnggcaggggaacaccagacangagagagggcaggagaaacgcaagaaaaagaaaaggggaagccangccacgcgagagagcgaggaaagaagcacaggaacaagaaaacc

SEQ ID NO: 40001 - DNA, 498 bp, Glycine max
  Clone ID: PAT_MRT3847_136120C.1
aattatggcattcactttgaccacccttccaacgcccaatgtgtctgtgacgtccttcacccgacgcaccgtctccaactccaaaccaaccctttcatgcaccctctcttcccacccttttaagagagagtacacgagcgtgatgatagtgccgacggggattggcgccgctattggaggatatgccggtgacgctttgcctgtggctcgcgcactctcctccgtcgttgattgccttatctctcaccctaacgtgcttaatgcagcaatgctatactggccaatgcctaatgcattatatgtggaaggttatgctcttgaccgttttgcagaagggttatgggcattacagcctgttcaccaaaacagggtgggcttagttcttgatgcaggaatagaggatgagctccggattcgacagttacaagtagctgatgctgcaagggcttcccttggattgcctgttgtggaatacattgtcacagacatcccgctgaa

SEQ ID NO: 40002 - DNA, 439 bp, Glycine max
  Clone ID: PAT_MRT3847_136121C.1
ttgctttgataagaggtttcatgaggaaaacactggggcgctaaagcaggtgtaagcgagatcaattgtctgatagaacctgttgacttcggagacaacaatttttaatggcagagatcacgccatctggggtgtggattatacaggaggaactcatgttagaaaatttttaccacattacattaggtggcatctgtataccttgctgatctacatactcccatgtttactcactggtggaattaaatttaatcggaatctgaagaataaccatattgccggcttgttttacgactgcagatacaaattttggactaaacacgagaaaagagtagcttgacagaataagaaaagatggatgtgattagaaatacaggccttcctgctgatgttcttgcttagagagctcatgaatttgaaaaacatgttcctcatgaaa

SEQ ID NO: 40003 - DNA, 375 bp, Glycine max
  Clone ID: PAT_MRT3847_136122C.1
gagctcttcatcctgcggccgccctttcttttttttggtgggtttttttaacattttttgggttttattttttttttaaaaaccaaatatcattttcacttaatacaaacaggtttttttgtttttttaaaaacaacaagacatcatttcttttaccaaaccctttccttaaaagaaaagaaaaagaaaaagagaaaacaataaccttgccaagatttgtgggaaaaactccctaaaaagagaagtgtcgggattaaaaaatttcacttggactccaaaaagtttagaattggtggaacccatgcacataaagagtttttttcattctgcctcaaaaagcttgggaaactaatcaaagcatcatccaaacttttt

SEQ ID NO: 40004 - DNA, 617 bp, Glycine max
  Clone ID: PAT_MRT3847_136123C.1
caggtcgactccatgataaatataaatagtggaaggaaggaagaagagggaaggaaaacgttaaaaagcaatgaattatgatagcagaaacacagaagcggaaggaaccaaattgggcactagccaaatcccaaatgtgaatgcacgtgagtgaggcacacgtgcgtgcaggcactgactgacatacccattcgtgcggacaagtgggtagacatgcatgggaaagtgtgagatcagagaggagcagacctcgggtctcgtagctgaccagggacattttttagttgacttttttgtctttcacctctattcaataaccccaacaccaaattaatcatagcataaactatactacaaatttgtagtatttttttaatctgattgaaaataaatatttttagatatcaattagaaagttagtaggagagtgatccatacatcataatcataattataagaaaatgtgattagtagagtgaatttaattaagaggaatgcttctaccgccattttttcaacaattttttttggggcatatattctttattatttgggctggtaatatattatttgggggatcaagttttattaagggtttaggtccttgttttgggagg

SEQ ID NO: 40005 - DNA, 1778 bp, Glycine max
  Clone ID: PAT_MRT3847_136124C.1
gtcctacaacagctcaggtgttgtgaagtactagaagttgttagactttcaagggctggatagcctattcgaatgggccatcaggagttttcctgtaggtttgggtttccgctttctgagtccaacggaacccttgcgaccttgagcttctcgataaaagtctagcaagaaatgtagcctcacagtgaagtgtcccgtaacgcgtccaccaaattgtatcctcgagggccgattcaggcactcgagaataagagaaagcaggttttacagggaatacttgggattcaaaaatgcttccgtggtcatcgagctcgtgtttatttctgtgaacttaagaatggagtgacaacattgcaatcatttattcgtggagaaaatacaagaaggaaatatggtgttacagtgaagtcttcagtaacaatttattctagaatactggaggagatccatgcaatcatactattacaatctgtaattcgtggttggctggttagaaggggggatgctagtcacataaataggtctaagagatatcctgaaaatgctaaacctaggcggaagtcctttatgaagataataccagaagtaaaggacttgtccaaagagccggttcagaatctgctttcagctttagcaggactccaaaggcgggttgacaaggctgatgcaattgtggagcaaaaggaagaagaaaatactgaattgagggaacagctaagacaatctgagaggaagaggatagaatatgagacaaaaatgaaatcaatggaggaggcttggcaaaaacagatggcatctttgcaaatgagtcttgttgctgctagaaagagccttgctcctgagaatgctacagttcagcctttaagacgtgattttgtgttgcctcgtggttatgattctgaagatgctacttccatgggatctcaaacacctggtgggagcacaccaatgctttctggtagtctatctgtctctgatgctgggagacaggtcaatggtactttgaccacagttggcaatctgatgaaggaattcgagcagcaaagacagaactttgatgatgaagtaaaagctttgaatgaggttaaaccggagcagtctgccaatatgaattcctttgaagaacttcggaaacttaaacagaaatttgagggatggaagaatcaatacaaggttagattacgcgagactaaaacaaggctttataaatcagaaacggaaaaaagtcggcgatcatggtgggggaagttcagctcaaaagcataatggtattcagtttttaaactcatttgctgagaatagtaatgccgaagaatcagaaaaattggcaaaatgattgttgtcatgaactgttgtccttttcgagctgttgtttctatatctcgctggagcacttattaaaagtgttaccaatttactcattggtgaagggaaagaaattgtatatctaccaattttgttacatgtggaagtatgataggttgtgcatagttgtagactcgtaagatcgcacagttatattgattagtcaatagtttgcttttgtatattttttcactttcttttttgtggggtgaaaaacagtaatggctcatgtatattctattgatgtgatctaaatctcagtctgaagatattaataagtaagttttaatatcttcaatgctaagggaaattttttttctggctgttatgtttgtgtctatgacaacagttttctcttggtgtattggttaaacagataattgttcagttaatagagatctatatcttttcgc

SEQ ID NO: 40006 - DNA, 348 bp, Glycine max
  Clone ID: PAT_MRT3847_136125C.1
aggaacagaccaaacacactgacactactagaaagcgccataaaaggaacactagaaaaacgaaaagcaacaattccaaacgataattccttgcaagagtagaaaccagtgcttacttatgaacaagaaaatcttataagatgcacagaaaaccgaagtctactgccaatagacactgcaaacaacaccaacggcaattgctcaggcaataaagattggaaacatggacataaggagaggcaccatcatgaacctaggagctacccttggcagtgcccaccaaaagacaaagagctaggcttagcctcatagaaaggggtgacaccaggctctcacacattatgatcg

SEQ ID NO: 40007 - DNA, 148 bp, Glycine max
  unsure (1)..(148): unsure at all n locations
  Clone ID: PAT_MRT3847_136126C.1
ngcnnaagacactcgtacgcnaagctcggtattcggnncgaggnnaatnagcgatctttcgctatngaactgactcattnccnngtggacagnaaagaanctccgagattaccnnngaagagaagcttantcaggactgactcagnan

SEQ ID NO: 40008 - DNA, 541 bp, Glycine max
  unsure (1)..(541): unsure at all n locations
  Clone ID: PAT_MRT3847_136127C.1
aaatcaattgaaagggaaataaactcagtaaatgacaatcccttgattgatgtcacaaggnaataaggcactgaatggtggtaatttccaaggaaccccaattggagtttcaatggataatgcacgtttagctgttgcttcaattggcaaactcatctttgcccaatttactgagctagtcaatgatttgtataacaatgggttgccatcaaatctttctgctggtagaaacccaagtctggattacggtttcaaggcatctgaagttgccatggctgcttattgttctgaacttcaatatctagcaaatccagtaacgagccatgtgcaaagtgctgagcagcacaaccaagatgtgaactctttgggcttaatttctgctttgaaaactgtcgaagccgttganatattaaagctcatgtcttcgacttatctggttgcactctgccaagctattgacttgaggcatttggaggaaaatttcaagantacggtcaagaatactgtaagcaganttgcacagaaaacattaattacagaa

SEQ ID NO: 40009 - DNA, 986 bp, Glycine max
  Clone ID: PAT_MRT3847_136128C.1
gtgccaatggttgggcttgtccttttcttcggggatcacatttcagaaacaattacttccttcagagaatcacggctcagcccagaatggctaaaaaatgctgcagaagaaatggctaaaaaagccagaaattatattaatcaagtttgcaacatatttacttatatgacagcaattcttgatcctcgaataaagggagacctgatccctgatagtttaaactcagaaaactttctggatgaagcaagaacccattttataagaaattattcagccagccatttctcatccatgagttctggatacaatgctcaagaaattggagatggaggaagtgtttcctttgctgaggaaatagcacgcaagaagcgaaggacaagcatgagctctgccactgatgagcttacgcagtacctatcagaggctccagctccaataccaacagatgtcttagagtggtggaaggtcaacagtacacgctaccctcgactatctgtgatggctagagatttcctggctgtgcaggcaacttcagttgtgcctgaagaacttttctgtggcaagggtgatgaaattgacaagcaaagaatctgtatgtcacatgatagcacacaagctattctttgtatcaagtcatggattcaggttggcatcaagtttaagtttaaatcaactgagatagattatgagcggttgatggaattggcagctgcagctgctgcaacagacaatagtccttcaagttctgacaagaagcaaagatagtgatagaagatggtggcactaaataatcaacaggcatcgttactgtcactgttagattatatcttgacttcggcccattgccacttcaacttagaaggggtaactggtgcgtgttttgttcttaagtacttgttgtatcatattaatataattatgttgtacagttctgaattctggaaattgctaaccagagaaaaatcaaatatgcaacttgacgatgg

SEQ ID NO: 40010 - DNA, 577 bp, Glycine max
  Clone ID: PAT_MRT3847_136129C.1
cttctgcctccaatcaccctcagcctgcaatttctacaagggaactgttatttgaggagaaaaacaggctaggttcaattcctcctagctgtcataacaagtgcaatgattgccatccatgcatggcagttcaagtgccaactttgccaagccatgactctaaccctccagatcttaccaaaactgcagccatggcaacttttcttaacccttcttctccgcaaggcaacaggtactccaattacaagccattggggtggaaatgccattgtggtgaccacttcttcaacccgtagaaatttgtaaaacggccctcttattttttgttggttaaattttaatatttgtggcttaggggtcagctagggtaacagatttgcgtacgtcagcatggatcctatacgttagagcttgatacacttgtacagagtttgttacagacctcatgaatttcaactttattctgttgcatcttaattttgagaaagttgcctgttcctgcttttgtgtctgttaggatcatatcatttgagttattgtgtgttttgatactcaataatcctttacagttttatcc

SEQ ID NO: 40011 - DNA, 610 bp, Glycine max
  Clone ID: PAT_MRT3847_13612C.1
cggccgctcgaggcggcgggcgggacttccacaaggatcatatattcctctctcactctcactatctactctaaacccttcccatcctatcttagagcaagatgaaagcatcacccatcgttagttgcccttggaaggccgtcatactttgggcatgcggatgagcttcagggtgagcgagctgagttccactccatgttagtgtttgtctacgcgcgataacgttctcaacccctctatcacacctacgctgatcctggatcgaggaacccagctgtgccgctgccaatatccctggaacccgaatctcatcattttggtgcactctccgaaggcgctgacagctcatgtgacttgggtaactcccctgtcacagtgggagccgttattaaagtgcacgaagccctcctctcacggattgagtattgaactggacatctgcccgagtgtgtggtcacatgctagatactgaaagaagacactgcgggattggaatcatcatacatacatataggctcctgtggagggactctctatagcacttgatgttaagattgtgatgacttatgcctagtggaaatcagaggctgctactgcatggtaccccatg

SEQ ID NO: 40012 - DNA, 468 bp, Glycine max
  Clone ID: PAT_MRT3847_136130C.1
ctgagtaaagcgaagaagataatacaagggagggtacaggacacagcccttgcgccttatgtacctcctgtgtaatgaggaaatgctccaacttccagccactttacgtatggcgtgcgctagacagagtgctcacgctactttctactggagagcacccgatgctttcggcgccatagcccgcctcatgtataaacaggaacctgcacatccaatgttacctatggaacactaacgagtgaagcacaagactctctaacaacgggctgatctgcggatcgtgcttatagatcaaaggctcgaacagctatcaatgatgtcactccagaaaggccttccatccttctaaccagctccaacttctggccatctaactacgctcttccaaacgacaatggccgctggtgcatccttcctggcccttacttagatctcgccatgcccatgctccttaaaatcgtcgaatac

SEQ ID NO: 40013 - DNA, 236 bp, Glycine max
  unsure (1)..(236): unsure at all n locations
  Clone ID: PAT_MRT3847_136131C.1
atatccatacactatgctttcatttctcagggatgcacctcaccacttaacatgataccatgctatacacttccataatacttgccccaagatatcacagatcctcattacttgcctaccgannctacttgtatcctnnnacatcccatacannnntgtgacatatcatctaccttgttaaaaagacttgaaacactatagaacaggtgtgtctccatactcatgcacccctcaca

SEQ ID NO: 40014 - DNA, 280 bp, Glycine max
  Clone ID: PAT_MRT3847_136132C.1
ctctctctctctctctctcaccatttttaattaacaacatggcttcaggaacttcagcaccgcgattgattcccgagaggggtcaggttctaaagagggtcctcaaaatggtgttttcttgtttcatgtgtgctggctcttccaattcacatcatcccaaaatcatcacttcttctccagtgtttccagcaccttcgcgtatctgaatttgctcttgtattgacctttgacctctcgtcaaattggacatctgggttcgtcctacaaccttgtctttctc

SEQ ID NO: 40015 - DNA, 323 bp, Glycine max
  unsure (1)..(323): unsure at all n locations
  Clone ID: PAT_MRT3847_136133C.1
ctgcagtgcgnnnttgcatgcgcatgtacgtaagcttaagctcggaatcgagcatcggcaaggtaaggcacttgaagcatggaatgctctccttatacaactcttgtgtcaaattcttttcatggtaacataacgactattcttggctggcttggtgttcatgctacccttatacttaatagaagccttacagtatatcatgatgacctactcaaactatcagcaattcattagcatgcaacagccacgcccttagctgctgatgctgtaggacccgtgtcttcgctagcgggtgaggatcctacccgttcactggattcgcg

SEQ ID NO: 40016 - DNA, 474 bp, Glycine max
  unsure (1)..(474): unsure at all n locations
  Clone ID: PAT_MRT3847_136134C.1
ctcgtttcgcaaatccaaggaggagaatggaggtttttttgtgtttgtgacccttgtgttgtgcggttgtgctgctggtaaggagtgcacggacattcgtacacgatcacacatgctaaggtaccagcttttgacatccaagaatgaaaggttggaggaagaggccatgtctcaccttcatttgacgccaaccgattaatctgtatgggcagatttgcagccgaggaagttcttgacggaacaacaccaacacgattgggcagttatgtataagaatattaagaacatgggtgtgttcaagtcacctgaaggatttctcaaagaagtgcctcttcaaggatgtgaggttgcataaggattccatccttggtggagcacagcagacaaatttggagtatctgttgatttggagctntaggaagacggttggtctatccactcctgggactccttatggaaggtgggaagttgttg

SEQ ID NO: 40017 - DNA, 360 bp, Glycine max
  Clone ID: PAT_MRT3847_136135C.1
cttggaatttgggttgaggggagattgcaggagggatttcacattcctattcgcattgggggttgtgttattcatcagagccatgataattattaactaggggattctctaaccattgttgattagcttgatgataattgttgatttctttgcacattttacatgtcgctagcggatcccgttcgacttggtaacggttgatagcgtcgctggtgggaatggattccatgggaggacccttgagtgtgtgagacagaccaccgtacacagcgcttgaggacttggagagaaaaatgctcaatggattagtggatttcaatacgctgtggggagtgattgccgaatagtgacttgggactc

SEQ ID NO: 40018 - DNA, 402 bp, Glycine max
  Clone ID: PAT_MRT3847_136136C.1
ggtttcctaactttttttacctaaaacccgcctggatgtccacttccggggtttttccttcattccaatactcgactactaattataacaaatcttctgctcaggaggcccgtgatgaccaattctttgataaagaaaattgcaatgtacatcaacccaaaacttcacagagactgccatttcaacctaaaattatgaacaccagcgctctgtcagagagaatggaagagctttcatatcaatccactatcgattgttctgttgattttgaccaaatctcacgatttagtgaagatttcgcccttccatcaaacttccttgaaccaactggcttgaaagtgtgtcttcatacgaacacaaccacaagaagatgcacctattgcaaagactgtggaatcttta

SEQ ID NO: 40019 - DNA, 448 bp, Glycine max
  unsure (1)..(448): unsure at all n locations
  Clone ID: PAT_MRT3847_136137C.1
gttgactattctctacaaaccacaaagacattggaacactatacctattattcggngcatgagctggagtcctaggcacagccctaagcctccttattcgagccgagctgggccagccaggcaaccttctgggtaacgaccacatctacaccgttatcgtcacagcccatgcatttgtaataatcttcttcatagtaatacccatcataatcggaggctttggcaactgactagttcccctaataatcggtgcccccgatatggcgtttccccgcataaacaacataagcttctgactcttacctccctctctcctactcctgctcgcatctgctatagtggaggccggagcaggaacaggttgaacagtctaccctcccttagcagggaactactcccaccctggagcctccgtagacctaaccatcttctccttacacctagcagg

SEQ ID NO: 40020 - DNA, 2852 bp, Glycine max
  Clone ID: PAT_MRT3847_136138C.1
taccggtccggaattcccgcggcgggccacgcgtccgggaaagcgtcactctctctacccgctactcaattaatccacttcggggaattatgggttgcacccacagacgaggaaatatgttggatatatcagcttagaagactaggtgtctttggtgctgaacaaaccattacttcacatcctaagctggatgagatcagccatgacgagcgacctcataaacgaatgcgcgaaaaggtgccggaatatcaaattatgcaacgcgattaggaattaaaaaaatacaaagcttagcgacgcgggtttcttccataattaagcataattagtggaacagataatgttattttggcggtaatagattagatgctgaatgatgatggacgaatgagtgttagtttcagcaattctcttccgtaagcaaagagcagtagctgaaacaaacaaacgaacactgtaagcatgaacaagcgccaagaagatttgcgcaacatagctactaccctcgactccagattcaatcagaccctcagaaatgttcaagggttactcaaaggtcgaagcatacctggtaaaatattattgagccgtagggtagatcctcccgataactcaaactcgaagatatcctcaccaaattacaaaaggagcttttctcacaatgatgctggcacaagtgataacacatctgggtgcagtagaggctgttactacgtcagttatcttgtttactaagaggagtttaagagtaaaagtaaacctattagtattgcctatgccaataaggtgaaagtgtcgacctttatttgagtgatcccgtcctgaagctttcgagaagtctacagaagggtgcaagagctacagattctgcgagagtaatgaagttcacctaggggctttcagcgactgtggttatattattttaattgcgtgaattaccttggagtggtttttcaaacaatatgcgtcctaaagtgtggagacttctcttgggatatgcaccacctaattcagatagaagggagggagttttgagaaaggaatctccttgagtattttgactgtatttctcagtattatgatattcctgatacagaacgttcagatgatgagatcaatatgcttcgtcagattgctgttgattgtccaagaactgttcctgaagtttcattctttcagcaacagcaagttcagaaatcattggagcgtattctgtacacatgggccattcgacatcctgcaagtggatatgttcaggggataaatgatcttgttacgccattttttagttgttttcttatcagaatactttgaaggggatatagataattggtcaatgtctgatttatcttcagatacaatctctcatttactcaacctcggattctggggcttgtttttgtggcgtgagaattggtcaggaggattgatgagcctgtttcctggcacatcgaggatcagcgacttgaatttcttcagtttgctttctgctggtgctactaccttgccatccatgtgataccattcctcctcgtcccaagcctttggtgaacgttcagtccctgccgatgctttagtgaactgccacgcctattagtctcccagctctgtgttgaaggtaaaccatgggaatctagtgaagttggagggattttgcatagacccagaagaagcaaattgctatctagtctatgaatatgtagagaatggatctctatactcatggctgcatgagggcaaaaaagaaaagttgagctggaaaataaggctaagaatagccattgacattgccaatggtctccaatacatccacgagcacacaaggccacgggttgtgcacaaagacatcaagagcagcaacattctcttggactccaacatgagagccaaaattgccaattttgggcttgcaaagtctggaatgaatgccattaccatgcacattgtgggaacacagggctatattgcccctgaatatcttgctgatggtgtggtctctacaaagatggatgtgttcgcatttggggttgtgttgcttgaattaatttctgggaaggaagtcattaacgagaaagtaaatctcttgtgggcaagtgccatcaaaacctttgaagtgggcaatgagcaagagaatgccaaggaggctaaaggaatggttggacaaggatattttaagggagacattctcaatggaaagtttgatgggtgctctcaccgttgcaattgcttgcttgcatagagacccgtctaagaggcccagcataatggatatcgtctatgcactgagtaaaagtgaagatatgggctttgatatttccgatgatgggattggttccccacgggtgatagctaggtgagatgggttgaggtactgacctatctggttttgtttttggtcagagaaccatttcgacatttttgtctaaagaaatccattttttttttttgtaatctctggttggggtggccttgatcctttttgtatgcgattaggttttcttgttgctatggatatgccgaccacgaaaaagggtatagaagaccacccccaataagtagtacttcgtgaagtagggcttttctgagcccaaaaataatgagtgtaataatcttaggctgtatatgtaactagtctctacctatgctagcacacagttatgttggtttgtacacatgttgtaaaacgatttgtttatatagtaactagcataatacttgtgcatttgcactgattatgctggattttatacatattttaatagatgtctaattcttctcttttttctcttttcagatcgaggggttattattgcttcgtcgaggacaattttttccattgtctattttctaac

SEQ ID NO: 40021 - DNA, 441 bp, Glycine max
  Clone ID: PAT_MRT3847_136139C.1
aggaccggaccggaaaacctgggactgacccacgtgaccgttcacacccaccgagcaaacgaaaggggaagggggccagaaacaggacgggaccgaaccaccccccagcagcaacacggagcggatgggagcacgcggaaggagagacagggacagcaacagagcgacgccgcccaagaagagacgaggagcccggacaacaacaacgggcacaaccacaagcaacggccaggcacgcacacgaacacgaacaacaacaacaacaacaacaaaaggcggggggcgaaagcagatgcggacacagaccacgcaacgcaaaaacatcaccaagggcaaggcaacggccggcgagccacgcacacgaacaagaacaggcagggaggcaagcgaggaggcacgagacaagaaggcatgcacagggaccaccaagggggcacaaag

SEQ ID NO: 40022 - DNA, 583 bp, Glycine max
  Clone ID: PAT_MRT3847_13613C.1
ataaactaagctggcataattgttggtattttactttattgattatacacggaaagtggtagacagagcctattaaactatatgtataattaactaaaagaaaccaagatgatgatcaatatgcataaaagcctagatggatccgtcccctgaacgatcacaatggtctccacaactaatgaaaatgtgtaaaagtctttaccaaatacctgaacttagtagggtcttttgctatggttttggatctctcaaatataaaaagaggattggtatgaaggaggagatactcgaggtgacccatatcaccattggggccaatatttctgcagccatagccaaaaggattggcagggccagcttggcgcttctccgaggaggttttggagaaaaactcctttccctcctcttccaatcttgcaaaaaccttctttggcacactgtgattcaccaccttgaagaaaccgtattccctcacatgctttcaccactagttctgccaacttcgatctttccagggaaagggtctatggtcggaacttccatggccttttgtttatttggtttttaccatcaatggatgttt

SEQ ID NO: 40023 - DNA, 353 bp, Glycine max
  Clone ID: PAT_MRT3847_136140C.1
catcgtctagctatctcgatcgaacatgtccaagcgtgcctgtcaccagtaacacagcagagctggcactgtgagcgtggcaaacaacattcaggcatgatagccagcctgcatcagaggcacgtgtgtacacagagggataaataatgcccatgtatacccaaggtaatactgctaaaacgccgagtaacgatgcgtacaggtaatacaaactggggaactgagcatgaacgatgagagccgacggttgtggatgcattgacatgttagaacggtaggacgggcgaagttacaaattacgttggagaatgcctgtgtaagtgcgccatgaccaagggcatgcgtagcgaaag

SEQ ID NO: 40024 - DNA, 1532 bp, Glycine max
  Clone ID: PAT_MRT3847_136141C.1
gacgcaagctgaattcgctagagggtatgagtctccactaccctggcctgaaagcaaattgaagatattgtacaagaatgttgcacacccgaaactagctgcatacgtaaaaaggcataattggttgatggagtctggagagtatcttacttttccccaaaaccaatctgagttcaagggagggattcttcactatcttgagtccattgaagagatggtaccagacattgaatggggtaaaaatattcgtgttgtcctggacattggatgtacagattcaagcttggcagctgctctctttgacaaggagattttaacattatcactaggcttgaagaatgacctagtggacttagctcaggtggcgcttgagcggggcttcccagcagtgattagtcctttaggtagaaggaggcttccttttccaagtcaaagttttgatgctatacattgtgggggttgcagcataccttggcattccaatggtggtaagcttctattagagatgaatcggattctacgacctggtggatactttattatgtcaactaaacatgacagcattgaagaagaagaagccatgaccacattaaccgcatctatttgttggaatgttctggcgcataaaagtgatgatgttggcgaagttggagttaaaatatatcaaaagcctgaaggaaatgacatttacgaattgagaaggaagaaggttccaccactttgcaaagaaaatgaaaatcctgatgcaccctggtatgtttccataaagacttgtttgcacaccattccaattggaattgaactacacggagcagagtggcctgaggaatggcccaagaggctcgaatcttatcctgactgggtgaacaacaaagagaaagtggttgcagacaccaaccactggaatgctgttgctaataagtcatatctcaatgggttgggcattaactggacaagtatccgaaatgtaatggacatgaaatctgtttatggaggattggctgttgctctctctcaacaaaaggtctgggtgatgaatgttgtacctgttcatgcaccggatacgcttcccatcatttttgaacgaggactaattggtatataccatgattggtgtgaatcatttggcacttatccaagaacatatgaccttttgcatgctgatcatttgttctcacggctcaaaaacaggtgcaagcagcctgtgaccattgttgtcgagatggaccgtatattacggccaggaggttggataattatacgtgacaaagttgaaattctaaatccgttggaggaaatattgaaaagtatgcagtgggagattagaatgacttttgctcaagacaaggagggtatcttgtgtgcacggaaaactatgtggaggccttgagtctctattatatgcaattttcttcttgtataacatcaacatcaacatcaaccacaagtgtgtgtacgagttatattaccatgttcttcaacgtgaaatatgatatatatgaaggaatttttagaggcatccttcatccaac

SEQ ID NO: 40025 - DNA, 295 bp, Glycine max
  Clone ID: PAT_MRT3847_136142C.1
cggctcgagctcgagccgaatcggctcgagatatgcttagcttctggccacggtaaaattataagtaatatcttctcgaatgttgtttgcagataatgtgtactctctgttgaatgtttgtttcagtatatgcagtggcattttcatttagagtgcatttgatttgctaacaaatgaaggactagacaatacaaatttccaaaaaatttaaaatacccccaatttagttaagccagcaagcacaatgactcactcgggcttgtacgcaatgcgaactcttactccatttctagaa

SEQ ID NO: 40026 - DNA, 367 bp, Glycine max
  Clone ID: PAT_MRT3847_136143C.1
aaaaacaaaatgggaaaaaaattttttgggggaccaaaacctttaattaaaggggaaggccacccatttccttcccaaaaaaagaacacccaaaatcccctaaaccacccaaggctttttggaccaaaaaacaacccaatcctttacagggctcattaaacaaccccttggggctttggctttaaaaccggggaaaaaaaaaccatgtaccccaaaatatttttaaaacaaaagaatggccccttttctaaggaattctaaaggcggcctggtccagaacccgggggtaaaacaggccccaggggggtttccccggttcacacaccataaacccctcaaatttcggccattggagcatttgcccggg

SEQ ID NO: 40027 - DNA, 535 bp, Glycine max
  unsure (1)..(535): unsure at all n locations
  Clone ID: PAT_MRT3847_136144C.1
aattcggctcgaggggagcaacttttccaaagaagagcaacaagctctgcagacatggaaccaattgaaccacttaattgataatgttcagggtttacccaatgcagcagaagctatcaaggaggctgccagtgcatggaatagctttatttcctcaattgaagagcaaaaacaaggtcatggaaatgatagttcaagagctaaagagaagcagtgtccccattttcttaataaaatgaattccactgacttggtaatagtagttataaactgcaattaccttgcggcctgacacaaggttcttccatcaccataattggcattccgaatggccttctaggtaattttcggattgacttgactggagaaccgcttcctggggagcctgatcctccaattgttttgcactataatgttcggcttcatggggataaaatcactgaggatccagtaattgtccaaaacacctggactcaagctcatgattggggtgaggaggatcgttgtccatccnccactcctgaaaggttgagaa

SEQ ID NO: 40028 - DNA, 121 bp, Glycine max
  Clone ID: PAT_MRT3847_136145C.1
gaagctaaaaatccctcgtttatgatctagaattgcaacacctgggggacccaatttacagtggaagtaatgaccgttgggattttctttcgaggaggaacaccctgagggattgaaatgg

SEQ ID NO: 40029 - DNA, 1621 bp, Glycine max
  Clone ID: PAT_MRT3847_136146C.1
atctttttgagactaagaattgcagacaaagaaggccatattcggaatatttatttcccatttgacacagagacggacacagcattaagtgtagcaactgaaatggttgcagaactcgacattactgatcaggatgttaccagtatatcagatatgatagacggggaaattgcttccttggtacctgaatggaagccaggaccaggaattgaagaaactaaccattatttaaataaaattgtttgtcacaattgtgtgtctaatcaaggcagaaagaacttgcagcttcctcaatgttgtaggcatggatgtgcttcaatgcatgggcgcttcgaggagattaccttcccatctgagtgtgacaatcatgttagaggggatgcacctatcaaatcaagccaatcagactgcttgcagcgtcaggaatcatggaatcatcatgaaagttgtgaactgagtccagtagagtctgatgaaagtcattctggtgagcaatttgataaaccagtattagcagaagacaaaggaaaaaaaggcatttgggaaaacaagttcgcacatgatccaggaaatcccccacgaagtttatcaggaaattatttctctgctatccgttttttgtgttgtggccctgagattgaatatgagaaagaggttcgacaagaaatgagatggatcaaagcaaaacacaatagggagtcaagggaacttggagataaacggtttggtatagcaactgaatcttcacatactagtaatagagagcacaaaactgaacaatgcattatgccaccactgccacagacagcaaacggtgtgcacaatgggattcacttgaaacccttaggtaatatctggaattatgaatccagttgccgttctcaagtccaaaagaaccaccccaatttggacacccaaagggcccaaaattgtgaggtgatgtgttctcacaaagaaggtatggttactgagaagagtttttacacaggctcgcttagagacactctacacaggacagtttcccttcctgttgatgctgtggatgtttagttttatgacacactggttgcattcttttgtgcattatgtacatactgtcctagaggctatctgatttctacaccccacctttttttcttcttggaatttcaatttccccacaaagatacaaaatcctttccgtacaaaagtatcaatagtgtcatatacttagaataaacagatttttattttttggtgagggggcggtgatcaatcatggttcgtgaacgtggcttgtgtaatagtagtacttagtttaacaatcggtcaaatctatgtgcaattttgtccaagtcttttttggaaaacaaattgtattggaattgctaggaatgagaaaacgtgtcacagttgcattatgtttttttttctaaatttgacgctgtggatatataattttatgatagtcgttgcattcttttgtgcattatatacatacagtcctagaggctatctgatttctacaccccaccttttttctgtcttggaatttcaatttccccaaaaagtaaaatggtaccatagacaaaactgctaaaaatcataactgaagcatatacccatacatagataaaaatgg

SEQ ID NO: 40030 - DNA, 286 bp, Glycine max
  Clone ID: PAT_MRT3847_136147C.1
cagggataaattagttaaacctacatgaatggtagaaagcaatacctagaaaaagcgtatcaatcacaaactaaaagacaatggagaccaaagaaaaacttactgaggcaaaaactaaaaagatggcatgaccataacaaggaaccggaaaagggcagtgatccaatgaaaccaaaacttccattctagtaaaaataacaccagacaaggcccaactaaacctttatttcaacaaaaaaattaatggacatgtgtaacaaaagggagagaagatctcaccaatgcc

SEQ ID NO: 40031 - DNA, 420 bp, Glycine max
  unsure (1)..(420): unsure at all n locations
  Clone ID: PAT_MRT3847_136148C.1
acanannaaaanannnagcaacgaaagccccagcacttaagattaaagtagcaaacgggggctatacctcggcaccccaagaaacaaatatttaccttcgatattgctctttgtgaaaccaaatttaataaataagtctttaatctaggaaggaagcacgcattggttggacattttacataggagaacatcccacacatatgctcaacacttggctgtctcaaagacgggccattgactttggagtaaaagaaagcagtgcactcaagggaatgcctttgagggctccttcttcgaaacacccggagggtctattgaagtcacagaaagatggggcccagttgttaaggccgggtgggacaccaaaagggcccaaccaaggcctgcgacagaacaatgacaccggcggggactaaggaa

SEQ ID NO: 40032 - DNA, 307 bp, Glycine max
  unsure (1)..(307): unsure at all n locations
  Clone ID: PAT_MRT3847_136149C.1
gggtgtcaggttctggaatctgcgcaaagcgagtggtggtggacgctcgccagcacaggttgggtcggctatcgtcgaacgtggcgaatgagcttctgcatgggcacaaggttgccgtcgtgcgctgcgaacagatttgcatctccagcagtctggtgaggcagaatatgacatacgtgagattcctctgcanacgcatgaacaccatcacctcgcatggtgctatcgacttctgcgccgaatccataatcgtctaggtcaccgttcatggaatgatatcacactcgacaacacgtggggaagctgc

SEQ ID NO: 40033 - DNA, 235 bp, Glycine max
  unsure (1)..(235): unsure at all n locations
  Clone ID: PAT_MRT3847_13614C.1
ggataaagatgatgctactagtccattaacaaaacctgtgccattgaagaatgagatccatacaaataacattagtgacggcaattttcagttttttcaggagaagcattttgatgataaccaaccactaggtcatacttttgaaggctatgcttcaactctgtacaacaatgctttnaatagctcagtatgacacagttggattatcatccattcagtttaaatcaagntatgg

SEQ ID NO: 40034 - DNA, 272 bp, Glycine max
  Clone ID: PAT_MRT3847_136150C.1
gcgtccgggaagggtagagacagagtctctccaaatcattgcagtgagaatggatcgtaatggcgtcctcctccaccaccaccaccacccaatgtctgccccgcttgcttccactcccacttccctttttgccctcccccatcttccttcccttacgccaaccttcactccaagataccccgacgctgcgacaaccctatcattttctcttgccacctctgctctctatagttcagttccgatcgcggatcctcctcctacacgccacacct

SEQ ID NO: 40035 - DNA, 341 bp, Glycine max
  unsure (1)..(341): unsure at all n locations
  Clone ID: PAT_MRT3847_136151C.1
gtntntaaaaaaggggaaagggtgtctagctngctactcnggnanaccaatnggaaggattgaccggctcactcagctgacgtggcgccgcggccgcccttnttttatctcctagtttttttcttttttttgagagaaaaagtgtttgtggggcatcgtggagagtgtatactttgcctgaaaacactgttgtgccttttgaccctcaaagaaaaattaagaagtgggggggcaaaggggattaaaataactttcagtttaatttgctgaaaattccactggttcttctggggtagggtctacaacctttgcatttgggagtttttttaataaaaggtcct

SEQ ID NO: 40036 - DNA, 448 bp, Glycine max
  Clone ID: PAT_MRT3847_136152C.1
aaaggaaaaaacaaaccccaacccccggtcccaaagtttcacaaatgggcaatggcccggcgggggggaaaattcggaaaaacaaattttggccaaaacccccccaacattttggggggggaccacagccctgggttaaatccaaaacaaaactatttttcatgggggaaaaaaccctggtttccccaaaaagggccccttttactttctcccccccctggggtaaaaaacgggggactttactattcaggatgggtcttaaaaaaaaacccccctggtatcccttcaactaagggttgggggaaaaaaaaacatgcccctcccggggacccccagggagattggcccccgattgccccttatgaagcctggttaaattctttcgggggggaaggcaaaaaccctggtggaaccccaaaacccccccaggaccccaaaattaatttca

SEQ ID NO: 40037 - DNA, 112 bp, Glycine max
  Clone ID: PAT_MRT3847_136153C.1
catgccctctagctgtcttagcggcgcttttttttttggtgaaactccttgaaccaaattcttcatctcattcaatcaagcctctttatgattaacgcgaagaatggtcaaa

SEQ ID NO: 40038 - DNA, 388 bp, Glycine max
  Clone ID: PAT_MRT3847_136154C.1
cattttcctatagaggacaagagagcgtgctaccgttcgcggccacagtccatgacattctagcgcatgaatggtggttttaacaaactcgggcgtggacttgtataattcatccgttgcttcaactgaagaaaatgctgcccctaggacaaggccataaagagggtgtcggtttggaacattggtttaacattgctgcattcagagatttgcaggaagcttgtgtctataaacaatatacactttcaaatactctatgtgaagatgcactactgtgtaagctgagctatccactctcatgttatgagggttgagatcctgcaccgtcaggtggaagcatgagcgtacacatacattcattaagctcagggattatgcaccgagatct

SEQ ID NO: 40039 - DNA, 265 bp, Glycine max
  unsure (1)..(265): unsure at all n locations
  Clone ID: PAT_MRT3847_136155C.1
ctacaataatcttaccggaacagttcctctatctatgcaaaatgnctttaacttgaggctttcattcaacaatttgaagggtcccattccatatggtttcagtgggagtgagctaatagggaacaagggtgtatgtagcgatgatttctattacatagctacacatcaattcaagcgttgttcagcccaagacaacttagtagtcatggccggcagcaacaaagtaaggcacaagcacaatcagctggtcatagttctccctatc

SEQ ID NO: 40040 - DNA, 1031 bp, Glycine max
  Clone ID: PAT_MRT3847_136156C.1
tacggttgggagaagctcgagccgaatgaggacacaagacgataacaaatggcatcatctcagtcgaggaagagagttgacgccgtcgattctcgcgctgcttccgttctcgttcgcgccaaagatggcagtgcttttgctcgttgcgacgattgcaagaagaatgtgccggttgcactcatcgacatgcacagttgcagccttgaagctaaaattaaaatgaacctagacgctcaagttgtggaacaggctgctgaagctaagaagccggagaggaagaagcccaaatctaaagagcctatggcaaaaaaaagctaaagttgggaaggggaagaaagtcaaggatcctaacatgcctaagcgtcctcccacagctttctttgtcttcttggatgattttagaaaatctttcaaagaagctaatcctgattctaaggatgttaaaagggttggtaaagaggctggtgaaaagtggaggtctatgactgatgaagagaagaagccatatcttgacaaagttgctgagcttaaggaagagtacgagaaggctatggaaagctatgaagctggtcaagatgaagaagatcaaactgtgtctgataaggaaacttctgataaggaagctgctgcaaaagaagttgcaatagaagttgaagaggagctaactgacgaggactaatggttgcattatggcactccttgaacttgatagctattattctaagggccacataattacttaacgactagggttgtaaattttggaacatgttttagttggagttaaaaactgttgaaatccatgcgcaatatcttttcattttttgtaatgctctcttgtgatgttcgtgaatggtagtcacattgttttctacaagaggcttgttggtctcttttaggattgattattgcttgcatatgtttgagcctttgaggcaattggtaaatagtctgatggctacagcgatattcattggattgacatgtgcgttgcattgaataggagttgcttagctttgttggcttgattc

SEQ ID NO: 40041 - DNA, 931 bp, Glycine max
  unsure (1)..(931): unsure at all n locations
  Clone ID: PAT_MRT3847_136157C.1
ttcttcccacgcgtccgcccacgcgtccgggcacgcttacttccacgcgtgcgttctgctgccagaagacgacagaagggggagtgagtgagggcattgttgtttaggtacagaaaaatggcatcatctcagtcgaagaagagagttgacgctgtcgattctcgcgctgcttccgttctccttcgcgccaaagatggaagtgcttttgctcgatgcgacgactgcaagaagaatgtgccggttgcactcatcgacatgcacagttgcagccttgaagctaaaattaaaatgaacctagatgctcaagttgtggaacaggctgctgaagctaagaagccagagaggaagaagcccaaatccaaagagcctatggcaaaaaaggctaaagttgagaaggtgaagaaagtcaaagatcctaacatgcctaagcgtcctcccacagccttctttgccttcttggatgattttagaaaatctttcaaggaagctaatcctgattctaaggatgttaaaagggttggtaaagaggctggtgagaagtggaggtctatgactgatgaaaagaagaagccttatttggataaagttgctgaacttaaggcagagtatgagaaggctatggaaagctatgaagctggtcaagatgaagaagatcaagctgggtctgacaaggaagctgctgcaaaagaagttgaagaagagctaactgacgaggagtaatggtggcattttggcactccttaaacccgatgactactattttaagggccacatattgcttagacagactagggttgtaaattttggaacatgttctagttggagttaaatgccgttaaaatccgtgcgcaatatttttttttttttgtaatgtacatgaatggtagtcactttgttttccaaaaaaaaaaaaaaaaaaattnntttttaa

SEQ ID NO: 40042 - DNA, 1663 bp, Glycine max
  Clone ID: PAT_MRT3847_136158C.1
cccacgcgtccgccctcgcgtcatggaaggaaagcctgaaaaccaaaaccatgcaatagttttcactcgtggtgaagctgttcaaactattgacatgaatcaggacaattatcttgaagaagcaatgaaaatgaggaatcttctggaggagttccatgcgaatcatggccttcgccctccaagcattcttggagtgagggagcatgtttttacaggaagtgtctcttccttggcttggttcatgtcaaatcaagaaactagctttgtaaccttggcccaacgagttttagcaaatcctctcaaagttcgcatgcactatggacacccagatgtatttgaccgaatatttcacataactcgaggaggcattagtaaggcatcacgtgttattaatattagtgaggatatatacgctggtttcaactccacattgcggctgggaaatgtcacacaccatgaatacattcaggttggaaaaggaagggatgttgggttaaaccagattgccctctttgaggggaaagtggcaggtggtaatggagagcaagtgcttagcagggatatttacaggcttggacaactttttgatttcttcagaatgctttctttcttcttcacaactgttggttattatgtctgcaccatgatgacagtccttacagtgtatattttcttatatggaagagcatacctggctttttctggtcttgatgaagatgtctcgaagaatgcaaaattgcagggtaacacagcacttgatgcagctttaaatgctcaatttttggtgcatgaggttgtctaacttttttttccaaatgtcctaatggaattcgtatatttaaaactggctattcattaccactttaattttattttattttttgcatcattgctgacatttgaagttaattccagcttctaacatttgtaaaattttccacactttcagttggcaattgcatggaagaagatagtttggagtctcggcatgtgggattctgtccgtgagtttgctagaatgtatgacgctggaatgggtatgatcatttttgcaccaatagcatttttatcgtggtttccattcatttcaactttccaatctcgccttctcttcaatcaagccttcagccgtggtcttgaaatttctatcatccttgctggaaacaaagctaacgttgagacttagcgcctttcatcttactctgtatccctgtggggcttgtatatttagatgtatattatttttgtagttcattgttgagttgtacatttagtctaaaaaaaaaattgaaagatgcctttttaatggttgcgttagttttgccttcttcggcggtttagtttccactattatactttttgtcttgatcagtcttttggaatttttgcgcacaatcaaatttgaggtcaacgccacttgaatgcaagtgctcatattagagattaactctggttggtttagatgtaaaccaagcacaaagggggaaaacagagtcagtactcacttgatgtatcaattgtatcattctctcttactagtcaaccagggcatactagtgtcctaatgttttacacctgatgcagttccatatcacgcttcattctttattaaaataggcttgttttaaataaatagttaaactcttttgtggttaaaacaacc

SEQ ID NO: 40043 - DNA, 1761 bp, Glycine max
  Clone ID: PAT_MRT3847_136159C.1
cacaccatgaatacattcaagttggaaaaagaaaggatgttgggttaaaccagattgccctctttgaagggaaagtggcaggtggtaatggagagcaagtgcttagcagggaggttcgagggcttggacaactttttgatttcttcagaatgctttctttcttcttcacaactgttggttattatgtctgcaccatgatgacagtccttacagtgtatatattcttatatggaagagcatacctggctttttctggtcttgatgaagatgtctcgaagaatgcaaaattgcagggtaacacagcacttgatgcagctttaaatgctcaatttttggtccagattggtgttttcactgcagtaccaatgataatgggttttatacttgaattaggattgctgaaggctgttttcagtttcatcacaatgcaactacaattgtgttctgtcttcttcactttctcattgggaactagaactcattattttgggcgtaccattctccatgggggtgcaaaatatcgtgctactggtagaggctttgttgtccgtcacataaaggatgctgaaaattacagacctgttttcagtttcatcttagtgcaactgcaattgtttgcattgcttcttattttctaaatcggatctagaactcattattttgggcgtaccattctccatgggggtgcaaaatatcgtgctactggtagaggctttgttgttcgtcacataaagtttgctgaaatttccggtttcgagtggcagaagactgtggaagattttgatgattggacaagttggcttctttacaaaggaggagtaggagtaaaaggagaaaatagttgggagtcttggtgggacgaagaacagatgcatatccaaactttgaggggtcgtattttggagacaattttgagtgcaaggttcttcttgtttcaatatggtgttgtgtataagctgcatcttaccggaaacaatacatcacttgcgatatatggattctcatgggctgtcttggttggaattgtcttgatatttaagatctttacctacagcccaaaaaagtctgctgattttcagctagtattgcgattttcacaaggagttgcatctataggccttgttgcagctgtgtgtcttgttgttgcctttactccactgtcgatagctgacctatttgcaagcatccttgcatttatccctactggatggggaatattatccttggcaattgcatggaagaagatagtttggagtctcggcatgtgggattctgttcgtgagtttgctagaatgtacgatgctggaatgggtatgatcatttttgcaccaatagcatttttatcgtggtttccattcatttcgactttccaatctcgccttctcttcaatcaagccttcagccgtggtcttgaaatctctatcatccttgctggaaataaagctaacgttgagagttagcgccattcgtcttactctgtatccctgtggggcttgtatatttagatgtatattattttgtagttcagtgttgagttatacatttagtctatgaaaaaaaatgaaagatgcctttttaagggtgtgtttgttttgccttgttcagctgtttattagttttgatacattttgtctttgatcagtatttggcatttttgcgtatgtatattattttgtagttcagtgttgagttatacattttgttttgcctaaatgtatctaaatgatagaatattccacgaagccattgacgccattgagg

SEQ ID NO: 40044 - DNA, 1284 bp, Glycine max
  Clone ID: PAT_MRT3847_13615C.1
atcaaatcaaattttgatattaaaggattcgatcgaagagagtgaaggatgcccgagatggatgagcgcgtggttatacagcaacctctttcagccatagcagaggcgtttgagaaactgtccaagagggtgaaggagaggaacaacggcaacgatattcgcttggacacgttctgcgaggcagcgtctctcgtctccgttctcttccgttctcttggcctcgccttcaaattcgctgaattggaatacgtcgccaagctacatggactattggaagcatcaaagacatgttccactctacccgatattcttaaccttgatgtcgccagtgacacagtgaaaacatctggaagcttttcacgtaatctgcgaagagttcggcagggtcttgatcttgtcagagctatatttgaacaacttttgtcaaccgacgatagttctctaaaagaagtggcttcaacagcttatggacaggtttgtgcaccgtatcacacatgggcagtaaaaacagctgtatatgctgggatgtatacacttccaacgagagaccaacttttgatgaagctcaatgaaacagagcaatcagctgataagaagatgagaaggtacattgctgcctcgcttccaattatagaatacattgataaactgtaccttgctcgaaatattacgttggactggtgaatttatgaaaagaaaaacgagaaaatctaagaagttgaatgccctttctgtctgttagaaggcaatgctgtggctccattgtttatcagcaaccttagtacacatgcttcaatttttgtactatatataagatgtaattgtgttagtttttctcaacggctcttggccccttagggggagatgcaccaaacaaccgaataggtttgtactaaattgctaacgaaatgcatgtgaaatttttagttccattttgattcgtaattttttatacctgtatatacatgtacatcatttgttttgaatgacagaaatcgtgatattttaattctgtgagagtactagtaatgaaatgcggatgcaagacattcggggcattattagattattaccgaatatcaaatcagttttctatcactaaaatgatatatgtaggttttattggcggtttgaattgatatatattattcgtatttcagtatgctttttgctcatctatgatttgaaacaaaaagatttctgaaaatgcaaataacaaaaggttgacacaaggcattcagttcaaaaaaaaaaaaaaaaagggaggccgctcgcgatctagaa

SEQ ID NO: 40045 - DNA, 362 bp, Glycine max
  Clone ID: PAT_MRT3847_136160C.1
ccatggcttcgtccgccctcctcctccgtgctcctcatcctcgctcaatctccactcaactttgcataaacggacagatttccattaacggatcttcttcttcttcttcttcttcttgttttccatgttccataacaacacaaagagggtcttgttcctctgtgattacatgttcatcttcaaatggcagagacccaaattcggtggatgaggaagatgtaaaacaagtggagcgcattctcgaagagaaacgacgagctgcattgtctgctaagattgcctctggggaattcaccgtgaagcagaaatctggtctactttcaataatggagggcttggcaaaggtgggggtgccgggtgag

SEQ ID NO: 40046 - DNA, 213 bp, Glycine max
  Clone ID: PAT_MRT3847_136161C.1
ctccaccagcttatttctttccacaacaaatctgtgttggtctgttcttaatccaattttctctcccaacagttacatgattgtgttattttaatctttcttttggtgaattttgtgatatcttaatctggttaattatgaatggtattaattcaacacgaagaaccttctttaatatttaggctttattcgttttaccttacaaaccttttt

SEQ ID NO: 40047 - DNA, 465 bp, Glycine max
  Clone ID: PAT_MRT3847_136162C.1
agagaaaaatccaaaaaaaacttatgcgaaggaacaaaggaaattttccaaaaaaggagtcaaaagaccggccaaaacacttaaaaaacaggtgggtttccaaggtaggacaaagggccctgcaaagaacatgagggaaccgaaaaaagggaaaatggggacacttccaaggggaatcttaaacggaacaacaggaacaggggaaccaaccccttacacatttaaagggcccccaggtcacaaaaaggagcagcagtatgaggcataggggaagaatcacaacatttgttgggacttccttacgcaaggggtaacccttttcttgaaatcatccctcctatctctccacgccttggcaggttcaacattggcaggagattcatcattagggctggaaagcattggtatgacactcaaaactaaactccctaccggaggaacaggtgtccagggctcacttgcaag

SEQ ID NO: 40048 - DNA, 512 bp, Glycine max
  Clone ID: PAT_MRT3847_136163C.1
agctttccaggaaggtttcccgtcatcactgtatgacgtcctcctgtctttgggggggggggggggaaccggggaaaaaatgggttctacggcgcagtctaaggcccattagagtaatacccagggcgggcgcagagtaataccggggaaaattggccagatcgcatgatgagtactaaagggacgaaggaaaataaccgacgcagcaataagggatcccgttgtcaaactaggtgtttttgttgtaattgtagtagtcgatgtagttgtagtactacgagtagttgcagagcgtgccgatgtgcttattaaagtcggtagcggctgtgtgcttgtacgcaatgttagggtcgttaggttggtttccgcgattagcgtaacaaccttgcgtcttgcgataggctacgcaagcgtgtatgtatttgggcaatagtgttgcaaggcaccgccacgggttaagcaaacgctatcatagtggtaacggtggcccacccagcgtatatatatggcat

SEQ ID NO: 40049 - DNA, 446 bp, Glycine max
  Clone ID: PAT_MRT3847_136164C.1
atctcttctcttgtttcccaagaatgaatcatcaatggcgattgaacacgaagacgatcttatagacgagatgaaccctcgacctttcgacgagggtgacattgcccttctcaagacctactggttgagaccttactccacaggcatataatatgcggggaaggacatcaacgatatgggctataaagagaaagacttctgtggtataaaggagcctgatgctgtcttttctgcgccaagccagtgggatcttgttcttgataagcacatgatgcatgaggagcaccctcttctatgtgcataggtgcacaaagattataatcctaacttctgaagatgccaagtctgttatcaatgtgaagcacattgctgagttggttgctgggctaggagacaaggtatcctccactgacgtataggatgggatgcgtgcagctgatgatcga

SEQ ID NO: 40050 - DNA, 445 bp, Glycine max
  Clone ID: PAT_MRT3847_136165C.1
aattcggcaccagaatccaaatcattgagttatttgcagctggaaaacattattcagttattgtttttacatttttctcacaaatctcaaacacttaattagtaagattagaagtatttattgatgtttgtgcattcattaaaaatatttgaaagataataattttattttaagtgagaggaagtgtacaagagcagctatagcaatactctttatggtaccaataggttcaaattctaattgccagtaaagcaggaacaaacccagaagccccaaaaaatgtataagcttatgacataataatcttgccggggtatcatatccatatttctatcatacaacattacagataaaaaccaaccttgtcaaaatcaagatcctgccaaggattgggaggggtgaaagtaaattgtgtgattttaacacaaatcataacatcctacca

SEQ ID NO: 40051 - DNA, 386 bp, Glycine max
  Clone ID: PAT_MRT3847_136166C.1
cgctcatgggtcagaaatatgaccgttctacagggaagaatgaaccttgacaaaaaaaaaatgaaccgctttaatcctgaagatgcattaccatgagatattgacatatgtggataggttcttaatcttctaagaaggttttcttccaccattaatgaacgaatagtatatatggaacatgtatgaggatcatttgctagcatcatctaatgaaagggtacattagcaaaggagcattcctaaagatagatagatttttgatcacccgtccattctgaagtgaaatccacgctgatgcagcttttaaacccaatgggaaataatgatgaaatactcggaatccaggtatgtgcctacaaaggtggcgaggccattattgtcactgc

SEQ ID NO: 40052 - DNA, 831 bp, Glycine max
  Clone ID: PAT_MRT3847_136167C.1
cagagaaagatgctgaattgagaagatcggcattcaagccgaattctccggcctgcaaggcggttgttgatcaagtgcttaagatcattgagaaggaagatagaaaactcttgattccttgtgtaaaggctattgggaatctggccaggaccttccgggcgacggagaccaggataatcggtcccttggtccggcttctcgacgaaagagaggctgaagtgtccagggaagcagccatatctctcacgaaattggcctgctcggagaactacctccaccttgatcactccaaggcaatcataagtgccagtggtgccaaacacttggtccagcttgtgtatcttggagaacagacagtgcagatttcagcactagtcctgctctcctacattgcattgcatgtgcctgacagtgaggaacttgctcgggccgaggtgctcggagttcttgaatgggcttccaagcaacctaacctgacgcaggaccaaaccctcgaggcattgttgcaggattccaagggtaggctggagctttatcagtctagaggttcaagaggattccaaaaattacatcactaggaacatgagtaagttattcattgttgtcgttgtgagctttgtcaatcattcgtattgatccattcttcttgtgagtgtatatacacaatcaaatgccttgtccaattgttcaaatttgtttttttttttccaactataaagagaattgtttgttgcctagtgtatatacaatcaaatgttttatccaattgttcaaatttgttttcaactataaagggaattgtttgttgcctaaaaaaaaaaaaaaaaaaaa

SEQ ID NO: 40053 - DNA, 511 bp, Glycine max
  Clone ID: PAT_MRT3847_136168C.1
aaagtgtctagggaagcagctatctctctcacgaaatttgcttcctcggaaaactacctccaccttgatcactccaaggcaatcataagtgccggtggtgcgaaacacttggtccagcttgtgtatcttggagaacagacagttcagatttcagcactagttctgctctcctacattgcattgcatgtgccagacagtgaggaacttgctagggctgaggtgcttggagtgcttgaatgggcttccaagcaaccaaacgtgacgcaggacgaaaccctcgaggcattgttgcaggaatccaagggtaggctggagctttaccagtctagaggttcaagaggattccaaaaattacatcaataggatgaagggtaagttattcattgttgtggttgtgaggtttgtcaatcattggtattgatccattgttcttgtgagtgtatatacaatcaaatgtcttatccaattgttcaaatttgttttcaactataaagggaattgtttgttgcct

SEQ ID NO: 40054 - DNA, 290 bp, Glycine max
  Clone ID: PAT_MRT3847_136169C.1
cggaattgccgggaccacccccgcctgcttttgttaggttctgcacgctctgcttgcaacgagggtacattcctcgttcaacgccgtaatttgcacaccgctgctgacttcagggttgagaaatggcgcacgaaaccttgatgttcacatctgattatgccgacgagggtccccccgagcaagatgtgcgtaccaggaactatgatgcatttgatagatgcgtgccttgatacagggccctgacagtactgttgactgggacacatgcaccgagaccaacactgtcatgg

SEQ ID NO: 40055 - DNA, 766 bp, Glycine max
  Clone ID: PAT_MRT3847_13616C.1
ccacgcgtccgtaaagagtgagactttcaaaaagacatgatttagtgaaaacaagtgcatttaattcttaacatgtacccatagagaaaaaataacagtagtcttttagaaattccttttaatggccttccatatcaattttgttcttgcagagttatgtttaactctgtaaattatctccctcaatatgagtttattctttatataaatttttaatgatatcacaactagtttagagttgatcttgtataagtgttttcctattctttgtatgactaatcttcactaacccaaattctatcttcattggtggataatggttatcatatcagcgtaccaatatttatatactagaaaaaataatttaagcatccttgatatgtcaggacataatgttacatcattctctggatccagatgcccgtttacatatagaaattggtttgctggtgtatgattcctttagactatagcttttgtttttgtttaatttctgaatcttattcaagtattaattatttatgatgttcgagctccgaaacacagttcctatactttcttgccacatactagtagattattatgtatgctgcgagtgtgaagccaaacttataccactagatacgtctctttaatttgtgttatctatataatgattagaaaccaagatgtaacatttatgaaagtaaagctggatttgcaacattccctgatagatttatacatcaaagatattcgtttttggcattcaaaattcataatttgg

SEQ ID NO: 40056 - DNA, 1654 bp, Glycine max
  Clone ID: PAT_MRT3847_136170C.1
gtttcagtggaattagaatgtatctacacacctggaaaaaggtggagaaggatatttgaaataatacaacctgtagagattaattcctatgcatctgactgtaattcagtggatcttctgtgcgttgttatccagaatgttactcctgcacatgttccagatattgtgatatttatagatgccataacaatagtttttgaagaggctacaaaaattggacctccatcctcattaccaattgcatgtattgaagctggaaatggccattctttaccaaatttagccctcaggagaggtgaagaacattcttttatccttaaacctgcaacttctatgtcaaagaatttaaaggctccggatgaaagctctcagttttcaaaggtgcaatctccaaactcagcaaaatcaagtatttcctctaagagtcctgacagaacaaagattgcttcaattgacgatcagtatgcaattatggtgtcttgtcgatgcaattatacagcatcaagattattctttaagcaagcaagcagttggcgaccacgttcatcgagggatattataatctctgttgcatctgagatgtcacaagagtctccatatccttatgaaaaaaattctcaacttcatgtgcatgttttaaatcttctagcttgcaatatggcatattgagaacttaccttgacggtacttacttcagcctcatttacttcactcccttcagtcctctctctgtctctggccataagtcaggtaaaggaacccagtggattccaacaatctggacacaggataagtgttgaaagacatgttggtgccacccagggggggagctttacttctcttataaaagacaatgagaaacaaaatgatgatgtccgacctcagtcagtttcagtgaatgatgatgtcatttctagttctggcctaagttgtacacatctttggctgcagagtagagttccactcggatgtattccatctcaatccacagccaccattaagcttgagctacttccattgaccgatggcataattacacttgactctttgcaaattgatgtcatggaaaaaggtgttacctacatccctgagcgctcgctaaagataaatgcaacatctagtatttcgaaggggattctttaagatggacttaggctagttgcatttcattaagcatgttgttatacagtgcagtagagaagcaaatatggacgatttgtttacttggatatcgaattgttcttccaacatacacttaatggcacaaaggtatcttcagttattgtagccttgtgatggagttggcgtgttaatttgttcaggaatagaggttcacttttgtattgtaaaaccacgagcttaaaatagatgattgtcacgtacccctttaaaggggaagaatgtaatctttatagatagatctatttttttgtgaagatgtatccgactcttcagagtgaaagcaatgaatcgcctcgcgattcatagcattaggcagctgcaattcagtgagtttcaattgatcatcagtggaggaagccttgtattcatgaactgctacttcacttttttttttttgacaaattattgcacatggttgatgtgactgcgtcaaaatcaagtttttactttagttttattttttttttcgtct

SEQ ID NO: 40057 - DNA, 426 bp, Glycine max
  Clone ID: PAT_MRT3847_136171C.1
gaattattttcaaaaggacgagcgagtatgtactgggtgtacatacatataatgaaagtttaattatttagacgatcacgatagcttttcagtacttccaagtaagtggtgattcacatacttttactttcatcatatgacctatatatacacacttcttgttcttcttttcatatatctctatgtctctcacgtataatttctttttaaaatctaatgtatcaataacactactccaaatgtttagtactttagtagattcatcattcataacccaggatcaataatagtgaatataaagtcatgcacagcattcttaattttcctgtttttggttccactttattggggacaaccggaagggcttttaaaccagaaaagaaagaaaactttttgaaatgttgtttgggcatataccaagaacaa

SEQ ID NO: 40058 - DNA, 455 bp, Glycine max
  Clone ID: PAT_MRT3847_136172C.1
cggctgcgagaagacgacagaaggggctggcttcttgattctggaatgttacaagaggggtaataaacaaacacttattcctcgtcatttcatctattgacaagtatttcatagggccaatgtagtcattcatgtccctttgttggaagggggagtgtatgacagtatgaattcaactacttgttattaggtaactaccatgttaaagttgatagaacattccatgtcagttaatctgcaatctcaatcacaacacacagactctgtaaacaagcacacgagccaattcaaggctgcatatgggactcatttattgcagaagcagttgagtctactttctgttctagtgtgttaagaagaccctactcaaaataaaacaacatacaacatatagtagtccaagagccataattgttaaaaacaggtcagaaaaggcagattacattgttcgaaca

SEQ ID NO: 40059 - DNA, 309 bp, Glycine max
  Clone ID: PAT_MRT3847_136173C.1
ccacgcgttcttttttacgcacgaaaaaacaccactggggggagaatataataatatggagggccccactatcgcgagaccaatggagtaaattgcccttcactgcctaaaaaagacaaacctataccgcgagatgtgcaccactctagcaggagcattatagcagggggatcaaatttaaggaatggccagcaaactgcctgtgaagcctcgctcttccatcatgaagaaaagggcattccatggtagattgcaaagctaggagtcaggaaaggaatgtggggaactgtccacaagattgaaacccgg

SEQ ID NO: 40060 - DNA, 1454 bp, Glycine max
  unsure (1)..(1454): unsure at all n locations
  Clone ID: PAT_MRT3847_136174C.1
gctcgggctttattcaaaacaaccaacctcttcagtgatctttgattagtactaagctaaaccatttcttattccctcaaaatcaaaacctttttctttctagctatttcccttttcaaatcatgccacctaacatcaccaccgttgttgccaatgtcaccaccgagcaattacccaaggctcgtggaggaagtgggcgtgccttcgtgacctttcttgctgggaacggtgattacgtaaagggtgtcgtgggtttggccaaaggactgagaaaggccaaaagcatgtaccctttggtggttgctgtgttaccagatgttcctgaagaacatcgtgagattctcaaatcccaaggttgcattgtcagggagattgaacctgtgtaccctcctgagaaccagacccagttcgccatggcctattatgtcatcaattactccaagctacgtatttgggagttcgtggagtacaagaagacgatatacctagacggtgacatccaagtatttggaaacatagaccacttgtttgatctgcctgataattatttctatgcggtgatggattgtttctgcgagaagacttggagccacacccctcagttccagattgggtactgccaacagtgccctgataaggttcaatggccctctcactttggttccaaacctcctctatatttcaatgctggcatgtttgtttatgagcctaatctcgacacctaccgtgatcttctccaaactgtccaactcaccaagcccacttcttttgctgagcaggactttctcaacatgtacttcaaggacaagtacaagccaataccgaacatgtacaaccttgtgctggccatgttgtggcgtcaccctgaaaatgttgaacttgataaagttcaagtggttcattactgtgctgctgggtctaagccttggaggttcactgggaaggaagagaacatggatagggaagatatcaagatgcttgtgaagaagtggtgggacatatatgaagatgagacactggactacaataacaactctgtcaacgtggaacgtttcacatcggcactattggatgctgggggctttcagtttgtgccagcaccttctgctgcctaatatgcttattatttacagctacaaattaatgttaattaacgacaaagtatatgtattgttatttgctttttttcgtttttgggtcttatatatgaaggaacaacgtctatggttttaatttggatgacctttttgtatacaaagccacatgtgatctcatacagcttttgattattattaagaaattagaggcccttttattatgagtcctttacttaatttgttttcattgatcaagtgagggggagatatctttaattttattaaatgaaattttagggcgtgtttaaaaaaaaaaaaaacaaaaaaaaaacctcctcnaaaaaaaaaaagaggacc

SEQ ID NO: 40061 - DNA, 701 bp, Glycine max
  Clone ID: PAT_MRT3847_136175C.1
agtagaaaagggttcccctggatcattgagtcggttgagacctgaggagaatcaagtactgccacagaatgctgtggacccaatggagtccatggattctacaagatttgcctctccccagcattgggaagatgaactgaataatgaagtcaaagttttaagccttaaaaatggaagggtcccacagaaggatcagattggtcgaaaggcagatcgttatcccatgtcaccaagtttattgcatgacaacagtttagcaacaatttctggaaaagacaatctgggatatgaatcagggtcaggagctgggggttgtggatttttatgttggaataagtccaagcctagaagggtagtaaaggtcaaaggtggcaccccagttagagcgcgtagagctgcaacttttacgttgtttggtgactgcactaagccaaagaaaagggagaggagaagataaggaaggatggattcagttgaggtttatccaatatattcttttcttttttttttttcccaaaatttttcctaccctttgtttctttgagcgattcttcaaggatgcgagcgtgaaatgtgaatgttatgtggttcagcagttccattcaacttgtgttccttttgctccatcctttatttaaagaactaataaagaggaacattgaaacctttgtttctttatctaaaatatcgtatttactttt

SEQ ID NO: 40062 - DNA, 290 bp, Glycine max
  Clone ID: PAT_MRT3847_136176C.1
cttagtgtggtttttttttgtttttgggtttttataatatcttaattttattgtgatcacacacacaagggggtttcgcaacaacccccggggcataaattgtggaggaaaaaaaaaacccaacggagaggggacccccggctccccccccaaaggggggggaggggctccaagtactataaaaagcctccgctcattatgccaccagacccaccccggggacccaaaaggagacaccccttgccgggggagggggactccccccattctctgaaaaaaacaggggtttt

SEQ ID NO: 40063 - DNA, 412 bp, Glycine max
  unsure (1)..(412): unsure at all n locations
  Clone ID: PAT_MRT3847_136177C.1
cccacgcgttcgaattagggtttttgtgatctgcancttctatagccaaaagatgcggggagaaaacttccgatgaagaaccaaaattccttactatgcttatatgggaaatacgaagcccctacatcttaaaaaaaattaaaacctctcatactttttttgttctaaagagcttgggaactataactgaaccttgactgcattatgaatgaccacagaatggtggtttcttctaagctacgcgatgcgaactcttcttttgggagaggtccgtaccttatctaaaaccagtatagaatctgcctggtgccttactcaagttcgttatccttcctgttcggggggtctttgtattataggacttaacgctccagttatatttcctggctctcgcaaacagattagctctctc

SEQ ID NO: 40064 - DNA, 426 bp, Glycine max
  Clone ID: PAT_MRT3847_136178C.1
gcacgaggaaagaggctgtggatgttgccactgtacaaatgcaggctccacttcccacaaccataacctcatcttcagatgtgaagttggggtcttctaaggtagaaaaacgagagaaggctgcaagtagtaaaggtacattgggtgcccggaaaagaacttatgaccctgatttgtttttcaaagtcaacggcaagctttatcagcgacttggcaagataggtagtggtggaagcagtgaggtgcacaaggtgatttcatcggactgtaggatatatgcacttaaaaagatcaagctcaagggtcgtgattatgctactgcatatgggttttgtcaagagattgagtatctaaataggctgaagggaaaggataacatcatacagcttatagattatgaggtgactgacaaggctttgcttgagg

SEQ ID NO: 40065 - DNA, 179 bp, Glycine max
  unsure (1)..(179): unsure at all n locations
  Clone ID: PAT_MRT3847_136179C.1
tcggataaaagggcccncaggcacccgagccgcgggagcgagcgagggagaaggcccccgcaaggcaaaagcagagaaaccaagggggagcacggcggcggagaagacggaggaagaacnccgcaacgagaacgacgagccaccacgccaacagcgcgagaacacggagaggccccgag

SEQ ID NO: 40066 - DNA, 540 bp, Glycine max
  Clone ID: PAT_MRT3847_13617C.1
ccacgcgtccgcggacgcgtgggttgtgtccctaacttcggtaccttaaaaaaaaaaaacactgctcaaaatttttttcttccaacatttcgtgtttctctctctagaaaaaagaaagaagtgtttctctctcctcctttctctctctacaacccttgatcttcttccttcttcactttgattttccgccttcaatgcgaacccaaccatggtcctctacacgtaatcccaccgtacttaacctaaaacccttttgatctctctgtttcacaccatgtcccaaggatctcccccacaagacaccaccgaaccctcgccggaacccgattcgtataaggaggaaacaaccgccacaaccaccaacagcaccgccgccgatgctgctcctcccgcccccacccggagcccccccacccggagccgcccctcccgagcctgcaccatgcgcacggctgcacgcctctacgcggcgtcgcagccggcgaggccaaaggccgcgaggagggagcctcgccgcgaggagtcgccgtcgcgcccgtc

SEQ ID NO: 40067 - DNA, 336 bp, Glycine max
  Clone ID: PAT_MRT3847_136180C.1
gccactcctcctatggcacgctaactcaaggccacctttactaatgctctcggatcggctaacggcctctctgcctctgcaccactccacctactgccttctaagaggcaatacagcctgactgatagggccatccaatcagaaaagccaacctatcaagtgattcaaccaatcaacggtgatcaccttcattggaagcctagaaaccccagttacatacagccccttgatcgcatgggacttatcgaacctgccagcatacaggaccgcagtgagcccattactaatacagatcgacgtgagcctggcccatggctaccttatgatggtcccatt

SEQ ID NO: 40068 - DNA, 363 bp, Glycine max
  Clone ID: PAT_MRT3847_136181C.1
aaggagttcaaaattttagtgcttcattggatgataaatgcccttcacctatgttattacatttttaaatgtaacaaaacatgtcacaaaattatgtttacctactaaactgagtttgaatcacccaaacagaaaattatgtataaacgttgaatttccttgaacgacaagcgagaaagtctgcatgcagagtgcaacaacatcactactaattaatcaaattttatagcactaaaaataataataattatagtgatagtgcaacttaacctgagtaagtttctccaataatatgtggaaattgttgctttccttctctagcaattgtaggattttaagaccacttgttcgagtgccactttt

SEQ ID NO: 40069 - DNA, 471 bp, Glycine max
  Clone ID: PAT_MRT3847_136182C.1
gcccagggttcacagtgtatccattaaaacccttcattgataccatattttagaaaacatgcttctaaaagggaaaatttgaggtgcaactagacctgcttaaccaataattttactgaaaaacttcctaaaagagatgtacctattccctcaaaattatacaaaaccttttggcctttctaaaaaattagcttgatgcaacctgtggtgtaaatggccaaggcaggctacaaattccacaaataaacttggaaaagaccttgcaaaaccgggtggggtaggtaaggaccctactaccagtcccaaaaaaaacacatgcaactcagaaggaaactcctggaatccttatattcttaacacatgctaactacaagtagtctattaactccatatctgggaatttcgtcaaaaacagttttatcctaagccggttacttaccccaggaagcacctaagtttacccacacgggg

SEQ ID NO: 40070 - DNA, 338 bp, Glycine max
  Clone ID: PAT_MRT3847_136183C.1
atggcgattaacatcattcacgacacgggtattaatagggcgcatttgtgccagaaaatccttaaggtctacattcgttgtgttgttcttaaaagggtatctttcgttggacactatttccgctttatttgtaacatactttttgtttgctccgtctccggaaggccatctcagtaccggaaactacctgttcgacacccctcttcttcgccgtcgtactacgctgactacgacttcttttccgctacaactaccactggcggttattacttctattccgatattttgaaccttaatatcagcttgtagtcttattgccatattttaaaaactacttt

SEQ ID NO: 40071 - DNA, 374 bp, Glycine max
  Clone ID: PAT_MRT3847_136184C.1
cacccgttccagagaagttatggtatgcgttgatttgcacacagggatttgctcgtcgagatccggtactttgtgggttcactgttggaatatgtttatatagagcgccttatgcgtggtgaactgtttctttcccctttgttcaacagcttgtgtgatatgcattggattctaagatcatgaaagaactacactgtgttggataccggaggtgtcttttatatggggacgttaactacagcagctattgcatgtttttctgtcggcataaaacctgattgtaaaaggagaatctcaagctgcaaactattttgcactggtaccagcactctggtatcggacacaggcatgccatggaagacacttctgttgct

SEQ ID NO: 40072 - DNA, 792 bp, Glycine max
  unsure (1)..(792): unsure at all n locations
  Clone ID: PAT_MRT3847_136185C.1
ccacgcgtccgctgaatctcattctggagtctttgtggtggtgttacttgtttcactgttcagattaaaaccctaaccctatctctctcttccatccatggacgccctcgactcaatcccaaatctccctcccctccctccctacgatccatcggagtatcacaaaccgccgcaacatcaatcggaaaccggagaaaacggtaacggcaccaagaacggcgaaccatcggagaacggccaggtcgccgccgacaacaacggcttgcatcttcagatttcgaagccattgctctccgaaggaatgacgcgcagcggcactgacagggatcaatccggcggcgaggaggagaccaccagcaagcggcgccgccggagccgatgggacccgcagccggaatcgaacgaccagagcggtggcggcgattcggggagcggaccgaagaagaggaaatctcgttgggcggatgacgagccgaaaccggtgattcagcttcctgatttcatgggcggtattgaattcgatccagagattcaagctttgaatagtaggcttcttgagattagtcgaatgttacagtcaggtttgcccttagatgatcgccctgaaggtgctcgatccccttcgcctgaacctgtatatgataacatgggcattagaattaacactagggaatatcgtgcgcgtgagagattgcaaaaagagaggcaggaaattatatctcagattataaagaagaaccctgcatttaagccacctgcggattataggcccnccaagcttcagaagaagct

SEQ ID NO: 40073 - DNA, 751 bp, Glycine max
  Clone ID: PAT_MRT3847_136186C.1
ccacgcggctcgagaatctggacactgctcagattagaaccctaacctaacccaaccctctctctctctctcttcaattcatggacgccgtcgactcaaccccaaatccccctcccctccctacctacgatccatcagagtatcacaacccgccgcaacatcaatcggaaaccgggcaaaacggtaacggcaccaacctcggaaaaccatcggagaacggcagtcaggtcgctgccgacaacaacggcttgaatcctcagatttcgaagccattgctatccgaaggactgacgcggagcggcaccgacagggatcaatccggcggcgaggaggagaccaccagcaagcgccgccgccgcagtcggtgggacccgcagccggaatcgaatgaacagagcggcggcgattcggggaccggaccgaagaagaggaagtctcgttgggccgatgacgaccctaaaccggtgattcagcttcctgatttcatgggcggtattgaattcgatcccgagattcaagctttgaatagtaggcttcttgagattagtcgaatgttacagtcaggtttacccttagatgatcgccctgaaggtgctcgttccccttcgcctgaacctatatatgataacatgggcattagaattaacactagggaatatcgtgcgcgtgagagattgcaaaaggagaggcaggaaattatatctcagattataaagagaatcctgcgtttaagccacctggggattatagg

SEQ ID NO: 40074 - DNA, 153 bp, Glycine max
  Clone ID: PAT_MRT3847_136187C.1
ctagtcattcgcctccctcattacttcattcaacacttcttttttttttatctaattgaaaccaatgtcaactgcggggggtgctgccataaatatagcatccaccaaacctacctctctgccaatcaggacctccataataaccccaaaaag

SEQ ID NO: 40075 - DNA, 373 bp, Glycine max
  Clone ID: PAT_MRT3847_136188C.1
gggaaaacaggtattgagctccggaagttttgttgcgagccccttgttatactcctggtgttggtatgcataagtcttcttttttttgttgcgagctggtgtttatttttgggagctatcatggattggttttggaggcaaaagttaaaatttgtagtttctgcttccttaatctggtttttgcatggggtctcctaaaagcaaaccccaacactatttgcatgagatcctagtccttcaacgaaatttatttgtataatacatttcttataccgtatgggttatctgagtgcactggatgctcataaatacccctcctaaaaatattaggacattaaaacatatctcttataaagtactcaagtgtttgact

SEQ ID NO: 40076 - DNA, 469 bp, Glycine max
  unsure (1)..(469): unsure at all n locations
  Clone ID: PAT_MRT3847_136189C.1
gtctgccagcatgaacncgtgagctcctgctaaagtgtcagcaacatgattagtttgccgtcttacaaaactcacacttgagtttggaatcaattttaaactatcacaacttttttcttatgagagatgcttctgataaataagcatgagatgaaatctgtttatttaaattgtctgctatcatctttgagtctatttcaaaaatcacattgttgagttgcaactgaatggatgactgaattgcttgatatagtgtccacgtttatgcttctaaaactgatggaatgccgtaaaatcaagttgtctttgctgctacaaactctccaggctatcccggaaacagactccaagaccaaattagagaataactccccccaacacaactcgcaactttcattgtattgtaatctccaaagagttgctcttctcaaaatctcaaaaaggtgctgagttggaatcccgttctaac

SEQ ID NO: 40077 - DNA, 341 bp, Glycine max
  unsure (1)..(341): unsure at all n locations
  Clone ID: PAT_MRT3847_13618C.1
ttttcatttacttgaacaaactttacaacccgacaagggggatttttacctcttcaanctaccaaccttctttttctttcttagtgccatcttgccataagtttaatttgcccaacaaactttactattcacatctgaatcaacaaacaagacacaccctacccagctctgtaaccaaatctccaatactcctctcatatacattctctcaccaggaccctcacaacaaggttacctctcaaaccttctccaataccaacatattaataactctccaacaaatcacaaccaaggacaacacactctatgacaacaatcaacgttacatatgcaggaacatt

SEQ ID NO: 40078 - DNA, 108 bp, Glycine max
  Clone ID: PAT_MRT3847_136190C.1
tgactccacgtcttcacgttttcgcgtctcggtatgaaatctagcaaagaagttcgggcttttctcctaggcgttgatgtacattactctactggtattaggatcctg

SEQ ID NO: 40079 - DNA, 395 bp, Glycine max
  Clone ID: PAT_MRT3847_136191C.1
ataaaagattaaataatcgtggagacgtagcatcaccgttggtggtagctgcacacagcgatattatattatgcagatagtacagtactaataataatgtataaaatactatgtgaagaagcaagcaccaacgacaatacactaattcagaggatgtcagttttcaggatgatgtctcatctccaacatgattaccattcacggagagtacagacccttactcaaaaccgtggaagatagtaaatctgaaacctgatgcattggattcatatacgaaagatggaaccatatggcctcaatcagcaatatgtaacgcgttatgtatcgtggaccagctgaggaaacgggttaggactgttcactgcaaaagcatccatcttgggttgatctgacat

SEQ ID NO: 40080 - DNA, 554 bp, Glycine max
  Clone ID: PAT_MRT3847_136192C.1
ttaacatgtataagattttctcctctcgacaaattaaaataaaacaaaactattgtaactggagctggagatgaaacacttaggttctggaacgtattcccttcccctaaatcacagaatactgatagtgaaatcggagcatcatctcttggaagaacaattattaggtgattgctcctggcattttgattcaatcatgtggcattattcaaagttttgacagaaagaaatatcagaatagagagcaccatggtgaaaaaacttatcatgtgaaaaatacatgacaatggcatgctttaccgattagagcagggagttatgaaagttacatgatggctgccaaagattatagacattcatgcgattcgtgtggagtctcatttcttatttacaacaaggtcaatttatttaattgtcagtcggagatttatacatgttaatggagttgtagcttccttctttctctctccttcggttcttttattctttacaatagttttctccgatgttatacattcaagatgagtatacagagagcatccttagcaagctgt

SEQ ID NO: 40081 - DNA, 503 bp, Glycine max
  Clone ID: PAT_MRT3847_136193C.1
atactgatagtgaaatcggagcatcatcttttggaagaacaattattaggtgattgctccgggcattttgattcaatcaatgtggcatatttcaaagtttgggttgctgtgcagaaagagcagaaagaaatatcagagtagagagcaccatggtgaaaaaacttatcatgtgaaaaaataacataacaatggcatgctttaccgattagagagcattgcagggagctaagaaagttacatgatggctgccaaagacgtagacattcatgcgattcgtgtggagtctcatttcttatttacaacaaggtcattttattttattgtccgtcggagatttatacatgttaatggagttgtagctctccttcgattcttttcttttttacaatagttctctccgatgttatatattcaagatgagtatacagagaacatccttagcaagcttgtatcatctgttgtatataattattaattttttaggagttttgatactttcctcc

SEQ ID NO: 40082 - DNA, 193 bp, Glycine max
  Clone ID: PAT_MRT3847_136194C.1
atcacctagatgttgctaatgattggtaatactcagcaccatacgaatagacagcgatgaacctactttctgttcctaaaccaaaacagctgaactgagtgaagtcatatacggaatgagctcactgcacatctacacaaaatgatcgaggatcgttggatcattgcacaaatcggatacatagaaacctaac

SEQ ID NO: 40083 - DNA, 614 bp, Glycine max
  unsure (1)..(614): unsure at all n locations
  Clone ID: PAT_MRT3847_136195C.1
cggaattcccgggtcgacccacgcgtccgcgtgcccccttcaaatgtttgtacaagtcttgtagctttccttggtttcacatttcatctgcaccatttgattaaataaggatatgtgcgcctgtttggatattcgctgataaattataattgattttgattaaaatattttttgaattggtgtgatttaaatttgagtgtctctgttataaaattaagttaagaataaaatttaatataaattttgtatgaaacataaaaattatacaaagttatttcaacttaattagtttgggactcaaaattaattttgatttcttttctaaaataaaattaaacatctaaaaatttatctaaaatcaataaaactaaacagcgtgtactatccttgagtttttttttccgtgattataaatgaatattattttaatttaatttgaatgcattcacggtgtgattttatccttcatccaatcaagtatagacgtatagtaatatatcgtaagttttcttttttttttaacttttataatgactacttaaactcattattttggaataatgtccgttagacatggaaaaccatatgattgaattggcctttctttanaattg

SEQ ID NO: 40084 - DNA, 404 bp, Glycine max
  Clone ID: PAT_MRT3847_136196C.1
cttataacttttttttttttggttttttttttttcctaaaccaaaacttttttttaataggagggccttgaaaaacatccaagtggggctttatgctccatcacacgggcttaatgccggcggcggttcttagctgaacaaactttatatcgttctttcacatgcgcccgccatattggcagagaaaagggtgtggattccacactggcgaacaaaccgctcaaacaccggggttttggacgggtttttttgggacacagaaaagcttgtattcttaaaacactggagattttctgcctatgatcatattacacgagccttgttaactgggaaccacacgtgtccaggggccccccaccaccaccacagtttggtgttcccttgtgctgggggcccaaactttt

SEQ ID NO: 40085 - DNA, 313 bp, Glycine max
  Clone ID: PAT_MRT3847_136197C.1
acaacacttgctcttacttcttacccgctgacaaattacctaaggtaaaccaactgaatatgtggcgcggtattctatgcaggactctaccaacatcctgacatacacgctcatcgaagaccacatctaatatatgacatgccaaacacctagacacatcagacatctctatacaattgctcgttagattctatcacccttctcgctatgctaatgctagaaccctccgtgccagaaccttcttcgggccccttttctctacgaacctaaattgcttatctggaacaagtagaccatacttacattatggtga

SEQ ID NO: 40086 - DNA, 1237 bp, Glycine max
  Clone ID: PAT_MRT3847_136198C.1
tgaacccctttcgtcattatcacaattttcgtcttctccgtactacacgcgcgcaccaacttacgctcacgccactcctcccttctttcctttcttcacccctagtttctctctcttacattagcaaaaaccaaaacccgaaaaaacgcacagcacagcatcgagcacagcaacacctgaaaaaggaagggttagtgagtgtgtgtgtggaaattgtcatcgctcgcaagagcaacaacaactagtacttaaagagacagagagtgtgcacatcaatgtctgctcaggtcggtgtcaggacacgagcccaagccgcattagccatggaagctgttagttctgctgaaccatcatccaagagaaagaagatcagcaacagtactaaccaagagccaaaactctccaagactccgagaacgagttcttcctccgctgtcaaaccagcgacggtgacggagatggttcagccggtgtcgccggagatggttcagcaacgctgcctgagccctacctccagtgaaattccggcgtcttgctgctccagcaacggatccattggcctcgatcaggacaggatcaagctcttagatctggaggtggagagcgcgcaagttgaaacgtcgacgtgcaatggtggtcatgaaattgagaggagagagatgaaacgttccagcgagcttcgcgagaattctcaggagccggagccaatggagatcaattctcaccgtgtcttatcaaaggcaaaagccatgcctaccgaattggagctcgaggaattcttcgctgcctcggagaaagacattcagaaacgatttcaagacagatacaattatgatattgttaaggacgtaccgctggaaggacgctacgagtgggttcagttgaagccttgaacgtgtgcgtcccagttcgtatcgccatcgaagaagaaaagctccgatcaaattgaacatgtcattttggcctatttatatattgttaattaagtctagtctaggtctttgatttcaatctaaattatctttttaatttacaccagccaagactcttttatgatctggtgtacagcttttttatatttatttcggtgtggttagttattggttaagggtaaacaggaatgaattcagcttcgtttgttctctgtacggagagcagcttaaagctagcttgtgcagaaaaatactgtaaattccctttggtgaagaagaacaaacgcttccattttacagacttc

SEQ ID NO: 40087 - DNA, 226 bp, Glycine max
  Clone ID: PAT_MRT3847_136199C.1
ttgtttttacacacttttactctttagtttctgcaagatgctttttcaattctcaacagtggccactacaacataactttacttaccccctggattcagattccatccaacagatgaagaacctcttcatccacgtatcttcgttgcaaatgcgcttcggaacatatttgtgggtgccataaccgtcgaaattgatctgttcatgtaccacccttgggaccttcca

SEQ ID NO: 40088 - DNA, 445 bp, Glycine max
  unsure (1)..(445): unsure at all n locations
  Clone ID: PAT_MRT3847_13619C.1
ttttctctctctctctctctctctctctctctctctcatcattacttgcgcatatactagaacatgccattcctagaactgacatgagtatcttcatgtgtagctggatggtctttttaactcatggtgtgaatcttggaggaggaagatgtggttgaaaacatctgttggatcatatgagtgaatgtgtatgctcttacggtgttaaacatgtagatatagggtaagataaatacctgcattgtatgtatatttggaagggttatattagaggaaataaggctcgtttctgtgagtcttgctaactaatgtgttatgctgantattatgcaatcaattttataatctatttattatagtatcatgtataacattattttacgcagttatacttcaagttactcaacttaatataatagttaatatttggtatatatgtaattca

SEQ ID NO: 40089 - DNA, 306 bp, Glycine max
  Clone ID: PAT_MRT3847_1361C.1
tcgattcccttccaggaaggtttcctgtcatcactgtatgacgtcctccttgcgttgggggggggggggggtaatatgcgaagagacaaattgggcaatgcaaaaacacaattgctggataaataaggtaagcaaccgccgaggaggaaattacttacaataatagtaattgtgctagccggcttgaaggcaaaaagtaagacttttagggagtagggtgcagtgtagtagtaaatggtggttgaattgtacgagcgggggtaaacgatgtagtgcgttaataccgtatgcactatgggtggtaat

SEQ ID NO: 40090 - DNA, 403 bp, Glycine max
  Clone ID: PAT_MRT3847_136200C.1
ggagaacctccttaagtgcaaccaggctgtcatcgccctgcagggccgctacggcggggaccaggaggagatcctgaggaccttccacgaaggaaccatagagcgaccgtattgctactgcctcctcgacggaatcaagaagtaccccagcaagggactccagaaagactccggcaaaaaaacggacgagaaatctaggcttaaagcgctcgagatactcgtgaactacgaccacctcatgcccacgcgacacgcatccgacgggtatcgctaggatggaggtacccctgatgttcgcggcaccagggactggaatgtcactgatctacaggagaccgaaaaacaggtgcaggacaggttcaagaccgtgaagaataaccggacctttaccaaactcacattc

SEQ ID NO: 40091 - DNA, 220 bp, Glycine max
  Clone ID: PAT_MRT3847_136201C.1
ggaaacaaccccggaaccagtaccagtcactgaggctcctgcaacagaacaagcagtagctgaggttcctgctcatgaagaacaacaagcaactgaggtacctgccccagaatcaaccaccgtagcaccaaaggaagaaactcaccgaagtcaccaacaaccagaaaccagttgaaacaacaacttccgaagaaggtcagccagaggagcctaaagaagt

SEQ ID NO: 40092 - DNA, 679 bp, Glycine max
  Clone ID: PAT_MRT3847_136202C.1
gacatgaatttttttaatttgtttctgtttcttgaatttgttattacaagaatgcccctttggaaaagacagatagcctcactgaaatatcatgtctgagtattctacaaatactttgttgccctttttgtacattgtcctaaaccaaaatctgcttgtcctaaactaagtcagcaatgttggcgtgctttgagtcgaagcaatgatctacagccaccgttttgcagtcttggtgtctgaatgggaaggaggagttctagcatttccgtccttgtcatatgctactactggcttccctccaagtgaagatctacgggagttatttgacagtggtggttgagtccccgttagagattgcctctttttagttttctcagcagctgaaattggtgattttacatgatttgtatgaccagtgcccttgatgggtgacttgacttcaaccatattattttgttggctcctcttatcagggccatttatcagtttcccaattgttctcaaggatcttcttatctgcgatccttttccatttgtgctacccatcaccttagtaccatgtgcatcgcctccatccaccactggtggttcaggtgttttgggcagtttaagaggatgaacttgcatcccaccatttacttttatcaatctcgtttgataggaaatgcttgttggactt

SEQ ID NO: 40093 - DNA, 1391 bp, Glycine max
  Clone ID: PAT_MRT3847_136203C.1
aattcggctcgaggaaaaatttgtcagtcacaaaaaatttctaagttccatttttctccttctctttgtttcccttcgttttgtaactctgcaaatccagttctcagggttctttttgaatttgagaggttccagatcattcttcattctgctatttggcaaggtctcgcctgttttacttactggttgaaatattgcgatagaggtttgtgtaacactgcaaattctcccgtggaccttgtgcatttgagtaatgttgctcgagtaacatcatcctgaaggcagaagtcctttgacaggtggacatattaagtggttgtttggatttgaagtttaattttttaaatcaggaattccttgcaccataaagaaacttccagtatccgcaatatgtcttcctccgagtcagtcctgcgacgttgagcttaattcttgattattgtcattttcatcaagtaccaggtcgctcaaacaaggaacgaaagtcttatgatgagaaattcattaggatggacacaaagcggctatgtgagttgacatctgctgcagacagccttcagttaaagccattggttgatcttacaagtcgtgcacttgctcggataattgaaggaaaatctccagaggagatacgcgagatatttcatctgcctgatgatcttactgaggtgtctggtgcttgaagagaagttggagcccttgaaaaacacaactgatgacccaaggatcaggcttttgaatagattgtatgccaaaaagaggaaagaactaaaagagcgtgagaggttaaagaatgttgaagttgaagaagagcatgtagatgaacgttcagttgatgaccttttgtcttttattaatggaaatgatggagatccaaaggaagttaaaacttctaagaataaaaagaaaaatagaaggaaaaaagagcaacaacagaagaactcttctctgaaggaagcttctgaagtgaacaaggaagtaaatggtcaaagtatcagacaccaaagtgctgaagctgatagaattgctgagacctcaaattcacatacagaagatgtatttgctcatagagaattcgatgatggagatatagatgatgggattgatcctgcgctaaaggaaaaaattgacagcatagttgcagtggcagatcactagcttttcttctcattagtgatcagtagcattggtgaatatattttgtgtggagtatagcatatgcagaggacaaggcatcggaatgattgaattctatccttctacaaattgtactttttgagtcatctattgctggttgaatatggcatgaagtgactgcgtacttgtgtttatcacagagagggagagatggcaatgctaatttatgtaagttcacacccttcagatgattc

SEQ ID NO: 40094 - DNA, 185 bp, Glycine max
  unsure (1)..(185): unsure at all n locations
  Clone ID: PAT_MRT3847_136204C.1
ctactcccacctaggattccgaccggccaccaacgttacccgctgctctggctttgcccttcctcggcntcctngcggaaccanagactaaanaccanttggctctnatctcnccntaanccgntttctnggtgncaganaantcttctcggganaaagaacnaggncttcttanagaggaatca

SEQ ID NO: 40095 - DNA, 1631 bp, Glycine max
  Clone ID: PAT_MRT3847_136205C.1
ttccaaatgggtcctggtgctctgcagtcaacatatgttgagaagaaaagattcacgcctgaatccgatagttcatctttaactgagtggaaatgggaaggaaccattgctaaaggcggaacccctgtttgttgtgcacgctgcttccctgttgggaaagtcctagatatgatgttacctgagttcttggattgcactgcaaaaactggtctagatatgctttcaaagcattactaccaagcagttggtgtttgggttgttttctttgtgcctggaagtgatgctgacatggaatgctacaatgaatttatgcattatctggaggaaaagaagcgcgctgcagttgccaagttggatgacaagaccaccttatttcttgttcctccatcagagttctcagagaaagtactgaaggtacctggtaggttgagcatatctggtgttattctgaggttggagaaccctgatttaaatcatggtcctgaacacattcaaagagaaatgactaacaaaaatctgctgtcctataatgagaatatactgcatctgaagtctacatttccttcagtacgtgtacctacattcccatctattccagaaatgggtaattctggaatcagcaatctttcatttctgggaaataaatttgcagcagctccatcagtttctgattcagctcgtgctgtggctagcatgtccgagtttcatgatgaaagaagtcacaactatcctacccagcagcgtacttcttctcaaaatctccagaacttctctaataaagctctaccattgcagccatcaagtggtgctggagaacctattgctgatgaacaccaacctatcattccaagggcagcgcaggatgtaaacgcgattcaacatcccagtggaatttctggtattccattttatggtgatagcaagttgtcttatccagatataagacatttagatcctttatcagtgcctgtgggagcccttgctccagaacagcttgcacaactagcagcaacgcttcttgagcagcagaggcaatcgggaggctcttcgagtacatctgcgttggctgatccccagcagattaacaggtttggcacatccgacacctcatccagatttatctcatccgacaactcatccagaccaccccagaaatatgctacagaaaacaatgtggtgaattctgatctctcagcatctcagatgggtcaaagtcaaatgctacagatgcaaaagcaacaacagatcgtaaatgtgcctcagttgtcacagatagttcaaagggaaccacaaagagaggccaatggaaaccagttggatagcagcttgcaggaagatgactgatgtagatccacagagacgtctacaggcaacactgcagctggcggctgttcttcttcaccaaatccagcacggaaaaggaagttgagcagtgtcaggatatatggtgttgctttattggtttaatgtatttaacataaaattttaaacaaggattaacggttgtaagtaggatggtcagattttcattttactcgttgcagtggcttgtagtcagttcttagttcttagcgcttttattggtagtgtcctttcttttctaaaattatggtagggttaattaacttttt

SEQ ID NO: 40096 - DNA, 319 bp, Glycine max
  Clone ID: PAT_MRT3847_136206C.1
gaaacctttcacggtggtgagtgtgcgatggttgcctaccaggctgtaataaagctatggcacgagaagcagcatcgatcgtctagcgctgattgcaagcgggagaggtgctatggagtataggacaccaaccttgcattgtacgctagacaaggtccacccgccctgacatggctcaggaatcggactctaaggctaaacaagactatgcgatataccgagtcagcgttatgaagtggggcggtataatgcactgcaccaaaggggtaggacctggtaagccgacttaccacggagatagcgaggttatattttacac

SEQ ID NO: 40097 - DNA, 494 bp, Glycine max
  Clone ID: PAT_MRT3847_136207C.1
tagctatctcgatcgaactgtccaaggtcctgtcacaggtgttgtggtacaaatacatgtaataataatttgaatccggcaacaaataaacgattactaaccgtgtatagtccacaaccaacaacaacaactaccattcgaggagcacggtagaaaactacaataaagaacgccggggataccattacggcacctcggcaaaagggatcctcaagcgaattaacacgcaactaatttagggtattcgcccacgacaagagtgcgtggttggactgttagtggtaatgtatacaatcgcaacaaacttaaaagcgcggatgtgccgacttctgcaaccacggaacgtggtcagtataaagcaaaggttttggcgggtgtggttagttttgtggttggggtgacaaccgtggctagcagtaaaatatttgtggtcgtgaaaaaagttaataataatcaacgtaaaacagttccaccggggattttcggctcgaagt

SEQ ID NO: 40098 - DNA, 1001 bp, Glycine max
  unsure (1)..(1001): unsure at all n locations
  Clone ID: PAT_MRT3847_136208C.1
ttcccacgcgtccgtacggctgcgagaagacgacagaaggggaaggtaaccggcgtttgtaaaattctctttctctctctctggcctcatactaccgctaccggagccgctatatcatgttggagccaattgttgctgtcacgtttaattttcatcattactaagttagtttaatagactctgtgctccattcattcaaatttcatatttatataggaacaaaacacactcctctccgctcttcccaattcctcaccccattgtcgattcccaaaccctacattttcgcccaacggcggatcagtttccctattcctcactcaccaattaagtgtaagatggaggatgatgagaaacccacgggtaactcccatggcattgctgatatggatgttgctgatgctgctttgcaaggccaacgtgttgcttcttcccctgctccgctacaacaggatcaagtaatggtcgaacagggtcatgatatcaaaaacggcgattctggtcctgctcatttgccagaagccagtgtaattaacaataatcagtttgaagttgaagatgctcagaccgtttcgcatcaggaactgaccactccaaagcctaaagaaaaaaacgtcagagaaatgaagaatgtgctaaatgatactgaggtacttacttccagtaaagatattagagcattttgttgttgttcttattttgtagattttttattatctcgacattaacccacagatgactgattatgatgagtatggcacgcctctggatcgagaaacattcatgaaagagcttgagactttctacagagagcgctccttggaatttaagcctcctaagttttatggagagccactcaattgccttaagtacgtataatatcccctgtgatgcattgatgtaatctctttaaggctagtttaagtgggcctgacttcctccttgatactaattttgaatgtgttacctaactcttttgatagcggattccttactntttc

SEQ ID NO: 40099 - DNA, 471 bp, Glycine max
  Clone ID: PAT_MRT3847_136209C.1
tacggctgcgagaagacgacagaaggggcttcccatttgatgaccacaattgcccttcccatttaggctggaatggcaaggacaggattgatgatttatagtcttctagtattcttaaaggtgaagagtttctaagcattttctaacgtgcctggtatttgcattttctaatgtgcttggtacttgttctgcttggtattcttaaaggtgaagagtttctaagcatttttctaagcatatattttataggtgcatgcttaggggatttcggcttcacagatgcccttactgaattaggtcctctataaccgtctcatatcatagtggtatgcttgccattcttgtactaaaatctctcctactgcttatagtccatgaccattctgttagtagatttataatgtcatgttattgttggtccttttcttgattaagttcttgatattttcatggtgtattggattctctttt

SEQ ID NO: 40100 - DNA, 224 bp, Glycine max
  Clone ID: PAT_MRT3847_13620C.1
gctcggattgcggctcgagcgacgatgcggtcggtaaagtggaggtggaggtggccctgtaaagagagtgtccatgtgacgtacgaaacagcaagactttaaaaccgcacaccgatctatcttctcaatgcgaacaaccatacacaaaccattccccacactctcccctcttctttttcattgtcattcttcaccagtattctgcaatatgttgctactcatca

SEQ ID NO: 40101 - DNA, 169 bp, Glycine max
  Clone ID: PAT_MRT3847_136210C.1
aacaaattctggaaacattttttgtgcattgcttcacccatgcaacctcaccccttgggaatgtgggtcaaaactgagcttattactggacctttatctcctatatagcttattatggggaccaccctttatataccccttaaaactaccttcaaatgaaaatttggtt

SEQ ID NO: 40102 - DNA, 824 bp, Glycine max
  Clone ID: PAT_MRT3847_136211C.1
cgacacccggcggactcgagctgaatcagcataagaaaaaaaaaaagaataaaaaaggatgatactgcagcagattattaagctcctgaccttaactttgatatggtggagcagtattaatgttgaatgtgcagttgcggggacacgcgacacacgtgtgataaactctggatgcagcacaatcaacgcttccaacccgggtagtttctttgggaatgtcaatgagacaatctcagagctgagaggagaaattaggaaccaaagcttgcactttggcacatcattgaaatccaaaggagatgtcaatacatatactatgtttcaatgcagaaactatctctccagaaatgactgtcttgcttgcatcaacactgcctccacccaaatccgggatatatgcaaaaaagccaacggcgcaagactcatctacaatgactgcttcctcaggtatgagagtgagaggttctaccaacagaccaacgaaatcggtggtggggtaacatgtgggaacaagagcacaaatgccacaggttttagagaagttggacaacaagcactactggacctacaaaaagcaacacctaaaattaaaggtttctatgcagctactaagacacaggtggctggtggtagtgcaaatatttatgccattgcacagtgtgttgaaactgcttccccacagaaatgcctggattgcatgcaagttggatacaacaacttacaaagttgccttcccagcacagatggttcagcatatgatggctggctgtttcatgagattctccaccacaccgttctttgctgataatcaaaccattaatatc

SEQ ID NO: 40103 - DNA, 392 bp, Glycine max
  Clone ID: PAT_MRT3847_136212C.1
ggctcgagtacaagaataacatttgcatgtggcagtatggttattatccaaaaccaggacgagtgctggtctgaaccagagagctcggtaagcctgagcaggggatggggctttagagggcctatgaccgatccgatggcctgggctatgatgtggacctgccgttactattggcgacttaatcatcgcgagtaccgacagtgcgacgcacagcgtcaacgagcgacatggtgtggactactctggacatacgagactaccccgatgtggttcataacattctcgagggctacttcgaaacagtgtaccatgacttctgactctagaacaggcctgatgaggactatgatcaggaggaacaggtgtcgaggaagctgaagttcatgacatct

SEQ ID NO: 40104 - DNA, 366 bp, Glycine max
  Clone ID: PAT_MRT3847_136213C.1
gaaatacgtacgtacttcctatgacatatacatattgcgacccttttggctggtagcagggaaagcacacctgcatacgtgaagtcaagccattatgctgcacccttcaatacgagtgttattgcttctgggtttctatttggaataggctatgcagcttacctgatataatgagcatcagatattaatcgcagaggaccaagtatatgggacacctatactaaacaggcaccatagatgatttacgatcataatgatggaagtatatgagtcgaatcttatgaccagtacaagatcgacataaacatggtgaaagaagttgagttggattcatacagattgtccatgtgatggtacacaatattg

SEQ ID NO: 40105 - DNA, 496 bp, Glycine max
  Clone ID: PAT_MRT3847_136214C.1
gcacgagatgaattctttgatgtttctgaaccaaagaactatgatgaatttgagaatgagtggcactctgccccgctttcagaacagcactctcagacggattaccaccccaaaatgtcatcagctgatggtttggcaaaaaaattacaagacctttcagttcagaagaagggatacatggatttacaagagacttccagcagggataatagtgagccatgcccttatggagccactcttcaaaaagattcaagctgtaatttaccatgcagttgggatgaatctgatgcatctttattttatattcgtggaaaaacttatttaaaagataagaaaaaggtcaaggcagaaagaaccttgatgcaaatggttggtgcagattggattcaatctaactcgcgacaagatgatctatgcagtcgtcctggtagcatagttcagcaatatgaaaaaaatgggaggccagagttcttttttgttgtcaacttccaagtgc

SEQ ID NO: 40106 - DNA, 218 bp, Glycine max
  Clone ID: PAT_MRT3847_136215C.1
gggagcctccagagcagccgccgtccaccttctttattataaccccccagaggacaaaagcacacgggcggaaaagaaacaaaaaccccccggaaggaacgcaagaacagacgcaagcccaagaggcacaggaagaaccagcaaagaggggcaaccacaaggaaaccaccgggcgccgagaaaaaaaccagcaaggccgacacggaacccaacgaaaa

SEQ ID NO: 40107 - DNA, 611 bp, Glycine max
  Clone ID: PAT_MRT3847_136216C.1
cgagaagacgacagaagggggcacacaatcatgcagctctagggtatcaagaaaattattataccctttaagatgaaaccgtacctacgtgcaatattcctattattccttatccttctcgaccaatccatttcggcgagtgcttttttaaatttaaatggattgctaaacattgaaaagtggccctctggcgagaaaagtttggaaatgggaaagatagggaaggagacgacagatcatatcaaagaccttttaaagaaactgattgagtcccctcccgaaccaccgaagcaaatcaatattgaagttgaaggcctgtctgtcgtcaaggattacttatctgactacggctacattgaatcctctgggccatttaacaatattttcgaccaggaaacaatgtcagccattaagacctaccagaaattttccaatcttccagttaccggcgttccgaacaaacagctttagcagcaaatgttttccctacgatgcggtgtccccgacgttaacttcgactacaacttaacccgacgacaacacttcctatcccaaagcccgacaccgcttgtttccaaacagaaacctcacataccgtttttttcccaaaa

SEQ ID NO: 40108 - DNA, 487 bp, Glycine max
  Clone ID: PAT_MRT3847_136217C.1
agaagacgacagaaggggaaggcagtcggagacaggccaagtatgctgtgcatgctctggctgcaataacaaaggatgatggcctcaagtccctttctgttctgtacaagagacttgtagatatgctggaggagaaaacacatctacctgcagtattgcagtctctggggtgtatagcacagacggcaatgcctatatttgaaactagagagagtgaaattgaagaatttataataaacaagattctgaaaagtgatagtaaagaagaccactcaagaatatcttgggatgataaaagcgatctttgtgttttgaagatatatggcatcaaaaccatagtgaaaagctacttgccaatcaaagatgctcatgttcgtcctggtatagatggtcttttggatatcctgagaaacatgctgtcttatggtgaaatatcaaaggacttacagtcaagctcagttgataaggcccatttgaggcttgcttc

SEQ ID NO: 40109 - DNA, 241 bp, Glycine max
  unsure (1)..(241): unsure at all n locations
  Clone ID: PAT_MRT3847_136218C.1
anaatcgcacagaatgggcaagagttnttagcagaacntgannaaggtngaagaggnangnattggacaganccccnnggcgntgtgtgttattcatgggaacngctaatnaatccgtatagtnggtgggaacggtcgtggttccgntnggagaggccgcttcngatnncatncnatcctcnggtcnctgncgncaccntgnnaatgggaacccgcgaatgatcncctncaacgtcganat

SEQ ID NO: 40110 - DNA, 866 bp, Glycine max
  Clone ID: PAT_MRT3847_136219C.1
ccacgcgtccggttaagcgttatgaaaatgctgttgatgaagctgtgcttgagaaggatagcatcaagaaggcctttgacgaggagaagaagaaagtggtgaagttagagttgcttattgcaaaaacgaaggaagtggctgcgaaaagtgatgctgagttgggacaagtgagaagtgaaagaaacaagctagttgagaaggaaaaggaactagaaggcaatgtgagtgttttgagggaagaaaatgaagcattgcagggtatgctcgcgaaggcgcgaaaggagtccaaggatttgaatgccaaggttgaagtttggtgcagcaattcaaacaaagcactgtcattgttgaagactactgctgctgcacttgtgtgtcaacacaaggaaaggggtggcgatgaagtggtggcggcgtccgatgagaatcctgtggaagaaattcagccgtatgctcaagaactggatgcaataaagaaggctttcaaaaccaaggatgagatggtggatgacatgaagcaacaacttgtttcactcaacaaatctgtggctgaggcacacaagagtaagagcttgtggactgtgatatcctctgcaactacaatttttgctgctgtcttagctgcttatgttgctagaggacgctgagttgagcttttgtgcttttttaaccttatatgaaatgaatgacttactttggtaataggatcaagatatatgccatttataatttgaactagttgagctatgtctatcttgatccttattagagaataacattttgatctgtattgagcttaaaacttgaagaagaaatatgcaagctaattatctataatcaatgctatgttgtttggtgttaacatc

SEQ ID NO: 40111 - DNA, 705 bp, Glycine max
  Clone ID: PAT_MRT3847_13621C.1
gtggactctcctgtgtcaacaaaattaaagtgaagagagtgaagcttgtagcaaaagttgtaggctagctggggttggagattctgatcagaagttggctgatggaatttcgttgtactctattgtgtctgattcgtacactaaagcaggaattcttgcacctctgataacagaacatgcgaatggaggaaagtgtattgttttcactcaaacgaaacgtgatgctgatcggttatcatatgtcatggcaaaaagccttagatgtgaggccttgcatggagatatttcacaaactcagagggaaagaactcttgctggcttcagaaataacaattttaatgttttagtggcaactgatgttgcttcacgtgggcttgatattcccaatgttgatcttgtaatacattatgatcttcccaattcatcagagatatttgttcatcgatctggacgaactggccgtgctgggaagaaaggaagtgccattctttttttcacacaagaccaattcagggccgtgcagactattgagcgtgatgttggatgcaaatttacagagctaccaaagattgatgctccaagtggatcagcagagatgtttagtggcatggctggtggtcgatttggctctatgagggatcgtcaatctggaggtacaggttttggtcgcagtcctggatttggtcgttctgggagtaccgggac

SEQ ID NO: 40112 - DNA, 637 bp, Glycine max
  unsure (1)..(637): unsure at all n locations
  Clone ID: PAT_MRT3847_136220C.1
ccggcgatgtaggcattagaagatctttgtgttttgttttgttgccattgaattttttcaaagcacaaaccaaaccaaacgcgagtgacgtcagcaggcaccggttatttcgggagagaagaagagaagcgatggaaagaagcaaagacaaaatcagaaagaaaaggagcaacaaaacaaaactactattaccaaaatctacactacaacttccaagttcaagcattatgtgtcactagcgatgtccaattccgatcccaaaacgagaccccgtccgggaccgtggccgccggcgccggcgccggtcgtcaaggcaatgccgcctgcttcatgggccaagaaaacgggcttcaagcccaagttctccggcgaggccaatgccagcgactcgggccagataagcctgcagcccaagcccagggagcccgacacaaacgtggatctcgaagcgggtcgggccggggctccggcgaatggtgtggcccaccagaacaaggttccgccgcttccaccttccgaggatcagctcgtgaagaagcgaaggaccccgacggcctccccagttccgccgtccctagtaccaatggccaagccactgcggagcctccaccgccgccgctntcgnggaggacggcga

SEQ ID NO: 40113 - DNA, 392 bp, Glycine max
  Clone ID: PAT_MRT3847_136221C.1
ctcttccagaagcagctgccgaagatgcctcgggagtatatcacccgcttggtgctcgacaagaaccacatcagcatggcaatcgtcaagaaggggtggcgcgtggtgggcgggatttgttatcggccgttcgagtcgaggggctttgcggagattgtcttttgcgctgtcgatagctcggagcagatcaagggatacggttcgcatctgatgaactcgctgaaagaccacgtcaggaaggctcatcccacgataaatcactttctcacgtacgcggacaactacgccgtcggatacttcaagaagcaaggcttcaccaagcagatttcgctgccgcgtgaacgatgggtcggatacatcaaggactacgagggtggaacgatcatgcagtg

SEQ ID NO: 40114 - DNA, 457 bp, Glycine max
  Clone ID: PAT_MRT3847_136222C.1
ccgggggggggggctaatttcaaaaaaagaataaaagaatttaaccataggggggtccaaaaaacgggggggcaggtttttttacaaaaaaaggttaaaagggacagggggctaaataattttattgggaaattttttatttaacccggaaagggggttttcccaaaatccctttttaaaaagcccaaaagagccgagggggggaaacgggggccaaaagccctttgggaaaaaaggaatttaatagcccttaaaaaaggtttcaatttttagggggggaaattgggcacagaaggggttttcataaaccccttattggatttcagggcgttttttggttttggggaaagggaaatttcaaaaattaggcttccctttctttaaaatgctggggggggcggcacgctcgcataattttggggggggttttccacccaaaagtggaaccgggtttccc

SEQ ID NO: 40115 - DNA, 152 bp, Glycine max
  Clone ID: PAT_MRT3847_136223C.1
caaaagtgcatgtatattctcgttacttttgtaggatggtccatctgaggtaagataagagagtgtagggatagcataatacccgatctagattagtgtagtgcgtaaggttctcacctgagtgggtccttggtgcataagtgcgtgtgtat

SEQ ID NO: 40116 - DNA, 436 bp, Glycine max
  Clone ID: PAT_MRT3847_136224C.1
gtaaaataggtaggggtaccaaagggcaaaccagttttctgaaaaaaaatgtgattcgaagacggggggacacaagacacgagccgcaaccaggaagagaaaagcctgcggagccaaacgaaagagggagcaaaaaggaaaggggaaggggaaacggcgggggggccaaaggggaaaaaaaggccacacaaaaggatgaacgaaaaaggcaacgcaaaaaaaaaggaaaaccgggcggggggggccaaaaaggaaccgcccaacaccagtgagaggggcggccgccgaaggggccccacggggggaaactgtgtgagccggggaaagagaaacacgctggttcgccccaacaggagggaacccaaaaaggggcagcaaagcgtcccccttgttcaagacaagagggggaaaaagggggaggccgggaccaaaaggg

SEQ ID NO: 40117 - DNA, 358 bp, Glycine max
  Clone ID: PAT_MRT3847_136225C.1
aggggggggagaccttaattaataaaaattataactcatcagtagcaaaaacagttcaaaacaaaaattccatgccactttgcgaaggactacccagattatttgccctaaacgatgtcctggggcccaaaacattaccttaaagggtccccgccacccattaaagcttcttaagccctataaaaatttggaaaacactaaaattaagcagcaccctttcccttttttttaggggggttttttatgtaaaactccaacttcttaccttccaaaatgtatccataaactctgccccattgaccagggcttgaggaaatgcccgccagcaaacccccaccaccaaactgcttcctaatgg

SEQ ID NO: 40118 - DNA, 394 bp, Glycine max
  Clone ID: PAT_MRT3847_136226C.1
ggaaagctggggaaactggttaagcatatattggtgttttggacatctcaaaaaccgacagcgcattgggcatgcagtccttgttcccgaaagataccttctggcacagataatgtatcagggagttcaacacaagcacctattatcccattccacttcgttgcacctacctcatgtgctgcatctttccttcactcagaacctccttcagttgcacaatccccaagtgctatactatctctcactccagaagaacctttctctatctttgccattggaccttatgcccacgaaacacaattagtttcaccacctgttttctcaacattcaccacagaaccatcaaccgctcctttcactccccctcctgaatctaaccacttgactacacctt

SEQ ID NO: 40119 - DNA, 174 bp, Glycine max
  Clone ID: PAT_MRT3847_136227C.1
ctgcttatctaatatgctcttaagtatatttaataatctctcatttaattaggtatctactgaaatcttgccaaatttcttatgaataatcagatattattaaaccccatatctaataacccattgaaacactcttacaagactttttaacattaatcataaacacgatacact

SEQ ID NO: 40120 - DNA, 552 bp, Glycine max
  Clone ID: PAT_MRT3847_136228C.1
ttaccgtgctacactgttgtagtaccacctgcttggggggggggggggggggggggggggtttgctgatgaggcgaagagtgagaactataggggatcaagagatagcgatttgaaaaggaaaagtaaatgatacgattctaaagagagagattgaatggctggcgtgtgtaatggtaattacccgtaaggagcccaaaggaacgttattagcttgctattagaggcagtggaagaaccaacttaatggagggggttaatttggcaaaggttggtaggtgaagtttatagagaaagaagcggatcgatgcagtaaggacgaaaccaaataagagccacaatagggagagctaacgtgggcgtaggctgctgtgcttgacaagtgtggtttacgcggatgggtaaagtggctgggtgggctagttaggcggaactcaagagaacacttagtaatggcaataattcactgcccaagaaggacggcgcaccaatgggtttgcggagcatgtatagccatcgcagtagaagtgagcgaaccactacgcgactaagt

SEQ ID NO: 40121 - DNA, 657 bp, Glycine max
  Clone ID: PAT_MRT3847_136229C.1
atggcgatgagcgttgcaaggctgaggaaggacgagatccagaggctggagaaggagatcgattcgctccggcatccaacggtggagctgcatgagtcagagacgagcgcggcactgaagaacctccttgaagagagagaaagaatggtgacatttctagagacgagcgcagcagcaccaccatcgccgcttgggactgccttcaacggcgtcgtcgaggagctcaagaatttcaccacccgcgtcgctcacgttctccccgtttccgacgatgaaggaagcactggtgaaattgttagtgttctcggtggtcctgctgttagagatatatgttccaagtgcctgaggttgtttgatcagagtaccattgaggctttcacagttcgaaatttggctgggcatcgtctaccacttgatccactgcaagctaaatcagaatggtttggaggagatgctacatttccatgggaatgcattcaccatttttggcaacaagggggacaaattaatggaagaaaggtgatcatggttatggataacaacaaagatgaagggaatggaggatgtatcactgtatacgtggtgtatggatccatctttgggtctaaaccagttgcggtaattttgatgatgcaggggaattgttctggtcagtaa

SEQ ID NO: 40122 - DNA, 214 bp, Glycine max
  unsure (1)..(214): unsure at all n locations
  Clone ID: PAT_MRT3847_13622C.1
cgaagctaaaaatataccacgacctttttggagcaaaaaaaccagtttttaacaaataaaaaaccttttgtgatttcactttcanggcttacaaaacccaaaaaattgttccggggttccaaatttaatttttattctcacatttttggaccccaaatcaattatatcccccgctttgggaaatttctccccgcgagggaaccctccaaatggg

SEQ ID NO: 40123 - DNA, 313 bp, Glycine max
  Clone ID: PAT_MRT3847_136230C.1
ggctgctagaacagaagaagaatacgactatctgttcaacgatgtactgctcagcgattctggtgttggaaaatacaatcttctgtccgtattcactcgctacgagtagtgcctcctatacatctccaccattgtagtagaattctctactagcactcttcatgtggagggaagaactgtcatagctcaattattgtatgctgccggacgggaacgatccagcacaattactactgcctactactagggtggcctcgctactgttcttgtctacgatgatgctaatccaacaaccttcttaaatgatattcgc

SEQ ID NO: 40124 - DNA, 250 bp, Glycine max
  Clone ID: PAT_MRT3847_136231C.1
gtatacgatcctctacaatgatcagaagataactggtacagagaaccatatgccaggtattgtctggtactcaaacaccttaacctcgattcgaagaggtggtgttatggacacacgcaccgtcgtcttagaccaaggcggaagtttatgaggtggaggctaagattctgacacttacttcgtaggctgatgttgctgcatgcgatgaatcagtgctactcagactgactgctcaggaaatgctaagttg

SEQ ID NO: 40125 - DNA, 199 bp, Glycine max
  Clone ID: PAT_MRT3847_136232C.1
ggctcgaggctatgtgtttgttttccaacgccaaaaatttctcgctttcggttgatttgttggtcctaagggtagggtggtcgttccattgcccggtcaaatttcaacagtctacaagtgcagaaccggatgctgctccaatcgagctgtgaggaggccatgggaggggacactgctgtcggcgtttagagagcgacct

SEQ ID NO: 40126 - DNA, 201 bp, Glycine max
  Clone ID: PAT_MRT3847_136233C.1
agggtcgagtggtgatgctttaagtctattggctcaaaacatagcaacaaccttggcagggttgatttttacttccgctgctagctggcaataggcatttattcttcttgtctaggattccctcattggaataaatggctacatgcacttgaatctcatgaagggatcctatgcagatgcatagatgatgtatgaggaagc

SEQ ID NO: 40127 - DNA, 1838 bp, Glycine max
  Clone ID: PAT_MRT3847_136234C.1
gcataaggccataaaactttgtgaagaagcactgatagctactgatccaacaattacatctcttggaccaaatatagaggctgcagtttacaagacaggagttgtatgtgctgccttccttgctaacattgccacatctgatgcaacagtgaccttcaatggaaattcatatcacttgcccgcatggtctgtgagcatcttaccagactgcaagaatgtagtacttaatactgcaaagattacttctgcatctatgatttcaagcttcacaactgaatctttaaaagatgttggttctttggatgattctggctcaagatggagttggattagtgaacctatcggtatttcaaaggctgattcattctcaacatttggattgctggagcaaataaatacaactgctgatagaagtgattacttgtggtactcattaagcattgatcttgatgctggtgctcaaactttccttcatattaaatcccttgggcatgctcttcatgctttcataaatgggaagcttgcagggagtggaaccggcaaccatgagaaagctaatgtcgaagtagacatccccatcacactagtttctgggaagaacacaattgatctcctgagtttaactgtgggacttcagaactatggagctttttttgacacatggggtgcggggatcactggccctgtgatattgaaatgtttgaagaatggcagcaatgttgatctctcctccaagcagtggacatatcaggttggccttaaaaatgaagatttaggtctatctagtggctgttctggacagtggaattcacaatctaccttacctacaaatcaaccgttgacttggtacaagacaaacttcgttgcaccctccggtaacaacccagttgcaattgacttcacggggatgggaaaaggtgaggcttgggtgaatggacagagcattgggcgatactggcctacatatgcctctccaaaaggtggttgtactgattcatgcaattatagaggagcctatgatgcatccaaatgtctcaagaactgtggaaaaccatcacagacattataccatgtacctcgatcatggttacgaccagatagaaacacacttgtattgtttgaggaaagtggaggcaaccctaagcaaatctcttttgccacaaaacaaataggaagcgtgtgttcacatgtatctgaatctcaccctccacctgtagactcgtggaattcaaatacagaatcaggaagaaaagtagttcctgtagtttcactggagtgcccttatcctaatcaggtggtctcatccattaaatttgcaagttttggaacgcctcttgggacttgcgggaacttcaagcatggactctgcagcagcaataaggctctatccattgtgcagaaggcttgcattggatcaagcagttgtagaattgaactatcagttaatacattcggagatccatgtaaaggagtagcaaagagtttagctgttgaagcttcttgtgcatagacatgtcgcttcaagcgttcccactagcttggacttggctgaataacactcttcactctcggaagtcttttagacttattgctgaagatgattcctcattagccaaagtaaaatggtattctggtagtaaaccagtaaaaaaaatttcaaacaaaatagtgtaattttactttataaaagaggaaagtctcacttatgcattatgcgtgatagtagtacttttacttaaaccaaaggtttctaactcattatacaagaaattgttcatacatcagcgtgacaaagatgagaaatgaacaattgggctatttctgataaaaaacacaaa

SEQ ID NO: 40128 - DNA, 306 bp, Glycine max
  Clone ID: PAT_MRT3847_136235C.1
ccgttcccattactgttgctgcgagttttttacctggcatcgggccctgtctcattcggcattgcgtattgcgaaaagcagaaccccagtcacaacaagtgcctccgaagttgcaataccgagaaagactcctacaggaaccaagcatgccacgctcgttgcaacctacttaaggcggacgaagaagacgaatgcgaataatgtcaaattccacgaccacgaccacaacaccccgagagggaacgtcagcaacaccttgagaacgaggaagacaaaggtgatcatccacttccattcccattccca

SEQ ID NO: 40129 - DNA, 270 bp, Glycine max
  unsure (1)..(270): unsure at all n locations
  Clone ID: PAT_MRT3847_136236C.1
caagattccgcaacnnatantanttnaaaatggcgcngttgatcacagtggtgtggtgngcggtggctctantcactgtgcacngcggcgggcgcgtcgtgggtggaggaggcggtnacccgatacgaatggtggcgggggtggaagnggaagtngttcgggtgatagggcantnncgncncgcnctgaantttgctaggttcatgancangttcgggaagagttacgaancgangaanagatnnggcagaggtacnagatattctncgc

SEQ ID NO: 40130 - DNA, 301 bp, Glycine max
  unsure (1)..(301): unsure at all n locations
  Clone ID: PAT_MRT3847_136237C.1
tttntttttttttttctntntnngccacaacaaaatctaaactctcgtgcctgcaccaggttgcttaacatgccccgaaaaaggaaccattcccacggcaaactcgattcggggaaatgctaaacccaacatacaaatgtaacaaatgggctctcgattctaactacaaagaacgaatcgtggcaagaatttggctaccagagagcctgtttattatcccaagggcccgaggtgggaaagaaatcacttaaaagaagttctgcactggcatttgcattcacctagacgaaccaaggttttt

SEQ ID NO: 40131 - DNA, 483 bp, Glycine max
  Clone ID: PAT_MRT3847_136238C.1
aaaaaacgaaaactttgccaaccaacaaagcattgaaagcaaagtcaccactcttgaatctgtggccacccagattgagaagaatggccaaaacaacaacaaaagtactaaaacaacacaatctcaccactctttctctcaaaccctgttagccacatcggctcgagataaccctcaaactcaaacacatcattaacaaaaattccaatcactttgaatcctctctctctttctctcttgttctccttgaaactaaccatctcttgaatctgaagttacccaagacttgcctttcaagtgtgttcagtttcatgtattggtcttatattggtgtatttaattttgggatgacatagatcttgccttgggaacagtaaaagaaagcagaaaaagcatgtttgcatctctacaggtgaaatctgaggtgtggattgttcttttttgagttaaaattccaatataggagtttacttgtcaagagac

SEQ ID NO: 40132 - DNA, 478 bp, Glycine max
  Clone ID: PAT_MRT3847_136239C.1
aattaaaaatccataaaagttcatcaaaacatgaacaggaaccgggtctagtacaagtacagtacatgtagagaagtattagcattttctacgaggaggctaagagatgatgacacaatccaaaataaagctccatttaagccatgcctccactcgttgctgtcctgattatctggaagagagatgatccaatgacaacaaagacagaacaaccgagcagcactgggccaacagggtagtctttcccctttttagtggttgtgtctggcacaaatcctcttttggtgatgtttttctcaaacttctccaccttcctgtccgcaaggcgccttgatgtcgtcatttctgttaaggattagggatagccggaaaacggtgatggaagaaaaaagagatcgccggaaaatgaaagacggtatttatcttcttccggcagggccctcttcaaccttatttgtgaatgcgcgcggacgcgtgg

SEQ ID NO: 40133 - DNA, 1052 bp, Glycine max
  unsure (1)..(1052): unsure at all n locations
  Clone ID: PAT_MRT3847_13623C.1
tacggtggtaataagtcgacagaaaagaatattagcatagacataaattaagaaatcaaagagacagaaagttgagagagaagtgttcacgtctttgagaaatgggtgcttcggcatcggtcacagaaaaatccatccatgaattcatggtcaaggatgctaagggcagagacgtgaacctcagcacctacaaagggaaggttcttcttgtagttaacgtcgcttcaaaatgtggatttacaaattccaattacacccagttaactgagctttacagcaaatataaagacagaggtcttgagatactggcatttccatgcaaccagtttctgaaacaagagcccgggagtagccaggaggcagaggaatttgcctgtacaaggtacaaggctgagtatcccatttttggaaaggtacgtgtcaatggacctgatacagcacctgtctacaaattccttaaagcaaataaaacaggatttctgggtagtaggataaagtggaatttcactaagtttttggttgacaaggaagggcatgtcctcgctcgttatggtccaaccacctcaccgttgtccattgaaaatgacatcaagacagcattgggggaggcttgaaagactctacaatcacttcaaattggtgctcttgttgaagatgattgaaacataaggaatgtatatttgtagatgtttcttctagtgattatttcttacatatttcatgcctaggtttttttgtgtttgttgtattagaattctgttttgtttgtgattttagtcgttatttaaaaattaattaatgggcattagtttgagttgtgtgtgagaagtgtgttttcatgtatcacttactaaatgcatgcaatcttcatggcctcatgtgtattaatgtctaggaagttgcatcacttgttataatgctagggaacagtccctaccaagtctatcaagagtctatatatatggatgatatgaagaacctatgtactgtattttacaagaacaaaaagcttttcattctctgaaaaaaaaaaaagttnnaactgcttacat

SEQ ID NO: 40134 - DNA, 457 bp, Glycine max
  Clone ID: PAT_MRT3847_136240C.1
acggctgcgagaagacacacaaaggcttggaggtgagatgtatgattgaattttataagagtataataaatgaacacattattaaccatttttagactattataattaaaataatgtttccagtataaaaaaatatttctggctaccttactgcagaagattgttactgctaaatggaagactgctacagcagaagagaagaagccttatgaggggatataccatgcggggaaagaagcttatttgcaggtgattgcaaaggaaaaacgtgaaactgactcaatgaggttcttggaagatgagcagaggcagaggactgcgatggaattgcttgaacagtacatgcaattcaaacaagagacagaaaaagatggaaaaaagaacaagttacatatacctacctttggaccattcttctttcttgtgtggttattgatgtgttttatacatgttcaca

SEQ ID NO: 40135 - DNA, 1394 bp, Glycine max
  Clone ID: PAT_MRT3847_136241C.1
gaattgtactatataatataaccaaaattaaaaaaaaagaaaagaaaacagaaacaggagcagaagaggaagatgctggtgagtgaatcgagtggttcgaaggtggatcttccggaggagttgctaaatgttctaccgtccgatccttacgagcagctcgatgtggcccgcaagatcacctccgttgcgctgtcgacacgtgtcgacgcgctccaatcagagtcgtccgctctacgcgccgaactcgccgataggaaccggctcatcgccgagctccagtctcaggtggagtccatcgacgccgctctctccgaagccgccgataagctagcccgagccgaccaagacaaggagaatttgctgaaggagaacgcttcgctttccaacacagtgagaaagctcaccagagatgtctccaagttggagactttcagaaagacgcttatgaaatcacttcgcgaggatgaagatacttctgaaggaacgccggacactgcagctaagttacacagtcaagcaagtttcacttccacatcgcaatttggagatgatgatgcatcttcaacgctttcttctagaacatcttcgatgcgaataaacacttctgatatgggaaattatttagcagaggatcgtgagtctgatggctcaaaatctcgagcatcacataatctcctcttagcatctcaaactagcacccctcgaattactccccctggttcccctcctagtatgtctgcattggtatccccaacaagaacatcatctaagcctgtgtctccaaggcgccatgcaatttccttttcaacctcaagaggaatgtttgatgataggtcttcagtagggtcacaaactggacgaacacgcgtggatggaaaagagttttttcgccaagttaggagtcgtttatcttatgagcagtttggtgcatttttggcaaatgttaaggaactgaattctcataaacaaactaaagaggaaacactacagaaagctaatgagttatttgggcctgaaaacaaggacctctatactatatttgagggactgataacgcgcaatgtccattagcactatcatgcggaaattaatttcatgactgaagttttgttccaacttcctagttaatttgtaacaactgatattcccactactttagcaaccttttcccattgtaaattacatattacttattattgcgtgataaagttttatttgaatttccaagcctgtaaatttgaattggggaatgacttctcttgacaagagcaagtctgttaacaggtcgaccattggtgtccttttaggaaatgcatactgtgtgttcttgctttcatccctgagatgactagacatgggtaataatttaactcatttttggtgccccccccccc

SEQ ID NO: 40136 - DNA, 174 bp, Glycine max
  unsure (1)..(174): unsure at all n locations
  Clone ID: PAT_MRT3847_136242C.1
ccccggtcgacctcaaccccccggggtataacccaaccgcgancacaggcgggnggacctttttaaagggaacaaagggtttccacaccggacgacaagaatattgcaaatgattcctacacaatagcgaacgattgccgaagggaaagaaaaccactccctgtgctggccaca

SEQ ID NO: 40137 - DNA, 201 bp, Glycine max
  unsure (1)..(201): unsure at all n locations
  Clone ID: PAT_MRT3847_136243C.1
gtccgccannggccnccgccgtcnccgntngaggcctccgggcnnntttccgggcttccgcacgnggttgcaccttntgnctnnngtccttcttgcgnacctngggtnnttngannctcgcnnncncntntancnngtngnggttnngatctcgagagttcagcnnacgacncanatnacncncnnacatancannantgt

SEQ ID NO: 40138 - DNA, 450 bp, Glycine max
  Clone ID: PAT_MRT3847_136244C.1
tttggatacactctactggatcttgtaaaaactacctatatatgattgcactgatgcttctaaagtgtagaaagagcttcaagaggctaggactgcatacctaaatgactcaagcttaattattggatttgacaactcttagcaagttgcatagcatcacctaaatcgactacaatgccccaggcttttcagtgattgaacaggtaacacagcatctgtacccaccttaattagcttgttgcacttaaactatattccaattggcttatgatttatgagatttgatcatattagatttttgaacagtgtttcaggcctaatgtcgaatggaacgcaccagatctcatgactttaatatcgggttgtgttaaagaaacccacaaagggcccgctatctataggatcgcacctgacctccgcccacatgctacgttacagcgttttctatag

SEQ ID NO: 40139 - DNA, 499 bp, Glycine max
  Clone ID: PAT_MRT3847_136245C.1
aagctggaaattcggttggagctgcgagagacgacagaagggaaaatggaaatatcttcattccatcaatttcctgatgaatcactcagcgaggcgctcgaccatttccacggattactcagaaagacgcctacacatgggtacagtgagtcggtgcaactaaatatcttcatagatggcctgcaaccacaatcaaagcaactcctttacgcatccgcaatgggaaaaatcaagttgaagacaccggaggaggcaatggagttgatagaaaacatggcagccaatgatcatgccatccttcgtgatcgagcatacacgccaacaaagagaagccttttggaactcacagcccaagatgcaacattggcccaaaacaagctattatcccgatagatagagaccctaacagagaccctcaacaagcttccacaacaactaactagggtaagtccctttcactcttcagttgtgcaaataaggggatgccacatctgtggag

SEQ ID NO: 40140 - DNA, 391 bp, Glycine max
  Clone ID: PAT_MRT3847_136246C.1
gctgattaaaatcaacagatttaattaaccatctgatatagataatatacaagccaatttaggtcaacatagaacccatgcatcttgaagttttttttttcataggcaaaccgcaaacctttgaacattaattatatacctaaaaatctctcgggtcaacaaacacatttctcacttgtccgttcatcattagttcatcaacattttcatcaccatggcttgaaagtctctttgtgtaccatagatcatcgatacatgacatagaatctgtttgaggaacatggttagcaagtggatcaccgaaccctaactcagttataacaaccctgcagtgcctcattgcttctcctactgttgatgggaatgtccacatggattgcatgagctctac

SEQ ID NO: 40141 - DNA, 1528 bp, Glycine max
  Clone ID: PAT_MRT3847_136247C.1
aattcttgaagaaagccccacgccaggagtttggtttcctgaagaggccaaagtttggttcagttgtttgatggtataggcgtatcaatgatttggagtgcgcaagtaggctaaacgcgtccggtgcgttaatcgcaacatagcagcacatgcagttgtgataaggaatgtaccgcgaagcgaagtgtagaaagagaaactgaattcaatggcgccactttcattgcctctgaatttgaaatggacgccgttgagtgtgaaggccaccgccaccgccaccaccaccagcaaggtccctgaggtgccgctgccggagaagatccgcaactctagaatcctcgtcctcggcggaacgggtcgggtcggaggatccactgccattgcactctccaacttatgtcccgatcttcaaatcctcgtcgccggcagaaacagggagaaaggtgaagttctcactgcaaaacttggcggcaattcagaattcgctcgcgttgacatcgacgacgtgaattcgctggaaactgcattgaagaatgtagatctcgtagttcatgccgctggtcccttccaacaagcagaaaggtgtagcgtgcttgaagctgcaataaatactcagactgcgtatcttgatgtctgtgatgacacaagctatgcatggcgcgcaaaatccttcatgaatagggcgttggatgcaaatgttccggctataacaaccggaggaatataccctggaattagcaatgtcatggcagcagagctagtccgtgctgcaaatgaaagtgaagataagcctgagaggctaagattctactactacacagctggaactggtggtgctggcctcttaccagcttcttgctgagaggaagtagttgcacagtgggcagaatgctgctttgcatgcaccataccatctcgatttggaacagcatcagaattggggaatggaaacggaagacagataagtccaaagtttggttcagttgtttgatcctgttgttcgagcagtggatgggattgctggagaacgcgtatcaatgagggttgatttggagtgcgcaagtggacgcaatactgttggtatattcagtcatagaagactttcagtatctgtaggaattgcaacagctgcttttgcacttgcaattcttgaaggaagcacgcagccaggagtttggtttcctgaagaggctcaaggaattccaattgaagcaagagaagttcttctcaagcgtgctagccagggaacgtttaactttataatgaacaggtcaccatggatggttgaaacgaatccaaaagagtttgggttaggaatatacttataagtcttcccgtaccaaagcaaaagtgatattcgctaaacaaaaagttattgtactgcgaggctgtaagtgtataattcttgagacatcgttcattttcatgcatgtatgggattaatcgatgagatgcccataagaaccaggcacactatgcctatctatttggttttgctagatgaaaatgagctacaaccttctccagt

SEQ ID NO: 40142 - DNA, 1169 bp, Glycine max
  unsure (1)..(1169): unsure at all n locations
  Clone ID: PAT_MRT3847_136248C.1
ccacgcgtccgatcgaattaaattagataacttaaaatatgacgtgtggtgtggattttgccaagtattgaacatacgtgctttaatcacagcatagcagcaagtgcagttgtgataaggaatgtaccgcgaagcgaagtgtagaaagagaaactgaattcaatggcgccactttcattgcctctgaatttgaaatggacgccgttgagtgtgaaggccaccgccaccgccaccaccaccagcaaggtccctgaggtgccgctgccggagaagatccgcaactctagaatcctcgtcctcggcggaacgggtcgggtcggaggatccactgccattgcactctccaacttatgtcccgatcttcaaatcctcgtcgccggcagaaacagggagaaaggtgaagttctcactgcaaaacttggcggcaattcagaattcgctcgcgttgacatcgacgacgtgaattcgctggaaactgcattgaagagtaaaattgcactcgctaccagtcaccgttgttctttgtcttgtgcttatgaattgaaaatcgatcatgaatgttgttattgtaaatgcgaatctgtgcagatgtagatctcgtagttcatgccgctggtcccttccaacaagcagaaaggtgtagcgtgcttgaagccgtccgcggacgcgtgggtgcgtatcttgatgtctgtgatgacacaagctatgcatggcgcgcaaaatccttcatgaatagggcgttggatgcaaatgttccggctataacaaccggaggaatataccctggaattagcaatggtgcttacctatctatccgcattgttcttctgttcccaaataggaaccagaattattatgaaaatcatttgatcaccaagttaggggaggtcgtgatttatgttgaacgagaatctttttgcatctgctgtattttggttgctaacacttcctacaattttgtcacagtcatggcagcagagctagtccgtgctgcaaatgaaagtgaagataagcctgagaggctaaggttggtggatcccctcacaattccaaagttntatgatttctttatttaaatgtaaatgtgaatgtattttggttgatatgtcattgcttatcttaccagttggatatatcataatatgttgaattccttgatatgttaattg

SEQ ID NO: 40143 - DNA, 391 bp, Glycine max
  unsure (1)..(391): unsure at all n locations
  Clone ID: PAT_MRT3847_136249C.1
ccgggccggatttccggggcgacgggaaacccgaccaacanaagacacgccgacgcccgggaggccggagacgcggcagaagacacaagccacagaaagggcaccaccccggccgccaaagaacgacaccngcacccccaagcaaaagaggagnnncagctccnnccattgctgaaaaagagggggtgaaaancannanaaagaatgtgataaaaaaaaaccccccccaggggggggggggggggcccacatcatgacctgcactcttggcactgaaccctgaacgaatatccctactcaagaccttggagcagaagcaggcctgcgcctactctaccacttggccaaaagacctagaaggactgcgacaagattaccacatgcccacact

SEQ ID NO: 40144 - DNA, 238 bp, Glycine max
  unsure (1)..(238): unsure at all n locations
  Clone ID: PAT_MRT3847_13624C.1
agctttgaatttggctctagctttatttcacagctcggtaanataacacgcaggctagagctcgccacgcggggggaaattttacaagctttgtcctagagtacctctcgcctgcggaaaggaaaaaatagcggaaatgcgccattctgtgccattcatcagcttaggtatatgagtcagccatagtcactcatatacgaggtgctattacatatggaatatttcagacttagcaggg

SEQ ID NO: 40145 - DNA, 1750 bp, Glycine max
  Clone ID: PAT_MRT3847_136250C.1
gctcgagccgattcggctcgaaggaatgatcctcctatttccaattactccttcattagagattgaaaatgatgttgccaagagaaacagtaaatgcagtagctcaagcagctctagtagtgaatctggctcttcatccagtgattcagactcagttagttcatctggtagtgagttggatatggctaaaacatcagaacctcttagtgccaccaaggaaaacataggatttggcttgacttcagatcaaaacaaaggggatcctggtaattcagaaactggaaaggattcaacaaatgtgggaggccaagttgaggagagttcccagagtaggcctgttgctactgagccagaaagccatcaagagggggagagtgctgcatctaagaggcaagtctctcccgaaaagctctaccgtgcagctttattaaggagccgttttgctgacaccatacttaaagctcaagagaaagcacttgaaaaggatgaaaagcgagatcctgaaaaacttaggattgagcgagaagatcttgaaaggcggcagaaagaagagaaagctcggttgcaggcggaggcaaaggctgcagaagaggctcagaggaaagctgaagcagaagctgcagctgaagccaaaaggaaaagggaactggaaagagaagcagcccgccaggctttgcaaaaggtaacataaaaaggaaagtatgttaggatgcaaagtcagctcctttgtatgcttcactgagtggttatgtgtgcagatggagaaaactgttgatatcaatgagaacagtcaatttttggaagatctagaaatgcttagtgctgtacatgatgaacacctgccaagtttcaaagaagagacaagcacagatcaacctcaagatggattgggtgggatcaagctacagggaaatcccttggaacagctagggttgtacatgaaggatgaggatgaggaggaggatgaggaggaagaggatgaactgcctccgagtggtgctgtaggaccatcaaatgatgttgaagaaggagagattgattgatttgttccccttgattgttccattattttgaacggatatataaacggtatttctggggaacagttgctggacttagagatgctgctttttttgttgctacggggaacagttgctgaacaaataattacggtttgtatgtctgatgctggttcacacctaagtttgaagatgggatagcaaaaactagtggcaaacgagtgaagattggatttggttttggttctttctgattaattttggttttaacttgggaaatggtttctgaaaatgtggatagaaagctcgcagcccccatttattgaagaagggctttggtatcttggatggaaagtttgtatcaatcaggatatgtccaattttgcttgtaaagagggaactaatttgtaacgagttctaagtctgacctcaagtagttggcttctctgacaatgtaaaatattttagagccagggtaaaatcaattctttctatttactctttgcttgaatttccttctgattgagtctagtggtgtgaagaatctttttattaatttcctaatcggtgtataagaggctaggcaggtttggggacgagtttattcgtctcaaaagatgtgagcagatggataacttgtctttggttttcttgaattgcaaaatagaagttgcacatgattaaaatgtgaatgaataatcattttagtcctaaaaaaaaaaaaaaaaaaa

SEQ ID NO: 40146 - DNA, 175 bp, Glycine max
  Clone ID: PAT_MRT3847_136251C.1
ccacgcgtccgcttggcagctgacactgagagcagcgcagatggagaggtgtaagaggtaggtggagggtgaaacatatggaggacttgttgctccttctgcataaagcatggcacaattctgaggtcgaagacagggagtactcgcgcgcgccaccaccaacaacgggagtgct

SEQ ID NO: 40147 - DNA, 274 bp, Glycine max
  unsure (1)..(274): unsure at all n locations
  Clone ID: PAT_MRT3847_136252C.1
caattttttgcntagctttttcctcaacctctttatacgactnatcgatcgttcancnatttattacgaacgnttggaancntaaacccnatattnttttaaggtgncaaattaagaaggnntaatataatccatggnaggaggaagcggaggaaganacntggaggaagggcctacatgggctgtctccgctgtttgtgtgttttganntnatctcgataggnatcggagcacatcntccacccnncaggagagtngntgnaggaggagnncc

SEQ ID NO: 40148 - DNA, 664 bp, Glycine max
  unsure (1)..(664): unsure at all n locations
  Clone ID: PAT_MRT3847_136253C.1
cggattcgtgggcggacgcgtgggttgaaaccaaagcaaacctcgctttctcagtttctctttcttagggttttctccaccgtccattgcaaagtcttgcgcccaatttccatgggtaaaatttctctcccatgattcacttcgttaatgcgttgtttgtttttgtgaaatgtctgagaaaataaaagttgattctttttttaatctgtgttttgttattatgtgtcaattttgtgtttttagtttttcaaatgtttgttttgatcgtctaggtttttgtggatctttatggagcagagttatatattgttgtattttatatcatttgtcttcgaaaaaaattagttttcagggagattatagtttttttgttaattgcaagaattacaggttgtcagtttttctgcaaatgaattattatgaattatgattacattctgtgcatgcatgagaggggttattttttgcatagaattttatggataggaagtatctgtgttgtcttgggagagaggaagtgaggaaacttctttgatatcaactttggactgttaattacaatttgttttaaggaaggaaatgggaataaacttcaagatgctctgctttctatgtttatttatgntaatcccaggggagagggtaaagaagtctactatctttt

SEQ ID NO: 40149 - DNA, 215 bp, Glycine max
  Clone ID: PAT_MRT3847_136254C.1
cattgatgccatggcttagatacatgtaatatgcgtacgtttgtgggaatacgtgattggtaggtggtgcagattcgataaggtgcacgaggcacacacgggccgttctttgtcgtttggatgattactcttagtggatgaatgggagacaacaactttttatggctaactacgagctacgagcatgatgcctcctactctatggctattgatta

SEQ ID NO: 40150 - DNA, 482 bp, Glycine max
  Clone ID: PAT_MRT3847_136255C.1
aattcggctcgagacggctgcgaaagacgacagaagggcagtctatgccagctagctgaaaataattgaaagcagtgctagcctatacatgtggctactatagggtcaaacgttttaaagaatattgttcccatctttccccatttcagattctgaaactaaaatcctaaataattactatttggaaccccaattgcatacacaatctcttcttataggtaatctcccaattgcaattgctttgcttcataagttaaccaaaatcaaccttggcctgcactcaaagaacaaaaccttcaaaatagtatccaaaacaccctttttactcccaatatctcaaacccaatttcaatttcaaaatagtataaaaaaaccttagcctacacataacccatttatgtgtgttggttggaagctaaatccagaccccagaacttactaccaccaaacatcaacttatctgacttcaaccctcaacaata

SEQ ID NO: 40151 - DNA, 360 bp, Glycine max
  unsure (1)..(360): unsure at all n locations
  Clone ID: PAT_MRT3847_136256C.1
agtcgctgcagcgtacgtaagctcggaattcggctcgagcnnnantttngcagntcnnagagccagagantttcatgtngnatggntnattnatccccttgtntntggngagtatccaacatgccattnaaaatattgttgggnatagnactnncccanattgcactcagnncangagagtttagnnatacgtngaaagggtctgcagtnngatatttngnttaggnaanttgcnganncaatcatgncataangggaatctggcnatggnaatggtatcnccnncaatncnaggnccngcatccccaaataggntncccnangggnnaatnccanaanttggacactggnatntganct

SEQ ID NO: 40152 - DNA, 929 bp, Glycine max
  Clone ID: PAT_MRT3847_136257C.1
gtagggctgagaaaatagcgacgcagaaacacgctcggctacacgatcctgcgatccaacgcggtgtgtccagtgattccgctctccgtcgagtctgctcatggtgaagaatcacgaggccatccgccggtgaagaatcacgaggccatccgccggtgaagaatcgcgcgattcgtctggaaatcgcgattcaaacacgattcatccccgatgcagagattcaaccacgattcaggaacaaaaaccagacaagctccgattcatattggtagctgctggaatcgtatacaatcgtgcgatgcgtatggtgaatcgtacgattctaactaccatattgaaaatgacgttataatattggtacctgaagattggggttgtgtcggctctggttggggcttctatggagttgttcatgatcaaaactggattctgtatgacaaagtaactgttttggagtcagaaaagcgtgcctgggagaattcgcctgatgctcaggcaattagagaagctctaaacccctggagacagattgacacagaaaaaacaaagaagtcctgactcaattatgaatcattttcttaaaatccatgagtgattttaaagaactcaaagtgttatgtgagaatgtgcggaaataaactaataacatttggactagctattctgttatgaaagtggatctggtatattaccatccaacaaccttgattgctacatcttgtcggctagactccaaatcatgggcaactctgggatggctcacacaaccttcaattttgctatctggctttgagtgttgaatttattttatttgactcttgaataagtgcgcagtgttttcttggtaatatggtacatatacaacactgagacaagcacacgtgtgctaacattattctcaactaaaaaaaaaaatacaaatgtttctt

SEQ ID NO: 40153 - DNA, 277 bp, Glycine max
  Clone ID: PAT_MRT3847_136258C.1
aggggagcagaatgagagcaatttatgtcgggaagagattgtggacatattggaagacgttcaggcccgaactgaaatatccatgtgtattgtaggtgtaaaacagtgagtataatacttaattcagaatgaactgaaattaatttttgttaccacaatcatcactacacatccttgacctccgaccaagatttggcatttcaatgcaaacactatagcggatcaaatcagcgtttgtggcaacaagttccctttggtgcctaaagacttgtttttt

SEQ ID NO: 40154 - DNA, 1018 bp, Glycine max
  Clone ID: PAT_MRT3847_136259C.1
cccacgcgcgccccggctgagaaaatagcgactcagaaacacgctcgtcttcacgatcctgcgattccgctctccaacgagtctgcgcaggatgaaaaatcgggaggctagccgtcggtgaagaatcgcgcgattcgccaggaaatcgcgattcaagcacgattcatccccgatacagagattcaaccacaattcaggaaaaaaaaaaacgagacaaactccgtttcgtatcaatagaagctggaatcccacgcgtccgcccacgcgtcatcccacgcgtccgcccacgcgtccgcacgattcatccccgataaagatattcaaccacgattcaggaacaaaaacgagacaacctccgattcgtatcggtagcagctggaatcgtatcgaatcgtgcgatacgtatcgtgaatattgaaaatgaagtttcttgattggtacctgaagattggggttgtgtcggctctggttggggcttctatggagttgttcatgatcaaaactggattctatgacaaagtaactgttttggagtcagaaaagcgtgcctgggagaattcgcctgatgctcaggcaattagagaagctctaaacccctggagacagattgacacagaaaaaacaaagaagtcctgactcaattatgaatcattttcttaaaatccatgagtgattttaaagaactcaaagtgttatgtgagaatgtgcggaaataaactaataacatttggactagctattctgttatgaaagtggatctggtatattaccatccaacaaaaaaaaaaaaaagtgaggaaatgtgagtccaaaaatggtgaatttttcgtttaagtaatgatctcattccctaggttttgttcagtctagaagtaatttgtttggtcggatagaagaaattagtagtttgctgatttctagtttaacaactcatgttacaactcagcaacagtatacttttgtgcaattcctttgcttcgcaaagtattaaatttaatgaaacattgtttgacttttt

SEQ ID NO: 40155 - DNA, 541 bp, Glycine max
  unsure (1)..(541): unsure at all n locations
  Clone ID: PAT_MRT3847_13625C.1
ggctcgagcataaattaagaaatcaaagagactgaaagttgagagagaagtgttcacgtctttgagaaatgggtgcttcggcatcggtcacagaaaaatccatccatgaattcatggtcaaggatgctaagggcagagacgtgaacctcagcacctacaaagggaaggttcttcttgtagttaacgtcgcttcaaaatgtggatttacaaattccaattacacccagttaactgagctttacagcaaatataaagacagaggtatggtttttttaggtttacagagcagttggtgcacttgcatgttattggattccaaatttgtgccttttcagtgaccaaatacttttagttaaactgaaggattaaaagaaattattaaatctgatctcacttgagaatgttttgttggtctgatctcaggtcttgagatactggcatttccatgcaaccagtttctgaaacaagagcccgggagtagccaggaggcagaggaaattgcctgtacanggtaccaggctgagtatcccatttttgaaag

SEQ ID NO: 40156 - DNA, 198 bp, Glycine max
  Clone ID: PAT_MRT3847_136260C.1
tctttgacgcgtggggtagagaccgagtaatgagtattctcttcccaagaagttcctcagcaacaaagaggaaaagggtcattagagaacttgttcagggtcgagattatgccactcagtctaagtttctgctttacaagcccattggccctgactgttctgtttagtcaaggttacttgtggtcaatgtgttgagat

SEQ ID NO: 40157 - DNA, 592 bp, Glycine max
  Clone ID: PAT_MRT3847_136261C.1
caattaattccttttttttttttaaacttttttttccccaccctttggttgggaaaaaggggtttaaaaattttattcgctctccctgggggaaattccggtgccctttgtttaagggaaaaaaaggaggattctttttaaacaggccagggttaaaaaggggcaaagggggggtttaaagggggttttttatgggggaaacccaattttgatattgggggcaaaaaaaattggggggtaaaggggtgggtctggggccaaactcctttataactccataaggcacgcgggaaaaggaggatttgaaaacaacgggcaaaattagtcagggttacagccaggggggcactaaagcatccggttaaagaaattcggaaactacggggggaaattggcacaaacagacccaaggttccaaaattatgtttttttatacagtaaaggaattcatccattcttatctgggttattcgggaaaaaaaactttaagcatcagccccttgtttccaaaaaataggttggctcttaacaaaggattaatacttttaaataaaacagggcgaccttcggggcctttctttctttttccttt

SEQ ID NO: 40158 - DNA, 537 bp, Glycine max
  Clone ID: PAT_MRT3847_136262C.1
ctattttcggatattttttccgctccgaaacataggcgagatatcaacgaggctccgggggagaatccataaatggacccctcgatggcacccatcatgaccagaaattaacgattttacaaacggggctgaacaccaatttttattgttcacaaataaagcccaaaacctaaatcaatagggctacacattaaaactaaggacccctccaacaatttgaacggttcccggagacacccttgaggatactgctttccaagcctgacccccaacattggcggggaattgatcaagaaaatatcccaatcttcctaaaccaacaggacgatccaggaggcccctgactctaccaagaaaaactttgctgaggggggaaaaacccaaggtggcccccctgagaggggggccgaaaaccttgggaaccatcctgcagccctgctccttggaagcacatgctggagcctgccgggacatgacctaccgcttgctaggaaaaacaagattaccccagctataatgagcgaagcaggcaaaatt

SEQ ID NO: 40159 - DNA, 375 bp, Glycine max
  Clone ID: PAT_MRT3847_136263C.1
ccggaccggaaaccccgggacgacccacgcgcccgagtagaagaaccacggagaggagcaagaggggggaagggagagaggccccgacgaagaagggagagccggactcccatgacaacaaagccaacgtccccgatcgagctcacgaggcatcgggcaagggtgcctctctccagctcatgagggccactactcctgaaccaggaacgagagggaagccaggaaaggcggcacacccggagaggagggaatcgacgaacacctctctgacatcagcaacagacacagagcccaccggcacacctgagagggacgagagcaagggggcacccggggcactcaaaacccgaaacaatcaccatagccaaaacaacc

SEQ ID NO: 40160 - DNA, 999 bp, Glycine max
  Clone ID: PAT_MRT3847_136264C.1
tgctattaaatgagcataaatgaactcttattctttgaagagatattagaaaacttaactatccaatcacaatgcatttgtatacacatgaaattaattaaaaataaatacaatgatctgggttgtctaacttgccccgatgatgatcttcattcgagaacaacaatattgatcacactcatacttcacatcactttaaacttcttaatcatatcgctctattttagtttaaattttatttatattctcaccccaggctcatcacatgccctatccttccaaggctttattagcaacaaatagacttcctcaatatacttgatcatacggaaagcacaaaaaagaagacagaaaaaatgcatgcatattttgcagacccaacaagagtaatcatctacctctgcaatattaatatataaagcctaaggatgagaggaagaaggtggtactgggaaccatttggggtgatggaaaaagtgctttggaggaagtttgggaagaggtggaagtggcttgagtggaggcaacttagggagtggaggaagaggtggaagtggcttcttgtagattggaactggatgaagtggtggaaacttagggagtggaggaagaggtggaagtggcttcttgtagattggaactggatgaagtggtggaaacttagggagtggaggaagaggtggaagtggcttcttgtagattggaactggatgaagtggtggcaacttagggagtggaggaagaggtggaagtggcttcttgtagattggaactggaggaagtggtggcaacttagggattggtggaagtggtttcttgaagattggtggacatggcttctttggcggtgttggaggaggctcctttggtggtgttcctttggtggttttggtggaagaggaggaggattctttggtggttttggtggaagtggaggctctacttttggtgggcttggtggtttcttcggtggttttggtggatgaggaggctctacct

SEQ ID NO: 40161 - DNA, 495 bp, Glycine max
  Clone ID: PAT_MRT3847_136265C.1
gcacatcttggtgacgagagacaaaaaaaatttagcccagagacaaaaaaaagttgtattccattatcagccgctccacatttttggtttactaaacaagtgtaaagcttaattccaaatttttatctccttattttcagttcctcattaactcaaccaactataccttaatacttgacctattaaaccttgacaaattgatcaaaatactcgagacatataatgtgaacaggtgtaacagctcacgtatcctggtacccgcggttgtgttgtcgaggaacggcttgtacggggagaatcagccccgtgacctatgttgtccacagtagtgacagccgtcgatcccttggccccccctgtcttgaggctactgctgcctggatctgggaccttcggcgctggattctaagtgaacctgaataatgagattctttgatctttaggcttacactgtcatgatgctactgctacctgaatcagagacctttggagctt

SEQ ID NO: 40162 - DNA, 663 bp, Glycine max
  Clone ID: PAT_MRT3847_136266C.1
acgggattaaagctacatgtcagatttgcatggaataattcttaatggtcctttctcaccaattcttggaaaaaaaagtacaaaataagaatcaaagttgaagatgacatcactggataggtacaatctaagagcttctaagataatatagaagtaaccattatggagtttcaacaacaaatataaaagaaaacagtaccaaagaaacttgaacatatatatgcatggcacagtgaatagtcatggtgcttgctgagtcaggagcaatctcctattcttaagcttcgtaggagatccaaatatccatcatattcaggagtgatgtatccatgtcgaaacaggaaatcaatgattacaagagcgcaatttgccttgaaaaactgtgtcttgcgtatgatttctgcaacttgtgtaacagggatcaacttgaagctatcaacttctccatctttatttttcggaatgaaatcttttggaagttttagatcataacagaacagaacatctctcttgtatctatatccatcaatggccttggatgaaacagcaccaaccggtatggcgttgacagagatagatctaggtattcctgcttcctcttcacattcctttgcaagattctgctgacaattgattccatgcggcagtcctcctgcaactagc

SEQ ID NO: 40163 - DNA, 211 bp, Glycine max
  Clone ID: PAT_MRT3847_136267C.1
tttttaattttttttttctttattttattttaattttgttattttagctggtggccaaagcgaacgcccacgagttcgtggacgcttgggttcacccgggaatttcggaccggcaccttcaggcgttcaaacattacctataggggggcgtgttaaggctcggggatatcatggcgatacctgcttgctgtccaaaattgtatatcgtgag

SEQ ID NO: 40164 - DNA, 472 bp, Glycine max
  Clone ID: PAT_MRT3847_136268C.1
ttcattatttcacaactttgggcaaaacagctttactggcattcagttattgccaatagcacgtgacaggctggggaagaagagcggttacacgtttcttgttggtgaaaataatcttacaggaccttttcctacttttttatttgagaaatgtgatgaattagaagcactgcttttaaacgtcagttataataggatatctggtcagattccttccaattttggtggaatatgcagatcattgaaattcttagatgcatctggaaatgaacttgcaggaccgattccccttgatttagggaatttggtctctcttgtatctctgaaccttagtaggaatcagttacaaggccagattcccaccagccttggccagaagaagaacctgaagttttctttctttggttggcaataggttaaatggttaaatcctaccagcctgaggcaagtgtactctttgaaagttttggac

SEQ ID NO: 40165 - DNA, 340 bp, Glycine max
  Clone ID: PAT_MRT3847_136269C.1
cagcctcactgttccaaaaccctaatccttcgtcttccaaggagatggctgaatctcccctcgcacggaattcaacgtcacgttccccatggaaagctcagtcaagatagagatctaggtcaaggtcgagatcaaagtcgaggtcgatgcctagacaaaagccatgatcccgttctataagtcgtggcaggttactgagacatgttgtttactttgagagtaatgctgcaggtgactatgccactcaaggctctagattgtgcactaagattactgacatgatgaacactgttacggccagatgtagatagtacataccatttttttgatgacaaatata

SEQ ID NO: 40166 - DNA, 336 bp, Glycine max
  Clone ID: PAT_MRT3847_13626C.1
ggatagcagctactcggtccatatggaagctcagaaatgatgtgatctttcataatcagcctttccacatttctaagttggtggataacactaacttcctcacttggtcctggttgaggggatgggaaaaggacttcaatgccccttttcaccaatggtctacagccatgcctatggcctttacttagctagtggtctgttgggttaaggattttgggggcttcttgtagggcatttgtgttatgtatttttggactcatgatcctggagatgttatctccttcttctcttgtagtacctctggtactattatttggttaatatatatattagatc

SEQ ID NO: 40167 - DNA, 1641 bp, Glycine max
  Clone ID: PAT_MRT3847_136270C.1
cttagacgttggttaaaaggaaggagcaggagtaggagggtagggggtgatgcgtatgtgtttttgcctaattcaattcctctttcaatctccctctaaaacttcaccaacccaacaaccacatcattttcttttctccaaacaaattaaaattaaaataatcaaagccttcatctataaatatagccatcacacactctccccattcgttccactcgttctttagatctatccactcacctgcctcttcctcacccctttctccatctaacgagtaaggaaaaatggcgcgtaagaagatcagagagtatgactcaaagaggttgttgaaggagcactttaagagactttctggcaaggagttgccgatcaagtctgcacaaattactgcatcaactgatttcactgagctacaagagaaggaaccctggctttcatcttctaaattggttgtgaaacctgacattgttatttggaaaatgggccgaatttggctaatggtagctgggggaggtgctagtgtcatctatgctgatacggtaggggatctcggttatgctcctgagcttggaaactatgcagaatatagtggtgcacccaaggaagatgaggtcttgcagtatgccagagttgtgattgatgtaatcgattcttatctcaaacatcattgttggcatatttatggataaactatttttgctttatgcgatcagccatttctcgtttagagtgtgtgaaaatagcttatcaaatgcatgctacttttgaaacatgatatagtgattctttatctctatgacaatctcttttgcagtgtgcaacttcaaatcctgatggccaaaagcgagcccttgtgataggtgggggaatagctaactttactgatgttgctgctatgttcagtggcataattcgtgctctgaaggagaaggaacaaaagctaaaagaagcaaagatgcacatctacgtgaggagaggaggtcccaactaccagaagggtctagcacaaatgagggcacttggagaggagattggcatccccattgaggtttatggacccgaagccacaatgactggtatatgcaaagaggcaatacagttcattacagccgctgcttaaggtcaacaacaccttcatttatagtattttcatggtgagtctgaagtgaacgttgattcttaatttccttttccattcctggaatttggaaatttagttagagtatatgtttatgaaatcaagccatccaagaaagagtggccaggattgttgtcacattgtttttgtagaattctgatggcactgtcttgacacaataaagagtgtttttcatttgactgttactaaaaaaaaaaaaaaaaaaaaaaaaaaaaaaaaaaaaaaaaaaaaaaaaaaaaaaaaaaaaaaaaaaaaaaaaaaaaaaaaaaaaaaaaaaaaaaaaaaaaaaaaaaaaaaaaaaaaaaaaaaaaaaaggggggggccccttttaaaggaccaatttttactacccctggtttgaaagtttaaattttttttttggggcccccaaaataaattcaagggccggggttttaaaaacgttggaatgggaaaaaccttggtttacccaaattaaatgctttggaaaaaaatcccttttt

SEQ ID NO: 40168 - DNA, 224 bp, Glycine max
  Clone ID: PAT_MRT3847_136271C.1
gacacatcaccatcctctggtaccttcttaccatcatactagttcgcgcccgttccttcgcggtctacgcagcttgcagtccaggctctgcaacgccacccagtctcttacaccaagttcgccatgctcgatggagtgatttctcggcacgtgtcactccccgttcgagccaccaatgtcgttgatcaccccaacgacaacgtgccactttcaaatttcagctc

SEQ ID NO: 40169 - DNA, 462 bp, Glycine max
  Clone ID: PAT_MRT3847_136272C.1
tacggctgcgagaagacgacagaagggcatgttgatgaaagctatggtactgtggaggaggatggggaaatctgtggccacttctgctgccagttgtatcatgacatctctgtggaccaattcttgcattctctgatgagcttccattagcactgagagctggagaataatggcaacagtcagaagaccaaatctattctattcaccacgaaagaaagatgactacattttttggctctggagtcaacactgtgggaggcagattatagaaagaagaataaaccagctatagatttatactcttgagtcaacacatatgtcattgtaaatgattcactggcaaagtaatattatacaagaaaacgtttaaaagtgaactgcagaacaacaaaaaggagaaagaaaaacatctttaccttgtacatatggcattggaagagacagatgccaagccaaagcatg

SEQ ID NO: 40170 - DNA, 523 bp, Glycine max
  Clone ID: PAT_MRT3847_136273C.1
caagcaggcaccgaatgtcatggtcacctctctgcgtcggtcatcggcattagctccatgtctggtatcatgcgtcacgcgcaagggcacttcagctacaacgccgcaaagggtggcactgttcacctgacaaagttgatgtcggccgagtttcagaagctgaaaattagagtcaactcgatcgcaccaggttacttcccctctgagatgacggcgaaggagagcaacgacgagcagaagagccatgtgcctgatgagaagatccaggagaagggccacgttcctcacggacgagctggccatgacgaggagatggcacaggcggtgctgttccttacgaagaactcctatgtcaacggtgagatcatcgctgtcgatggtggtgtccttaacgtcgtcgctgggcgttaacagaccccgcttctcgtgacgaatacatgcataacgacggcgcctggcgaacacttgcacaaaacgtggatagatcacatcatgaacaataatgagagcaatgatacccgag

SEQ ID NO: 40171 - DNA, 274 bp, Glycine max
  unsure (1)..(274): unsure at all n locations
  Clone ID: PAT_MRT3847_136274C.1
gtttctctctttcgtcgccgttgcagtgggcagtngcacgngctttcacaacttcccccttttnctcaatggttactcgangctatcatggagtttgtngctggtggctacccctgatnataatgatgagatatctgattcaggaacangacncaataagnaggtgngacagnaggtctatggngtgggantagttcacnntggagactgttggganctggtgtggtggcanggngctganggtganacagtgnggnnangntcatnngcttat

SEQ ID NO: 40172 - DNA, 359 bp, Glycine max
  Clone ID: PAT_MRT3847_136275C.1
ggacaccacaaagtcttgctttataatttcttaatgacagggacactcgaaagttttaaatattaaacaaacatgcattattgatttttaacaagggatacttagctgtgttgggacccaaacccaaaaggatggaactttcctatataccattatacttttttttgcttgaaccactttatgggcattgaacaattgacaccctccacaaatcctacacattttttttttctctgtactgaaaaaaaagattattataccttcgaagaattttctcacaaataggtggtgcctgaataaaataagaaaccttgaattgtctactactttcaacatttgcccttttgtaccaccaattt

SEQ ID NO: 40173 - DNA, 290 bp, Glycine max
  Clone ID: PAT_MRT3847_136276C.1
gagcccaaaaaaaatcctgggggaaagttttttttaaaatagctaaaaacgggtttctttttaataaaaaaagggcattaattcttgccccccacttaacccttccattcttttcccaaataaacttttatttccagctaatgctttttttttgaactattttttatgctacaaaagctggttaacggggctttctttgcaaataaagatcgccgtaattttagtaaacctatttttttttataattaaattaaagcgctaattggggggttatacccttggtttgggcc

SEQ ID NO: 40174 - DNA, 589 bp, Glycine max
  Clone ID: PAT_MRT3847_136277C.1
gacaacagtaaggaaaatcactatttattatcaaaaaatatgcgtagtctaaattaatgacaattattcataacacttggtttagggcaagacagaacgattcaacttacagctgatctggaaagacaacagagcactgagtcgacagatgcctaataacacaacaaaaatcgttttgcctagtatataaagagtcctcaccattatgctaaagcagcgcatggttgtctacattaaaatctacatactactacaaattgccctatatataaatacctacttctacaggaacatacaccaaggcatagacgcttatgttgtctatattgcctactggctaacgaaaccaaaaggaggaaaattcgagattttattttaaaccaaccattgaattttggcaaaacacttgggcaagaacaccccttttcaaatgtatcacatcaccatcactgaaaaagcttaacttgcgaggggctttgcaatgactttattaacggcttgagcatatgtcctgtgctgatatgacagagtggattgaagcaggtcccaaagtgaagacttaggattccatacaagatgcttgattatt

SEQ ID NO: 40175 - DNA, 806 bp, Glycine max
  unsure (1)..(806): unsure at all n locations
  Clone ID: PAT_MRT3847_136278C.1
cccccggctcgaggaaacttgcatctaccattattattctatcacatccatggccacagttgtgaagctacatgttgtcccagaatgtttgaaccaacagaaaacgaggtcgctcaggaggggatttggctcatgcccttcccctggggtgcttggttttggccattattgtgatcggttctctgtgaaagtgtgcagggcttttaggactgaggatggtggggatgtaaaggagaaaaagttacgaaatttgaagaaaaatgaagagaaaaccctaatccgacatggggaagaagaagccgacggcgagggacgaagagaacgcgtcgcagcaaggcggcggcgggaaatcgaagaagaaggcggttgtcatcgacgacgatgagtactccgtcggaactgagctctccgaggagcaggcaccggcgtcagaggagaaacccgccgcggcgggaaagaagaaaggtaagaaaggtaatgctaaagctaagaacaatgatgatgatgttgatgaggatgaggatgtttctggaattgtgtttgctgggaagaagaaggggaagaataagaaaggtggtgggagcagtgcgttcactgcttctggctttgatttgcttggtgacgaggaagatgatgatgaagagaaatctgggttgaccggtgaggttgatggtgaggaagaggatgaacctgtggttagttntacggggaagaagaagtcatccaagaaaggaggtggtagtttgttcagtgcatctgcttttgatgatggtgaggaggaggaggatgagacagtgattagtttt

SEQ ID NO: 40176 - DNA, 1031 bp, Glycine max
  Clone ID: PAT_MRT3847_136279C.1
gcccccttcggccaccaccccctcttccgaaccagctctctcaaaagatatccctctcaacccaaccaccaacacctccctccgcctcttcctcccaaacccccctcccccctctgccgccaaactccccctcataatatacttccacggcggcggcttcatcctctaccacccctcctccctcatcttccaccgctcctgcgccgccctcgccgcctccctccccgccatcatcgcctccgttgattaccgcctctgcccccaacaccgcctccccgccgcctaccacgacgccctcgaagccctccattgggcccaggcccaggcccaagcccaagcccaatcagacccgtggctccgcgactatgtagacttctcaaaaaccttcctcatgggaagcagcgccgggggaaacatcgccttcttcacagccctaaattctctctccctctcactctcacctctaaaaatcctcggtgtaatcatgaacatcccttatttcagtggggtccaccgttccgactcggagctccgacttgtcgacgatcgcatccttccgttaccggcgaacgacctcatgtggtccctctcgctgccagagggcgcggatcgcgaccacgtgtactgcaatccgacggctgtggataacgaacacggcgacgcgatcggacggttgccgccgtgcttcatcaacggatacggtggggatcccttggtggacaagcagaaggagttggtgaagattctggaggcgcgtggggtgcgcgtggacgcgcgttttgtggaggacgggtttcatgctgtggggctctttgatcaggctaaggcatttgctgtggggcagaacattaagaactgtataccttctattacttctcaatcctccatgtgacttcgcctggaatatccaccatcgtgtgattctcggggtatgatatcattgtgcgctttcatatgctaggagatggtggtgtacatcgatgagtgtggagtccgggcgctatttgtcaaggcgcgttgtctcggcacaa

SEQ ID NO: 40177 - DNA, 778 bp, Glycine max
  Clone ID: PAT_MRT3847_13627C.1
tcccacgcgtccgtacggctgcgagaagacgacagaagggggaataatcaatcagtgaaatagctaggtagcatgagtagtagaggtgaaagcagtggtggtggccaaagctccttaaattacctctttggatcagaagaacagccaaagcctcctcccccaaagacagtttcatatccattgccaccttatggaattgacatcgataacaaccacaatccccctactggtcaaggccaacacctgggaaacgttctcaccaatcgtccatcgacaaaagttcaatcggttccaggtggacactcatcgcttggatacttgttcggagacaagtgatatcgatcatgttttcattttattatctcgatcgatatatcgaattccctgatagtactgcatattggtgcctctgaaaaggagtatcaacaaccaagttattgcatatgtttaaaagtagatatcgtatgaggccgtgggttatgtacgttgattgggtgggtgtttatcattactgtatgtactgtgggctttctatggtacctagctagttaaagtgtggcttttattaattgttatgttggcattgggtgggtgttgttctttgatttctacgggttgcattaagctcaggtctgcagcttccttatcttgtttcttatctttcgcacgccttgtgctagcttggttgcaagttattaataaattcgatcattgggctttctagctagctaccaagaaaaaggaatgcaagtactatttctaagaaaaaaaaacaaaa

SEQ ID NO: 40178 - DNA, 284 bp, Glycine max
  unsure (1)..(284): unsure at all n locations
  Clone ID: PAT_MRT3847_136280C.1
cttaacatggtgcctcgcatgtaattaaattataattgggcttnntagtntcgtacttnaaacaanaagggcnatcgctacacttgactgncangttttagatatntgttcncagtatggngttatggtctcgtaagtnaaanggnttatttactcgnatgnatncagtttaatgtgntagtgatcagaattggaattgaaagtccgctaccnatgaaatgattcgttaaaacatcgtntcactacacannctcccngcaaagnggncnatgtagcnagccccc

SEQ ID NO: 40179 - DNA, 270 bp, Glycine max
  Clone ID: PAT_MRT3847_136281C.1
tccactgcgccaccgcctcattccatccttgacaatggcattaacgcaaggtcaattcacaatgtccttctcttcaacccatctctctctacctatcaccctgtctagctcctctgttgccttctgttaatgccattgtcaaggaagcaatgaggctgcacccagtggcaccaatgttggttccaagactagccagagaggactgcaatcttggagggtatgacatccccaaacggacacaagtgcttgtgaatgtgtggactattggga

SEQ ID NO: 40180 - DNA, 529 bp, Glycine max
  unsure (1)..(529): unsure at all n locations
  Clone ID: PAT_MRT3847_136282C.1
ccacgcgtccgtcctccaccaccggcgaccgcgccaacgccaacacctcctccacctgtactacgcccgcctcctcccagtgctgtcccggcgtcaccaccacctcctgactccgtcccatcaccgcccccgtctcctaacggcgtcccggcgtcacccgcgtctccgccgtcacatcagttattggctccgcctccaccggcctcgtcgaccggaacatcatcaacgtcgtcatcgccctctaaatcatcaagcaacgccaccgtggtgggcataggcgtcgccgtcggggcggttgttctgatcggcctcgccgtcggcctcatttactgcttcgcgggaaggaaacgacgccggcggtcgccgctgccgtctcaggggtttccaggcgagttctacgacccggccggggtccaatgaccccgctgcacatgtcgcacgtgcaatcgacgacgccatcctcgacgccgncactgatgaactcgtggcagcagagcagccacggtctgtncgagtccccgctgccgca

SEQ ID NO: 40181 - DNA, 363 bp, Glycine max
  Clone ID: PAT_MRT3847_136283C.1
cttgtgcatcgatccatttgaacctttcttgtatttccaaccgtgccatcaacaggtgcaactatgatcaggaacaacaattcaacactgcttaagggtgcaatatcttctgaggaggcaccatgaatatagactgttctgaacaacaaaatagctccaccactgtgcataatctcattaagaccaattaacattaaaacaaccaacttactcacatgtgcgcaactgcactgcattaaaaagattatcaaattggcacttgcagatcaacgcacagcattaacatcaacaacaccaccgccaacaacaacaacaataaggccttctctcttcttagaagcttatgcataaaatctgatcatc

SEQ ID NO: 40182 - DNA, 367 bp, Glycine max
  Clone ID: PAT_MRT3847_136284C.1
ggggaaaaaatatcggccccttttctccttaaattgaaaattggacccaaaggaaattttattcccattggactaaaatacccccgattaccaaccggaaatttttaacctaagggtggtttaaaaggtttcccttaaccccccataacaaacttccctttaaacagaaatttcctttgggggggccctttttttgtttaaataattcccatcttgggggccccatccaggggggcataatcagggggcaacccgacataggcccttttgggtccatcaggcctgccacaaaaaaattaaaattttaaaaaaatggccttttgtgtaagtttgaatgccagtttttcaaaaaattgggggttcattt

SEQ ID NO: 40183 - DNA, 471 bp, Glycine max
  Clone ID: PAT_MRT3847_136285C.1
cgagctcggaattcggctcgaggtttgtttcttcaggtgcactcgcatgttgatgtgttcgatttcagcagcaacaagtgggtagatcagattaaaatgccaaaggaaatggctcattcacatttgggcatagcatctgatgggaggtatatatacattatctcaggacaatatggtatccaatgcagtgggcctactaccgcatccttttcgttagacactgcaacaaagaaatggaaacctttgccaccattgccagcccccaggtatgctcctgcaactcaattatggaaaggaagactccatgtcatgggtggtagcaaggagaatcgccatacacctggaatagatcattggagtttggctgtgaaggatggtgaagcattggagcaacaatggcgggacgaagttcccattccacgcggtggaccacatagggcttgcattgcagtcaatgatcgactttttgta

SEQ ID NO: 40184 - DNA, 2492 bp, Glycine max
  Clone ID: PAT_MRT3847_136286C.1
ccaaaccattggcgccaacagttgtttgtttcctctaccatccaattacgcttctctctgcctctacgtaaataaaaatatggctctcatattccaagccaataaccccaaaaaaccaatggcatcgctaacagcgaggtttctccaccaccatagccattattcttctgcgtcaaaaatcttaatcttcttctgtctctctgcatttctcgccctcgccctcatcgccaacctcttccgcgcctccctctccactcactatctcgccatcgccaccaactgggtcgacaccaacgcaccccttcttattccgaatctcaccgccatacctcacaacaacaacaacaacaagggaaaagatgggaagattgcaaaaaggaggggtcccgagagattcctttcggctacatttgcagacttgcctgctcccgagtggcattggaagcagatgccctcggctccagtgcctcggctagatgggtactctatacagattaagaatatgttttatgtgtttgcaggatatgccaatcttgaccatgtgcactcgcatgttgatgtgttcgatttcagcagcaacaagtgggtagatcagattaaaatgccaaaggaaatggctcattcacatttgggcatagcatctgatgggaggtatatatacattatctcaggacaatatggtatccaatgcagtgggcctactaccgcatccttttcgttagacactgcaacaaagaaatggaaacctttgcatacgacgcgtgggcacgtgggcggagggcggggacgacgacagatgggtcattactggttgattgccactaatctcgctctaattacactttctatctcatttccaatctcattttcgttcggttcaaacccctaacaacatttctaatctcattctccttctgttcaaacactctctctcatggcatcagataagaagattaggatcggcatcaacgggtttggaaggattggccgtttggtggccagggttgcccttcaaaggaatgatgttgaacttgttgctgtcaacgatcctttcatcaccactgattacatgacatacatgttcaagtacgacaccgttcatggccagtggaagcattttgatgtgaaggtgaaggactctaagacccttctctttggtgagaagcccgtcaccgtttttggaatcaggaaccctgaggaaattccatggggtgaggttggtgctgattatgttgttgagtcaactggtgtattcactgacaaggacaaggctgctgctcacttgaagggtggtgccaagaaggttgtcatctctgccccaagcaaagatgcacccatgtttgttgttggtgttaacgagaaggagtacaagccagagcttgacattgtttccaatgctagctgcactaccaattgtcttgctcccctcgccaaggttatcaacgaccgatttggaattgtggagggtcttatgaccactgttcatgccatcacagctactcagaagactgttgatggtccatcaaacaaggactggaggggtggaagagctgcttccttcaatataattcccagcagcactggagctgctaaggctgtaggaaaagttcttccagcactgaatggtaaattgactggcatgtccttccgagtccccactgtagatgtttcagttgttgacctcactgttaggctagagaagccagcaacctatgagcaaatcaaatctgctatcaaggaggaatcagagggcaaattgaagggtattttgggttacacagaagatgatgttgtgtctactgattttgttggtgataacaggtctagcatatttgacgccaaggccggaatttctttgaatgacaactttgtaaaacttgtttcctggtatgacaacgaatggggttacagttcccgtgtgattgatttgattgtccacattgcatccgtggcttaaagaattgagtctgagcttggatatcatcgctacaccgttccaaatttttatcttaatcgagtttattttagtgtgaattcggaataaacactttgtgttgctgtgagagatatcattgaaaaacagtgcaatatgttgagttggtagacggccttataggtttttcctctcgtaagggacgattgactattctgtttcgttatcataatcatctagtataagcaacattttgttttccacgtctctttgttataattaagttaataatataatattgttaacatattttgatatttattatcttttataatcaaaatagttcttgtggctattttatttagaataaatataagacttttttggaaaaaaaaagaaagggcgcccaccattgccagcccccaggtatgctcctgcaactcaattatggaaaggaagactccatgtcatgggtggtagcaaggagaatcgccatacacctggaatagatcattggagtttggctgtgaaggatggtgaagcattggagcacaatggc

SEQ ID NO: 40185 - DNA, 1472 bp, Glycine max
  unsure (1)..(1472): unsure at all n locations
  Clone ID: PAT_MRT3847_136287C.1
ggctgcgagaagacgacagtaaggggaccaaatcacgctctaattacactttctatctcatttccaatctcattttcgttcggttcaaacactctcatggcatcagacaagaagattaggatcggcatcaacggatttggaaggattggccgtttggtggccagggttgctcttcagaggaatgacgttgaacttgttgctgtcaacgatcctttcatcaccactgattacatgacatacatgttcaagtacgacaccgttcatgggcagtggaagcattttgatgtgaagctgaaggactctaagacccttctcttcggtgagaagcccgtcaccgtttttggattcaggaaccctgaggaaattccatggggtgaggttggtgctgattatgttgttgagtcaactggcgtattcactgacaaggacaaggctgctgctcacttgaagggtggtgccaagaaggttgtcatctctgccccaagcaaagatgcacccatgtttgttgttggtgttaacgagaaggagtacaagccagagcttgacattgtttctaatgctagctgcactaccaattgccttgctcccctcgccaaggttatcaacgaccgatttggaattgtggagggtcttatgaccactgttcacgccatcacagctactcagaagactgttgatggtccttcaaacaaggactggagaggtggaagagctgcttcgttcaatataattcctagcagcactggagctgctaaggctgtaggaaaagttcttccagcgctgaatggtaaattgactggaatgtccttccgagtccccactgttgatgtttcagttgttgacctaactgtcaggctagagaagccagcaacctatgagcaaatcaaagctgctatcaaggaggaatcagagggcaaactgaagggtattttgggatacaccgaagatgatgttgtgtctactgattttgttggtgataacaggtctagcatatttgacgccaaggccggaatttctttgaatgaaaactttgtaaaacttgtttcctggtatgacaacgaatggggttacagttcccgtgtgattgatttaattgcccacattgcatccgtggcttaaacagttgaggctgatcttggatatcatcgctaaaccgttccaaatttttatcttaatcgagtttattttagtgtgaattcggaataaacacgtgttgctgtgtgtgatatcattgaaaaacacagtgcaatatttgtatttatatttttgagtttgatagacggccttaggtttttcctcctcttgtaagggacggttgactattctgtttcgtcatcacaatcataatataagcaacattttgttttccataaaaaaaaaangaacataaattgaaaagactgaataaataaagtaatggccaataactagtatatacatgttagctaaaactgtacagtccccacaatata

SEQ ID NO: 40186 - DNA, 249 bp, Glycine max
  Clone ID: PAT_MRT3847_136288C.1
atcctatcctatcgtagcaaagaaagacagaaagaaaaccctagcttaacttttcaacattcaagtcgcacatctttgttaagacactcactggtaagacaatcacccttgaggtcggagagttcagataccatagataatgtaaagtccaagattcacagacaaggaacgggatcccaccagaccagcaacgtctcattaatgctgggaagcagcttgaggatggacgtacactcgctgattacaaca

SEQ ID NO: 40187 - DNA, 444 bp, Glycine max
  Clone ID: PAT_MRT3847_136289C.1
gattttgtttagtgtgagggattaccctaataaatgcaggagaatcacactgaactgaaggttgtatttaactgagcacataactcatagcttctctccaggatctctgcattcgtttgcttaaattttggaatattttgggtcatgaacatattagctctttgtttctactgttttcattttgatttaatgaatttaagattatttgcagcttataccatgaatcacagtggatgatgtacattatttctgtattatttataaatgagatattgctgactagaacctcataatgaatgggcttgtttttgtatttttaattgtttttggtattcttttcccatctgtccaatttgatacacgtcataaacttcaataatcgagtgtgaaagtcacaggtggaggctatacaggcttgtggaggccagatgactgttgatggta

SEQ ID NO: 40188 - DNA, 394 bp, Glycine max
  Clone ID: PAT_MRT3847_13628C.1
ggcaagagacgaacaccaaaaatcggaacatcatgtttagggaaagagccccttccaattacatcaaaccgtaagaatgccattgacctgaatgaaaagtttcacctctttctgaaaaacaccacgaggcgcaaaagggataccgcccaaaacctacctaccaagaaaaacaaagcctttccctcccccaatttgaaactaaagggcggggaaccctacactgttttgtccataatcttaagccaataaaattttttacctcccctgcgggatcgccaaagtttaaagggataattttagacataaaacaacgtaacccaaacggtcccaaaaataaaggcgtgacatcccacacctcaaagtttgtcaggtggggggggggtacaccatgctg

SEQ ID NO: 40189 - DNA, 648 bp, Glycine max
  Clone ID: PAT_MRT3847_136290C.1
ggttagaataagatgtacccagagcatttaattgaataaataggaggtttggatcacaagagaattgaagggaacacaattgtgagtttgtgacgctaaaagtaggagataccacgcacgaatgaacgtggattggcatccatttacaattgattcgtaaataaaagagggcaaatgagaaccttattccttaattcaattatagtataaataattctttttagttgacatcaagttgaagccttttcaggtactcccaccgggataaacacaagcattgtaacttggattttgggatgtaagcatagctgtttgagagaaatcacagttccatggatttctgccaaacttctggtagtagagattcatagcaaaggcggcatgagatgatatcgtgttaggttcataacaagcaccttctggttgaattggcccacaatctacaacttggctaccacaaatataatcaatatttgcctgcaattgagcctcagtcacttccactttggggatgcaccattgtgttcccattttaggagctggagtaacaggactagttggtggattcttgtgggtagaaccagacttgtctaggccaacatcatatgccatggtgagatcagttttgaacaaaccaaatgcttgctc

SEQ ID NO: 40190 - DNA, 130 bp, Glycine max
  Clone ID: PAT_MRT3847_136291C.1
ggctcgaggaaaactcaagccctgatggaagtggagatggaaacggcattggtggagcacaggctattagcgcggtggctgaatttctgctgcttggctacatcgacgttcttatatggcgcatgaagcg

SEQ ID NO: 40191 - DNA, 207 bp, Glycine max
  Clone ID: PAT_MRT3847_136292C.1
caaaaggtaatacttttttatttattttactgtaaatagtgaaggaatccaaacaactgggcttgagagtacggaaaaagccataaacacatagaagacaaacagcggctactacaaaaacacaagatcccaacatgagtcgaaaacacatacacgctttaaataggcccgtgagcaaaccaactgtctgaaaactcctggatatac

SEQ ID NO: 40192 - DNA, 2032 bp, Glycine max
  Clone ID: PAT_MRT3847_136293C.1
agcacggaacccggctcgagggtttctcatgtgggaagaaagaatcaattattgcttttcttttacaccttatgaggaaatattccaagttatttagaagtgagttctctgatgataatgattctcaaggttctcaaccttgttctcccactgttcagagatctcttgaggatggcattcccggtggtcattgtcatgcctttgacagacagctttcaaaacttagttcctttaattttaagccaaataataggaaatcagggcagatgctcattcaggtataagactgaaagtgtccaatatctctgcaacttataagggattcgtgtataatcacctctcagtgaaggtatgaacaactgcccaaagacccagcagaaactttcacatctttgtttgactcctaattatcgtgttaagggccttgtttctagttggtgtgaacaaaatggagttcctattcctgaaggccctcctgaatctcttgatcttaactactgggtgaaggccctcctgaatctcttgattttaactactggaggttggcattatcagacactgaatccacaaattcaagatccgtaaacagtgtcagctcttgcaagttgaagggtgtcaaagttgttcctgtagaagagagtggtatctcagagcaaacagggggaaatgcaactgaaagtttttctgcacaagaggaagataatgaacggtatcttagttttcttaaagtcttgacagaaggaaacaattggaagaggaagtgtagagtggttgaacagttgaggctgttgctgcgggatgatgaggaagccaggatttttatgggcaccaatggatttgttgaagcacttatgcagtttctgcaatcagctgtgcttgaagcgaatgtgatggctcttgaaaatggagctatggctctgttcaacttggctgtgaataacaatagaaataaggaaattatgatagcaacaggaatcttgtcgttgttggaggaaatgatttcaaaaactagtcttgcctcgatgaagccaagcatgtgattggcacaagtcaggctgtccagttcctaatccagattcttcaagccaagacagaagtccagtgcaagatagattccctccatgcactctataacctttctactgtgccctccaatattccaaacctcctttcgtctggcatcatcaggaagagagaaaatgatgttggctcctggacttataagtgccttggcttccactctagacaccggtgagcccatagagcaggagcaagctgcttcttgtctcctaattttgtgtaacaggagtgaggaatgttgtcagatggtcctgcaagaaggggttatacctgcattggtgtcaatatcggtgaatgggacctcgagaggaagagagaaggctcagaagctcttgatggtcttccgagagcagcgacaacaagaccattcacctgttaagactgatcaacgtgaatccgaaagtagtgatttgtctatgcctcctcctgaaaccaaactgctatctaaatcaatatctagaagaaaggtggggaaagctttcagctttctctggaaaagcaagagctattctgtttaccagtgttaagtttcatgtaaatttctgtttgattcttaatttttctggccctgcttttcaccctctcacccgttttcacgggtgctgcttactttttggttcccaaagaagagatgtacagtcatgtgtaatttatggatgttgattacctgtcccttcccccttcgtataccaatctctcataaatgttttttttttgggtggggggaggggtgtttgcatttctacgagcttaaagtgttagatttccctcggtgaattctgtcttagggtttaggaagtttcctcggtgaaataaccagtatctttgctagattctgttgcatggagctatggctctgttcaacttggctgtgaataacaataggtgtgtattaaattgtaatgtaaaactgattttcatatgattacaaaattattattggggaggggag

SEQ ID NO: 40193 - DNA, 1228 bp, Glycine max
  Clone ID: PAT_MRT3847_136294C.1
gaaagatcaattattgcttttctttacaccttatgaggaaatattccaagttatttagaagtgagttctctgatgataatgattctcagggttctcaaccttgttctcccactgttcagagatctcttgaggatggcattcccggtggtcattgtcatgcctttgacagacagctttcaaaacttagttcctttaattttaagccaaataataggaaatcagggcagatgctccttccgccagaagagttaaggtgcccaatatctctgcaacttatgagtgatcctgttataattgcttctgggcaaacatatgaaaggatttgtatagagaaatggttcagagatgggcacaacacctgcccaaagactcaacagaaactttcacatctttgtttgactcctaattactgtgttaagggtcttgtggctagttggtgtgaacagaatggagttcctattcctgaaggccctcctgaatctcttgattttaactactggagattggcattatcgtagacactgaatccacaaattcaagatccgtaaacagtgtcagctcttgcaagttgaagggtgtcaaagttgttcctgtagaagagagtggtatctcagagcaaacagggggaaatgcaactgaaagtttttctgcacaagaggaagataatgaacggtatcttagttttcttaaagtcttgacagaaggaaacaattggaagaggaagtgtagagtggttgaacagttgaggctgttgctgcgggatgatgaggaagccaggatttttatgggcaccaatggatttgttgaagcacttatgcagtttctgcaatcagctgtgcttgaagcgaatgtgatggctcttgaaaatggagctatggctctgttcaacttggctgtgaataacaatagaaataaggaaattatgatagcaacaggaatcttgtcgttgttggaggaaatgatttcaaaaactagttcctatggttgtgcagttgccctgtatctgaatctttcttgcctcgatgaagccaagcatgtgattggcacaagtcaggctgtccagttcctaatccagattcttcaagacaagacagaagtgcagtgcaagatagattccctccatgcactctataacctttctactgtgccctccaatattccaaacctcctttcatctggcatcatttgtagcctacaatcccttcttgtaggccagggtgattgcatg

SEQ ID NO: 40194 - DNA, 366 bp, Glycine max
  Clone ID: PAT_MRT3847_136295C.1
atgatgaacccaatgcattttatgatcgatgagcacccccgtttttgtttaaacccaaaccaacaaaagggttcttggctaaacatccttcccctcatctgtaaccaattttccattccccggattccaagcaggaatgaacaaaaaaagaacctttgacaacactagggggtcacatttcaggattggttccccaagctcaaaggttaggcgggcatagggcccccttttcgggtataagttctccaatcaatgcgaaaaccaaacccacttgggccaatttttccacaaatagctcttgtgctttctggaatcccaattttggccctgtccccagacccatagtttacctgaagcctttgcctg

SEQ ID NO: 40195 - DNA, 326 bp, Glycine max
  unsure (1)..(326): unsure at all n locations
  Clone ID: PAT_MRT3847_136296C.1
nanncagngtacgtaagctcggaattcgggtcgagntcttntnnngtntcanctntncagcgacttgcaccaaaacgcacaagcgncatncnagangcgnatcangcncnangncgagccnnncagtacnnagnggcagcctgtacgagatggttcncccccatngtcatnttnctnctnccngcgaattngtncttgggaccatttcatnatntganaccttgncannanccaccaaacaccaacaaannagaaccacaacaagcgcatgacnttccannncagcntnttcnaggtcaccttcncaggntccaaagagttcaagt

SEQ ID NO: 40196 - DNA, 433 bp, Glycine max
  Clone ID: PAT_MRT3847_136297C.1
cccacgcgtccgtacggctgcgagaagacgacagaaggggactcactcaaactcaacacagagagagatatggcagattacgacgagagatacgaagggaacggagaagaagaggaacttcacaattctcttcctcatcctcatccccagcctgattcctctcctcaccccacccacgacgatctcaccgattccaaatctcaccatgggtctcgcgattatgacagagactcttccagaagcagagataaggaacgggagaaagggagagacagggaaaaaaaaagagagaagggaagggacagggaaagggatagaagtacggatagggattcagagagaagtatggacaaggacagagattgggagaagagcaaggacagggagagggaccgggaccgggatcgtgatggtggtgagaaggaaagggatc

SEQ ID NO: 40197 - DNA, 225 bp, Glycine max
  Clone ID: PAT_MRT3847_136298C.1
tgggctcctctcaggagtgtgtggccaggacctttcgggttgtaaatccacaaaatccttttgggctcaatacgaggctggggaaactgactctcccccagggcacttaccgaagtggtaaaagagtgcctatatctatacgcggaggggctcggtgcgatgaaggctagttttacaagtatgccaaatgctgagcttgaaatgtggagagatgatggcggaaac

SEQ ID NO: 40198 - DNA, 405 bp, Glycine max
  Clone ID: PAT_MRT3847_136299C.1
tttatttttatttattttttactttttttttgttttttttttaaaaaaaaacacactcattgcacatagaaaggcgctttatttaagggaataaaatattacctactaggtcacaaatgccaaagggcacttattaaccagatttttgagacttttacaggtctcaagaagtcgcgtcaccataggattgggggggttagaactcaaaatttcattcttaacgcccaaaaaaaccgcccgtaaagctactggaaaagggtcaaccctaggaagaaaaacaatttgtttaccttttccaagggccgggggaatttttttggtgatatctgaggggcgattgttaactgcagaactaatcccagcgggggggggtgaaccaccccgtccccccccacttgtgacatt

SEQ ID NO: 40199 - DNA, 377 bp, Glycine max
  Clone ID: PAT_MRT3847_13629C.1
caagcacatgcttactaaacaaacaccccttaccagcacccagatttatactaaattcactaatgctcaaataccactgtggaatttaaagagggaggaggggaacttgcatacagataaaacatcattaactaaactccattataaagaacatacctacaatttcagaagatcccattacaaaaaccacaaattctcaaaataaacatactctactctaacttcaatgacccacctttactaccaaacacaataatcactaacacatacactacactacaataactccatcttattcaccatcaataacatctactcctactgataatcaaaccaatacttatttcaccccatgtgcccatatatactaaactcta

SEQ ID NO: 40200 - DNA, 339 bp, Glycine max
  unsure (1)..(339): unsure at all n locations
  Clone ID: PAT_MRT3847_1362C.1
taaataattatcttttttttttttatactcaggcagccttttttaaaaatttttgggcgggttcacaacacccctcccacttttttcctatagtngaaaacacatgacaggcccggcgggggaacaaccgcgaaaaaacccaggcccaggagccaaagggggcgatcaccctcacatccctaaaaaagagcaaaccaacaaggcaccgcccaaaaaataagaggccctggcgtgctcccacggtggagaaaagatttaccctaaaaaacgtccccaaaaaaaaccccgccaacaaaaaaaaaaaccaaaaccccggccgtaaaaaaagggagccccacc

SEQ ID NO: 40201 - DNA, 279 bp, Glycine max
  Clone ID: PAT_MRT3847_136300C.1
tttcttttaatattaaattctatcttttgttttgcacccaaaaaaaataaatgaaatagggaagggtataaaaaaaaaacagaaaatgaaaacaaaaaaagaacacaaacaacatttttacgctctatttgtaccctccttcgttcgcttcctatctcaatgtttgttctatcattgagctcactaaattgattaccaatgtgctcttttataacatcacactttgtaacacacttagtgataatcacttctaatgaccatatcactatcaagacttct

SEQ ID NO: 40202 - DNA, 1138 bp, Glycine max
  Clone ID: PAT_MRT3847_136301C.1
aattcggctcgagtcaatacctaatgcatcctgagataagaagctttccctctagagagttttatgaagactccttggaagatggggatgaagtcaaatcacggacaatacacgcatggcatgattaccgctgctttggccccttctgcttctttgacattcatgagggaaaagaggctcggccacctgggagtggctcatggataaatgttgaggaagttgactttgttctattcttgtatcaaaaacttatttcactttatccgacactgaagtctggtaaccaagttgcaattatatcaccctatagtcaacaggtcaagctcttccaaaaacgttttgaagatacctttggaatgtcagctgagaaaatagtggatatatgtactgttgatggttgccagggacgggaaaaggacattgcaatattttcatgtgtcagggcgagcaaagataaaggtatagggtttgtggaggatatccggcgaatgaatgttgggatcactacagcaaagtctgcagtgttggtggttggatctgcctcaacattaaggaggagtgaacaatggaacaagctagtggaaagtgcagagaaaaggaactgtttattcaaagtttcacagccatattcctcattcttcagtgatgaaagtctgacatccatgcaaacaaaggtggctgaaccatcacaagtgactggacctgatgatatggtagataatgatgtgcagcctgacaatgctgcagcatttgatgctcaagcacaaactgaggacaatgacgatggagaaggcgacatcgacatgaatgatgcaggttttgacgacgattaggatttagatatatgtttcacattatttgatctgcatccattccaatgcctagtgctgtagcttccacgtttttatctttgattggacgtggaaatcttgttttacgtgcatctttgacacctgcccaaacacacttgttaaatagatgtgtagttgagcaaactggtataatttatgtttttttttcctgtaatgaggacaaggaaaattgtaacctgcaccagcttgaacagtggatactgagaaatgatagcatgtcatatttaatgcagaaaagggtacctgaaatattggtcaccaaaagt

SEQ ID NO: 40203 - DNA, 442 bp, Glycine max
  Clone ID: PAT_MRT3847_136302C.1
tcgccgcgtgcccccgtggaggaagcggagtatagataggggaaatgaaaaaaataaaaataaaaaaataaacaagcataaagggtgccaacaagataaaggtggattgtgactagtgggagatttttaaggaatggaatcaacaaatttcatgctccaatcaggaagtgacactcaacaccagctgttaaatattttataggtctttttaacagctacaaaagaggtagtgaaagagggggaaataagaagaaggactattgtatttgtatgtgtaagtacattttgtctttttacttttaaatgggggagtaaaatagaaacccaaaaagtaaaataagatgcagagctattcaaaaatatttgcggcatttttttttttttttgtcatgatccttattttattggttacattatttaataatcagatttgcggtttctg

SEQ ID NO: 40204 - DNA, 259 bp, Glycine max
  Clone ID: PAT_MRT3847_136303C.1
aagctcgagccggttcggctgtagcttgctgctaagatggttctgctaggtgagctctgggatgacgttgttgctggccctcaacctgagcgtggccttggcaagctcagatgactcaccaccctcaaaactattgatcaaggacacattagcaagctgcagaagacgttgtcgatgccgtcgacaccgacaatcccgatgactccgatgagtccaacgagaccgggatgcgcgcgtaaagctgtcaacgtttggagga

SEQ ID NO: 40205 - DNA, 514 bp, Glycine max
  Clone ID: PAT_MRT3847_136304C.1
tagctcgagccgattcggcttagtactgatgcttctactaatgaattgctacgaatatgaacaggaccacctattccgtacgataatgataggctacattagtgatccttataccgtgtcatataatatgtgagctgattgcccatagataagctctttttgatgacgacgatgttcgatcatatcgtgtgtagccactagaactccactctatacgcaacgcttcagcatctctcgactgtctatctctctcgacgaataccctctatgaaagagataccctatcagctgacagaaatgcatcctacaatgccctgagcgtgagtgctgccctggaacctatctatcaggacataaccaccgtgggatacataatcctgatcatcgactcatatgattatgtgctgctaaagaatgagtgcagactgcacctactgagcaccaagcttacatatctgctgccatatgcctgtatctggagacagtgtcgaaggaggaattgaatctgatgaag

SEQ ID NO: 40206 - DNA, 358 bp, Glycine max
  Clone ID: PAT_MRT3847_136305C.1
aggcaagagggaggtatttgaattttgggtaaaaaaaaattcatggcttaaataaaaatttaaatttaaatagacccattttttttttaaggaaacaaaaatcacatttctttttttaaaaaaaacctcccccacattttaaaagcccaaaagtgtttaatttcataacgggaaaaaacgactgtttggcaaaaaataaaaattagcctgaagtctttaaagagcatattatttggagactctgtaagccttgacccttttaaggagctttttaacattgctggccttactaaagggtgccctaagaggttccaaaattttatttaatgaatttgccaaaggtggtttaaggtcacca

SEQ ID NO: 40207 - DNA, 180 bp, Glycine max
  Clone ID: PAT_MRT3847_136306C.1
gaaggggaggggaaacactttattttattaagggaatggaaagttggtttcctaactttattttattttggggggaactgaggttttaaccacatggggctgtcccaaacatgtattttatggggggggttttttttccctgcccttaggggaagaaaatatattgtactacaggaccca

SEQ ID NO: 40208 - DNA, 2625 bp, Glycine max
  Clone ID: PAT_MRT3847_136307C.1
atgactacctcgaatcctttccctttcgcgcctcaatcttttcctaacttaatagctgagaaacttgatgactctaattatctacattggaaacaacaaattgaacctgtcatcaaatcgcacaaacttcagcgatttgtcgttaacccttcaattcctcaacgatatctcactgatgaagatcgtgttgcaaacaaagtgaatcccacgtttgaggcttgggaagtccaagaccaaatgctcctcacatggcttcaatcaacattgtcgaagtcggttctctctcgagtcattggctcgattcactcatatcaagtttggaataaaattcatgagtacttccatatgcagacgaaggtgcgtgcccgccaacttagcactgaccttcgctccacctcccttgacggcaagatgatgcatgagttcttatcgcagatcaagaacattgttgacgaactcgcaggcgtcgacaatctggtacctcatgaagaacacgtcaatgccattcttgaaggcctaccacaggattatgcaccaatgatctctgttattgaaagcaagtttgagactcctcctgttgctgaagttaaggctctccttcttacatatgaatctcgagccaacagatttcgtaaacaatcattttctccctctatcaattacactcgagggtatgtgctccctaattcaaatgatactagaacttgcaataattctagtggtggatatggctgcggcagtgaaggtcgtggcaacaatggtggtcgtcgtggtgacgggctgattcaaattatcatcctcattaatccttctcagtccaacaacagaacttccaacacttgggtgaatcccaatttgaaaaattccagtcaggatattaatgtcacctcagctactcccagtgccatgcttgccaacgtctcttctacgggtgttgcccattctgcatggatccctgactcaggcgtatcatttcatgtcaccgctaaatcaccttcaagttctgctgatttgtcatctagttctagggttgtttttaattccagtgatgtaaataaagtttcaaatgtttctttgacccctagttctcacactttgtggcatactaggcttggtcatcctaatgctcatgttcttaaacttgtccttaatcatttcttgtttaacaaatcaccagactacaaatttctaagaacttttggatgtgcttgtttccctttcttgagaccttatagtacttacaaacttgatttcagatcacaagaatgtgtatttctaggctattcgtcttcccacaaaggctataaatgtttatctacttccggcaaaatttacatttccaaagatgtcatttttaatgaaatacgatatccatattgtgatcttttcaagcaaagtcctactcaggctacctctttctctcaatattttacacttaatcctgacttgtctccaccttgtcataactcccctttgacctctccaacccctacacatcagctttctatttcctctcccatctctgttgatgtcccctcacagcaacctagtttgtcctcaaataacagtctccataataatgaaactagtcctacatatgtgtcacagcctgaatctgattcttcatcccctcgtgaatcccttaaacatggtgaacctgtttctagaactaccaatgcttatcctatgcaaaccaagtccaaatcagggatatatactcctcgaattcatcattcattatttttggctcatagtgaaccaaaaggtgttaaacaggctctcgctgatccaaattggctttctgccatgcaacttgaatatgctgccttactaaagaatcacacctgggatttagttcccttgccctctaatagaaagacagtagggtgtaaatgggtttttcagatcaaagaaaatgtggatgggcttatcattactcttgcccttactaataattgggagttatttcagttggatgtgaataatgctttccttaatggccttttagatgaaacagtttacatggtgcaacctccaggatttgaagttcaagacaaatcccttgtttgcaagcttaacaaggtcctttatgggctgaaacaagcaccaaggcagtggtttgaccgactaaaaattactttgattcagtttgggtttcaagctagcaagtgtgatccatccttgttcatatataagcatcaagctcacaatatttttcttctaatatatgtggatgatattatccttaccggcagctcatcttctctcatccagcagattacaactcaacttcattctgcattctctctcaaacagctaggtcaattggactatttcttaggtattgagatcaagtatctacctgataggtctcttctcatgactcaaagcaagtacattagagacctccttcacaggactcacatggctgaagctcattctatttcttctcctatggcctcttcttgcaaactgtctaaaactggtggtgatttatttcaggatcctactctctatagatctatagttggtgctttgcagtatgatactctaacaagactagaaattacctttgttgttaataaagtttgccaattcatggaaaatcccttagacactcattag

SEQ ID NO: 40209 - DNA, 380 bp, Glycine max
  Clone ID: PAT_MRT3847_136308C.1
acgagaagacgacacaaaggatattgtgggtacatgacttcaagtctaatatgtcgcacattttggacgggaccaacgaaaaacgaggacgaaaaccatacactcactttatcaaccacgatggctttaaagggtaccttctgatccctgcgctcctgagtgactaaatccaacattctctccccaagagggccatgaaattcaaaatatgacttctaaaaaagaaccccaaaaaacatccggttttacaggatttttaccaaatgggttattaattgaaagcgcatactataattaatttgattgctaaaaagaaccttgtaaaactgaagggaggattttttttcctgttgtgcatggattatgtatctttcttattt

SEQ ID NO: 40210 - DNA, 192 bp, Glycine max
  unsure (1)..(192): unsure at all n locations
  Clone ID: PAT_MRT3847_136309C.1
ccggtccggaattaatggctcgacccacgcgttcactaacgcgcgggcgcccatccacaaactgagtttttgaaaacgattcatatgttagctgaggcggtntttagagggttgcttaagtattcaccttttactaattgtttgaaggtagttctcttcctcggtgaacttgtcgaattccttgaagcatca

SEQ ID NO: 40211 - DNA, 348 bp, Glycine max
  Clone ID: PAT_MRT3847_13630C.1
gacgagagaaggcgacatttattccacatcgagtgctcactctgtcttatactagggttcgctctcatggacacaagctatcgtgcacaggcttactaatcgcaagcgccattattatgctaccaaatccaaccaactgcgcgttgttaagacccctggtgggaagtagaagcaccagaccactaagatgagagcagtggacctaattgccctgtcactggctagaggatccaacgaatatgccacttaagacctgctttatacacaagggctaaatcggctaggaaaccgagaaccgcactgcaaccctacataggtgtcttatgcggtggagctgacacacaaagg

SEQ ID NO: 40212 - DNA, 327 bp, Glycine max
  Clone ID: PAT_MRT3847_136310C.1
ggctcgagacatgttctgatctgaaagtggctgctctcatgtgaagggaggtgttctcgctccattggtctctgtgacgctttatctccatggctcaccaagatgctcctaatggtgggtcggacaatgccccatttgccgtgctgtttgtcagttttaagccacagatccttatcgaagctcccaaagtgaacgactccgttctgttatacatggccgcgtttgccgcttaggaggttggtcgtacactcaacccttagcgtactgcggagcacgagctttctctcattctctccgcagagctcaaaatcgcttggctgtaccttc

SEQ ID NO: 40213 - DNA, 311 bp, Glycine max
  Clone ID: PAT_MRT3847_136311C.1
actaaccatatcaccaccgaaatcaccacccccagcatcactatcgaagcagcctcctatttcaccaccatcattgtcaccccctacctcaccaccattgttatcaccctttgacacaccacccttgtagcctcccatttcaccaccgccgccaccacccagagactctccacctttgcgaccacctactatctctccaccaaagatgactcccatttcacctccattaccttcaccccctatctcaccaacattgcctcctactgactcaccactcatctgccaacttactgactcaccatcaccgtcac

SEQ ID NO: 40214 - DNA, 657 bp, Glycine max
  Clone ID: PAT_MRT3847_136312C.1
gaggatgaagatgagattattgatgataaaagaaggagatgaagatgcacaaaacaagaaagaggactcgtaagggtgcgtagatcgcattcaaatccttaaaacaaaaactaaccggatgacaaacgaataacaaacgaagaacaatgtagaagtcgattaggatcgcaattcggtagcacctcggcctcgtttttctcttctttcttcttcttctctctgatttctctcaatgttggaccttggaaccctttactcagcctccctcacacctatttatagcaaaagatggcattaggagtcatggcagctcacccaggcgagttatagcttcaacctgaagtaactttgcttgcccaggcgagctagttatttcacccctaagctattttggggcctaagcgagccaggggctagcctgggttcagaaaaaggcttaaaatgaccctgttgccctctttttttgggtattttctgtattccttatggaaacatcaaatgatctttcatcttgcacggtaactggtgtcatacagcttaattcggctagcgaggatcaaaagatcaacaaatgatagtcttagaacgaaattagggtatgacacaaagttattaaactaacactcgtagtctttattgtctaagcccttctacgcc

SEQ ID NO: 40215 - DNA, 387 bp, Glycine max
  unsure (1)..(387): unsure at all n locations
  Clone ID: PAT_MRT3847_136313C.1
ggaanncccggggcggccgcacgcgtccgtagaaagaaacctcctccaaataaaatgttatattcttacatttaaagaataaacaaagggggctttctttaaacccactccgggctctctatctcttctgtttgtgttctctatccacattctttatctagtgagtgtggtggcacttctggtgttgctcaacaatgtctttcgattcagatattgctacaaacatcaacagcaggtagcctatgtctttcttgtactctgcttttccctctcattctcctactatttcctctacattgcacttccctttatttccatctttaccttcttcttctttaacgaaactttcaatttctctaaccaaacccaaattccttttcacctatt

SEQ ID NO: 40216 - DNA, 1674 bp, Glycine max
  unsure (1)..(1674): unsure at all n locations
  Clone ID: PAT_MRT3847_136314C.1
gcggtttccttccttacgggggggtttctcctcagaatctgaaagaacattcctatttcctacacaacactacactgtctggtggaagaatcttttcactctccatgcaacaacgtgggctatgtctccttattctctctctttgttagcctccgcctcccccaaaatgcacacccttctttctttctcctaatcacactctccacatcttccaaaccacaacataaccaaatccaataataaactctctcattccatcaatggactttcatcatgcccttcttctcctttgctccccagtgccacaaaatcttctccctttctcatttccacttcaaaaattgcatctttcagggtccttgctgcttcctctatacctgatgctagaagtgatgaaccacccgaaactagtgatttcttaaaaactcttcagcttggggccatgtttgcaacttggtaccttttgaacatctactacaacatctacaacaaacaggttctaaaagtctatccatttccagcaacaattacagcatttcaatttggctttgcatcgttggttattaatctagtctggactttgaatctccatcccagaccaagcatcagtggttcacagtttgcagcaatccttccactggctgtggctcacacaatgggaaacctcttgaccaacattagtcttggcaaggttgctgtatctttcactcacacaatcaaagctatggagcctttcttcactgtagttctttctgcccttttactgggtgagatgcctactttctgggtggtttcttcccttgtaccagtagtaggtggagtggcactggcatcaatgactgaagtctctttcaattggattggattcactactgctatggcatctaacgttactaatcaatcgcggaacgttttgagcaaaaaactgatgactaatgaagaggaaactttggacaatatcaatctctactcagttataactatcatttcctttctgttgttggtcccatgtgctattcttgtggagggtgtcaagttttctccttcatacttgcaatctgctgcaagtcaagggctgaatgtcagagagctatgtgtcagatcagttcttgctgctttttgcttccatgcataccagcaggtatcatatatgatattacagatggtgtcacctgtgacccactctgttggaaactgtgtgaagcgtgtggttgtcattgtttcttcagttatattcttccaaattcctgtctcaccaattcggctcgagggaactgggcttgcacttgttggagttttcttgtactcaagggcaaagaggatcaagtcagtccaaaagacaaattgaggctgcataacccttcaaaaaagaaaggaaacaggcagagggaaaagtaaatattgtagacacataacagccattgattttttttttctttctttttacattttgtgagggtatcactactccttgttaattggccatcctatgcgactaaatcttagtaaataatataggagtttaatagacatgtactgtaagtttaattttttttacaaatattcagaaatctttattgacatgactatagttattataaaatttaattaacttaatatatatatatatatatatatatatatatatatatatatatatgataaaatgcctna

SEQ ID NO: 40217 - DNA, 114 bp, Glycine max
  Clone ID: PAT_MRT3847_136315C.1
atacagaacttatgcttgacccatggaataacaaaagaggcatggtagaactacatcacggggactattttctcacatcacaaccacatcttgattcttattgtattggaacgc

SEQ ID NO: 40218 - DNA, 1013 bp, Glycine max
  Clone ID: PAT_MRT3847_136316C.1
gtttttctctcttcatttatgcatatacatacgtcttgtcaccctatgcgtttttgtatttcttttcgtcctcttcttctcttacaattaatactattattaattgcaactgcgtttattagtttaccttcttgagtaacaacatatttactcatcatagtgtagttgtggggaaaaaggataaaaaaaacatactgagagagagagagagagaggtaaacgaggacacagtagtaccatttattcctctgcttatttattagctatcagcaacgcttcgcatggctgcaggttcttcttcaaattgggtcatggaaagtggtgatgttcctcatgttttggccgttgatgacaaccttattgatcgcaaactcgttgagaaactcctcaggaattcttcttgcaaagttacaactgcagaaaatgggccaagggcattggaattattgggcttaacaagtggtggacagaacaccatgaacggtagatccaaagtaaatatggttatcacagactattgcatgccagggatgacaggctacgagctacttaagaaaatcaaggaatcgtcggtaacgaaggaggttccagtagtgatcatgtcatctgagaacataccaacacgaattaacaagtgtctggaagaaggagctcagatgttcattctaaagcccctcaaacaatctgatgtaaaaaaactgacatgtcagttaatgaattgagaaagtgagatttgacttttaagagagtataagctaagcaagaaggcaaactctatgagatctgtggtctggtaatgtgagcagcattccagaaccctgcacttgtcatggctgtctattgctaaaatctatattatataggccttaccctctaattttagtactagttcaggtgtaggaatgcgtttcattgttttgaagatgctttactttctttctttcactctttcttgtattgacctacatattccattttattttcctagaaaataattcatgttcttttttttc

SEQ ID NO: 40219 - DNA, 284 bp, Glycine max
  Clone ID: PAT_MRT3847_136317C.1
agaaatgtaaaaatacaagtattgatactatttttttgtttttgttttttttttaaaacgaggcgtgggaatacccgaaaactttggacaagcctcgccagggcgtcccaccttcccactaggggccgaccattaaaccattgaaaaggtaaagagaaagagagaccaattggctggataagaaaagcataattgaacctttccatccaaagggagacaacatgcaagttgtgctcatggggtgcacccaatgggggggggtatggtaaaaaacttgaggaaat

SEQ ID NO: 40220 - DNA, 354 bp, Glycine max
  Clone ID: PAT_MRT3847_136318C.1
ctcttggtttttttttgaaaagaaggacgggcaagtagctactataacagtcggtaacaagaacagaagcaagtattcaggccaagtacatcgagcgagtatcttaaaatccaaaaactacgagccccctccacaagagataccatcaaatagtccaaaaaagagctaatgcccaccccaacaagtaacactactgggtttaagaaaccgagtgatggagacctctgatgttttgctagagcaagacactaaatgcgagccaaacgttagcctgcgggaataatagcgactacaagctactatgaaggaacacgtgaaagagacttcgttggctgcattacaatgaagatgccc

SEQ ID NO: 40221 - DNA, 1318 bp, Glycine max
  Clone ID: PAT_MRT3847_136319C.1
gctgcgagaagacgacagaagggcagaatgaattgaaaatgaaagagcttttgaaccaaatagattctaaagccgaaacaatagaacagatgtcacaagaactagaagttaagtcgaaacaacttgaggatgcacagaggcaaaaggatgaaaaggatgcttcattttcaaagcaaattcaaatgctgagatctcaaattaagatgttgatggcagagggtgcattgtctgaaacaaacctaacaaagaacacgactgagacccagaaaggagaacgacttatgataccaaatgatgaggagtggattcttggaaccctactgtcagaagtagaaacctttaagaatcagcacaatgaaataaaacaaagtttgcgcaaagaacaagtggagaaagaaaatatgaagaaacagatatctcaattagaaggggagctgaagaagaaggaagcagagttaagtgctatggaaaagaagctcaagaataacaaaggacgtgctgcaattgttagtgttgtgcctccttctgctaaggcacatatcaagaagtcaaaatctgaaatgcacaagggaatggatgctgcaaacgctgctgttagcaagtttgaaggaggaacattaggcaaatcagctggaagtgagggccatacaaatgaattgttgaatgaagttgcacagctaaaggaaaggaacaagattatggaaagcgagctgaaagacatggaagaaagatattcagagattagtctgaaatttgcagaggtagagggagaaagacaacagcttgttatggctctacggaatctcaagaatggtaaaaagaactagaattctttgccggtgttgtctcatagaaagcattcatgagtggtgatggaggcagattatcatcatcaccagaatggaggaaacaaatttaacaagtactttgcagtttgcacttaagttatcctgtacatctactaacagttttacctcatccaaattttttctgggccacttggtccatccaatattcttgttgtatgataagttggcaagtgagccaggggtatgatgctgtagccttatataggccatgtagccaatgatttatcatcagtttgaggcatgcaatgtaacatatacataagttatatcagaagaaatggttttattgactgtcctagaagcataccgcgttgtttgatctgatgtgtggcatagaataaagaaaaacaggctaaggagtataacccactgtcagtttaccttgattaatgttttcagaagcaataattagaagctaagaaaaaaaaaaaaaatgaacgaaagcgtgg

SEQ ID NO: 40222 - DNA, 471 bp, Glycine max
  unsure (1)..(471): unsure at all n locations
  Clone ID: PAT_MRT3847_13631C.1
ctggtacgcctgcggggccggggccgagttcccggggcgacccacccctccggggaagaggggaggtatcatatctggggcaggggagtagcgttnngagcgttcccgtttgtgctgcttttcctatcgggctcancaaacgacgtggttgtgcgctctgaagataacttccagagagggggtggggcangacagaggagctctcgtggagggctatgctccttggggggggcactggggaagcgtggtncnatatgaaaggtggggcgcttcaaaaggcaatcggttatcggaggggctggatagccanatgtggcgcaaaatggggggctggggcccaacaattcaggggggtccaaaaggggcggggagggcaaaaantgtnaaggggcacgcactggtgagtcacttggggaggttgggaatacgggagggggggcaaatgggaagagtgcgacagctccttccaat

SEQ ID NO: 40223 - DNA, 1150 bp, Glycine max
  Clone ID: PAT_MRT3847_136320C.1
cggctcgaggtactgtctctggtagtgcccgtgccaaaaggtcacacacagttcttttcttcaccctcaaacaaggaaaagacattatcttaggtcgcgcctgcactgcaccgattacatcacttctctattctatttcccactttagtgcttctcaatacttcactttttccctctttatattccaaactctctctgtcactccagactctgtcacatgtccaccctcccctgttcaaatatttcccctctcattctccctataaatttcaatctttttacagaacctgttccttccgtgagatggcgacaaattgtactcagtgggaaaaaatgctacacttgaaagaagaagaggagggaaaggaggaagaagaagaagaaatagaagcattgtcactttgcgatcttcctgtcaatctgatcggccacgaagaccaatcaaaagcaaaaccagattctcaaatcaatgaaacccaagaagaggatttcgatttccgcttatggagtggccccttttccacagaaccagaaatgtgtgctgcagatgaagttttcttccaaggccaaattctcccattgcatctctcacttaagcgatgtgaatccttggaccacgtttccgtgagagaattttgtagcaatagcagtagcagcagcattagaagccagaattcatctagtagcagctcctccaccacaaccactacaaccccaataatttccgaaacaagaattcaaaatcaaaatcaaaatcatttcctcacgcatccaagtccccaacgtcagttgaaggtaaccgttccaagacaaacaagcttcggcaatcacggtagaaaatcatcagcatgggaactttttgcgtctgggtgtggtgcctgcaccagagatagcattgcaagatctcaaggttcgtagtaccaatggtgttaataaaaaccacacagctcgcagcaatagcatgggcagcaacaatagcaacgccaatgctaatggcaccgtgaaaacgagttacagcggtaagacaaaaaatcacgttttcaaaaaaattggtggcttttgagtggttgcaaatattctgttgaaacagtgcaacaatcggacatggtcatgattaagggtggtctaaaagcgccacacgacagaaagc

SEQ ID NO: 40224 - DNA, 856 bp, Glycine max
  unsure (1)..(856): unsure at all n locations
  Clone ID: PAT_MRT3847_136321C.1
tcgacccacgcgtccgcgcttcgttcagagtatcaatggcgcatcataacaatattagggtttcgatttgcttcctcttcgcgtcatcccttctttctctcttcgctcagatctcctccgggaaggagttcgttctcactttgaatcgctccaacttctccgacattgtcacctatcacaacttcgtcgtcgtcgagttctacgcgccttggtgtggccactgtatgaagcttgctccagagtatgagaaagctgcttctatcttgagtagcaatgattctccggttattttggctaaagttgatgccaatgaggaaaagaatagagaacttgcaagacaatttcaggttcagggatttccaacgattaagattctaagaaacgggggcaaggttgttcaagattacaaaggtccccgtgaagcagatgatattgttgactatttgaagaagcaaagtggtcccgcaacagctgaaattaaatctgcagatgatgctagtgctttgattggcaaaaataaagttgttattgttggggtcttcccaaaattttctggggaggagtatgagaacttcaatgcattggcagagaaattgcgttctgaatatgatttcggtcacaccttggatgccaaataccttccacgtggagaatcatcggtgactgggcctgtagttagattattcaagccatttgatgaactttntgttgactcccatgatttccatatggaagccttagagaaatttgttgcagaatctagtgtccctgttgtgactgtttttaacaatgacccaagcaatcaccctttttgttgtcaaatttttttgaacatccaaacgtaaaggcaatgatg

SEQ ID NO: 40225 - DNA, 482 bp, Glycine max
  Clone ID: PAT_MRT3847_136322C.1
cattcatggagtatatcactatttgcaccatcgatcttcttctatgtgactggtaccatcatatggttggcgtttgccagcagtaagcctcaaagtttttctgagcaaaactgattcatgttccaatcattcattattctgagcatagcctagaaacttaagaaaccttcatgcgaagcagaattttgacacggggggtataatggtatatccgcttgatatatacaaatcatataatttaagtacaaagaaatgatagtataggtacattactgtaagtattctttatttttaactgtagcttattagtatatagcagtattgtatatttttaatagatgaagatggtatggtggttggtcaccaaaaaatgtattgacgtgtttaaatcctttccaccaacttttggtgctctctggtccttctgttgcaagtttcaaccagaaagtgaccgtttcaataatcttacattttaaggcaaa

SEQ ID NO: 40226 - DNA, 2129 bp, Glycine max
  Clone ID: PAT_MRT3847_136323C.1
tagggaactgcgagaagacgacagaaggggatatcgaatcaatgttatacgcctcatgtcatgttatggcactccctaacacagctaactattcttccttggtttcattttttttcctttctctttctgcaactgcaacttgaataggcaggctattttaaccagcatggccaggctcacgctgagaccagacaattcctgcttcttttcacacattcaaagagcttactcacacaccccttttaccagaactacctcgattcaacgttttcactttcatctctcaccatccaaccacaccctcaggctcagaatagtttctagctctcagcaaaatgccaaaggaacccacagagtgtccatggcgaaaagcaacgatgaggttcttgtctacctacaagtggaagatagggaagaatcttccccgaagataccatcgaattggccacccttgatgagtcttccccaaagatacaagctcatcggcaccactttacattggtccttttgttatttgtaaacatggataaggatgaaccttgagtattattggttcagtcctccttgtctcatggctatgcattgagtcaattacccgggggttggctagccaaaatatttggtggcggatctgttcttgaggttggagtattgatatggtcagtggctacagctcttgttccttttcttgctggatatatgcctggcttattgttgtcaagggttttggttgggataggcgaaggtgtttcaccatctgctgctactgatctcattgccaggtcaataccattagaagagcgctcacgtgcagtagcattggtttttggtggtttgagtgttggaagtgttatggggcttcttttggctcctccccttatccaaaatcttggttgggaatccgtattctatatatttggtctcttgggaattgcttggtttttagggtttcaagttcttgaaggaggtgaaacacaattaaatgcagaatctctttcagcagcccaagatatcatgacacaatcatggaagacttctctaagagaattgaatggctctttgaaggatgtaccatggaaggcttttttccaaaatcgtgctgtgtgggctatgatatatgctcatttctgtggcagttggggtcactataactgtctatcatggcttcccacattttttagtgaggagctgaatctaaatctgactgaagctgcatgggtctctattcttccgccactggcttcaatatttgtgactagtcttgcagcgcaattagctgacaacttgatttcaagaggagttgaagccactgtggttcgaaagatctgccaatcaattgcatttttgtcccctgcaatctgcatgactctttcctcgctggatctagggctaccgccttgggagattgtggggattctcacaagtggtttagccctctcaagctttgccttatcaggactctattgtacccatcaagacatgtcgccagaatatgcaagtatacttctgggtataactaatactgttggggctgttcctggaatagtgggtgtagccctcactggttatcttcttgattcaactcattcatggagtatatcactatttgcgccatcgatcttcttctatgtgactggtaccatcgtatggttggcgttcgccagcagtaagcctcaaagtttttctgagctaaactgattcaagttccaatcattcattattctgagcatagcctagaaacttaagaaaccttcatgcgaagcagaattttgacacgggggtataatggtatatccgcttgatatatgcatatcagataatttaagtacaaagaaatgatagtataggcacattactgtatgtattcttatttttttgaactgtagcttattagtatattgcagtattgtatatttttaacagattaatgtatggtggttggtcaccaaaaaatgtattgacgtgtttaaatccttgaaagtcaagaatcagttttcctccacgtggttggtcaccaaaaaatgtattgacgtgtttaatccttcccaccaacttttggtgctctctggtccttctgttgcaagtttcaaccagaaagtgaccgtttcaataatcttacattttaaggc

SEQ ID NO: 40227 - DNA, 1315 bp, Glycine max
  Clone ID: PAT_MRT3847_136324C.1
gtcataagattttcttgtatatattcctagcattttggtttcagttgctttccataataattaagaagaatggtcgttctcatcgagcaatcagagctaacaagaccgcaagctgaggagaacaatgatgatttggtattggatggtggtttttccttgctcaaatcaccttcacatgttggatttacagtccctgatatcaattcatatggtcactccttcagaaattattatgatgaaagcgaaaggaataagtctgtggaggaactttaccgacaacaacacacgaatcaaacatatgaatttgctaagaagatgagagaggaatatgggaaactgaataaagtagaagtgggtatatgggaatgttgtgagatgcttgataaaattgtggatgcaagtgatcctgatttagaagaatctcaaattcagcatgcattgcagacagctgaagctgctagaaatgactaccctaatgaagactggctacatttgaccgctctcattcatgatctcggaaaggttcttctccttccaagttttggtgggcttcctcaatgggctgttgtcggagattcgtttccccttggttgtgcttttcatgaagctaatactcacttcaagtacttcaaggacaacccagatagcaacaatccagcttataatactaaaaagggcatatatgatgaaggatgcggactggacaatgtaatgatgtcatggggacatgatgagtacatgtatttggttactaaggggaataacaccactttaccgtcggaggcattgttcattattcgatatcactcttttcatcctttgtaccagacaggagcgtacaaacacttgtatagtgaagaggatgttaagaacctcaagtggctagaaatatttcacaagtatgatctctacagcaagagcaatgtgctaattgatgttgaaaaagttaagccatactatatgtcgctcattaagaagtatttcccgccaaagctcatatggtaaatctgtctagaaatactagtaacatattttataatgtatttctttttaacacattttttactattatctgaaatttgtttaaagttataatattatatgagtctcagtgagctctatttataatttataatttttaatgagtttgaaataatagtatagacgtgtatttaaagaagtgtgtaaaaaattgtattacttgccaactatcttaaatattgaattaaaggcaaaggaaagtggagatgaactgcagggactgtatcaaaattatcatttatttgcttcttttttaaattgtatccttaaggat

SEQ ID NO: 40228 - DNA, 687 bp, Glycine max
  Clone ID: PAT_MRT3847_136325C.1
cccacgcgtccgaggttgaccagctgttgaacaaccctttctttggcgcggtatagggcatatgaacgaagcttatcagatatttccccatctcatggatgccaatggaaactcaattaaagccaaagcaaagttagtgcgctagttgagaggtatttattttccctccaaccattccaatactaactaactgtatttattttcttgctccctttcatttccgccattcgatactcttccatggaccttccgcttctcagcaagagtcttcaattctctctaagaaacaaaaactaccttctcctaattgccttgttcggcgcctccggttacgctgcctacaattcaccctatgtcgctcagaaacggcgccgtattgccaagctcctcagagccttcgtttccctcgccgagttaatttccaactccgcggacaccgttaccgttatctctaacgacttgaaccgtttcctcgcttccgaatccgacgaaatcccaaacagtttgaagcagttagccaaaatagcaaaatccaacgagttctccatgtcgttggctagggtttccgaggctgtgacgcttgggattttgctagggtataaatcacagcctggtaacgataaaaaagatacgaaaatcaccgcggaagcttctggattctcggatagggtgtgggggaggtttttc

SEQ ID NO: 40229 - DNA, 447 bp, Glycine max
  Clone ID: PAT_MRT3847_136326C.1
ggctcgaggagtattgtaacttatcattgatttaaatactgcagatgaagttgcaaggtgacaagagtgggaggaagggtcacctttcagtggctactgaggtttttgaagtggcgccatccgtgcatatggtggagctgcgaaagacagggggtgatacattagagtttcataagttctacaaaatattctcatcagggttgcaagacatagtgtggcatgatactgaaggaaaaaaaaatatgaagaattaaggtatcgcctattcctatatttccccttacctatatgccacatgtatcctatgaaagagaacgttttgatcatgtaccattttgtccacagcaacctctagggaaagcaatcatcatattcatagggttacgccttcaatgattccgttgattaattcataatccgggttattggtctgtttctacttctagt

SEQ ID NO: 40230 - DNA, 418 bp, Glycine max
  Clone ID: PAT_MRT3847_136327C.1
gataaaatcagcagaatagaagtaaaaagaaactagatacagagtgaataagaaagaaaacaggcacaagaaataaaaagtagctgagaaaaaataagacgtagagacaatagaaagaaatgaaatgaggtgaagacactgggaattagacacaaatgagtgataaatatcttgaaaagagggtgtaaaggaaagtacggtaagtatcacataaagcaaacgagcaacaaaataaataattaaagataaaaatttttaaccggaattgaataaaagacattaaacaaatagaagaaaaaagacaagaagtgtttaaaactgacgtcaaacgaaaaagatgaacaaggaaaaggtaataaagaaaataaaagggagaagtaaaaatataaaaaagaaatttctaaaaaattaaggatta

SEQ ID NO: 40231 - DNA, 295 bp, Glycine max
  Clone ID: PAT_MRT3847_136328C.1
agtctcgagtttctttgctattttcctgggggggggaatcaccactggtgctggtgtggcttcttacccccttgtcgctgctcgtcgaaggatgatgatgacttctgcagaagatgttgagaacaacaactctttgcatgctttcctcccaatcgtcgccaatgatggtgccgcctcgctcctcttcggaggtggtgcagacatcttgctggctgctgcaggagctgctgtgcttgctgcttatgacaacctgctgcttgtcttgttcggcaagaaatactgctctgctggaggt

SEQ ID NO: 40232 - DNA, 247 bp, Glycine max
  Clone ID: PAT_MRT3847_136329C.1
aaccactaaagatgcccccaaatattactgaactagatgtagctcatcttatgacccctgcggtatcttttaacagtagagccgaacccatacaaacaccccaccttacaatgggttacacccggatttaccgttcggaaccgaccctttcctctataaaagggcccggccccccttaaagaattcgggggaggggaaatcggttaaagactggaataaaatacttggaacgatacaactaactccc

SEQ ID NO: 40233 - DNA, 1291 bp, Glycine max
  Clone ID: PAT_MRT3847_13632C.1
ccacgcgtccggttagtgttgaagagtttagttcataatagtagttggatcttctgcataatcatattcaatatgattttctcaagaggcaacaccgccatgtctgccatattgctgcttcttggaatattatcttccactggagtagaatttacgggggcacaatctgttggtgtgtgttatggaggaaatggaaacaatctaccaacaaagcaagcagtggtggatctttacaaatcaaacagaataggcaaaatccgtttatactatccagacgaaggagtccttcaagccctcagaggttcaaacatagaggtgatcctcggtgtccctaatgaccaacttcaatctctcaccaacgctggagctgccacaaattgggtcaacaagtacgtgaaagcatactcacaaaacgtgaaattcaagtacattgcagttggtaacgaaattcaccctggtgactctttagcagggtctgtacttccagcacttgaaaacattcagaaagcaatttctgccgccaatttacaaggccaaatgaaggtgtcaacagcaatagacaccactttacttggcaactcttacccaccaaaagatggcgttttcagcagtagtgcaagttcatacataagaccaattgtaaactttttagcaagaaatggagccccacttctcgcaaacgtgtacccttacttcgcctatgttaacaaccaacaaagcattggtcttgactatgccttgtttactaaacatggtaacaacgaggttgggtaccaaaacctgtttgatgcattgttggattctctatacgctgctcttgagaaagtaggggcaccaaatgtgaaggttgttgtgtctgagagtggttggccatctgaaggtggagttggagcaactgttcaaaacgcaggaacctattaccgcaatttgattaatcatgccaaaggtggaacccccaagaggcctagtggacccatagagacttacctctttgccatgtttgatgaaaaccagaaggatggtcctgaaatcgaacgacactttggtctcttcaggcctgacaaatcacctaaataccaactcagtttcaattgaaacagtggatcataaactcggtgctgattactcagaataattaagggtatctcattacatatatatggttttaattagtttaatttgcaccgacctcaatgtactacgtactagtacgcaagtgatgcttctaattattaataaatgcatctctaccactttatatctaaaaaataaatgttttaattccttgcgt

SEQ ID NO: 40234 - DNA, 1516 bp, Glycine max
  unsure (1)..(1516): unsure at all n locations
  Clone ID: PAT_MRT3847_136330C.1
gatccttctgcatcatcacccttcgtataataccgtctctccctttttgcatttttctctccatcattgacttctgccaagtctttcaaaaagctagctgatcgaggaataatatagcatgcacgaggtcttcgtggaagaacataccattgacacttgccacatgccaagcgagttggtgaggtgaatgttacttatgatgttaattacactacgtccatctcactcttaatttcttaatccgagtcctttagtcaattgctttttagccccttttgaaattccaatctcattctaactttgcacaaacaattttcttagcggtggaaaattggaaattttgttagatatatagaaatattggtgaagtagtggactttattaggagttgatggaacccaatgcactaggtggtggaatatttcctaacataagtagtggtttgctaggagtagaaaaccctttacaacaacaaccaaaccttcaaaaccagcaaaaccctcaccctttgcaccatccccaaatggtttcctacgccactaaccatgacactgacacacatcatcaacaacaacctcctcagcaaccaatcaaacatggctacaacttttcagccatcaaatccaacaagtcacaaagcacactcagtgacgaagatgaaccagtgttcacagcagaagacaactgctccggggaccccaagagaaaagtgtcaccgtggcatagaatgaagtggactgacaccatggttaagctcctaataatggcggtccattccactggagacgaggctggttcagaatgcactgatccaaccaagaagaaagcctctgggctgcttcaaaagaaagggaaatggaaatcagtgtcgaagggcatgatggagaagggttactatgtgtctcctcagcaatgtgaagacaagttcaatgacttgaacaagaggtacaagagggtcaacgacattctaggtaagggcacagcatgtcgggtggtggagaaccaaaccttgttggacactatggatctgtcgccaaagatgaaggaagaagttcgaaagctcctcaactcaaagcacttgttcttcagggaaatgtgtgcttaccacaacagttgtggccacaacaacaactgtggcagtacttccaacgtgcaacaatcaaccgaggctcaaccaccacatcaacatcaacagcagcagtgtttgcactcatcagagaacggggtggggagtctgagaatgttgaaagaggatgaggatgaggacgatgattcggaggagttttctgatgaggatgaagaggaatcaggagaaggaggatcaaggggtatggaggaggatgaaaatgatgtgattaggaggagagcaaggaataagggagggtnttggtgtttcatcatcacagatgatgcagcaattgagtggtgaagtgagtggtgtgttgcaagacggagggaagagtgcttgngagaaaaaacagtggatgaagaagaggggtgtgcagttggaggagca

SEQ ID NO: 40235 - DNA, 302 bp, Glycine max
  unsure (1)..(302): unsure at all n locations
  Clone ID: PAT_MRT3847_136331C.1
gcatgcacgcgtacgtaagctcggaattcggctcgaggtgtgttnttgnaantcgtnnttcttctnntgnnntnntgtgtatgngntggcantntcnctnanctgaaaatgnctngcnncggtagnaactgnggnngaggnagctcctgcaagtncggcaacggctgcggangtgcaagntgtacncagattnanctanacggtgttaangcacnncngaagaccttggnnatcggaaaggcaccggnnaaggnccatttgnggggggcaaaaangggnancccnctaaancggngcntaaa

SEQ ID NO: 40236 - DNA, 203 bp, Glycine max
  Clone ID: PAT_MRT3847_136332C.1
tacgtcaaaaactctgctatagaggggacctaaattcaataaaagtggagcagaagggggacaacgtcgtaatgtgggaaaacccaggggcgggacaagtgaagggaatggcagcaaaaggcgataacccaaacaaaggccgtggcgatgaggccaaaacatgagcgccggacaaacggcggcgcaacctaaatggttaatgg

SEQ ID NO: 40237 - DNA, 103 bp, Glycine max
  Clone ID: PAT_MRT3847_136333C.1
tgtgccgagcctgactctcgaatctctgagactctctactcttctcttagtgctctaatctagttattattatcaacataagtgacaacaccaccattcttcg

SEQ ID NO: 40238 - DNA, 141 bp, Glycine max
  unsure (1)..(141): unsure at all n locations
  Clone ID: PAT_MRT3847_136334C.1
ttaaaaagggggggtaaagcatctgcttgctacccaacaaagggannngcaaggggaaancagnngnnngaaggaagaacncgancagagaagacaagangnngaagccgcngaaaaggaaaacgacaggcacaagcagaa

SEQ ID NO: 40239 - DNA, 245 bp, Glycine max
  Clone ID: PAT_MRT3847_136335C.1
ataagggaacttagctacatcaagggattaagatatatgcataacctagttgaacctggatgctatgtaattaagagaaacctgaactgcgctatgtcacatgctatatgtgacgtcccagaattaccactaatttacctcgataactttcaaactacgcaaatgttaatgacggaacggaaactcttatgataggcccaacaacacactggctggtccactgcggaggcgataccatagagctt

SEQ ID NO: 40240 - DNA, 823 bp, Glycine max
  Clone ID: PAT_MRT3847_136336C.1
caatttttttaaagtgtttcttccttttaactttataagtagactgagtagaactggtaagttcaataatctagtacaaggaaacctcacgtagaaatactaatccaacaagtagttacatatggataaactacagaacaagagaaacaggaaaacaaacaacaaatctctccaacttctttcagtataatattaatatcctaccggccactataaatctaatcataaagggaaggcaatgtgagtaaaggcagaaagtaactaaaaggtaatttctgcaactccatcttccagacttgtcaaggaacttgcaaacttttacattcttggaacatttatgcgcttcatgaaagatagtttctttctataagtacagtgtagactccaaactattgaaagtaggcatagaaaccttaatgatgacaatagcatttcaggcacagaagcaacccatgtgggtgttggctctgttattcttcaacaacttgcagaaaaagatgcaactcatactagctcaaaggcatggtaaactttagatattcttcttctaaacaagggctccaaacgaaatgatgaaacacctttctgccactttttagcttcatacatctcattccatgcttgtactatttcatcaattttgaatccaagaccatcagtgttattagaacagtggttcttcaacatcacagctatatctgttgcagaagctccagcaagttcaaacttctcagctgcatcttcccgactttcatgccataccggtagccctaatttgaactccactatggagagttcatatagcatggtaccccacagaaga

SEQ ID NO: 40241 - DNA, 263 bp, Glycine max
  Clone ID: PAT_MRT3847_136337C.1
cattatcaaacattgatttgaaattcactttgttttgtttagttctgaaaaatgttttctaaggaaaccatactcatcctaggtctcttgaccatggttgctcttatatcctctaacgtgacagctagaaaccttgctgagacctccccaatgtctacaacgggtgaagttgctaaagagaaaaaagtgactgatgtgaaatatgaacaaaatccaagtcatggggtttgttcaacgtcaaattgctttggttggggcatcca

SEQ ID NO: 40242 - DNA, 344 bp, Glycine max
  Clone ID: PAT_MRT3847_136338C.1
gttctacaggacgactattaatattgtttggtgggaggaagatctgctcaacaaaaacggcgggaagcttatgaacgccgattaacaccgcacctccaaaaataacagttgtggtgttgtgcagcaccatgatgcaccagtctactaccaccacaaccaacgacctcctatcgaacaacgatgcttgtcgccgcaaaaaacaacatttgcagcactcacaacaacgactgttgacaacgcagagatgcaacatattaacggcagcagataagtgctcaacaagatggtcagctgtttaacaagaagcaacaccaccatgatgcagagaactactggagcttcag

SEQ ID NO: 40243 - DNA, 280 bp, Glycine max
  unsure (1)..(280): unsure at all n locations
  Clone ID: PAT_MRT3847_136339C.1
gatntanggntatgatgtcnacaaggacntggacnngccagatanagggtgannagtatncangccncgatcttggnangntcagcttnaaattacagtaggcagaggagagancccggaagaggaangactagagnagatccnaacagtagaagccgggcgagtttgtnnaccatccaaganatgaagcatttgggcacttgaagtnntcagatgttctagcnnatggaatcaaatctgnggcccaagatgtcttgcctgngtngatgcngcagcgntg

SEQ ID NO: 40244 - DNA, 366 bp, Glycine max
  Clone ID: PAT_MRT3847_13633C.1
cgcggaatttttgactatcattggcctgcgctatgaatagttctttttgggggcgtgccacatctgatattcacaccatccgctctcaagactgtgaattatggactcctgcttgcacaaaagcactgactctgccatttaatccaaatccgtgccctgatgcatggagttgggaatttttgcagcgtaccggatcacattgcgatatcatctgagtcactggatggactgccaccccaatgcaggatgtacaggtatacaacggattggtttactaccctctcaggaatgtgctcccaggacctatagagatataaagccacaaaatcctatggagttaaataagtggatggagacactgacttt

SEQ ID NO: 40245 - DNA, 402 bp, Glycine max
  Clone ID: PAT_MRT3847_136340C.1
aattcggatcgtgataacatcctatcaaccctcttcttctttctagtgttacaacagtgcacaaacaactctgggttttcaataacataatattcttctgagtctgctttttttttctctcacaagaccattataccagatccagtttgacgagatcgagttatatgagcaggcatacctctaatccgaacgaggatagactgcacattgatgtcaatgttgtggaaaggccaatgagtgaaaagccctacgatctgttgctgatgattcttggcctttcactcactctcgtagcaatcattattgcctgtgtcgacaatgagaccaatagtatatcctatgccgatatgcatgtcaaagccactgctaagtgcgaatatgtccactgccatagtgtttgtc

SEQ ID NO: 40246 - DNA, 434 bp, Glycine max
  unsure (1)..(434): unsure at all n locations
  Clone ID: PAT_MRT3847_136341C.1
atattgaattttgactttttttgtgtggttggaaaaaagaaaaatcttataactttttttttcgtggcaccagtagtaagaactctgtggaaaaaaggctatggcgggtctcttgatagagaacaggcgtttttttccagatgcattgatattcccttttttttaatgggagttatagcctcggaacggggtgaggaggattatagttgaatgaaaaaaaaggggtttttaatgaatctggaaaaaaactcctgttctttatttcgaaaccccccgnnnnnttcaaccacaattgtcttacaatggggggggaaagagaaagaataagagaatctccccttttacaaccccctttttaaaatttttttttttttaaaatttattggaatttaatattttttttgaaaaacccaaaaaaatatattttttttttt

SEQ ID NO: 40247 - DNA, 315 bp, Glycine max
  Clone ID: PAT_MRT3847_136342C.1
ctttatcatgatcgagacttcaccgcgggacactgaggtaatgacatatgatatgacaattttctgaatctgagtgctaactaggtgacaaatgaccccaaaccacctattatgtgagtgaactatcacagtagtcaattaatacaaactctacaagaagcagaatcaggccatctaggaaggaacaatggctgtgataaaaaaagtggggctcaggacggaaaatatggaactgcgcgtgtgagaacccaacacctgtgctgagaacactgttatgaaagaacatacggatgcccaaagtggaaagggatcgct

SEQ ID NO: 40248 - DNA, 279 bp, Glycine max
  unsure (1)..(279): unsure at all n locations
  Clone ID: PAT_MRT3847_136343C.1
gaccaacggacggatgccatgagggctctgctgctcctggggttcctgctggtgagcttggagtcaacactttcgattccaccttgaggaagcaactgaaaaagnataagtacaaagctgaaaagcacacagtcgttctcactgtcaccggggagccctgccacttccccttccagtaccaccggcagctcnaccacaaatgatancaccggngncggtcangccctcagccctggtgtgctaccacccccaactttgatcaggaccagcgatggggat

SEQ ID NO: 40249 - DNA, 349 bp, Glycine max
  Clone ID: PAT_MRT3847_136344C.1
atgacttactgaaatttggctttatttagacataacatgaatacggaaagcaacatactacatatgcatgcccgaatgaaattaacataatttgctggatgtgaaggaaactttccatgttcttgcaccaaagcattcccaaatcccaaagtaatgaagatagtgagtgacccttggattcaaaaacattgatctagggccatgagaagtatagagagagaacacaggggctatgccatttaccaatataccccactgcaccataccactatgtattctatagcccctctttcattgcctaaaactaaggtgggataatccgaccttgtggaggcttatttttctagtt

SEQ ID NO: 40250 - DNA, 267 bp, Glycine max
  Clone ID: PAT_MRT3847_136345C.1
actacactcgtccgcaggaagctgtggtaagaggagagataaaaaggttaggggggtctttctctctctttctctttgtgattttgccttctgtttttgacacaaaaaaaaaaaaaaacaaacctttggtgggatttgagggtatttaggttgtggattgacttagattgttggggtaacccacccctataaccgctattgaaaatacgatgaatttaaaaaaaatcttttcttactaaaacagaagcccacaacctgtgtcatctt

SEQ ID NO: 40251 - DNA, 1898 bp, Glycine max
  Clone ID: PAT_MRT3847_136346C.1
ccccaacctcagctttcgactcgttaggagtttcacaacgcagctgcgcacagcacagtcctgaccctcccagaaaaccctaatcagcgtatcgaatagttggaatctccaattcttgtctttatctcttgaccagaaaaaatgtgcgaagccgtagaaattgaagaaaggcccaaatacaaagatatcagacgctattactgcgagtactgcggtatctgcagatccaaaaaaacccttatcacctcccacatcaatttgcaccacaaggaagagtatgaaaaagcaagagctgaaagagatcccgaagcagaggcttcgaaatcgaacacttgcgaggaatgtggtgccactttcaaaaaacacgcctatttgttgcagcacatgcaaagtcattcacttgaggtatttgaactcttgattaattattatttaagaaaaataagttggatacagtcaaactctaaaagcacataagaaaactgtatttaaaagctatgtcttatagaccgttgtgttccttgagaaacatttgatttgcggaagacaggctttgggttgtgacttgattgtgctagttgttttatagactgaagatacatattttgcaggaaagtaatctataagtttctaaaatcattggaaaattatgggttaatagtgtgaagcattggatcccagagaaagatctccaaaatgcgcgaggcagcatatatggacttgatggattagtatcaggtagggtgacctcctgtgaagctccatcaaggatgcctcggtcacgctctgtccaaaattgagaggccatttgtgtgtgctgtcgatgattgtcaggcaagttacagaagaaaggaccacctgactcggcaccttctacagcatgaagggaagatttttaagtgccctgttgagaattgcaacagtgagttctctttgcaaagcaatatgaaaagacatactgaggagattcatgatgacagttctaccactaccagtagtgacaaaagtcacaaacagcatatgtgtccagagattggctgtggaaaggtttttagatatgcatcacagctacaaaaacatgaagattctcatgttaatttggaatcagtagatatggtgtgcttagagcctggttgcttgaaacatttcactaatgtccagtgccttcaagcccatgtgaagtcctcccatcagtatatgacctgtgacatttgcgggacaaagcaactgaagaagaatattaagcgccatcttcgatcacatgaagctgaaggcagttcatcagagacctttcaatgcgagtttaagggttgcagctgcacattctcaagaaaatctaatctagacaagcataagaaggctgtgcactttaatgtaaagccttttgcgtgtgggtttactgattgtggcatgagatttgcttacaaacatgtgcgagataatcatgaaaaaactgctaaacatgtttttacccttggggattttgaagaagctgatgaagagttcaggtcaaggccgaggggaggaaggaagagaacatgtcccactgttgaaatgttaattaggaagagggttaccccacctagtcaattggaacattggttatttatgcaggatagtgagtagagtgcatttagcactctgtgctcctattactagtaggtaaaatgtaaatttaacatgttgacaggagtatataatatggtttggattattgttaacagatatatagaatttaggacaacaacgtgtaataatgattgatgcttatgagttatgacagattccatagtgtagcgaatctattaacctttgtaccaatttgcaatttaaacaactgcttttgtttacaaaaaggtttggaaggtgatatgtaagcactcatcggcatttgcttt

SEQ ID NO: 40252 - DNA, 555 bp, Glycine max
  Clone ID: PAT_MRT3847_136347C.1
gcgagtactgcggtatctgcagatccaaaaaaacccttatcacctcccacatcaatttgcaccacaaggaagagtatgaaaaagcaagagctgaaagagatcccgaagcagaggcttcgaaatcgaacagttgcgaggaatgtggtgccactttcaaaaaacacgcctatttgttgcagcacatgcaaagtcattcacttgagaggccatttgtgtgtgctgtcgatgattgtcaggcaagttacagaagaaaggaccacctgactcggcaccttctacagcatgaagggaagatttttaagtgccctgttgagaattgcaacagtgagttctctttgcaaagcaatatgaaaagacatactgaggagattcatgatgacagttctaccactaccagtagtgacaaaagtcacaaacagcatatgtgtccagagattggctgtggaaaggtttttagatatgcatcacagctacaaaaacatgaagattctcatgttaatttggaatcagtagatatggtgtgcttagagcctggttgcttgaaacatttcacta

SEQ ID NO: 40253 - DNA, 1496 bp, Glycine max
  Clone ID: PAT_MRT3847_136348C.1
ccacgcgtccgggagtttctcccagaaaacactaatcagagaatagttggaatctccaattcttgtctttatctcttcatcagaaaaaatgtgcgaagccgtagaattgaagaaaggcccaaatacaaagatatcagacgctattactgcgagtactgcggtatctgcagatccaaaaaaacccttatcacctcccacatcaatttgcaccacaaggaagagtatgaaaaagcaagtagctaaaagagatcccgaagcagaggcttcgagagcgaacacttgcgaggaatgtggtgccactttcaaaaaacacgccggctcgaggcagcacatgcaaagtcattcacttgaggaaagtaatctataagtttctaaaatcattggaaaattatgggttaatagtgtgaagcattggatcccagagaaagatctccaaaatgcgcgaggcagcatatatggacttgatggattagtatcaggtagggtgaccctcctgtgaagctccatcaaggatgcctcggtcacgctctgtccaaaattgagggcttgttcatttgtgttttgttcttgtcagagcatcatgatacttttatgtgtgtgttttttgggttttagtttcttgctttaacagtatttggtccagaggccatttgtgtgtgctgtcgatgattgtcaggcaagttacagaagaaaggaccacctgactcggcaccttctacagcatgaagggaagatttttaagtgccctgttgagaattgcaacagtgagttctcatttggaaagcaatatgaaaagacatactgaggagattcatgatgacagttctaccactaccagtagtgacaaaacaaaaactttcgtttaatttgttcatggttttgtgtcaacagaaatctaatctagacaagcataagaaggctgtgcacttaaatgtaaagccttttgcttgtgggtttcctgattgtggcatgagatttgcttacaaacatgtgcgagataatcatgaaaaaactgctaaacatgtttttacccttgtaagttcttttccctttctattccctttgtgcaaaaggctatcataagtgatattgtcatagtcacacggctttgcattgactttggttcagggggattttgaagaagctgatgaagagttcaggtcaaggccaaggggaggaaggaagagaacatgtcccactgttgaagtgttaattaggaagagggttaccccacctagtcaattggagcattggttatttatgcaggatagtgagtagagtgcatttagcactctgtgctcctattacaagtaggcaaaatgtaaatttaacatgttgacaggagtatataacattttggattattgttaacagatatatagaatttaggacaacgtgtaataatgattgatgcttatgagttatgacagattccatagtgtagcgaatctattaacctttgtaccaatttgcaatttaaacaactgcttttgttt

SEQ ID NO: 40254 - DNA, 469 bp, Glycine max
  unsure (1)..(469): unsure at all n locations
  Clone ID: PAT_MRT3847_136349C.1
gaccggctctgatcgtttcgtcctttcctaacgactttggaatggaaattgccaatgttgtttatgttgctcctgacgagatcctttaccctgtccctcgttcgttgtacactttggatccgcttcagcgtgcgtacatgtcaaaatctcagtgcaataagatgaccactgttcagtcagaagactccgttgtcactgtccaagttgattcgaaagcgtcgaaagtcacttgtatgatgaagggcgggactggcttatttggactggataagcgcgggtcggattggatgatggatgtcgatgtggccgtctccgatgagcaacctcgtcaagtctttgtttgttctcctttcttgccgggcactctgatgaagactntgatcaacttaaacgactacttgccaaacaaaccatatagaggcactgtcaaattaaatgtttttcatggaactattgcangctgggcttc

SEQ ID NO: 40255 - DNA, 248 bp, Glycine max
  Clone ID: PAT_MRT3847_13634C.1
gttgtgggttaagaagagttgacccatttcaaggttgattaataggagaatcattttagttgattgattgctgttaactaggaggctgatcaaggggtaattaattcacaataacactatcatatactctttccttaatataactgtggtatggcttttgaggctatagtgcctcttttggtatctttcttgtaaatttttccctacaatacaccttgtgtgcctattttcctatatttaccatatga

SEQ ID NO: 40256 - DNA, 439 bp, Glycine max
  Clone ID: PAT_MRT3847_136350C.1
aaaaaaaccccccctttacacattttttccaaaattaaaaaaggggggggaatttttaaaaaaggcgagcctacccaacaaaaggggcatgcccaaatttcctttttggattaaacaaaccaaccacccaaaaaaaaccccaattcccaaaccttccgaagattccccatttttaaaaaaactgggaaaaaccctgggaaaaaaaaaaaccgggcttaaaatttttcccccaatttcaaaaattttagaaaatccccaaaaaaaatccaaaacctggaaccggttgggaatttcaaaaaaggaaaccaaaagcccttaaattttaatttcccccctcaaaaccccccttttaaaacccttttttgggccccctaccctttttgggaaaaataaattcccagaaagggggtcttaatttggccccttccttccctaaaaa

SEQ ID NO: 40257 - DNA, 192 bp, Glycine max
  Clone ID: PAT_MRT3847_136351C.1
atataattatcatattaacataagggggtattttaaagcacataaaccaaaatatactcatcaaaattaaaaatcctaacaaagataatccaccggcacacttaaaataaaatttctcccatattcaacacaactaattttcaccaatcacatgtttcatacacagccatgaatcacaatttatgagctaga

SEQ ID NO: 40258 - DNA, 691 bp, Glycine max
  unsure (1)..(691): unsure at all n locations
  Clone ID: PAT_MRT3847_136352C.1
ccacgcgtccgtagacagttacataatattttcccgtcgcaatgttatttactctctctaatgctgttcaaaccctttcgtcaccctgcacttattttcacataactcctcttctaaatttaagtgtgttagttctaaagttcccgtctttgcgcagaaaccccgcgagagcagttactacattgaaaggggtttggagttttgcgccggtgacgcgtttttccggcaagagagcgcaaccggcagagacctcggcgttttggcagcttctctgcacaagaaagagaatgggaggttgcgtgttctcgacgcgttgtgtgggtgcggaattcggtcgctacggtacttggcggaggccgaggcggattttgtggcggcgaatgatgggaacgaggactatggaagcaccattgtggagaatttgatgcgggtttcggcggaagaggaagggagatgggtggttactcatttggaagctaatagggttatgatggattattatttgcagaagagtttctttgattntattgatgttgattcttttgggagtgattcctctttcttgaggtctgccatttgtactttgaaattgggtggcttgctctatgttacttccactgatggcttctcatctggtggccaccgtcctcatcattctttagctgcatatggagcttatgtgcgccctatg

SEQ ID NO: 40259 - DNA, 815 bp, Glycine max
  Clone ID: PAT_MRT3847_136353C.1
taaaaataaagcttttcccttgtttgtttataaaactattaattagtcagtctttttcatcatcaccatcattatcatcatcattattatattattccccatacatctttttttctcaacaatgacatttattgtactgtcatacgtaggcatagctactttaacttttgagcttaaatgtgaaagccaactattatggtgtagtgattttgatttatatatcagaatatgcatacacattgaaagttgatgagaaaagtgatgtctatagctttggagtggtgctgctagaactactaacagggagaaggccagtggggaattttggtgaagaaggtctagatattgttcaatggaccaagttgcaaacaaattggagcaatgacaaagtggtgaagattctagatgagaggctatgtcacattcccgtagatgaagcaaagcatgtcgtcttctcgcccatgctatgtgttcaggaacaaagtgtggagagaccaaccatgagggaagtggttgaaatgcttgcacaagcaaagaaaccaaacacattccaaaagcagtgatctactaccaaagaaccaaaggaaaagttaaagaacaaataaaagaaaaagctgagtctatacatgtgccttgcatgtgttaatgttgtcggttggtaaagatgtcaattttcctaactagtttgtcatttgagttttaaagggttttttttttcctttctctttattaacaattagctgtggggacaagagacttgcatattgtgtaagcatactggaaaatttactatgaatggacattgatgctaaagg

SEQ ID NO: 40260 - DNA, 511 bp, Glycine max
  Clone ID: PAT_MRT3847_136354C.1
aattatgcaacgaatgaaaagttaaccattatatttagtattgagtaatttgaagtcagtgtgagacatggcaacgtagttaacttactttaattaaaaatatgaataattaaaataggaatatataacggattcggattctctccagcaatgatgaggacgtaggattaattttatggctgagagtaaatccaaaaagatacgcaaaccacgtatcaccgctactgcttgaccaaatggaagcgacttcaaaccaaaattaggacaaagaaaataaaaatacaaatgtcaataaactcaatatacaaagacagagtgtaagttttactaaatggaaagctggaattgaagtaaaagctttacatatatattgcttgctaaacaattttgaattttttttatcttggattcttgctaaacaattaattatatctattaatatttctctaataatatgggatacacttattattattattattattattattattattattattattatttg

SEQ ID NO: 40261 - DNA, 415 bp, Glycine max
  Clone ID: PAT_MRT3847_136355C.1
gcaataactgagacataagctgtggcctgatttttcctgaacagtttgaaacaaccccacatcagcgatgtgcataaagagttgcttatcttgctccattattacgaccacccatttccttggatttgctacttggatctgtgaagcattcatacagaaattacatgctacataaaccacatggtctaaaccgccacctgagcctatgctgagattattatacccgtgccgaatgatcaagttcacaccatcaatagataaaccaactcctcttagttcagggtcacgtgacaaccacactgaagcatctgttcaaattaaatggctggatggatatatagcagatacaggcgagaccatgggatgtaatccacacacattttgacctttgcagatcttgaaaaatccattcttt

SEQ ID NO: 40262 - DNA, 516 bp, Glycine max
  unsure (1)..(516): unsure at all n locations
  Clone ID: PAT_MRT3847_136356C.1
ggctcgaggggcttactattgggcacatgatgagaagcttctcatcagtgatttcatctccaatggcaatttgactcatgcccttagagggagacatggccaaccatctacaaatctttcatggtccaccaggctgagaatcaccaaaggaacagcgaggggcctggcctatctccacgaatgcagtccaagaaaattcgtccatggcgatatcaagccctccaacattcttcttgacaacgacttccagccctacatatccgattttggccttaaccgtctaatcagcatcactggcaacaacccttccaccggtggattcatgggtggagctcttccttacatgaactcatcacagaaagagagaactaacagttacaaagcccccgaggctcgtgtccctggctgcagacccacccagaaatgggacgtgtactcgttcggngtcgtgctactagaaatactaactgggaggtcaccagagtcatctcccaccacatcaacttccatggaagt

SEQ ID NO: 40263 - DNA, 1248 bp, Glycine max
  Clone ID: PAT_MRT3847_136357C.1
aacgcgtccgcttcgaggacagcgagtctgacacatttatcttccatttctagagagataaaagtttggtttttgaatagttggtgtgaactctgaagtgtagtgaagtgaagaagtgaatacttttatattgcacctgtttagttaggcttagcggtgttattctatttttaacttttaaggcctctgaagtttgattttattatcagtttatcaccattgactctaggtgaaagattcttctgatttcctcacttttttttttttaatttaataatattataaattgagacattgagcgttttgtgtccgtttctcaattatgaagcagaaaccgtttctgggtgttagtgattccgaggaaactgtttctggttagtggtgttaatgtcttttgagcatgcaagacgcggttttgcggaagatcagggctttatctgattgctgattctggaagcattacatttacatgagttaatatttattcagaacttgtcaaagcaaagttttgaggttgttgattggtgatcctttctctgaggcattttctatgtcactacattagtgtgtctgagacatagtgataaaaagtgtttctgtgaagtttgaagattaagccacaacatatatttcttcaaagaagcattggagagtggaaaacaaggctgttttgtggatcattcaatggctctcaacaagataaacctcttggattacaaggaaattcacttggattgagctaaaactcagttgggtgtataccaaatcgaattcaatcttgaagaaagttagcgatgttgttgcgggagatgctcgttccacagaagactggttgttgcatgcacaagaacttgttcctgttgtcattgataaggcaagagaggtcaagggatttgccggtagatggaagatgattgtcgcacaactggaacagatccctttgcggttatcggatttgtcaagccatccatgcttctcgaagaatgctctgtgcaaggagcagttgcaggctgtgtcaaagacacttggggaagcgattgaattggctgagttatgtttgaaggagaagtatgaggggtagcctcggatgcagagcgatctagattcattgtctgggagcctggtttggacgttgacggtggggggcctctgattagcatggtggacttgtgaagctacttttgcattgctgtgctaggtgtgtgggagaggagtggtcacgctaagtgactaagtggatggctgcac

SEQ ID NO: 40264 - DNA, 250 bp, Glycine max
  unsure (1)..(250): unsure at all n locations
  Clone ID: PAT_MRT3847_136358C.1
attgaagttaaaagccttagccttccntacaactccanacaggaaganatcnacaaccatggctgcntcngtctccactgtcggagcngtcaacanagcnctnttgaacctgaatggntctnganctggagcttcancncccagttcancctnctttgggaccancttgaagaaggttattgcctcaagggtcnccaacagnaaggtttccggtggaagcttcaagattgttgctgtagaagagaagaaa

SEQ ID NO: 40265 - DNA, 155 bp, Glycine max
  Clone ID: PAT_MRT3847_136359C.1
acgtaaaccctctatatagacacacccagtggatactcttcattgactgagccatagcgtaagggggtctccaattagggagcattgtgtggaacaaagtctaaacctttattcttatgaacatgcatctgaaaagcgttgattcatcatattgt

SEQ ID NO: 40266 - DNA, 313 bp, Glycine max
  unsure (1)..(313): unsure at all n locations
  Clone ID: PAT_MRT3847_13635C.1
ngtcgcangcacgcgtacgtaagctcggaattcggctcgagcnccaacccaggatncntagcccccacgtctatgtncanctncgtcgtgctggtaatnaccatcgncatctgnctctgccacgtctgagtnggncacatcaaatacnacancgnccacaactataagattgaacacacagagacagatgcggtgagctccagaagtaatggacggccccncactgctggcgctgtcnccaaatctgcaaaatacatcgctcaggngctgcaggatcagagggggacggggacggggtcnnggctnctnggat

SEQ ID NO: 40267 - DNA, 240 bp, Glycine max
  unsure (1)..(240): unsure at all n locations
  Clone ID: PAT_MRT3847_136360C.1
gttactattttttttaaaaanacttaaaaagtttcaatttttattttaattttctctattattattggtgctgttactattaattaatttctggggctaaattgananaactgtgtgtgtgtgtgagaaaaagagagnccgtaagaganaaaaagaggaatcaagatagctctttgcattttctatcagaatctgaggacccaaaatctagggttttctgntcttctctggggatctgaa

SEQ ID NO: 40268 - DNA, 651 bp, Glycine max
  Clone ID: PAT_MRT3847_136361C.1
ggctcgagtgatcctatttctgtgatgaacccggatgagtgttgatgagaaaacaaaggatagagggagatctgtttaagtttgaaaacatctcttcgtcacagtctttgttctttctagttttatctcttttgttgttgttggaaggaacccgacacaactttacacagtttacacagatctgttcctttttgacactgtcaacagaactatcctttcattcactgccgccagtgatgataacttgaagaaagaatcagatatggagggtgatcttcaaagggctctatctttgcgcctacatcgtagaggagaccgaagtaatcaaagtcctgctaaagattttgaggtgggcttcttttcttcagggagggtacctcaggattaccccatgaagattgtttggaaaaaagggtttgttcggttggttcttgtagcagggatcttgtggatgttattaattcttcttgcattattgttccatatatggtcttgtcaaacttccgtctcctttttatcagctatgtgtaacaaagatagcaaggttttcaacatgttagacaatatgggacttgtatcaaaacctcacagatgtccaattcctctttccaatgaccctgataaaatagttatcccaactggaagaactcc

SEQ ID NO: 40269 - DNA, 402 bp, Glycine max
  unsure (1)..(402): unsure at all n locations
  Clone ID: PAT_MRT3847_136362C.1
aacatgttttgtccaatgctctacaagaaatgttacttgctagatgcggtgtacggacagattatttctttcccggacgcacacaaggncaaggaatatctgaacgaccacaagtaatttctcttttccttcgctcctgctcctgctgctacatctggtgctccagcaactgcagccaaggaggacgaaaataatgaagaaccagctgaagagtctgactatgacatgggtttcagtctgtttgactaaattaactaatacttttgttgagtttgctttgatagaatacgtgaaaatgttacctatttagtctatttattctgctttaatcatgtacatcaacagtttaatccaagtataaacttacatttgctcttatgttaatcaaaaccatgctctttt

SEQ ID NO: 40270 - DNA, 116 bp, Glycine max
  unsure (1)..(116): unsure at all n locations
  Clone ID: PAT_MRT3847_136363C.1
gtcccaagnnagggaaaatnncatgaatcaacgaagaaggggnctgtgacctccactncgcctccctcttccccagtagaggaggcgcaaanggcggccaagcgcgtcgaagacac

SEQ ID NO: 40271 - DNA, 280 bp, Glycine max
  Clone ID: PAT_MRT3847_136364C.1
gaaattgttgattttaatgaccgagccggagcaacgcaaaagatgcaaaggaaactgcagaaagtgtgcctcaaaacaggttcacctattgaatcccatgctgccactgtccttactcctgatgccttaagtaaactccaggaagagctagttttggcgccacaatatgcatcctttctggttgatgaaggtcgtttccaggtcagacaccactctcagtcagatggaggatgcaaagtattttgggttgcttgtcaagagcacatcagctgcagctgcc

SEQ ID NO: 40272 - DNA, 589 bp, Glycine max
  Clone ID: PAT_MRT3847_136365C.1
aaaaactgcatttgtagaaacttcatttgaaatgaagttgctcaatcacaacagtaatataggaatacacttgttaaatcaagttttaatcaaattatatactcaattgatccgttttccacacttctcttcacctcttagggggtgcttggtacaaggaattttttttatgcccgggaatctttgtttcccaactttagattcccaggaaactaaaactttctcttgtgacaaacacccccttaatggttggtagttgctactggctatatattgaaagtgagataattaacaaatttaaagttaaaaccacagctatgtgcaagggtcaaacttgaaggggagatatttgcattaacatttgtttatagaactatacatgcagtttaagcctgtgtttggtagtgttgaaatggattggaaaggaagggaaagtttaaaaaattagtgtgggtccctcaactccaccacactactttaattcaaatatttcctcatttctatttcattatatttctttccactgtaccaaacacaccctacatgtttatactatattactatgtcttaattattttttctttttaaa

SEQ ID NO: 40273 - DNA, 341 bp, Glycine max
  Clone ID: PAT_MRT3847_136366C.1
aacttcttcattataattttttattctttgcatttacaaacgaaacctccctcaatttatcaggcaaaaatcccaaatcatgggccctcggggtaggaccattgacccttccgccctctaaatgcactgggcctgctaaactttttgaccttgattgccctcgccggcaaaatgtggaagattctaatacaaacgccgaaccccattttgggccctggatagattttgctaccccacctggagttcccaaaagcaccctcctttatgcactggatggtgccgacaaaaaaatattctttttttttcctgcgcctacccaaaaacgctgttgtttctgaaaa

SEQ ID NO: 40274 - DNA, 503 bp, Glycine max
  unsure (1)..(503): unsure at all n locations
  Clone ID: PAT_MRT3847_136367C.1
ccggnnccggcaattcccggngtcgacccacgccgttcggggagtatgaagggatggaaacaacatgcgagtactaccgtgccatcatgaatttcatagaacatgtatagacaagtggctgaaggagattcacaggtatgtgaaaataggaatttgagttttcttcttgttaactataaaacttcgaatttatgcaaactcccaatttactggtgtactgtatctatgcatattttttctttacagcctcactgtatctatgcataagggtttatggcatagataaatgagctctacattttttgttcaagaagcacaactaatggaatttaatgctggcagaatttagatattttcaaaattatgagctggttaaattgtacattggcaaaatatggtgaatgttgaaccatcttatggtcatgtgccttagtctatggcagttatcgacctgataagatcttagtatcactagaatgactatctaactgtcattagacatt

SEQ ID NO: 40275 - DNA, 483 bp, Glycine max
  Clone ID: PAT_MRT3847_136368C.1
ccaaaaaaaaaatttaaaataaggttcccccatttatgggaaacccctttaaagggaaaatttttttacccaaaatttaaaaaagatttttttttccccccggaaaaaccaaacagctaaacttttgggggccggtttttttttggccttggggattttaaaacccttttaaaaaatttttggcttttcaaaagggaagggggaaaaaatctttttttaaaaagtcccccgggaaaaaacacccccaaaggctgggttaagggccctggggttcctaggaaatttaggggacccgggggtcccccgggaaattccggacgggtccctgaaggggaacaagttttccttatggggggtcgtataaaaggtgggggaaaaaagggaaaaaggggttcccgggggaaaatggttatccgttcaaatttccacaaaaaataatggccggaaagaataaagggaaaagccgggggggcctaggggggg

SEQ ID NO: 40276 - DNA, 110 bp, Glycine max
  Clone ID: PAT_MRT3847_136369C.1
tgtgaccaccagaagttcgatctctttcaactcaagaactatctaatttattcacactcccgccgacaccggaaccagcaccggcaccaaattcatttaggcccgtgctt

SEQ ID NO: 40277 - DNA, 285 bp, Glycine max
  Clone ID: PAT_MRT3847_13636C.1
ataaaattatttttttttacaagggataacataacccataagggcaaacctatatcataagggtattgcaaataagtggcccttatcccgagggactctaattaaggattccaaacttggcaggtttttttaaaactcacattgaaaacgcattggaaagcataggtgatatatatttaatgacacttgagggaaaagcatctatttagaattccttaaccaatgcccaaaggggttcgaatttgccttacgattattggtatgcaaggaatatgtttcataaaa

SEQ ID NO: 40278 - DNA, 547 bp, Glycine max
  Clone ID: PAT_MRT3847_136370C.1
tagaaatttaactattctctttgatcccaagttccaatgtttcattaactcctgcagtttattattttcaatagttacaatttaatgattccaatacttttaatacagcactaaatattataactgtttccatccaatcagcaccaacagttcagcacctctaatcaatgtgaaacctttgcaacatttaatatgttcaaaagcccgcacatatgtgcagtagggtattttttccttcccattgagttttctgttctgtctttcccctttaatgcataaaacacattaatgcaatggcttttgcactagggtaaattatgcttatctaatgaggggggctggagttgaggggataaaggataaggcgtttgagaaactgtggaagctaaaggtgccaatcaaatatgaagtatttgcttggaggctacttagggataggttgcctactaaagtaaatttgcataggagacaaatacaggtcatggataggagctgtccattttgcagaaatgtggaagaggatgcagggcacttgttttttcattgc

SEQ ID NO: 40279 - DNA, 250 bp, Glycine max
  Clone ID: PAT_MRT3847_136371C.1
tgttggagtgcttctcagtggtgagggatggttgttattgttgctgaaagtcagacgtaaacaaaaactaatagaagcataactaatattatgtataagaagaggaagagtttatcttcttacttactaattccgattgatcgcctttcttcatctaatacgcgttctacaactgccttattcttacgatttatcctattatcaaccaacatcttcttaaacctttactattacatctgcgtcttcattt

SEQ ID NO: 40280 - DNA, 447 bp, Glycine max
  Clone ID: PAT_MRT3847_136372C.1
atgatgcgaacgttttaggtttagggattgatgtttcacctaactctgattgtctactgagtcatgacactgacctgccctgccatacacagagatgaattgatatataagtatatgatttttttttgggtgtgatcctttttactctttttctttctctggatgcctatgactccatgagcatgtttgattttattattgttaactgacaaaaagtaatttttgctaacggatcaatattattgttattgtttttatataggattttttttacagagtaggatatttttttatttaaaattacaaaaatatatttgcgaattccaatgcataaaatgggaagcaaaaatttattgccttagaaataatagtaatcctgaggcgtgttcaacttttaatccaaacatacaaattacagcatgtatgggatttgctattatgcttttt

SEQ ID NO: 40281 - DNA, 3194 bp, Glycine max
  Clone ID: PAT_MRT3847_136373C.1
ggcacgagggttgatttgacagcttatgtggagaaacatgagttttgttttgatgctgttcttgacgagaatgttaccaatgatgaagtaaggttgctccttatcaaagattgaatttttatgctgtttcttatttaaattaaattaacattttttcttcactagttatgacgccattatttgccttgtttgttgttgttggaatttatgaaagtgattgctcgatttggagtcggtcttaaatcttgagctgttagtcgaaggccttggtactactctgcactaaaacttatattgcataaatgtagcaaaaaagattcctccaagtttggctaccccacgagctaatgggcctaatgatgggaaaactggaaaccctataaattgggtaaaatggtatcccaatggttctgatcattccactgaaggcctctagcagccgagcacgggaaattttacaattaccaatgtattgttgccgtctgaaaaagaatcctctgcggatgtgaatatcagtgcaatactcgaggaggaagaaaaaatttttaattcaagaattctgacggtggagattctactggacataatacgaactcttattcacttaatggtagagatgagaaagtgcaaagggtgtctcctccacgcagaaaagggactaaggaggagaaatctgaaagatctgtaaattgggtaaaacgggatgtcgatggttatgatcattccaccacaagctccaaacagcagagcacaggaaattataacattaccactggatcggggcagtctgaaacagaatcctcttctaatgtgaatatcagcgcaatacttgaggaggaagaagcactaattgctgctcataggaaggaaattgaagacacaatggagattgttcgtgaagaaatgaaactactggcagaagtggaccagccgggaagtcttattgacaactacgtgacccagttgagtttcgtgctttctcgcaaagcagctagtctcgtcagtctccaagcacgccttgcaagattccaacatcgactaaaagaacaagagatactaagtagaaaaagagtgccccgttaagagactcggtttctcttgttcagtgatgacgtgtatgttcttgatgtcatttctcagtgtttgttagcgatatagttttaaaggtttttgttcattttataaaaaaaaatggatcttttgttgggtattcaaattaaatttactcaaatgtatatttgtcccttctgtgatattattatgcccaccttattattggttttagcaagcttacagaagtgctccgtgattcctttgttagaaattcgaaaactgttatgatctcttgtatatccccaaatgctgggtcatgtgaacacacacttaataccttgagatatgcagaccgagttaaaagtctatccaagagtggaaatcctagaaaggaccaggccacaaatccagtaccaccagcaattaaagaggtttcatccacatcttcacttccagctagtgttggtgcagatgattttaatggtcaatgtcaagaggtaaaaacaatggacatgggcaggaaagttgtcgaaaaggaaagttctttgtacagctccgctgctgatgttgacaaacaatcaagtttttcttctagttatccattcaatgggcgagaggaaaaaagctcaacttctgccccaatggacagggaaaggtttgaagtaaagaattcttacggtggtgattctaccagtcaaaagatgaactcttattccctaaatgttacagatgagaaagtgcaaagggtgtctcccccacgcagaaaagggactaaggaggagaaatctgaaagatctgtaaattgggtaaaacgggatgccaatggttctgatcattccactgcaagctccaagcagcagagcacaggaaattatagcattaccactggatcggggcagtctgaaacagaatcctcttctgatgtgaatatcagtgcaatacttgaggtttgtcaaatttttggatttcccttgtcccagtttaaaagttgattgtaatgcttttgagtatctgtttaatttgtacttctgcaggaggaagaagcactaattgctgctcataggaaggaaattgaagacacaatggagattgttcgtgaagaaatgaaactactggcagaagtggaccagccaggaagtcttattgacaactacgtaacccagttgagtttcgtgctttctcgcaaagcagctagtctcgttagtctccaagcacgccttgcaagattccaacatcgactaaaagaacaagagatactaagtagaaaaagagtgccccgttgagaggctccatttctcttgttcagtgatgatgtgtatgttcttgatgtaatatctccgtgtttgttagcaatatagttttaaaggcttttgttcattttattaaaaaaaaaaaaggatcttttgttgggtattcaaattaaatttactcaaatgtatatttgtccctcgtgtgatattgtgtccaccttaatgcccttgcaaattggatttaagtgtaaattattttttattcatccaggcttaatgaaacagaatcctctcctgatgggaatgtcagtgcagtacttgaggaggaagaagcgctaattgctgctcataggaaagaaattgaagatacaatggagattgttcgtgaagaaatgaaactcttggcagaggtggaccaaccgggaagccttattgacaactatgtaaccaaattgagctttgtgctttctcgcaaagcagctagtctcgtgggtcttcaagctcgtcttgcaagattccaacatcgactaaaagagcaagaaattctaagtagaaaaagagttccccgtcaataagagactcggtttctcttattcaacgtcatctgtattctcgtgtttattagcaatatagttgaaaggttttgtttgatataaacaaatcttttgttgaatatattctaattgaatttacttacatgtatatgcccttgtgtgagtcgtgtgacttttgggccacctcttgcctttgcaaatttggtgttatctatgtaggttatctgcttcgttgtcataaaaaaaaaaaaagttgtctgccccaaaatttttagtttgtgggcaaagtaataaataaaatagaatttaatgctgatacttgaaaaacaaattaaat

SEQ ID NO: 40282 - DNA, 268 bp, Glycine max
  unsure (1)..(268): unsure at all n locations
  Clone ID: PAT_MRT3847_136374C.1
ctcggccaccacccttnatctcccttttttttttattttttttccaaaccaatacagaaacttataaggtatacacgatctgtacaacaggattaacgctttctattgtactacaaacaattaattgtaacatgtcacatataacctatacaaactctaaagaatcaaaaaatgatcttccgttcaatgttttttagtctattcttaaaaaaatctacattttctcacaaaacatacataatctagcgattaaaagaatatccttaat

SEQ ID NO: 40283 - DNA, 382 bp, Glycine max
  Clone ID: PAT_MRT3847_136375C.1
cctcgagccgaatcggctcgagatgatggtaaccgtccaacttgtgaatgcctgagaggttaccttcctaagtctccggatcagtggaatatgtcaatttcaccaaacggctgtgttccaaggaataaatctaactgccaaaacagttatacagatggcttcttcaagtacgcacacacgaaaatgccagacacatcttcttcgtggtttaatacaaccatgaaccttgatgaatgtcggaagtcatgtcttaaaaactgttcttgtactgcatatgcaaatttagatattcgtggtggtggaagtggctgtctactttggtttaataatacagttgacatgaggtatttccctaaatttggacaagacatttatatcagag

SEQ ID NO: 40284 - DNA, 296 bp, Glycine max
  Clone ID: PAT_MRT3847_136376C.1
gtctcacctagcagaaacgggagaagagaagccgtggaatgattacagatcaaaccaagctccgacctcgagaccgattacgggaatagactaccaacaagagcaaacctaaggagaaggaatgggcagatagatgactaccaatgaccataaagaacgtgacaagaggaggaagcgacccacatataagatgggagcgaaagaataatgccagtatggcgggagagccttgcatggacagaggaaggaactgcgttgctagcatcaccgagggatgccagagagctccagctgcg

SEQ ID NO: 40285 - DNA, 564 bp, Glycine max
  Clone ID: PAT_MRT3847_136377C.1
caaacacaagaaccttgggaacctaatatctggtttgatttcatgttctccgctttgaaactgaaacctgcgagcgttggttcccgccttttttgtgttggctctctacaaacacaaatcaacaaaaccatatggcaccagttgaagtcacccactcaccaaacccttcaccatctcttggaccaatgttcctccatgaaacgactcaagcttgtccatgcccagatcattctccatggacttgcagcccaagttgtcacactgggcaagctactctctctctgcgttcaagagggtgatctccgttacgcacaccttctgttcgatcaaattccccaacccaataaattcatgtacaatcatttaataaggggctattcgaatagtaatgacccaatgaaatctttgttgctcttccgccagatggtgagtgctggccctatgccaaaccaattcaccttcccctttgtccttaaagctttgtgctgccaaaccctttctattggggaaagctgttatttgttcaatgctcaggctattaagctcgggatgggggcctcatgc

SEQ ID NO: 40286 - DNA, 150 bp, Glycine max
  Clone ID: PAT_MRT3847_136378C.1
cgcacttccaggtctacttctgttgtgtcagtcaccacagatagtttagctccactcgcctctcaccggaaccttaagttggtatgtacctttcttcttctcagctctgtgtaatgtttaaaacttgaagcgaaaccaattgccccattt

SEQ ID NO: 40287 - DNA, 591 bp, Glycine max
  unsure (1)..(591): unsure at all n locations
  Clone ID: PAT_MRT3847_136379C.1
ggctcgaggttcaccaagacacactgacgtacatgtttgattttgagctgtacgacttcgttgctgatccaaattttgatcagttcatcaatttgttccgaggagagaatgaagatgctaactgtgatcacttcggttctgaccttatcaatgattgttttgctaacaatcagcagcagctactttcatgtccagcaaacccttttgatcagaacaataataataatgctgtgaatgtctatgatccaagctccacatttagctccttctcttactatgatagggagctcaagggggaaggaggagaagaacttgatgaagaacattcttctgggacgatgacaacgacaactaacaatgctgttggcaaaccaaaagtaaaaactgatatgtccaagactctcatttctgagaggagaaggagaggccgaatgaaggagaagctttatgcattgcgttctttggttcccaacataactaagatggataaggcttctataattggagacgcagcatcatatgtgcatgaccttcaagctcgagctangaagcttgaggctgaggttgcaggacttgaagcatctttatagt

SEQ ID NO: 40288 - DNA, 358 bp, Glycine max
  Clone ID: PAT_MRT3847_13637C.1
tgctcgagccgggtcggctcgatcttttcctttggtcttctttccttctctgtctctctgcttgcttcttgttgttgaacctaaagaacaagatattgcttcttcttcccttttgttttcaaatttcaatttttcatcgggttctctgaaaaggtttctcttttcatgggtctcaactcaaaagaacctcttgctgcggcgaaagaggagatgcacgtttttggcttcgaaaactctggctccacaaatggtcgtgtttgccagtggcctttctccaacaaaacatctgcccttccacatttgatatctttcaaagccttctcaagattattagaccatcaaaatagagccctgttcc

SEQ ID NO: 40289 - DNA, 780 bp, Glycine max
  unsure (1)..(780): unsure at all n locations
  Clone ID: PAT_MRT3847_136380C.1
tcgagggataaactactataaagaaggtgattatctgtatccaaaatttgatgctgttgaggcatacagaaaggctataaagacctggggaaaatggatcgatgataatatcaatccacgaaaacagattgtctactatcgtggatattctaatgcccatttcagaggtggggactgggactcaggtgggtcatgctacggtgaaactgaaccagcttttaatggctctatcctgaataactatcctttgaaaatgaaggtagtagaggaagtgatccggggaatgaaggttcccgtaaagttattaaatgtcacaaagctgaccaatttccgcaaggatgggcacccatctgtctttggcaagaatacaatgggtggaaagaaagtctctacaaggaagcaggattgcagccattggtgtcttcctggggtccctgatgcatggaatgagctaatttatgccactcttgtttttcaacaaacaaattcatggaagtgacttacacaagttccttctttccaggactttaccttttccgcggcaaagaaggggaaaacaaaacctctggggccttggcttacattaaggtgattgagaacaatgaaaagtgtttttgcccgtggtacccctttgggtattatcgtgagattagttattcgggtaaccatggaaaagtgtacttcattgcacataatcaagtngaaagttagtataaaaattagtgatgctatttgttcattgctaaaaaaaaaaaaaaaaaaaaaaaaaaaaaaaaaaaa

SEQ ID NO: 40290 - DNA, 382 bp, Glycine max
  Clone ID: PAT_MRT3847_136381C.1
cgcgacacagatgactaggaaggcggcctttcgtttatttttgttgattcacggaaacactcacacatccacatccactatctcttattctcattcttcttatacctatcgaggacgaagaataatgatgatggagcaacttcaaacacccaccaccacccatattaacactgaattcagaaacctcctacttttatcaggggcgaggttttctacgaagacttcaacagcactagatccaccccttacgttagcgccccttggcagcccctgccgcggtcccctcccaggcttcttctacagcgctccggccagcccaatgcactccccattactgccgcattatcttaccagaacaccctttcttccccacctatgggct

SEQ ID NO: 40291 - DNA, 205 bp, Glycine max
  Clone ID: PAT_MRT3847_136382C.1
ctcaagggagcacactaatactgaattcacagaaaatagggaagggaatgagagaaccgggattgagtgtacgtatcacgccataaacacatgttagacccacagcggcctctaggaagacacaagatcccaacctgacttggaaaaacatacaggctttaaatgggcccggtacccaaccagctgtctgaaaactcctggatat

SEQ ID NO: 40292 - DNA, 161 bp, Glycine max
  Clone ID: PAT_MRT3847_136383C.1
gcgggtatttggatatgcccgaccctccgattgggccgtcgcaggcggcatggcctccgccgctcctatctccttctgggtgatggaaagagccagcccgtcgcatgtcggccgtgggtggttttgccccagtcatgcgcctcgccactgccgtcggtctg

SEQ ID NO: 40293 - DNA, 489 bp, Glycine max
  Clone ID: PAT_MRT3847_136384C.1
gaaattcttaaatgcgatcccgcgataagcatataatgtagtcacagtaagtgtttctacaactaaaccgaacagtggaagttgagttcatgatgttgcttggcacgtctagttactttttacagtcacctagtactatgggatcaacattggaatatcatcttctccccatgccttgcaggaagcgggacagtaatcctaatatacacacagaagtgttaccgtcaaacggttagtgattacaaacacacagcggaagaagaaacttgacctaggtcgacatagtccgggggtgcgcatcttaaagggtgcaatattcatatccttagtaagcctgctgataggtgagagccgaaacatttacataggcggcatatgcatgaggatagtacatgggagctgccggctaagaccatccaacatgtagtgccggcatcagtgaatacgcattacagggatgtgatgggggacttctgctggcatacatga

SEQ ID NO: 40294 - DNA, 364 bp, Glycine max
  unsure (1)..(364): unsure at all n locations
  Clone ID: PAT_MRT3847_136385C.1
cagaatcagaggaaagaagagaagaaagagtgggagagatctcattcgtagaaacggcgtcgttgcgcccacgtggacggtgctggtaaccccttcgcccagctaccggctgttaccgttaaatctcttacacgatagtatatatttttgatataatcgttccgttattagagaagttgagaaaatggacggccatatgggaatgaggaaaatcagctctcactgctctatccctgatttggatgattctgatatcttacgtttgcttgaaaagccaaagttgaacattgagagacagagatcanttgatgagaggtcactcagtgagctcttcattggtcttgcgagagcgggcttggataac

SEQ ID NO: 40295 - DNA, 784 bp, Glycine max
  Clone ID: PAT_MRT3847_136386C.1
ccacgcgtccgaaaatattgccattctttaatcctcactttctctccgtggatgccctaatttcgtgtagggtttgtcagccatgagtccgattgattctacgggtaacggtgatcgcaaaatccaccaagatttcgacttcgtcgacactcaaccattcgacgccgatggtgaggaggacgatgtttgcggattcttcgaggacacggtgcctttcggcgacgacggtgttttggagaccgaagcggtgaaccttgccggtgaaactcaggcattggatgatggtgatgctttcgacgacgacgacggcgttttggagaccgaagcgctaaaccttgccggggaaactcaggcgttggatgacggtgacacgcagttgctggaggaagagtcggattcggatagaacgcaagttttggagaatgtggatgatgacgacgttgatgaggtatctgtcggcaatgtcaatggtgaagccgtggatagcaagaagggtgaatcgtcacaacaaaacagttctggttctatgccaccacggtttactgttctccgtgcagaatccttgcggcaagctgctctagcctgcaacatggatttgaaagaaacccaggatgtgaccaattctgttgagggtacgagtcagttttgtcaggtaccacaggctgtaaaggataatggggggtcctttcttagatgttctgagaaggatgatggagttgatcaggaaaacaagcacaggaaatacagtgtgggaagtgggggggtttagagcaaaagtatgtgc

SEQ ID NO: 40296 - DNA, 2336 bp, Glycine max
  Clone ID: PAT_MRT3847_136387C.1
cacactcgtccgatttcgccattctctccgcgcaccgttttccggcgcagtcgccggcgagtcaccgtcgtttccgccggcaagtctctctcaccgttgccatcctccttcagagaagttgagaaaatggacggccatatgggaatgaggaaaatcagctctcactgctctatccctgatttggatgattctgatatcttacgtttgcttgaaaagccaaagttgaacattgagagacagagatcatttgatgagaggtcactcagtgagctctccattggtcttgcgagagcgggcttggataactatgacacttattctccaggaggaagatctggcttcaacacacctgcttcgtctacacggaactcgttcgagcctcaccccatggttgccgatgcctgggaatccctcagaaaatctctagtctattttagaggccaaccggttggcacaattgcagctgttgatcatcaatcagaggaagttctgaactatgatcaggtttttgttcgagattttgtgcccagtgctctagcctttttgatgaatggtgaaccagagatagtcaggaacttcttgttgaagacactgcatcttcaggggtgggaaaaaagagtagatcggtttaagcttggtgaaggtgtgatgccagctagtttcaaagttcttcatgatcctattaggaaaacagatactcttattgcagattttggtgaaagtgcaattggaagagttgctccagttgattctggattctggtggataattttacttcgtgcgtacacaaagtctacaggggatttatctttagctgaatcaccagattgtcaaaagggaatgaaacttatactgactctatgcttgtcagagggttttgatacatttccaactttgctttgtgctgatggatgttgcatggttgatcgaagaatgggtatttatggttatccaatagagattcaagcacttttcttcatggcattgagatgtgctttgtcaatgctgaaacaggatgacgccgaagggaaggaatgtgttgagcgtattgtgaagcgtttgcatgcactaagttatcatatgcggagttacttttggctcgacttccaacaactaaatgacatttatcgatataagactgaggagtactcacatactgctgtaaataagtttaatgttattcctgattcaatcccagattgggtatttgactttatgccaatgcgcgggggctacttcattggaaatgttagtccggcccggatggattttcgatggtttgctttaggaaattgtgttgcaattctatcttctctggcaactccggagcaatcaatggctatcatggatcttattgaatctcgctgggatgaattagttggagaaatgcccctaaaaatatcttatcctgcaatagagagccatgagtggcgaattgttactggttgtgatcccaaaaataccagatggagttaccataatggaggatcttggccagtgctcctgtggctagtaacagctgcttgtatcaaaacggggagaccacagattgcaagacgtgcaattgaacttgccgagagtcgtttactgaaggatgggtggccagagtattatgatggtaaacttgggagatatattggcaaacaggcaagaaaataccaaacatggtctattgcaggttatctggtggcaaagatgatgctggaggacccctcacacttggggatgatttcccttgaagaagacaaacagatgaaaccggttattaaaagatcatcttcttggacttgctaaattcaggtgatagataaatagtataaaaaacgaatagagaaaaacttagaaagtgagagatattgttgtttcaatacacggcactattcttggtgattcccttcctcgtaggcttgattggaagtttggcttgcttgtgtaaaatagctgctgctgagactggcttcatgcttttcccaaataagtaaaaagacacttcagttcatgtttgctaagtttcaatgctaccgtcccacttgttgcgtgggttaattagtaagataagagaaatcatgaaacattcttcattttattattgtgtttccttatagtttgtcaataaggcttcttttaaaaagggcctagaacaggaaagtattagctttttcatatgaaactttaggtctactgcccacattgctaaaaaaatatggtaaattatgatttttcttttttaccatttttcgttaataaagtctactttccgttgagttttttagctgctgctgagactggcatcgtgctttccccaaataagtaaaaagacacttcagttcaaaaaa

SEQ ID NO: 40297 - DNA, 347 bp, Glycine max
  Clone ID: PAT_MRT3847_136388C.1
aatgcataaaggctttatatatgaattattgtttttataaaagcatgcatacgtatgggctgaatatataacaagaggtgactttaactgttttctgatatgaacaggattcaatataattgaacccttttataactaaatattctcatcacataaaaatatacctataattcactctaataaaaggtgtcattggggaaacaattatacagttagatcagccaagttaaaatcatttttcaagatcaaaccatctgagacattatccatgcttgtaatgggaggccttatttagttacccaaactttgaagaaaaacactggtgtttacataattaaaagagtaac

SEQ ID NO: 40298 - DNA, 850 bp, Glycine max
  unsure (1)..(850): unsure at all n locations
  Clone ID: PAT_MRT3847_136389C.1
ccattcccaacttttgaattcacagaatcagaggaaagaagagaagaaagagtgggagagatctcattcgtagaaacggcgtcgttgcgcccacgtggacggtgctggtaaccccttcgcccagctaccggctgttaccgttaaatctcttacacggtatccaactgtcagaaattaaaagtaaaagttaataaaaaaaacaaaaaacaaacggggtaggacggtacggtccgttggttgcaccctctccaggactctctttctaccgttcgtctccttctataaataacggcttctgagctactgctcattttttcccttctctttctctccatttcgccattctctccgcgcaccgttttccggcgcagtcgccggcgagtcaccgtcgtttccgccggcaagtctctctcaccgttgccatcctccttcagatagtatatatttttgatataatcgttccgttattagagaagttgagaaaatggacggccatatgggaatgaggaaaatcagctctcactgctctatccctgatttggatgattctgatatcttacgtttgcttgaaaagccaaagttgaacattgagagacagagatcatttgatgagaggtcactcagtgagctctccattggtcttgcgagagcgggcttggataactatgacacttattctccaggaggaagatctggcttcaacacacctgcttcgtctacacggaactcgttcgagcctcaccccatggttgccgatgcctgggaatccctcagaaaatctctagtctattttagaggccaaccggttggcacaattgcagctgnntgatcatcatcagaggaagtctga

SEQ ID NO: 40299 - DNA, 420 bp, Glycine max
  Clone ID: PAT_MRT3847_13638C.1
gggatagagtagggaaatttagttagcaactgtcagagtggttagttagaagggttaaaataggaggatataagggaagggagatcattctgttttgtactaattgtgaactgagcattatatttgtgtgaaagaggaaaccctttgttgtgaagggattaaaccttggaggaagatatatctcctttgttctgttcttctgcaatcaagaaatagaatatttcttttcttttgtctattttctgatcttggttccaaataatatgttagaactgtgattttattgatgaatcctccaaggaggcaatgagttcccttgaggtagagaagaattacagaaagaacctgataggaatgttcgagtgcctatcctttcccctaacctctttctaacagactaaccgaatgccctcgccctcc

SEQ ID NO: 40300 - DNA, 316 bp, Glycine max
  Clone ID: PAT_MRT3847_136390C.1
gatacttcagttggaaaaacagttagatgccaaacaaaatttggaaatggaaattgaaaagttaaaagggaaattgcaagttatgaaccatcttgaatataaagataatgcagctgttcacaataaaataaaggagataaatgataaattacaagaaaaagtagacaatttagaaaatatagaagccataaatcaaaccctcatcataaaagagcaccaaattaatgatgaactacaagaatctcataaataattaataaacaaattagacaatatgctaaataatcctacaactaatgttgggctcaagagaatg

SEQ ID NO: 40301 - DNA, 557 bp, Glycine max
  unsure (1)..(557): unsure at all n locations
  Clone ID: PAT_MRT3847_136391C.1
acgcgtnacgctaagcctcggtaattcaggctcgaagggttcaatacacggcactattcttggcgattcccttcctcgtaggctagattggaagtttggcttgctcgagtaaaataactgctgtgagactggcttatgcttttcccaaataataaaaagacacttcatcctgcctgctaagtttcaatgctaccgtcccacttgttgcgtgggttaattagtaagataagataaatcatgaaacattcttcattttattattgagtttccttatagtttgtcaataaagcttctttcaaaaacggcctagaacaggaaagtattagctttttcatatgaaactttatgtctactgcccacattgctgaatgacctacatgctttgataagtccaacaccacaaggcactcccctccccctaattctagtaaaaaagggccgccaccgcactaggatcctctctccccgggatttatttccggaccgggccctgcaggccaaccatcttcccctataaagagcgcacttaaatcttggcccaaatatggccataccgg

SEQ ID NO: 40302 - DNA, 411 bp, Glycine max
  unsure (1)..(411): unsure at all n locations
  Clone ID: PAT_MRT3847_136392C.1
aaaaagatgaaatttataaatccagaaaagcacatagcaaaaaagaaccgaaatttaatctgataaacataaacgatacctagggtcatgccccactccaatcattacatgacagacattaaaaacgcatttggcgggggaataaaaagaacccagttttgtgtacaacagacgccctgatgaatgctggagactacaaactgtgcccgcaaaacaatctacctacatatgaataaacacagttctaagaacaataccatccttgattgtatccatcatcccttgttgaaccaacccgcgcggttcaattttttgtctgggcctcctctttgaccttcgtttcgggcggaccctttttccctccagcgttgntgactgcctaccgctgcagtctgtggcatggccctgtcg

SEQ ID NO: 40303 - DNA, 556 bp, Glycine max
  Clone ID: PAT_MRT3847_136393C.1
cacgcgtccgcacggctcagtgtccaattccgacaaattgaggctctactcgacagaacaactacccatgatttcattcgaccttcgattcctcttccgcttcaactcttcgttcctcgttcgctgtccatttcgttgcaatcttggttcttgcgttttctttttctcctgaatctgggtgcttcaatttcggtgcaaactggctatggactacgaaccctactatagtagcggaactgatgatgatcttccaccaacacatccaaatagaatccccagaggggaacgtcttgcaggaaatggaagattgccagcaggttcaattccatacccaaggatgcatggtgaaattgatatggaaactcaaattcaccaacttgagaaggaagcatacagttcaattctacgggcatttaaagctcaagctgatgccatttcttgggagaaggaaagtttgattacagaacttagataagaactaagattatcaaatgaggaacacagagaacttctacgtcatgttaatgcagatgatgtcatacaaaatataagggag

SEQ ID NO: 40304 - DNA, 369 bp, Glycine max
  Clone ID: PAT_MRT3847_136394C.1
gaatgagacaaagagcgcttgaggaaccttacaaattgcccctatgaattaacgatacagtgagccacccagccccatcagattacagcatacaacaagctacttctatatacgccatgccagacaccgaaaacggaagaagaatttggttgctcgaagatatatcgggccaagatatcccagaaacacatacgcttgatcaacaactcgtggggaaggatgctgaaaacatccagcgccgatgacaaagaatacataagacaaatgcccgatgcccaactcacagtggacgttgaaacgagatggaaaacaaattgccgaccatgagaacaatgctagaactctatggagactgtgcctgatcaaggg

SEQ ID NO: 40305 - DNA, 328 bp, Glycine max
  unsure (1)..(328): unsure at all n locations
  Clone ID: PAT_MRT3847_136395C.1
gggtatgtaaaaatttaggtgaattagattttggaagtacagactgttgactaactatgttctcacattgacattgagatttaaattcatgtcctcatgagatatgagtttgatcttcctggttggaccaacctttgttagcctcccgagagacttgatggttaagagcattgatctctctcttgcattattgatactagaaatgatgtggggtattgctaatttgttgccgtggcatatactatgaagataatgtggggtattgttaatttgttcttattcatttgaagttttgtttgaatttnttattttgattttgatatggtgg

SEQ ID NO: 40306 - DNA, 160 bp, Glycine max
  Clone ID: PAT_MRT3847_136396C.1
ctgtattatcgcgtaaacaacattgttgttcaactctctttaatttaacccaacactcatttcatggggccctatgacgataacatccgcgtcaaaacaatcactattcaatcaccacttattcagccttcctctattcttctcgttctatccattcaac

SEQ ID NO: 40307 - DNA, 234 bp, Glycine max
  Clone ID: PAT_MRT3847_136397C.1
cccactcgtccggaggaagtagatcatcttaatgcatttccggttgcttaatgctccggacaaacgcaatgatcaaaggaaaatgctctggatagaataatgatgctcccattctatgatatgtaatcaattccaaatcattatctccatataaatccttcttaatttgttcaaatccccttgaacaaccagattcaaacaaatttttacctaaaacctaaccctaatcttttt

SEQ ID NO: 40308 - DNA, 427 bp, Glycine max
  Clone ID: PAT_MRT3847_136398C.1
tcgttttcgcgtacgatgacaccgagtttgtgtgggtcttatctcaatccgtcaaccaaaccgcccccaacgcacgcgctgttttgcagtcgctgtacacgacaggacgccgcatccgctataatatacactcaatgcgttaacggaacctaccgctatggataccgtcggcatcatgctcctatgctaccacgctatcaacaatgctaatggagccagtcacccccgtacgctaaacggcggcttaattacggaattagaccactcatgcatgctgtgaccacactacgtcgagctaacaagatacatctatacattgactgtgcgctggccatagtatgacactgaaaggagtgatccctcgaccatcaatacacctgcaactattgctcatgtactgggcacgatacgcaaaaaaggagcatgg

SEQ ID NO: 40309 - DNA, 484 bp, Glycine max
  Clone ID: PAT_MRT3847_136399C.1
ataaaaatagataatatcctctaatatatttgatttgatttagggttaccgaaatttaaatttgaaatgaaaaaaatcatttgatttggtaacaaataaaactaaaagtataaaacaaatatttctattattttgaattttatttcttatgattaggtaaaagaaatgcttaaaaaattatattttaagcatatctctgaccttttcttttgaattacaattcgtaataatggttatattttctttgatctgtcttatgattctgcctgatgagataaagtgtctatttttgtttcaacaaaaatttaatttcttaagatcgcagcaaaagaaaagatggaaaataattactgtcttccggttcttgaattagaagcaacaatcacagacgtgttttctttatatgtgcctaatagatgagttaatggcgcatcaaacttataaaatcctttggcatgcggtcacatataaagttttgaatttg

SEQ ID NO: 40310 - DNA, 351 bp, Glycine max
  Clone ID: PAT_MRT3847_13639C.1
ggaatacacaaaaaaattaatacagggatttttggtaaaaaataatatataacttactgattttcatttaactgaaacagaagaaaataacatatctatcatatcttactgggagtaacaagataaaaactaaaccttttaataacttgcagccctcatggaaacaaatgaatttatattttccttaacaataaggttattgaccaaaggaaatagaattggactttgaagcttcactttcacacaacaatcttttgattaagtgaaaaaaaacctgataataacaccaccctgaaatagataaacacttctcaagaaaatacgatgtaccctggcatgtaaaaaacactt

SEQ ID NO: 40311 - DNA, 426 bp, Glycine max
  Clone ID: PAT_MRT3847_1363C.1
ggaaaaaatgcggtccaagggggagaggaccctcccccctggaaaaaacactcagctattctttttctcccaaacatttttggttaggagcataagcccgcccgtcctttagaaacccttacccccgtttttgagttgcaaaaagctttttcccccacgggggccttgaccgaggctaaagggatttattttgggggtgtttggtagtatgatgtacggccaggccggcccggcaaaaaagattcccctttctttgagaaacaaaatttttcacccctgatagggcagcggacaggggatgctttacaggccgattccctttttgcgctgggataccccacacaggatgaaagggcccacaaaaaatgtgaccgggcaaacaagaccctttggaaagctggcaggcctgcagccaaaattggggga

SEQ ID NO: 40312 - DNA, 432 bp, Glycine max
  Clone ID: PAT_MRT3847_136400C.1
gtgcaatcataagaatgatgctctacttgatggcagtgatataaatgggaggcgggagaagcagaggctctagtatgtgaagaacactgcacagcatgctgctcagccctgttatactatccgatttaaaggatagcgagagctcaggtagaggcagaatatatatataatcttgtatacgatcagaggcacttcttaagttacttggcattattcatgtgcacgatatgatgatgccattggcgctgtggctgatactgttgctgatcacgtgtagggtttccctatatcgatagtattaccgtctagtggaaaaacatgtcttgcaagagttgagcattacatagttatgatatatacatagatacacatgtatgtatatccacaaatgctataatgagggcggccggacactactgagctcagtaaccc

SEQ ID NO: 40313 - DNA, 211 bp, Glycine max
  Clone ID: PAT_MRT3847_136401C.1
catcatgaaaggaggaaagaccaagaccttatctatcaaagccggtgccaaacttgccgcgaataatacgggcgcttccaccaagactaggaaacccgtcagaaaggcgaaagcaaactatgattctaacaaggcaaacaggcctccaagagcttcgttggttaccatggccgaagccaggaaggtgcctaacatggaacatggctgacaa

SEQ ID NO: 40314 - DNA, 283 bp, Glycine max
  unsure (1)..(283): unsure at all n locations
  Clone ID: PAT_MRT3847_136402C.1
tttacttctttagctttctgctcaaagccatcatctatcatcttcatctatgctacattattagcatcgaaaaccgggacaataaatcacnaatcaataaatcaaatgcaaattaaagaagctttacacagctcatatattgaaaataaccacaattatttagacacagaaaagaaaattaacttaaatatacaattcaatatttagacacangaagaaaaataaattgaattaaatatacaattcaatcactagaacaggaagttaccccaacaaaaacata

SEQ ID NO: 40315 - DNA, 260 bp, Glycine max
  Clone ID: PAT_MRT3847_136403C.1
aacttcatttcattcatttaagggcccggccgagaagtaaaatttcttggccaggaccacccactaccatataaatttcaacaatgacccaaaaaaatatttcctcatgttaatccccgcaaatacatcaatcttctttgcgtcccttttttaaaaaccccacatattgggtgtcccgcaaagagcccccccaccccttggcaatggggccccctgtaacctgacccggaaaaacaaatgcatcaacaagttcccttgca

SEQ ID NO: 40316 - DNA, 296 bp, Glycine max
  Clone ID: PAT_MRT3847_136404C.1
acctaaccctaaataatctctatgaaactgggtttgaattttataatctgctccatcatttcggcattgtttataactcatgtcgattatgcaaccaattatatatcttattaaagcttttgaattaaccttcccttcaattaaaacttttatacaaacttgtctaacaccaataaattcttcgttggtgacaatctcattttcatcatagacagactccattatcttataattataacctaggctacttattatgacaattgcaacaccagcttattaactggtttcacgttcat

SEQ ID NO: 40317 - DNA, 678 bp, Glycine max
  Clone ID: PAT_MRT3847_136405C.1
tgtacatcagtttccatcgtgggttggcaaacatgctgtttgttgtacactttggtttgatttgcaagtcagtgcatcatcatttttaatattaaagatgtttttttttccttcaaacttttttctattaaataaaattgtggtagtaggaaaggtcctagtgggataaggttttgttgttgttgaggtaataggaaaggtgtataaagatattaaagaactcatctgggtctatttcttgctctcattggtaccatattcttttcatagaaaggaattagttatattatttttacacacttttttacctctcatttttcctcattcatcttattccatctctctctcttttttgttttcattcttagttgtaattaaagattgtataaacttgatatacgtacaaacaaaaacgaagaatattagatataagatgaattaggaaaaatacaaaaaggaggttgacaagtcatcctccaaaattgatatttccatagcattcttttgttgcttctcttgttgatcgatttccttatgttgtaatatactgtctaatgcattttaaaacactatattcaaattatacatggaatgtagtgtagaaaatttaatatggagatttgtaactttttttggttatttgtttatttcccaatttgtataaggaaaagcataaaa

SEQ ID NO: 40318 - DNA, 464 bp, Glycine max
  Clone ID: PAT_MRT3847_136406C.1
gaaggatctagatcttgctatctgacataaaaattaccagcatggcttacactgcagttgccatgcctacatctccagcagctacctctgcaactatggacattgcaaaagagcataatggtcttcgccgctcgcaatccagcaaagaactatgcacacgttccattatgcggaggtcttattctgacaaccacctatgttgctccatcaatcgcatacaagccacatcagtgccgccaaaacttaagagcaatcgatcaatgggcatttccccatttcaattttcaggctccatgcttccaaattcactgcgctccttcttgtttgacccagaaacaagcaaggatgtaagtgtggaggagaaggttgtaagtattgaggaaaacatggtggaaagcagcaaagaagagatagcgaatagagccaactgggtagagaggcttatgggaatcaagaaacattgg

SEQ ID NO: 40319 - DNA, 283 bp, Glycine max
  unsure (1)..(283): unsure at all n locations
  Clone ID: PAT_MRT3847_136407C.1
aanaacgccttctcaananaggatcaacaaatttctgtcacttccagaggtnganattccnattctggcntgaattctgaanatggatgaaanatcaggactannnagatatttnttggngggttgcctcccaccctgactnnagannnatttcggctgtactttgagncntatgganatgtaactgntgtagtagtcatgtatgactngaatactgggcgtncacggggatttgggnttatttcatttgatactgaggnggcagttnatagggtttncacac

SEQ ID NO: 40320 - DNA, 171 bp, Glycine max
  Clone ID: PAT_MRT3847_136408C.1
tttaattgttggcgaatgggtggctcttagcttggctattgaccttcgactgcgcgggtttttaggtcgcgatactggatgatggatgctacggatagacaactcttgagtaagagcctggtagcgagtaattctagcatataaaagacccaacaagagaaatgaaggttt

SEQ ID NO: 40321 - DNA, 2673 bp, Glycine max
  Clone ID: PAT_MRT3847_136409C.1
tttgtagaagtagaagtgttgatttgtaattatatacaaaagctatgataccgttggtgcaaaatccataggatgaaaacgcagtagataatgcgacataatgtgacaagtttagaaaattgaaacccgtgcgactatatatctttcaagcgaaaatatttatgtgtccaaagaatgatccatttgttagagttcaccaccacccagcaagtggagctgaggatataaaggaaactggatacacctatattatgccaaagagttcacatatatatggttcacacgaaggtataaatttgaactctgaggatataaaggaaactggatacacctatattatgccaaagaacattttgaaaaagtttatatgcatagcagatcttcgaacacaaatttctgggtacatgtatggcgtaagtcctccagataatcctcaggttaaagaaattcgctgcattgtgatgccaccacaatgggggacacatcaacaagttcatctgccatcagctcttccagagcatgatttcttgaatgatttggagcctttaggatggatgcatactcaaccaaatgaacttcctcagttgtcgcctcaggatctcacttcacatgccaagatcctagagaacaataagcaatgggatggggagaaatgtattatcttgacttgcagctttactcctggttcttgttctttaactgcatataagctcactccatctggttacgaatgggggcgtgtaaataaggatacgggaagcaatccacatggttaccttcccacccattatgagaaggttcagatgctccttagtgatcgcttccttggtttctacatggttcctgataatggtccatggaattacaacttcatgggggtgagacacgcatcagggatgaaatatggagtgaagctcgggactcctagggaatattaccacgaggaccatagaccaacccatttcttagagttcagcaatatggaggaagtggagacagctgctgagggagatcgagaggatacattctcttgagagataaaaatatttttgtttgagatatataagtggcaagtcctttaattttttaaacttgtcataatatgttgtatcatctactgtttgttcatcctagggattttgtaacaacggtataatagctctgtacataattactatctgcttctgtatttctaccgagctgagtttttggccaagcaaaagcaactacatgagttgatttaaaatgttgcttaaacctttttatactatcatcactgaaccttatcacatctggccttctctaagtgatgatcaatggatgaaggtggaggttgcattaagagatcttatactatcagattatgcaaagaaaaacaatgtgaatacttcagctttgactcagtctgagattcgtgatattatacttggagctgagattactccaccttctcaacagcggcaacagattgcagagattgagaaacaggcccatgaagcaaatcaggtgacagctgtgacaacaaagactacaaatgttcatggtgaagaacttatagtaaccaccactagtccttatgagcaagctgcttttggttccaagactgattggcgtgtccgagcaatatcagccacaaatttataccttcgtgtgaaccatatatatgtgaactctgaggatataaaggaaactggatacacctatattatgccaaagaacattttgaaaaagtttatatgcatagcagatcttcgaacacaaatttctgggtacatgtatggcgtaagtcctccagataatcctcaggttaaagaaattcgctgcattgtgatgccaccacaatgggggacacatcaacaagttcatctgccatcagctcttccagagcatgatttcttgaatgatttggagcctttaggatggatgcatactcaaccaaatgaacttcctcagttgtcgcctcaggatctcacttcacatgccaagatcctagagaacaataagcaatgggatggggagaagtgtattatcttgacttgcagctttactcctggttcttgttctttaactgcatataagctcactccatctggttatgaatgggggcgtgttaataaggatacgggaagcaatccacatggttaccttcccacccattatgagaaggttcagatgctccttagtgatcgcttccttggtttctacatggttcctgataatggtccatggaattacaacttcatgggggtgagacacgcatcagggatgaaatatggagtgaagcttgggactcctagggaatattaccacgaggaccatagaccaacccatttcttagagttcagcaatatggaggaagtggagataactgctgagggagatcgagaggatacattctcttgagataaaaatatttttgtttgagatatataagtggcaggtcttttaattttttaaacttgtcagagtatgttgtattatctactgttttttcatcctagggattttgcaacaacggtatcatagctttgtatataattacgaatcaacaattctacttctacaaatatctgcttctgcatttactatatatccaattttagcaaattatgaaaagacgtaactgaataactgtacgtggtcttttggtaaaatattctaattcattgaatt

SEQ ID NO: 40322 - DNA, 656 bp, Glycine max
  unsure (1)..(656): unsure at all n locations
  Clone ID: PAT_MRT3847_13640C.1
aagacttattagaaaaggtggtaaagccaaaatgtttaccacgcgtccgggttcttccatcttttggttagtggaccctaactaactgaagatcaatggtttattgttcatgttcaagaaagtttccattaaagaaaaaagaaagaattgaagaagaaaaagaagaaaagttgcagtgatggtatcgagaaacgtgtccttgaggcaaatattcgcggagaggagcaaggaaagactcctctcgcgccatgagttgccgctgaatggcagcaacaacagagctgggggaattctgcgtgtccttgcagatcgtactgcgacggtctacaagggcgtgtgcgagttcttccggcagctccaggagatggcgcggtcagatcggcggaaggtggcgttcgcagcaaaggcggggctttcgctggccctggcttcgctgttcatttacgtgaaggaggaacagttgagcaagtactccatctgggctgttctcactgtcgttctcatttttgaattcagcgtangtgcgacattgagcaaagggttgaatcgttctttcggaacgctttccgctggagggcttgctctcggaattgctgagttggccattttaaccggagacttcgaagaactattatcgtactctgtatatttattgc

SEQ ID NO: 40323 - DNA, 1195 bp, Glycine max
  Clone ID: PAT_MRT3847_136410C.1
cttcctcttctttttccttctttctccacaagaagccacacacacctctgtttctttctctgctccacactttctcttcctccattattgagcttccactagtttttttttctttctttctttctttcaaggacttaattgcactgcttaaagtctcaagctttacaacttttggaagacacccatcaaaccattttttgcagccatcacttacttgcccaagaagagaggggctttcttttggtttcaaccattttctgcttttggcttcaaaaggaacatcatagatgatagccagctccttctgcaatgctgattctatgttttcaagagaagaggggatagatgttagaaagatgatggaacataaaaggagcccctgctctgttgaccaaagcagttatacttctattgcctccaaaaggcaaaaggctgatttatcgatcagcactaaggagaggaaggaaaagattggcaaacgaattgttgctcttcagcagcttgtttcaccatatggaaagacagatacatcttctgttctaaaggaggcaatggaatacataggattccttcataaacaagttaagctgcttagtgctccataccttgaaagttcaccagcagcaaagatgcagggtatggagccatgcagcctgaggagtagagggttatgtcttgttcctgtgtcatttactattggagttgctgagaccaatggtgcagatatctgggctcccattaagactactacttctcctaaatttgagaaggatgtctcccaatttcattgaataattttctcacctttacagcctaaaggttgctaaagttgctaaactagcatgaaaatgattatgatcatacatctagatggaatcatagtagctatatatatatatatataatagttatatcattaaaaaaaaactctagtcaagaagctgtcccacacctcttagattttaaacgggtgatgggggtaagcttccaattagccatatgtgcccttaattaattaattccatgtgctgattattaagtgtatatttgaaaaattctagttgtataatgtttccatgtactgattagcttaatgaaagtcgtttctagatttgatgtaaaaaaaaaaaaacaaagcttaaaagaaacaaccaaaacaaaaaccaattaaaaaaaataaaaagtaaacggccgg

SEQ ID NO: 40324 - DNA, 144 bp, Glycine max
  Clone ID: PAT_MRT3847_136411C.1
acctacgctattgcacctaacttcgcggagcttttttaaaaagtggtgactacacttatattattactaaattctcttacatctacatataaagtctcagttgctattatcatgatctacatatctacttcttttattctcaat

SEQ ID NO: 40325 - DNA, 1450 bp, Glycine max
  Clone ID: PAT_MRT3847_136412C.1
aaaaacctctacctctgcatcgtcccacgtggcagctgagttgagatatcaagcagaagaagcactctggttctgaggcgcaacctcgtcccaacaaccatggagatgactactagcactctggttcttctgaggcacaacctcgttccaacagccatggcggtccctgctacatcctcagcccctgtccttcgacccatccccaccaaccgttccttctcttccccattccgttcactccccactcccaccacccgaaaacccctaaccgtcttcgccatggcccctaagaagaaggtgaacaagtacaacgaaaactggaaaaaggagtggtttggagcggggatattctacgaggggagcgaggaagtggaggtggacgtgttcaagaagctggagaagaggaaggttttgagcaacgtggagaaagcaggcttgctctccaaggcagaacaattaggattctcgctctcttccatagagaagctcggcgtcttctccaaagccgaagagctcggcttgctcagcttgctcgaccgagccgccagcttctccccctccctcctcgcctccgccgccctccccgccttcgtcgctgccattgccgccattgtgctcattcccgacgactctgccaccctcgtcgccgtccaggctgttgttgctgccgcgctcggcgtcggagccgtcgggcttttcgttggctccgtcgtgctcggcggcttgcaagaggctgattgattgaatggtgtgggaatggtatgtggatgaattcatcttagattttttttttttgtctttgtagttgtagaattgaggaggagagattatggcagtttcttttggtgtaaaaaaattgtaataaaaaaaatgaaatgacaataattgactggaaatggttgcatacaacaaaatgtagtgtctctgtctcttctgaatgaatgaatgctgttttctgatttatgtttcttaaaaaaaaaaaaaaaaaaaaaaaaaaaaaaaaaaaaaaaaaaaaaaaaaaaaaaaaaaaaaaaaaaaaaaaaaaaaaaaaaaaaaaaaaaaaaaaaaaaaaaaaaaaaaaaaaaaaaaaaaaggggggggccgttttaaaggatcaaagtttacttccccgtgtttgcaaggtaatattttttttttggggcccccaaaataaatttcccgggccggggtttaaaaacgtggggacgggaaaaaccttggggttcccaaatttattcgctttgaaaaaaatccccttttccccagttgggttaataccaaaaaggcccgcaccaatcgcctttccaaaaatttgcccaccctaattggcaattggaaccccccctgtacgggccctttaagcgcgggggttgggggggttccccccaggggacccgttaaatttgcaagggccttaagcccggttcttttggtttttttcctttctttt

SEQ ID NO: 40326 - DNA, 162 bp, Glycine max
  Clone ID: PAT_MRT3847_136413C.1
tacgtacactcgaatctccgatcgcggccgcactgttgttcctttttgaggaccagtagtccatcgcggtgaattcggctgcgaacgacatagttcgtcgcgaccgtcattcaatcatgaggtcaacgtcgggcgcagtaacgaaggttttggttgaccgtc

SEQ ID NO: 40327 - DNA, 933 bp, Glycine max
  Clone ID: PAT_MRT3847_136414C.1
tgctctctcttgatcgacccacgtggcagttgagttgagatatcaagcagaagcagaagaagaagaagaagcactctggttcttctgaggcacaacctcgttccaacagccatggcggttcctgcaacatcctcagcccctgtccttcgacccatccccaccaaccgttccttctcttccccattccgttcactccccactcccaccacccgaaaacccctaaccgtcttcgccatggcccctaagaagaaggtgaacaagtacaacgaaaactggaaaaaggagtggtttggcgcggggatattctacgaggggagcgaggaagtggaggtggacgtgttcaagaagctggagaagaggaaggttttgagcaacgtggagaaagcaggcttgctctccaaggcagaacaattaggattctcgctctcttccatagagaagctcggcgtcttctccaaagccgaagagctcggcttgctcagcttgctcgaccgagccgccagcttctccccctccgtcctcgcctccgccgccatccccgccttcgtcgccgcaatcgccgccgttgtcatcattcccgatgactccgccgcgctcgtcgccgtccaggctgttgttgccgccgcactcggcgtcggcgccgtcggtctgttcgttggctccgtcgtgctcggcggattgcaggaggcggattgattgattgattgattgattgaatgatgtgggaatggtatgtggatgaattaattttagaattttttttttttttttgtctttgtagttgtagaattgaggagagattatggctgtttcttttggtgtaaaaaattgtaataaaaaaatgaaaatgccaataattgactggaaatgggtgcatacaacaaaatgtagtgtctctgtctcttctgaatgaatgaattgctgttttctgcc

SEQ ID NO: 40328 - DNA, 411 bp, Glycine max
  Clone ID: PAT_MRT3847_136415C.1
ggaacctttgggctgatttatgtgcttgtttatgtgcttgtggtcgtgagaagatgatcagaggggagtccccgactcccgcgcccgcgtcaacaacaatcccgagccctacgacgtcccgcgtagaggtgagaaattcatacgtcccctagtaataggtaacggaacacggcgtcgtcggcccgtgaatgtaaagcctacactaactaataacactcatcccggaacgccgtgcacgggatcggcctttttactcgggtgcctcatattaacctaatctcgtcagggtacgtacacaccgtaatcatgaagcctaaagtcaaccctcttacactaccaaccacgcccgcagctccccaaaccacagggccgacccccagactcacaaacgaaaaaagaaacgcaccccca

SEQ ID NO: 40329 - DNA, 761 bp, Glycine max
  unsure (1)..(761): unsure at all n locations
  Clone ID: PAT_MRT3847_136416C.1
ccctcatcacaagcctttctctacagtgtagtttacgtttccatggctcaccttgctgatctttgtcaaaagctgaaagtcatagagcaatgtcaagtttctcctccaccaggttcggttcctccaacctctcttccactagccttccttgaccttccttgggtttactgtgacacagtgcaaagcattttcttctttgagtttcctcactcttgtaaccacttcttgcaaacagtgcttccaaatctcaaacactctctttccctcactctccaacaattcttccccttcgttggaaaccttgtgatccctcctaaacctaacttccctcacattctctacacctctgaaaactccatctccttcacgattgcagaatccactgccgactttccacatctcatagctgacaccgctagagatgttaaagactcgcacccttttgttcctatcttacctaccccaactaccaaagaagatggcacatggttgcttcctcttatggccattcaactcaccattttccccgagtatggcttcagcatttgcatcagttttagacacgttgttgctgacgcaagagcattcttacatttcatgaagttctggtcctatgtttgtaggacaaaacatgacgtggcagctactcaagatttgttaccactgctcaacagggacatcatcaaagaccccaaagggcttaaattcgttntctcggaggaactatggaattctcctatagaaagcataataaaaacacc

SEQ ID NO: 40330 - DNA, 355 bp, Glycine max
  Clone ID: PAT_MRT3847_136417C.1
cctgtataccggacagccgtcgcccttttttttgcgaattttatgtttggcacaccaacactagacgcagacaccaggagggtaataattattaaaacaggcctcactttcctctcgtttgctacagaactcaatatcagatcttctcctaggttgctgaaaaccatcccagtcatcttatagtcgagacacacaagcacttgtaccttgaaacccatgctggacttttaacatatttcctgccccaatgctaaactgacggggctgtaacttctcttatgcactgacggcctattcaaaagtgttgctatgaggatcctctctagaatctcctcaaaaacaggggaatcacact

SEQ ID NO: 40331 - DNA, 820 bp, Glycine max
  unsure (1)..(820): unsure at all n locations
  Clone ID: PAT_MRT3847_136418C.1
ttgttcacgcgtccgcccacgcgtccgcccacgcgtccgtccacgcgtccgcccacgcgtccgcccacgcgtccgcccacgcgtccgcttcctttccttcttttcactacttgtctcttcccttttttctttccagaacaacagaacaacagagcaaaaagctccaccaatggcgggttacagagccgacgacgactacgactacctcttcaaggtggtcctcatcggcgactccggcgtgggcaagtccaacctcctctcgcgcttcaccaagaacgagttcaacctggagtccaagtccaccattggcgtcgagttcgccacccgcaccttgaacgtcgattccaaagtcatcaaggcccagatctgggataccgcaggccaagaaaggtatcgtgcgatcaccagtgcttactatcgtggggcagttggtgcacttcttgtgtatgatgtcactcgccatgcaacatttgaaaatgttgacagatggctgaaagaattgcggaaccacacagacgccaacattgttgtgatgctagttggcaacaaatcagaccttcgtcacctcgtagcggtgtcaactgaagatgggaagtcctatgctgagaaagaatcactttacttcatggaaacctcagctctggaggctactaatgtagagaatgcatttgctgaagttctgactcaaatctaccgcattgttagcaagaaacgcgtagagggggctgaaaatggaactgcatctgtgcctgccaaaggagagaaaattgatctgaaaatgatgtgtctgctttgaagagagtngttgctgctcagctaa

SEQ ID NO: 40332 - DNA, 271 bp, Glycine max
  Clone ID: PAT_MRT3847_136419C.1
cacccacacatacagacaaggctattccattgttaagcctctctctcgcttcgggttcttgttaaaccaagtgcgtcctcccaaacccattcaaaactcattcagctaacacccctctgacacacactccattccacccactacttgccaaactatggtaccataagtgctgatcaataaactgactcaaccattccattaccttatactaacaaacacaccacatattaactctgatcttcaagacctactcgacaatctcgcactcctt

SEQ ID NO: 40333 - DNA, 428 bp, Glycine max
  Clone ID: PAT_MRT3847_13641C.1
gaaaaaaaaccagggtatcccttgcggggggcccaaaacccagcccgggacccagacgggcgaaatttccgccccccccacgggacaaaacaaaaaggttcccccgatttccccaagggaaaagccccccgatgcctaaaaaaccgcttattccggggggcccttcccaaaaccagggcccaacccctgtttttgaggggggggggggggatgccaactgggggaaacccccccaccggggccgctccctaggaggggccccccccaaaaaaccctggggcccccccggccggggctttgggggaaaagaaggcggcccccaaacccccaccgggggaaagccccctccccggggggggaaagggggccaaggggcccacaaacccaaaaatatcgggggggggggggccccacaaaggacccggggg

SEQ ID NO: 40334 - DNA, 1196 bp, Glycine max
  Clone ID: PAT_MRT3847_136420C.1
agcaacatttgaaaatgttgaagatggctgaaagaattgcctccccccttttcactacttgtctcttccctttttctttccagaacaacagaacaacagagcaaaaagctccaccaatggcgggttacagagccgacgacgactacgactacctcttcaaggtggtcctcatcggcgaccttttcttcccttctttccagaacaacaccacaacacaaacagagcaaaaaaagctccaccaatggcgggttacagagccgacgacgactacgactacctcttcaaggtggtcctgatcggcgattccggcgtgggcaagtccaacctcctctctcgcttcaccaagaacgagttcaacttggagtccaagtccaccattggcgtcgagttcgccacccgcaccttgaacgtcgattccaaagtcatcaaggcccagatctgggacaccgcaggccaagaaaggtatcgtgccatcaccagtgcatactatcgtggggcagtcggtgcacttctcgtgtatgatgtcactcgccatgcaacatttgaaaatgttgacagatggctgaaagaattgcggaaccacacagatgccaacattgttgtgatgctcgtgggtaataaatcagaccttcgtcaccttgtagccgtgtcaactgaagatgggaagtcctatgctgagaaggaatcactttacttcatggaaacctcagctctggaggctactaatgtagagaatgcatttgctgaagttctgactcaaatctatcacattgttagcaagaaagcagtagagggggctgaaaatggaaccacatctgtgcctgccaaaggagagaaaattgatctgaaaaatgatgtttctgctttgaagagagttggttgctgctcaagctaagattggaaaacatagttcaattggttggtatcggctctgttgtacgtgtaatattctgagaaatacgaactagaagaaaagtgaaatttaatttgtcatagcatgttagactctttgtgtaaccttaaaactaagtttggtgtttcaataggagcttgctggtgaagcaagttgattgctagtcttactttggttgtagtgcttttattattgtttttgaaaatgttttacatcaaaagaggttcaagcttggaattacttcatttaagtttgtgtagtattctgcagtgattatggctcc

SEQ ID NO: 40335 - DNA, 354 bp, Glycine max
  unsure (1)..(354): unsure at all n locations
  Clone ID: PAT_MRT3847_136421C.1
ctccataattcctctgcttcgacttcttccgattccaaaccnnnnnntgcagacttggaggacataatagtcacaaagaggagcctgcggggttggattgattgccgatttggagaataaggaatcacatgagattgtcaaggatgctttaaatgctttaagttgnntggaacatcgaggtggctgaggagcatataatgactctcgagatggttcaaggctgatgaccggaggtnngagggaactatttgacaagagggccaacacgcatgcattgcngcctttgataagctgcacactggagctggaatggttttattacccnnngaggcacaacttctcaatgaggcgaag

SEQ ID NO: 40336 - DNA, 238 bp, Glycine max
  Clone ID: PAT_MRT3847_136422C.1
ttttagttttttttttttttgtcgtggaaattagttaatgtcagaaaatatatttgggtcgggtttctttcttatacttaggaagatatctaccagcactggtccgtttgccacttacgggtctgatagtaaaatccggaagatccattcggagcagcagccaaagacgagaacgagcgatgatcatggcgcgccgccctaaacgaaagatcatacagtgctctggccgacggatccg

SEQ ID NO: 40337 - DNA, 604 bp, Glycine max
  Clone ID: PAT_MRT3847_136423C.1
acgcgtccgctcaaaactccgagtgcttgatcttcgaaataattctttgacaggttctgttggtcttaatttcgctaggttgtctaatcttttcacattggaccttggtagcaatcattttaatggatcccttccaaattcgttgtcctattgccatgaattgacaatgttaagccttgctaaaaatgagttaactggccaaatccctgagagctatgcaaacctcagttcacttttgactctgtcgttgtcaaacaatagctttgagaacttatctgaggcgttttatgtactgcaacaatgcaaaaatctcaccactcttgtcctcacaaagaatttccacggtgaggaaattccagaaaatttaacagcaagcttcgagagccttgtggttttagcacttggaaattgtggtctcaaaggccgtattccttcttggctattgaattgcccgaaattggaagttcttgatttgtcatggaaccatttggaaggtagtgtcccttcttggattggtcagatgcaccatttgttctacttggatttgtcaaataattctcttacaggagaaataccgataggtttgacagagctgatgggcctc

SEQ ID NO: 40338 - DNA, 208 bp, Glycine max
  Clone ID: PAT_MRT3847_136424C.1
gccttcagctggttacgataaggacggggatggttgcggcacaggcaaggagcttggatctgttacgcgttcattggggcaacacccacctgcgggagaactccaggacatgatcgtattgaaggggatgctgatggtaatggtaccattggcttccgctgaggtcctaaccctcttggctaggaagacgaagggacaatgattctga

SEQ ID NO: 40339 - DNA, 430 bp, Glycine max
  Clone ID: PAT_MRT3847_136425C.1
aacctttgggctgatgtatgtgcttgcatggtcgtgagaagatgatagaaggggctcgaggaaaagtaagatctccccagaggtagggagagatatcgtaacagcccgcatatttaaacctatacagaaaccaaaaggcctaccacgagtcatagcaatctcaaaaccataagcattatatttggagacacaagaccagcagggcgagaaaagaaggaaagacatcattccagaccccctcagcaacaaaaatcaataatcagcaacaaaaatcaataatgcaacaaccaatacccacgccaaaaaaaaaaaaagaataggtattttatacaagcgatacgtatcaaacccctacagttcgacaaatcacacagtatacgtcagtcaagaaacaaggctacgtagggaaggccggcaagaaacgagaagg

SEQ ID NO: 40340 - DNA, 414 bp, Glycine max
  Clone ID: PAT_MRT3847_136426C.1
acggctgcgagaagacgacagaagggcctagctcattcattatatttagaaaattagatagtattactattggaatctcattacttttcaaagtgttccgatacgtactgcacttatagctctcagctgaaataatgacaaaactgaacaaattcaatttttaatctgttcacatactgatatgtgtcaagggtgatgtgtagccgtttggtgattaagtgaataaattaaaatgtgtactttcccctggtaattcacttggatctattttgcttttggttggggaatgcatgttttttttcctgtcaggctaaacaggggggaatgggtattttaattggtatggttctggacaggggtttggtggtgatggatggtttgataaataaactcattgcggggttttgcagaaaa

SEQ ID NO: 40341 - DNA, 292 bp, Glycine max
  Clone ID: PAT_MRT3847_136427C.1
ggtgtgagtgcgagagacacgaagacaggtccttggatagtaatacgtggattacgttttcagtcgccaaaatttggtttacaaaagccattcgccagaacaaccacaaaaggaaacaacgaacactggttttgaatccgttagcggcggcgttagctgatttagcttacgaacacacacctctagctctgtgttgatcgtttgcaggtcacagtgaccaggaggagaggggtttcgaaggtcctgtgatagcgtggaatgtaaaatcactctggcaatgggactgggaaca

SEQ ID NO: 40342 - DNA, 265 bp, Glycine max
  Clone ID: PAT_MRT3847_136428C.1
cgcggacgtattcctgctacgtgaactgcctcacctctcctccttcttcatctgtaactcttcttcactctatttctcattatcattcatataccttcatcactttccccaaaacgcggtcggatccaccgggtccggttccgtggcattggttggctcgtatgaatagcgtgttcagcgagcagatactcgccgacatcctgactaagctcaacagcactcagcattgcattgacacttgatcacattggtgtatacttctccg

SEQ ID NO: 40343 - DNA, 353 bp, Glycine max
  Clone ID: PAT_MRT3847_136429C.1
gacccacgcgtccgacgggttccaaaaaacccccaaagggggtttctagcgtgcgatagactgtagttctagcgcctacttattcttaggtcaaccatctctttatatcacctattaatctcacctgaaaatgcctctctactctaataacttaattctctcaagctcctgcacttccatcaacaaatgcgacagcttcacaatgtacccaaacttgatctacactaagacaaacaccacctagaccttcctcatgttatatcaacctcttaaaactcaatctgattgaacacaattaccaattccccctaataacaacagctgcacatatgaaccaaactactcctgcaacc

SEQ ID NO: 40344 - DNA, 180 bp, Glycine max
  Clone ID: PAT_MRT3847_13642C.1
gaaccgctcgagccggacccaccaacgcacgaaagccgggatctttcagaaaatggaatcctattctaagggaccataaccgaatggttaacttcatcctaacccgtcaatttgggttccaattcggttcctaggaagtatcgggaaggaatttagaatgttaatgtatcgattcatgca

SEQ ID NO: 40345 - DNA, 265 bp, Glycine max
  unsure (1)..(265): unsure at all n locations
  Clone ID: PAT_MRT3847_136430C.1
ggaattnccggggcgaggcacgcgtccgcacctttgtggttaccgccgacatattcagaagacgatcaggttcataggggcggctttgagatatctaacctgatgtctctaatagttcagaacagcgagtcggatccgcatgatccttcttcaccttaacctaatcctggggcttgatctcgtgattaatctgcagcggagtaaatgcaggcattacgtcgataccgtgtaggggttcttatgcaatttgtagaggttaaacata

SEQ ID NO: 40346 - DNA, 464 bp, Glycine max
  Clone ID: PAT_MRT3847_136431C.1
tgcagattttgaacgggatttggaatcatggaatataagtcttgtgcagggaggtgtagactccagaaatttgttccacaactatatcatggtgtggatacaggatatgcaacttagtttacttgatttatgtaaagcagaaaaggtgccatgggctggagtaaccacaaaccactccacctccccatttgccgaggaaatgtatgagaaaatcaaagacaaccttaccctttacgaagttgtaatcaatagatggcctcaatactcactttatttggaaaatgctgttgcaaacattgaaagggcaattgtgaaatcccttgagaaacaatacagtgatatattaactcctttgaaagatagcattcaaaagagacttcacttgcaagttcaaaagatagcaagaagacaatcagctactgttcatttgggtcctaatcaattgggaatattcttgaacacca

SEQ ID NO: 40347 - DNA, 298 bp, Glycine max
  Clone ID: PAT_MRT3847_136432C.1
aaaaataaaaatctcacttaagttttaaaaatgttgcccctttggcacaaattaaaagggacctgttggttaacctactgctaattccagtcatggcatgtttcaaatttttcaaaagaaaagactttccctattcctgatcagtgatcactcccaacccacttaaatttttgcaataacaacttgaaatcctccaactgtgcaaattgcagggaaagaaacatgggaaactttagaggggtgatttccatgctcataactgacccaaaaaggggggtttcagaacaacctcccaaaa

SEQ ID NO: 40348 - DNA, 587 bp, Glycine max
  Clone ID: PAT_MRT3847_136433C.1
tcccacgcgtccggcctgccgctactttccctttcccggttaatctgctcccgagtttgctcagtcatcaaaccccaaccctaatcctaatcccaatcctctcatccttcaatttaaacccccattcccattgctatcttgtcatttttcccgacaaattgtctctccctcttccgtttcattctcacaatttcaaacatgaatcgtgtatcggtgttccggtagagcatatgacgaaggaggttatcggaactgcgaatcgattgcatgggtttagagaatgccagagcttcgtagaggagtgcgacgtgggcgtggccgtggccagaaagcatcggaaccggcaaggaaggagttgaaggctcgtgcggcgccgagagggagacctaggactagattggcggcgaaggaattggagcgccaggagccgttgatcccgataccgataccggaaccgttgatcccgataccggagccggcgaaagaagagaaaaagaaagttggtgtgggggtgaatatgggtgacgaaagcggggggttgagtggtaataagcctgaggaggatgccaccactcctccttttcctg

SEQ ID NO: 40349 - DNA, 435 bp, Glycine max
  Clone ID: PAT_MRT3847_136434C.1
cgattggaaagaggggatataaacccaacccatcatccaaatatagacccaatttttttcaacaactggggaaattacattggggggaccccaaactgggaaaagtaaaaaggcccaactccacgaaagggtttattcagggggcatccaaaatccaaaataccaccggctattctggaaagaaaaacatccaaccttacccccggtattaatttgaaaccggggaacaggatttgaatcaacccatcaaaggagaggtttttatctgaccaaaggattgtggggaaaaaaataaaaaaggaaccccaccccaaaggcaaagccccgcctgcacaagggactaaaaggagctatcctatgatatcggaccacaatctgaaacaatggggtttgaaagtcttgaaagccactggctcaaaagggggactagggggc

SEQ ID NO: 40350 - DNA, 119 bp, Glycine max
  Clone ID: PAT_MRT3847_136435C.1
ccccgttttgctttttgctcacattcagccagccatgctgcttattattcacgaatgagctcttcttgttctctttaaagcaacagcttgcatggtaggtaaacctaatatttattgct

SEQ ID NO: 40351 - DNA, 248 bp, Glycine max
  Clone ID: PAT_MRT3847_136436C.1
gcatcgggatcatgacattcattgttggacattatactgatcatcatcacaggtacaatgcatttctctttgttctctaagtgtatacttgattgccgtggaattaatctcaccgctttcatgtcatgtacttggagaccgatgtgaaatgctaccgaaatttcaccaaatttaagaaaagagacttaaccttgacgtatgagtttactataaaaatatgtcttcctgaataggataaggtcacacct

SEQ ID NO: 40352 - DNA, 1523 bp, Glycine max
  Clone ID: PAT_MRT3847_136437C.1
ttccattttgaattgggcaatagagctgtgagtcctaacggccgcgtgggtcgaccggcagcatgttcaagctatctcgcatgctccctctcacttccacttccaggcataggctgttggcagtgctgtcctctagcaaagtcggacgcaactcacaagtgaagaagaacgagagattgtgaagagaaagcgttccaaaatgttcacgctatctcgcgtgttccctctcacttccccttccaggcataggctcttggaagtgctgtcctctaggaaagttgaagtcggagaccgtctgcgccaagaggggcgcgattttacctattcagctggcatttctactgctacaaataactatgctgccaaaggatatgcttccgatcgaatatttgctccttatactgtttacaagggcaaagctgcattctcgttgattccttgtcttccaactttcactaagttgaattctgggactgttgtagttgatcgacgcggttcaatcatgatgactttcatgcattctattggagagcgcaaatatgactgggagaaaagacaaagatttgctctctcagcaactgaagttggttctttgataaccatgggcgctcaagattcctgtgatttctttcatgacccctcaatgttatcaagtaatgctggtcaagtaaggaagagcttatcaattaagcctcatgcaaatggctactttgtgtctttgactgttgtcaacaacctgttaaacaccaaagactacttcagtgttcccgtcacaactgctgagtttgctgtaatgaagacagcttgcacttttgcattgccacacattatgggttgggaccagataactaatcagcaatccagaggcatagatggccttcaagcaaagggtgactctaaagtttcagagttggaatgggaaagatgaattgctaggaatatccgaatatgaaatggatccttttttgttttgcaattctaatttgtatattgccaatttgaagacgaggatttgctaggggaagatgtaaattgcaatctttaagaaagggatacgtgatgttgtataacttgttaaactagtatgctcttctgcctggctttgaaaatactatagtattaactgtttgaaaaatcatcaatctgatggcaacacggaagtatatcagtcctttaacagcgagttgatgattatgcatcatcagtaaaaaaaaaaaaaaaaaaaaaaaaaaaaaaaaaaaaaaaaaaaaaaaaaaaaaaaaaaaaaaaaaaaaaaaaaaaacataaaaaaacaaaaaaggcacgcaaacaaaaccctaaaacaagtcctacagggtcctatattgcctattgaaggtgacaaactagattgggtgtatcaaaagcattgccctgtccgtgatgaaagagcttggcaatgctaatttctcacaagctctgatgactgaaaccttaaacggaaatcccggggagccttagtggaagccttaccaactataagctgcaaaagcatctcgtgccat

SEQ ID NO: 40353 - DNA, 558 bp, Glycine max
  Clone ID: PAT_MRT3847_136438C.1
ttcctttttttttttttttttttttttttttttttttttttttttttttttttttttttttttttttttttttttttttttttttgagcagacccgaaaaaagttctatggggcatttaaaaaacaaaattcaaggggaaaaatctcaaaagacaaagggaaattacaaacccccgtccgtggaaaaaaaccaccaagcccccaaaggctattcatatcctaaaaattaaaccccccgtggcttgggggggggaaatccttttcctagcttcccaaaggggggaaagctaaaaacctttaccctggggaaaagaaaaccacggttttgttcccttgccaagggggaacacatggcccattcggggggcaaattcaggcccaggagcatcccgaacagggataggccaaaagcctcccttaagcttctctcggggttggaccactccaacacgacccctatttcttccacccggcaccatgactacattcccaacataaaattggaggaaaacaacaattttggtctcccccaaaaccagcttaaggggggcattaccc

SEQ ID NO: 40354 - DNA, 466 bp, Glycine max
  Clone ID: PAT_MRT3847_136439C.1
gagcacctacgtcgtttcgcgtgagtaccagcttttcctttgggcaattctcggcttcagtgattcctatgataaagccattgaacatgtcttcagcaaccaagggtgataggaagactgcacttgatgtggcatcatggatgttcaatatagtcacatctgtgggaataatccttgtgaataaagccctcatggctacatatggtttcagctttgctacaacgttaactggtctgcattttgccacaacaaccttgctgacagtctttcttaagtggctgggatatgtccaaacctctcaccttcccttacctgatctcatcaaatttgtcttatttgcaaatttctctattgtcggcatgaacgtgagtttgatgtggaattttgtcggtttctatcagattgctaagctgagtatgattccagtatctcgttccctgaagttatcttggataatgtgcgatat

SEQ ID NO: 40355 - DNA, 473 bp, Glycine max
  Clone ID: PAT_MRT3847_13643C.1
tctgcaaggatttctaatcattcataacttcaatattataacaaaaaaagatttctttaaaacttgttatgactatatcagtatccaaagcccacaaaactggttgcctaacatttccagattttattttctttttttctggggctccaaatcagtggagcaaagaatgtagcactgaacaattacatgatatccatcctcagttaattaacaagaaggaatcacttccctctttctaacaatctaacccataaatttaagggtgagagaattgtgctcctattcacaaataagaacctgagcaattaaaaatacattccaaaatttgctaataatctcattttgtacacatgtacataagggtataacatattgtgggtgacctgccctctttgcaggtttccaggtgtcagcataggtagatacccttaagccacttccggctcgagtttaaggataccttctcagtagag

SEQ ID NO: 40356 - DNA, 782 bp, Glycine max
  unsure (1)..(782): unsure at all n locations
  Clone ID: PAT_MRT3847_136441C.1
tatacacatagtactacttttcatttcattgccttaatgattaagatatcaaactttgtgttgctaccacgtacaatgcaacgttagtggcggtgtgcataaaattgaccattgttcttcatgacattgtttacgctgctgttcctgcttcctcactgagtgaagaaaaaggacgttacaaaagcgcacacgatttttcaagagccaaacagagtgccctaaattcaagcgcaacgagtcaaacaaacaaagagagaagaagaagaagcaaaataaagccattgaacatgtcttcagcaaccaagggtgataggaagactgcacttgatgtggcatcatggatgttcaatatagtcacatctgtgggaataatccttgtgaataaagccctcatggctacatatggtttcagctttgctacaacgttaactggtctgcattttgccacaacaaccttgctgacagtctttcttaagtggctgggatatgtccaaacctctcaccttcccttacctgatctcatcaaatttgtcttatttgcaaatttctctattgtcggcatgaacgtgagtttgatgtggaattctgtcggtttctatcagattgctaagctgagtatgattccagtatcttgtttcctggaagttatcttggataatgtgcgatattcaagggacacaaaacttancatttctctagttctccttggggttgctgtatgtacagtcactgacgtgagtgtcaatgctaatggttctatanctgctgcagtggcagtttgg

SEQ ID NO: 40357 - DNA, 815 bp, Glycine max
  Clone ID: PAT_MRT3847_136442C.1
cggccgctcgagccggcgggccggattttctgatgacagaaaatacctttccgaattcgttgtgagaagtcctacggctgcgagaagacgacagaaggggaagtcgtacacgtttaaacggagttctaaatttccggcgagttttcctctctcgaatctgcgacaccgacgaatctcgctcaccggaatttcgcattcagaaaatggctttaggtggaacagctcccccaagaggaagtgcagcggctactgcaagcatgaggagaaggagaacaaccggtggtgcggcctctggaggagcagctggaactatgctccaattttacacagatgatgcccctggactcaagatctccccaaatgttgttcttgtaatgagcattggcttcatagcatttgttgccatccttcatgtgatgggcaagctgtactttgtgcgtagggaggcttagagaatagatcaagatgttaggtccaattttttggattttcaatacacctctgttatgaaatttagatttttttgttgctggaaccaacccttcctttgctttttgttttttggtactgctattttttaaggtaaactgttgaaatatctttctgttgcatcttcttgtttttgcggttggtgaaatatgttttagtttcctttagtcgcttaacttaaaggtggggaaagtgttggaatttatggtgtagattgatgggtaactatatatgccaaccaggttaacttgtaaaaaaaaaaaaaaaatttttttctcccttgatttgtacaagatgaacgcatagctgaattaatggtttttaca

SEQ ID NO: 40358 - DNA, 529 bp, Glycine max
  Clone ID: PAT_MRT3847_136443C.1
tctctctctctctctctctctctctctctctctctcttccgttttgccttaatttctctgtatcaatttcctattttgttgggcatcccttttcgcattgattattcttctgattgttcgaatttttctgttcaatttggagtcgtgaaggtgcagtgtggtaggggtgttgtgaagcttgtggtatccatagggttttgggtgctaatgcattgattgttcaatctcgcggacatttagttcgggttcgctatttatctttcccctttcctaccctagttatttgatctgaattgtcaaataaatatcagattactgttgcagctgaactgcagagaggaattttactagcctaaaattttgccatcggcacatagaaagtgttgctttgtatcttttcgaagatcactttgttaagataaaaagagataagactaatgcgagaagtgcctcatcattgggtttcatcttgcttttaattgaagtctggagaatgaatatgacctatattttttgaacttttgagaat

SEQ ID NO: 40359 - DNA, 570 bp, Glycine max
  Clone ID: PAT_MRT3847_136444C.1
ataaatagggccgaatcgagacggccccggggtacacgtttaaacggagttctaaatttccggcgagtttccctctctcgaatctgcgacaccgacgaatctcactaagcggaacttcgcattcagaaaatggctttaggtggaacagctcccccgagaggaagtgcagcagctactgccagcatgaggagaaggagaacaaccggtggtgcggcctctggaggagcagctggaactatgctccaattttacactgatgatgcccctggactcaagatctccccaaatgtggttcttgtaatgagcattggctttatagcatttgttgccatccttcatgtgatgggcaagctgtactttgtgcgtagggaggcttaggaaatagatcaagatgttaggtccatttttggattttcaatacacagtctctgatatgaaatttagattttctgctgctggaaccaacccttcctttgcttttgtttttcggtacaatcctctgctatgttttttaagttaaacagttgaaaaatatctttctgttgcatcctcttgtcgttgcacttggtg

SEQ ID NO: 40360 - DNA, 342 bp, Glycine max
  Clone ID: PAT_MRT3847_136445C.1
gactgcgaatagaattctcagtttctttatataacaaagaagtaaggtgaacattctattgaaagaaactaacatggtgccatccttggggagagcacgatatggtatgacaatccttctaaccgagggcattctgacggacaaaacgaaatatctagctccttcaagagacttggcgcacgccttgatttggacaccctgctgtgtttagatatgatgaatagaaacgctttttctcctgtacagaaggctaatactaggggtaatagatcgaacctgtgcccacatctttttagctgattccaagagtcccttccctgtttaaggacaccaaaacccttc

SEQ ID NO: 40361 - DNA, 263 bp, Glycine max
  Clone ID: PAT_MRT3847_136446C.1
tgggcatacaattccaaatctagagttcccctaatccctatagatgaatctccattatgaggatatgactcttgcacgtggaacaagctgctcaaattgtagcctaatatggcttggtgttaatggatcttcagcctgactccatgtaagtcctcatgggaaatgtgttggtcagggcaagacaaaagttcaagatttgtgctgtggaaatttgagttcttcatgcaaatttctttccttttaattccaagagttctggatgg

SEQ ID NO: 40362 - DNA, 391 bp, Glycine max
  Clone ID: PAT_MRT3847_136447C.1
ggacacaagaaaccagggggggccctggcataattaatataaaatattaacaaaggttttttttcaagcgggcaacaggggctacccaaatcaatttggggggggaaaaaacatctgaccgcaggaagaattttatgggggaggacccccccgacggggggaagaatccccagaaaaggactaacatgttttcacaattcatttgcacactcatttttaaaaggacattatgctttacagttggcattgggaacggaaaaaagaaaaaacgggagtcatcatgcttcccaaaaaacataacatcagataaaataacccgacgggtacaaaaacattggcttcactatttatgcggggggcaaaccaaccaccccacacgctaattttccac

SEQ ID NO: 40363 - DNA, 387 bp, Glycine max
  Clone ID: PAT_MRT3847_136448C.1
acaacgtgaaatgccttgtaccaaaatttgatcggattaatcaaaataataataaccttaacgaatgaatctaacataaaaatactagtctccccaaactatccaaacggataattcaagactaaatacaatgactaatgcaaaatgtctacaagaatcattgcattcagtctcaaacgggaatctaaggttcactcagcatgaacaacagttgtttatattgcaaattacattgatggcgtacaagaacatacaaatatcgacatcaacagttgtgagactagtcataaaaatacaagcaaaagcaagatgctaagctttatctttgtaaatattagattaaggtttcattatttttgggccttgtatttagggctccataatgta

SEQ ID NO: 40364 - DNA, 690 bp, Glycine max
  Clone ID: PAT_MRT3847_136449C.1
ccacgcgtccgatttggttttgttactttcttgggagttgttgaaagagatggggaggacagggaaatggctcaggagcttgttgacagggaagagatcagacagagagaaagagaaggaaaaggaaaaatgtggcaccaacatgtgtttgttgaatggcatcacaagcacaacagaaacagaaaatccaaccacaccagtttcaacaacaacaaccaccaaggagaaaagaaggtggagtttcaggagatcaccagcttccagggaactgaatcttgcagaatctggtgccattgcttcttcagtcacagtgcaaaatgctgagaatgatcaaagggagcatgatcctgattccaatgggttgtcaacaagatgttctgaagaggctgcagctattaaaattcaatcggtggtttcggtcctacttggcaagaaaggcactgtatgctctcagaggactagtgaagttgcaggcattggtgaggggtcacttggtgagaaaacaggccagggagacactgagatgcattcaggctttggtcatagcacaagccagggctcgtgctcagagggcgcggatggtgttagaagatcaaaacctatcaccctacagaataaccactgaggaaaacttcttcatgcttatgcataatgaaatggacagtggttttggaagaaaatgccaagatt

SEQ ID NO: 40365 - DNA, 495 bp, Glycine max
  unsure (1)..(495): unsure at all n locations
  Clone ID: PAT_MRT3847_13644C.1
ccacgcgtccggcagcccgtcaggttatatagctcactcttgatcgcttcctggtttgctaagcgatttgcctctcgtggttcggtgacggatcggaggcgctgcgagttcgaagctggtttctctgggctaagtcggttcggacttacttgttcagtaggtgtagtgtagctcgatagacgagaagaatatctggcgtggaagtttcagcaaagctcctggattaaattggcatcatagagggcgcaggatccaaatctgccggaaacctgtatcttcatccagtatcaaggggaagttctgttgttgtgagttcggtgatggatacatccaaaagcaagcaaggaccagaacatctccttgttcttgtccatggtatcatggcaagccccaaagactggacatatggngaagcagtgctgaagaggcggttgggtgatgattttttcatatatgctagttcaacgaacagctacaccaaaacctttgatggga

SEQ ID NO: 40366 - DNA, 279 bp, Glycine max
  Clone ID: PAT_MRT3847_136450C.1
gattgattttttttttttttgctttttctcttatattctttttttagctacttgaggtttttgatattatccatttgctctttttgctgagcgagaattgatgctaattaagattgctgtaaatgctgctgcacaatgtgatgtccttgatatagctagcattttgggggctaaaactgtcagatttatgttgatcctctctacctctgaagcttactgcagattaagacaagatggttgcattgcatagattgctacaaccatatggcctctgtgagg

SEQ ID NO: 40367 - DNA, 207 bp, Glycine max
  Clone ID: PAT_MRT3847_136451C.1
ctcgagccgagtcgggtcgagcaaacagtctacagttattgatattctcttgggaatctctcaagattttgaaattgctgggtatactcttatgccagctttttttgttccacatgctaatgcccaatctttttaaaatgccgaataccttgcattatctgggaagttgtgttatatttcgcttgtgcgtttgtgtaaaaccataag

SEQ ID NO: 40368 - DNA, 499 bp, Glycine max
  Clone ID: PAT_MRT3847_136452C.1
aattcggcaccagaacaccacaactgtatttccgtgttcaatattttctccttcaattgcaacagaatcagatctgaaaataacttacgcccatagaatctaaaattgaaaattaatacaacccccttcatcttcctcctcccaaacttctcaaccaaaaaccaatatctcaaaaacaaaaaacatcaaagccttgaataacaacatattaggatctcaaaatgcaagaaaaaagaaacatcgaaaagcctgcctccagatctgcatctcgatgttttgtggtggcgcggtctagatctcccgttgtagtgcaaaaatgtctgtacgctgtctcaagcttgacttcgataccgatggagaagaacaggacccactttagccccaactctaattcgagctaaagccacatcacatttttcggcagtgcccattgaaatttctgacgacgaggactttattgacatcctctcccgcccatccagccatcggcttccttcgc

SEQ ID NO: 40369 - DNA, 134 bp, Glycine max
  Clone ID: PAT_MRT3847_136453C.1
ggggtttagaagcaaaaaagtaaggctccatgctacaatgataacaagacagagtgaacagttacactgaagtcatacatgttctgtgagaatgtatgaagctaaagcaaatgtaagcaaccatatctataaat

SEQ ID NO: 40370 - DNA, 344 bp, Glycine max
  Clone ID: PAT_MRT3847_136454C.1
agaaacgggaaaacatattttttttttatataaaatcccttggaaccccattaaacggaaaaaccccggaggggataaaccagggtaaaaaaaaggctggcagaaccaatttatgcaaaccccccagcatttttatccttcccaaaaaaaaccctttttttttactagcaaagggaagggcttccttagcaaggggatttacatccggaaccggggggtggaccttagcaactttagcaatagcctgggttttttaagggggtccacctttcaaaaagaccccgaaaacttttccgtgtttaaaccagtatggcccaaactttggctttgaaaaccccggattg

SEQ ID NO: 40371 - DNA, 193 bp, Glycine max
  Clone ID: PAT_MRT3847_136455C.1
tctcgagccggaaacttttctcttctctttgattcttctctaccagtgtcaccttccctcgatgtgtaacatcaggcgagatcgcggtttcttcattttctaaactttccctctcgttttgattcttcaatcatttcaggtaacaacatccttcgatctatgcttctttgcttcccaaagacattagggttat

SEQ ID NO: 40372 - DNA, 356 bp, Glycine max
  Clone ID: PAT_MRT3847_136456C.1
aaaaaaaaaaaaaaaaaaaaaaaaaaaaaaacaaatttatttttaaaaaaaaaaaaaccactgtggagggtttaatttaaaagcctcgcccatcccacaaacttacctccactccatttctacctaaaacaccttcaattacccacacttacattcacctccctacctctcaacaccccaacgttctcccctcttaaacccctttcctcccccacccttatctccatttctacactttctcctacctccccctccctaattacctacaaatcccttacccattccccatttctaaatataaccccccctatacctcccttttaaccccccctccatcacttttttataccccccct

SEQ ID NO: 40373 - DNA, 694 bp, Glycine max
  unsure (1)..(694): unsure at all n locations
  Clone ID: PAT_MRT3847_136457C.1
agctcggaattgggttcgaggtgatttttatacgcacatgaggagcaaaataacacttgttctgaaatcaaagatggattgaatgagaagcaacttgaacttcgagaccccttctctcaggaagaggtgttgatgaatacgttacttgtgaacaaaaatcaactaccacaatacagtagaggagtgttgatattattaaggtccaatactccaactatacttattttacatgctgattcaagtgaacaagcaaacgtgtttgatatatataatttgcctgtaatatgatatcatgaggtaaaaatcctataagttgatagaaatcatagtttcataattttcattatgcataaaagacatcacaactttttattgcttcttttctaataactttttcaagattgtcaaaaattagcaacatgattacaatacagagaaaaatgttatttaagacataattcaagtaagatatatataaatttagcaacatgattacctatagttttggttgtagaaacataattttgtttattattttattctttcagttgaaatgtgaaatatatactgatggtatttgtcacaattcttttcttgcttgtaaaaagtgtacatttattttattttatttagtaaatgtncagttcatgaacacaaatataattattctttattcgaaattgttttgtttttt

SEQ ID NO: 40374 - DNA, 340 bp, Glycine max
  unsure (1)..(340): unsure at all n locations
  Clone ID: PAT_MRT3847_136458C.1
ctgggaatgatgatagttttatttattgnccacatntcggngtttatntaaaacagttatacaaggttaggcatgnggnntgccataaaatttancatgaattaagnacacacatgcaggttgacannttcaggagtgatnntncacccccagcagaaatcagnaagaaacctccagncnccacnggngtcttcatgtnacatcacacaattgtggnggtttctcttnctcatcaanatccagncncccctttctcatcatagccacancctcctggtnattaattnccccgccgttatcagcgtnaacatcgncgntgacttcatctatngtcgcttca

SEQ ID NO: 40375 - DNA, 416 bp, Glycine max
  Clone ID: PAT_MRT3847_136459C.1
tttcagacttaaatcctctcctgcaccaacttgttcacacctgcaaagatctgttaacagggaaagctgattttgaaaattttatcgaggaagtggcatttgctttggactggagcattaataacagtgtcacctccacaaatgctgccattgcaagggataagatcaagaagcaattcagcagtcatttatcacaaaatcaaagtaaaacagatgttgaagataaacagtcttctcgcttgccctcatttgcatatcctgacgaacagtgtgaactcttcaacacacagaatgatcagtgtgatctccttgaagagattagaaaactaaaatatgatttgaggagcacaaaaactgcgaagaaagacttggaagaaaagctgctgtcagtaactgatgagaggcagaacttagca

SEQ ID NO: 40376 - DNA, 404 bp, Glycine max
  Clone ID: PAT_MRT3847_13645C.1
agttaggaaaacggcccgagctgcgatatcttcctggtgctattgtggctgcggtttttgggatcatttttgacatgcctgttatatgagttggggccatatttaaaggcccttgcgtgcttttcaaagggtggaagcgtttggttcatgaatctcaatgggtcggtgaaagcccttttcttggagaccaatatgtgtgcccttttgctggccttgctattggtcttgggccccctgcttttggtggggccagtcttgcattcttgttagcccagttcgttctttggggatttgcacggtttattacttatcaggaatcctctttcttgttttgcctggggtacattgttgcaacctgtgccctttatgatgaatacagcaatgatatttttgacatgaaagaa

SEQ ID NO: 40377 - DNA, 381 bp, Glycine max
  Clone ID: PAT_MRT3847_136460C.1
tcctacaaaagcaacaaggaaattccttatcttgttcttttgtttcttctctagaaaaaaagttatgaaatatcctcaactctcagctgatttctttcaaactctaaattttatacatgcagctttgggattcaaatagtatgagtattttaaattttagtagtagcaacaacaacaattaaagaagagaaaataaacatacaatgcaaaaataatctttatagtaaattttaagacccaaataagatacctaacacaccattaatcctcaatctttggattgaaaaagactaactgcaattgattttttcaatgcattgattaaacattggtgataagtcttgtcaaataaaggttatctttggacactccattgctcac

SEQ ID NO: 40378 - DNA, 357 bp, Glycine max
  Clone ID: PAT_MRT3847_136461C.1
gaatcattgtagacctttggatcgatctgcttggggacgacaggggcgaatgccgtacctttaagcttcctaatcccatgtactacattgagtagtaccttcacctatatcaacaatctagctagagttcgctcctatctatatgtaataaggcatactgatatgcactattcaaatatgaacactaactatgcatgttaatgacactttatgttatgtgggtaagtcacctaatacactacaccttcctacttgttgtatgttactccattttaataaatcttatgacattgttccatatgcttagattctttaatggtgtgaaataatatgactggctctagcatttaaacaaca

SEQ ID NO: 40379 - DNA, 272 bp, Glycine max
  Clone ID: PAT_MRT3847_136462C.1
tgagagaagattgtgatgaggagagttcacgtggctgagaaatgcgtgcttcgctatcgttctcgcaaacatccatgcatgaattcatggtcaaggcataccctaatctcaacatcagaaagcctcacttagattattatcacaaatggtcaagaatctttgtagaaagctcttaccatatggttcaacaatgactcatcaagcttatggcatagtcaccaacctcatcatctacaacggcctcgggaattttttaattgaacatggtttta

SEQ ID NO: 40380 - DNA, 207 bp, Glycine max
  unsure (1)..(207): unsure at all n locations
  Clone ID: PAT_MRT3847_136463C.1
ngttggngtncgcgtacgtaagctcggaattcngctcnagngattagccatggncnttnaatggagaananntggnnnngtaangtgctaanggnaatcnntgnncgctangtggtacagatgcntcggggnnatgntgntgntggtnacgttaaanatgcaactnttntaggattgcngagcaatgntngtggtaanatatgaagt

SEQ ID NO: 40381 - DNA, 339 bp, Glycine max
  Clone ID: PAT_MRT3847_136464C.1
ggctcgagacttaactatacctataaacattaattttatttatcctacaccaattattatacaacgctcgcgaattcttttttatccacggacttcaaacttttaaataacaactattgacaatcttacactatacttcatcattaatctaaatctctgaccatcaactaacttaaatacatcaaatcttctgacactcgattatcatattcccaatacctcaccacaatataacaaaccattcctttaatacaaattttacctatatatcatcaacataataatttattacaatctaaattaaatgacatcatatacctcttcttatttcaaatacct

SEQ ID NO: 40382 - DNA, 155 bp, Glycine max
  Clone ID: PAT_MRT3847_136465C.1
actcccacacgaactatactgccagcaataaatctatgaacagcagatgaagatcatgggaacgaataaacttaaagatccggaagaaacacgaactttattacagttcacaatttttactactcaacatgaactaaacctaatgataaagaatg

SEQ ID NO: 40383 - DNA, 565 bp, Glycine max
  Clone ID: PAT_MRT3847_136466C.1
ccacgcgtccgggcggcaccacctttccttccctcccgattgccctaggtaaaaaatgtatatagttcttttcttttgcatcaattcagcggcgacgaaaccgcaatagatctccgtttctcgccaaacaaacacaaaatagctgccttcagcggcgacgaaaccgcacctttctttggcttcctcggagccaccgctaccctcgttttttcctgtaactaactcatcaaggaggatccatctctgaaacatattttggaggagatagagactggtggtcctgctgctatgatgaggtactggaatgatgaggaggttttgcggaagttgggacaaaccatgggagtttccttaataaacgtgtaaagggattaggtagcttttagcccttaatattatttctttattgttgttattttatttccacatcttctgtaaggaggatcacttatcttctgaattatttctactttttaatttcttttattaattttaaaaaatccatcttagaaggtggcttaaattttttttaaatttattgaaattagacatttattatttctaa

SEQ ID NO: 40384 - DNA, 277 bp, Glycine max
  unsure (1)..(277): unsure at all n locations
  Clone ID: PAT_MRT3847_136467C.1
cactctgggaagtcaaccaccactgggccacttgntttacaagcttggaggtattgacaagcgtgttattgagaggtttgagaaagaagctgctgagatgaacaagaggtcattcaaatacgcctgggtgctcgacaagcttaaggctgagcgtgagagnngnattaccttgatattgcatatggaagttttganaccaccaaatactactgccangttattgatgctcccaggaccatcgtgattnccntcaggaacatgattacnggaattcccc

SEQ ID NO: 40385 - DNA, 342 bp, Glycine max
  Clone ID: PAT_MRT3847_136468C.1
cgcgaacctggtttatgggttgaagtttttttcatcattcgaggcggaagatctgagaactcacaccatatacgttctcgctcctctacgaatttaaatatccatccatattgttctcatcatggacttgaccgacaagcttcaccgtttagacctaaccgacgtggtcattttgaacgcacgaaagccctccgtactccgtcaccttacgtcacgcatcctgaccaaaacaaacaccaatttaatttacacgaaccgcttctcgggcccatcgaggcccacttccgcttgctcttccacgataaccgttgaggacgacaataagtctcttttttacgatac

SEQ ID NO: 40386 - DNA, 424 bp, Glycine max
  Clone ID: PAT_MRT3847_136469C.1
acgagtatagcttgtattgttccatccgagtaggaatcacataagctgagatgaataagcaaagggcaatcatgcactggccaccgcagccccctgcaatttgtttaccaaagaaaccaacaacttggtctttctaatccattactctaaggaaagggtctacattgggagaaattattggtcgttttggatataatagggattattgtgattttcattaatctctatatatcacataattgagttctattattatttttttataaattaaaaatcttgaatatgctcacataaatattggtcagaatcatacatgtgctgtaatgaagtttctaataatttgtcatagattggccatttgtaattgcccttcagacagcttcattcccacatgcagtttacattatgtctaatttgacatgct

SEQ ID NO: 40387 - DNA, 128 bp, Glycine max
  Clone ID: PAT_MRT3847_13646C.1
cttgtgttagagtacaagaggagattaagtgtatattatgcagagacatggatactcactgaaatattcatttagtttccttttgtactctaacagtaggagattaaatgaatatttcagtagtatcc

SEQ ID NO: 40388 - DNA, 420 bp, Glycine max
  unsure (1)..(420): unsure at all n locations
  Clone ID: PAT_MRT3847_136470C.1
aacaacaccacaccacatggaaatcacacaaagataatcaaacaaggactcacatacacaacggaagcacgtcaaattttccatgtggcaccgaattgtgcgaagcacatgcgtacaaactccatatccggattgattccagttccaaactctcccttgggaaggattggagcaccagatttgtgagttgtaaggatgcttttgaccacatactcagtgccaacttcagtcatctgaacctcaattattaccatcagatctacttgcacaacactctttcttcctttcacagaaacaaattaattaatctaactaaatgtttcatttttttttatcatgttattgctatgaaatatctataggtttgactgataannnannanaanaaaaaaaaaaaaaaaaaaaaaaaaaaaaaaaaaa

SEQ ID NO: 40389 - DNA, 264 bp, Glycine max
  Clone ID: PAT_MRT3847_136471C.1
tctagtacgcgaggcccttttttttttttttttttgggttatttttataattttttcgctttttcacaccacatttagttatacatcaaaagtacagactctataataaaagaactctggaaaataggctgacgaaaccaataaaatctgaggcttttccccacaagctggtgcagtttggagagattcaggaaaaagttgtactgaaattttcacaagaggaatttcccacagctaggtcaactcaggagcgttcagcaacaa

SEQ ID NO: 40390 - DNA, 294 bp, Glycine max
  Clone ID: PAT_MRT3847_136472C.1
gaaacttcgaattcgggttgaggggaggtggtggttctttggcacaacttttttgcacaccagggtattttcacgagaatctatgcgaccagaagcctgccactggtggcgaagaagaaaggccggagggaaaagagaaaggatgagcctggtcggccgcgctgtgtacacttaactctcaaggaacaagacacggcagggggagtccgcgtttgaggggggaaagtgaaatggaggggattgagataggataccgggaaatactcctggggaagtgaagctgtaactctcaag

SEQ ID NO: 40391 - DNA, 369 bp, Glycine max
  Clone ID: PAT_MRT3847_136473C.1
cggccccaaaaaaaaaaaaaaggggcccccccccctttttggcccctccccccccgaatttttttccgccccggtcccggggggggccccacttttccttttgtggggcgcttttaaacccgggcgtaatactggaaaaaccttttccctgggaaaaattgtttcccgtcacaatttccccaaaaattaaaacccggaaccttaaagggtaaacccggggggccctaagggggggcccacccccctttttttgcgttggccccaccgccccttttcaccggggaaaacctttcggcccgtttgttttattatttccccccccccccggggaaaggggttttctttttttgcccccagggggtttttttt

SEQ ID NO: 40392 - DNA, 1089 bp, Glycine max
  Clone ID: PAT_MRT3847_136474C.1
aacggctgcgagaagacgacagaagggtcccctaactctctgcagcaataataaatatgatatggaggaagtagagatgataatttgaggagttggaatccaatgcaggaattgacttcttagaattcagaccctcagagattgcagcagcagtggcaatatctgtggtgggggagggccaaacagtgcacactgagaaagcaatttctgttctgattcagcttgtggaaaaggtaaatacatatggtggtggtccaatgacaataaaaaaaaagtgaacatttataaatgatggtttggttttcccttttgagcatgatcattttaagttgattacttgtaagttgtaacttgtactcatcaaatgcaattaattgttaacacggtttaattaatgttttacattgtcctatttgttgtttctttttggcaggagagggtcttgaagtgtgttaaaatgatccaagagctggcatcaaatagtggtggttctgccaagggtgctagtgcttctgtttctgtccctagcgtgcccgaaagcccactaggggtgttggtcactgcatgcttcagctacaaaagtgatgacacaaatgctgcttcatatgcaaattcttcacataacattagtccagatgctaaaaggaggaagctaaacaaaacctttggataatagtcattgtggcctgtgattttcaacgtcattcctaggatgcctttacttaaaaaaataagatgttatgtgctttgaaggtgccccctcaagggaatacccaatgaaggaagtaggaatgtagatagggaaagtgaaaaaataaaaaaccatgcataaaagggtgccaaaaagataaaggtggatcgtgactagtgggagatttttaagggatggaatcaacaaatttcatgctccaagccggatgtgaccactcaacaccagctgttaaatattttataggtctttttaacagctataaaagaggtagtgaaagaggagggaataagaaagaaggactagtgtatttgtatgtgtaagtacattttgtctttttacttttaaatgagggagttaaatagaaacccataaggcag

SEQ ID NO: 40393 - DNA, 358 bp, Glycine max
  Clone ID: PAT_MRT3847_136475C.1
gccacgaccaatacgtgttatattgcgcaccctctgtatatctcttacgcgtggtcattttcatgaaaagccatctctatcatgggaaccaaatccattaaacggaggaccgctgagtctaagaacacttccatggccgctgtggacccttacctgcgcaagcattgatcatacaccaaggcctccgaagtggtgatccgtcttgtcgtcgtctccgacatcaatctctatggtcctatcgtctaacaagtcgagcgcgacccaacgcattgtgaggtatgatacgatcactagagttaacctttattttgacgacctttaagccttcacacagggccatggctatgatagaagtgac

SEQ ID NO: 40394 - DNA, 507 bp, Glycine max
  Clone ID: PAT_MRT3847_136476C.1
aggtttccgtcatcactgtatgacgtcctccttctttggggggggggggggggaaagtaacgataaggaaaagcgcgagggaaagggttgacaaaaggggaaaattggtagttagatataacgtaacgggcaaaacatgcaaaaacccaggacctgagagataagataatagtatggggataaaacaaacacggatcgtgattatagaatataaatgatgtggtgggtacggtgacccatggtatggtacttaaaacttcgggagatgtagtggcaatggtggcgagggtatggggaactagtcgtattggcacaggaacggtggtgttgcgtggggtaaaggtgaaatagggcgtagcgtacgggtggcggggcggctattacacgtagacgtgggtccgtcaatattgccgtactgccacgactaagcagtgccggaggtgcatgcaaattaatataccggataggtgtgcgttgcgtagcgggggttcgaggtgcaaccgtgat

SEQ ID NO: 40395 - DNA, 448 bp, Glycine max
  unsure (1)..(448): unsure at all n locations
  Clone ID: PAT_MRT3847_136477C.1
nnntactgctgcgagaagacgacagaagggtcatatctaataaactcattttttattattaaatttataattttactcatgaatgtttttcactatgtctaaggatccttctgctccaaaagcaaaagctcaggccatcaccgagtaatgctcatcagcacccgttgtcttcaacttcataattttgttaaatcgccaacaatttgaattggtaaataagaaagagtttaatgtcatataaaataattttatattattatttaatgataaattatcatttgaattattttaaaatttaataaatttatcctacattataaattgtaatcaaataaaaaatgtgtaaacaaatttacactactttatgtgaaaagcttgatcaagattggaagtatggaaacaagatagagcaagctagctttttaaacaacagcaagtactttaaaat

SEQ ID NO: 40396 - DNA, 546 bp, Glycine max
  unsure (1)..(546): unsure at all n locations
  Clone ID: PAT_MRT3847_136478C.1
cttagcttaaaaaacagggtagttagcctttggaaagcctcataagaaaggaccaaaaggggtgccgaataacccatctttggtcctcaacaatatatcatccttgtatgcaaaagctccattaatatgcatgtgacatgcttgatatctatatagaaaaagtgtcaccttgatttagagctttaggtagtgtgaaggaaaacttgggaaatggatgtgaagaagtactggttcggttcaagaagtcaaaggacacaaaacataaggttaggtcgaaactacacaaaaccccactataggagctattctccaagcagctgtgatggcacaaaaacaacagtgtggcagatgctttggagaaagctgaaaagatcttcagataagaagaaagtgttcagttctcacactacaatggagggtgtctatgatcaagaaacatactcaatgaacttcgatcaaggaacgggatggatggagccagacaatcttcctcgttccttctcagctcggtttgctgatccatctangatcttaccaccaaaacat

SEQ ID NO: 40397 - DNA, 272 bp, Glycine max
  Clone ID: PAT_MRT3847_136479C.1
aaaaagctgaaaaacaagtgttatttattcaaaataagttgtacaaaaaatgcaccaacatttgcacattttgagaattatttcatgcaatataattttaaaattgaaataacaataaatgaatcataatggcacacacttatactctaagcccattgtcccccaccctttatcttgttattacaaataacaatagccattttcagctgcggtgttattttgttcttgttactgttaggagcagcttagtttgtttgcttaaaaacacttca

SEQ ID NO: 40398 - DNA, 243 bp, Glycine max
  Clone ID: PAT_MRT3847_13647C.1
tatagtgtctcgaggacaaattactgggagtgatacaactttcaggggaacaccacaaacaaatattgcgagggggaagataatatccccatccacgaggacaacaacattacgtaacctttattggtgtagaaatatttatttattcatgattattcttatatatgggcggttatctattgggaatattttagggcccactatttatattgagggggggctaaggggttaacatgcttaact

SEQ ID NO: 40399 - DNA, 154 bp, Glycine max
  Clone ID: PAT_MRT3847_136480C.1
ctgtacgatacaggctctctactcattcgcagcatcaaaaagagtgatagcaaccagtggagcgtccgctggagctctaggtttctgaacgagactagagcagctgccggtaccgccgtcgttaccaccctacccagggtttctggtagcttgg

SEQ ID NO: 40400 - DNA, 463 bp, Glycine max
  Clone ID: PAT_MRT3847_136481C.1
ccacattttggggcttaccccattccaggaattcaaaccatttcccaagcctgaaaaacaatccattaaaaaacttgaatcgtcgcttaagcttttccaagcgggcaacgcccccgcactggccattaaagcgaacgtggaaaaaaccaaaaagaaggtccaccactaccccaaacaagggttgctttgccgcggcgatgggttgccgcacctgatcgtgagcggagaccaaaagcactggggtgaattcattacacccggaattctatttctgtacattttgggattgatccgctgggtgggtccgaacttccttgatggcaatcaggaccagaaaaaacccacccttgaagagaacattattcatggttctctggcttcttgcgtggtttttaaggggttcaactggccccttgctgccttcagagaacttcattaccgggaccttattgcctaagatgtg

SEQ ID NO: 40401 - DNA, 608 bp, Glycine max
  Clone ID: PAT_MRT3847_136482C.1
gtgggcctttgcaccaaatacgaagttgttgttataataagcttcttcccacccaaaaaccattcatggcaccaccaattcacacattcacaacctacccttctttctttctctcttaaattttcttcaacctaaccttactttttttgcacacacaatttctctgttattggcttctgggtctccttttgtctacctctcttcttttcaagttcatgtgatgtgcaaccgtgatccgttctagtgtatcatacaattcacagtccattgattccagttttagaattttcaatttgtatgtttttagagatcttcactcttcatgctaattgtttggttctgttaacggtttagtttgaatctagctatataaggaaaataaatgtcttaaccatatatctatatactttttctttatatatgagtattttatgactatcaaatggatatatcaactcctatgaaattgtttttgatttaacaagtgatcttgagtttgaatcttgacaataagactgtattaaatattctggaaatgattttgttacttgtaggatcagccgtataccaaaaacattaatattatgaatatttcatggaatgcttga

SEQ ID NO: 40402 - DNA, 498 bp, Glycine max
  Clone ID: PAT_MRT3847_136483C.1
gagatatcactttattggagtaccttttttcttgtctttagtatattagtgtttccaatttctacaatatttttctacagcctgaagtaatgtagaagtaataaaaaaaataagatatttattatgtcaaaaatagtaaaaatttaattttcaaaataattaaatttatttaaatattaattatttaaatattaaatactcttaaaaaacattagttagagattttttattgttttgaaaaaaattataaaatcaaattaaacaaaacaagcggatttaagaaaaaaaatcattacttattatttctaagctttatgccataaagactagaaatttatttattttttattttggaattaatcatataacaacctctgtaaaaaggtttattatacaagtttaatgattatgcgattttagcgtaaaaaagttatatgatcaatcaatggaaaatattattaatataattcttatataaaatgaaaaaaagaatatttt

SEQ ID NO: 40403 - DNA, 340 bp, Glycine max
  Clone ID: PAT_MRT3847_136484C.1
cccacaacaatttcacccttttttattttttggccattaacattatggaactacatattatcattggctattcaaaccctggtacttaactttctataaaaaaggccatttaatcttaattaaacactactcctggacagagaaaaagtgaccatcactgaaaaaaaaattttcacctgaaaccttaaaactcccagagaaaaaaaaactcatgaacaaaaacctaaaatctacgccaaaatttttaaaccaattaaagggggaaaacaaaaggcttatattaaactgatacgctataaacgaacaaaaataagggccaaatttggagaaaatctaatac

SEQ ID NO: 40404 - DNA, 371 bp, Glycine max
  Clone ID: PAT_MRT3847_136485C.1
tggaacctttgggctgatttatgtgcttgcatggtcgtgagaagatgaagaagggtatggtcgtgagaagatgatagaagggcatggtcgggagaagatgatagaagggcatggtcgtgagaagatgatagaagggcatggtcgtgagaagatgatagaagggcatggtcgtgagaagatgatagagggaccatagccgttcacgttggatcacgtccgccccgctcccatactcccgttgagcgtctctaactaaccattcctcctgggagaatcatcgaaatcgaagaataagatattactactcaaccgcaatacaatcatctacccctgtcaccgcacgctccttttgctaagaacaaactactccc

SEQ ID NO: 40405 - DNA, 422 bp, Glycine max
  Clone ID: PAT_MRT3847_136486C.1
tgggctgatttatgtgcttgtttatgtgcttgcatggtcgtgagaagatcatagaacgggacagtcgagagagaaagggagggccggtcaacaagtaacatcctaacggttatttccgccgcctacaattaaatcctcctcgtctaagacgtcgaggtctcttaataggtccctaaaggacggggggtcgacgataaggttaccacagtaacatcgggctatagaaacgcctactagaggtaagaaactagaaaagtccacgaggagacccattaagaggactctactaaatgttccgagcttgagactctcggcgatcccgagagagtcacgcattggcggacgccgtacttcgtggactgcgacgtcgccccggcgaacgcggtaactaataacgggattaaacatcactacgcgaccgt

SEQ ID NO: 40406 - DNA, 269 bp, Glycine max
  Clone ID: PAT_MRT3847_136487C.1
aaggatcgttatttaaacagcactccagatatatttattcaaccgtctgtttcacatgcttttgcctctaaaaccaggtacacatacatatcatatcattacacatatccaacataaagaaaatttaacattcatacatatattaacttaagaaagcaaagccatgtagttactataaaggacacctgagaaagcatatactcaacacatattgctacttgatatatatatatatatatatgtgtgtgtgtgtgtgtgtgtgtgtgtgt

SEQ ID NO: 40407 - DNA, 189 bp, Glycine max
  Clone ID: PAT_MRT3847_136488C.1
gagaagacaaatctttgaattaaatagatgttctcaaattgcaaaggtgagttcatatctgtaaattggatttattttacataatgcttcattgcaattagaccctcaaaaaaaaaaaaaaaaaaaaaaaaaaaaaaaaaaaaaaaaaaaaaaaaaaaaaaaaaaaaaaaaaaaaaaaaaagaaaaaaa

SEQ ID NO: 40408 - DNA, 137 bp, Glycine max
  Clone ID: PAT_MRT3847_136489C.1
aactctaatcatacttgtgaatcaagaatattttttatatacaaacactagatactccttcacaagccactaacatgatcaaattatgtacttctacctatacaaaacaagaatattttttatatgacattaatcaa

SEQ ID NO: 40409 - DNA, 651 bp, Glycine max
  unsure (1)..(651): unsure at all n locations
  Clone ID: PAT_MRT3847_13648C.1
agtagctcgtgcttatctcctgcaccttgtctgttgcactcttttttctaacaagagtgtaacaaatgttcatgtggtgcatctggaggcttttcgcgacctgggtcagagtgggggctatgcctggggagctgccgcgctggttcatatgtatgagcagttagatgaagcttctaggaccacaacatgacaaattgggggtacctcactttattacagtgttggatctatgagcactttctgagtgtgcatcagtgcatcaccgatgatgcgtacgaagagatgtccccatgtgcctcccggtggctaacgacgaaggctcatatgaagggaattacaggagcgccctaccgggcacattgtgatgctttgacggtcacagacgtgtgttggttgccttatagtgaccatcgaggggttagggnggtttgagctaatttcatcgttccaaggtcagttgagatggggtcctattgtggtcacagttcgaccggagagggtggtgcgccagtttgggtacatttagaccatccctctgccgactgttagcgctttgttgtcatatgatgatatagatgacatgtgaatgcattttctcgaccacttagcaactgcgggtgacatttgtgtagtgcctgggcaggtatctgc

SEQ ID NO: 40410 - DNA, 249 bp, Glycine max
  Clone ID: PAT_MRT3847_136490C.1
gcgtccggatgtaactgaaccaacagtgcttagcacgtgaattttagcataaactccacgaatctagggttttattcgagcccagatcactgcgggtataggttccaccgaataatcttaaacactcactgttgtatattttcaaatatttcattttttctaaaataactgtaatatttcaccaattatatttgtttaccgctattcaatcactcatgattcattttctaaatgtcgatggtatgcttc

SEQ ID NO: 40411 - DNA, 1788 bp, Glycine max
  unsure (1)..(1788): unsure at all n locations
  Clone ID: PAT_MRT3847_136491C.1
acggctgcgagaagacgacagaagggggaaggtaactcaactgttacgtctttcagctcttttattgtgtctgtgtggcgaatgaaccctgctctgcctctccgatccgaaacccatcgcttctaacacccgcagatctccctttctcaacctcactccacaccttacaccaaagtcccccaaactttccatcgcttattattccctttttaccctttctctcttctcacctttctgcaattgcttctctagggtttctccgaggcgacggattttccagttgtatccggtacactctcgtttcctcttacaactataattcatcggcgattcattccgaggaaacgaagataacaaaaaacgtatttcgagagaatgagaaagcaagaagcagagcaaacacaccgtttcgatggggaactgtaacagcgaagcctcttcccaaactcagccacattccgatcaccatccccaaccacgctccaactccaacggcatcaccgtccttcctcccaattcgaagccctccgttggaaaaaaaataaaagaatctaactttcgatggccccttcactgcttctaccttgagcatatttagtggtggaagaagtgcagtactcactatctcacccttccgtcccaccatccgccacattctctcaagacccgacacagacacacttggtcttcctctcacccagaccaacgaaccaacctcttcctccgactaccgttctccctcctattttgaccttagtccatgggaaactgcagcagcggggccggagcccccaccacctactccgacgaccatccccaccacaacggcataaccgtcctccctcccaactcaaacccttcaccccaactccccaagcccccaccgacctcctcctcctcctcctcgctgggccgggttttgggccggcccatggaggatgtccggtccatttacatattcgggcgggagctggggcgcgggcagctcggcgtgacgtacctggtgacccacaaggccacgaaggagcagttcgcgtgcaagtcaatcgcgacgcggaagctggtcaaccgcgacgacatcgacgacatccgccgcgaggtccagatcatgcaccacctcaccggccaccgcaacatcgtcgagctcaagggcgcctacgaggaccgccactccgtcaacctcgtcatggagctctgcgccggcggtgagctcttcgaccgcatcatcaccaagggccactactccgagcgcgccgccgccaactcctgccgccagatcgtcaccgtcgtccataactgccactccatgggagtcatgcatagggacttgaagcccgagaatttcttgttgctcaacaagaacgatgattcccccctcaaggccacagattttggcctctccgtcttttttaagccaggggatgtgtttagagacattgttggcagtgcttactattttgctctataactggtgagatagagagacagaagtaaggttgagatctagagttctgggttaaaagtatttatttgccttccatacgaaactccttactcacatgttgtttctgagagctcctctgttgcaaagtattgctgcttctttgcctgctcgtttgcgggtcgcgtgggccaatttactctcgagtttgtaattttttaacatagggaattaaattttaacttggctcgttagtaaatgatttttgcccttcctgggggaaattagaactgccatttntgcaactgtaaccgctgggggatttgatataaaaatgttttaatttt

SEQ ID NO: 40412 - DNA, 274 bp, Glycine max
  Clone ID: PAT_MRT3847_136492C.1
tttatgcaaagccttaatattttccagtgggtaataaaagtggggaaacaaaaattggtcgttgattggcactatccaaactatagtgatataaaaagctcccaattagtttttggtttaacaacgttcaatcccagttgacttagtcaggaatacttatttgatgaggtggagggagtatttacgcatttgatcacatatagattcgggtgaaagaaagaccgcatgggatcatagtcaaagcgcagttaccacaaactcaagttgatccaat

SEQ ID NO: 40413 - DNA, 297 bp, Glycine max
  Clone ID: PAT_MRT3847_136493C.1
gtaagctcgcagaggcggctcgagatactgactattcactatatctcaccctttatagaagtgcaattccatcctctaactggtccatttcatggctagcggactgcttaacatgaacgttacaagctgcatggttgcggtgttgatggttagttttggacacataatttccttggcagaagctgaaattccatgtggcagggtgcaaatcacagtggctccatgcatagggtacctaagggtgcctggtggaggtgtccctgcagcatgctgcaatggggttaggagcataaacaa

SEQ ID NO: 40414 - DNA, 259 bp, Glycine max
  Clone ID: PAT_MRT3847_136494C.1
ctagctgaggaccaaaaagtgtgggtctcttcttgatgtatcttaaaaattaagttcaataaaatttacaagctgggttttgtaaaaaaaaaaaaacaaaaaaaaaaggggggccccccaatttgtagtcccgtcccccgggaatttattccgggccgggaacttgcggggggccccttttccccaaaagggagccgtttaagactttggcgaaatcagggtcaaaacttttccctgggaaaattttttacccgtccaa

SEQ ID NO: 40415 - DNA, 161 bp, Glycine max
  Clone ID: PAT_MRT3847_136495C.1
gacatctcaattcaatgagtgctgggcatgctgaaactgaacatcacactcatgatatagcatcaatattgaaaaccagaatttctaggcaacattacatgcttcatatgctgttggaagcacgcgtgctactatcaaacgagatagtgtggtccttgatt

SEQ ID NO: 40416 - DNA, 672 bp, Glycine max
  Clone ID: PAT_MRT3847_136496C.1
aacgattgcaagaattattttttattcatttattaatgccttggggcttttgtatatcatggagagcttgcgtgttcaatacattattaacagaattaatgcttgattgatacacataactactatttaacggacatatgaaacaatttttctttaattgcttcaaggcaactttacttgaaaatgtcttcaattccacgtaatcgccgttagggttccatgagcatgatacttattttcttatggttgggttataagcccaagcattcattccacataccccatatggcaaaccggtgttccttttaatccatatataaccatttattccccattttgtcccccacgaattcttcacgatccaataatcttcaccatttgaggaatcataacccacaattaacacgcagtgatttgtatattttgatgacgatgaacattgttgaccatcaaatattccagattcatatagttgaaaatcggttgcattcaaacaaatactaataggctgcttgactatggaacacaagagaccgttgtctgattgttctacttgttcatagccatcaatggttgctttgattggaaccttgtcagaattggcagtttcaccatcttttcccgtataaggatatttctgcttccaaagtaatccttccattgcttataacc

SEQ ID NO: 40417 - DNA, 389 bp, Glycine max
  Clone ID: PAT_MRT3847_136497C.1
gtgggttttttttttttttttttttttttttttttttttttttttttttatttttatttttttttttttgtgatttttattttcttagggaacaaacagactttcttttttccaaaaaccttttgagacctttgggaacaaaagcccccttttacaaaggggaagttttaccttaacaaaaaatggggcctttgggggggtttttagcggggtttgtttacaaaacaaaaaaccccgcttcttaatatgttgatggggccaaatgggaaaaccccttggaagacttgaaacaagggggaaaaaaaactctttgaagggggagaaggaatcttttgtttggaggctgtacatttatatgaggagtgtttttggaggggagggcccccccc

SEQ ID NO: 40418 - DNA, 361 bp, Glycine max
  Clone ID: PAT_MRT3847_136498C.1
gttgggacccaaattttgagcttacttacccgggaataaaaagcgaaacgttttttgtagggggaccaaaattcaataaactgggcggggttatacaacgggggaacagggaaaaaccgggggccccccaaaaaaatggggtggggggaaattcccctttaacaaaggggggaaaaaaaaaaaaggccaacccggggggccccccaaaaaaggggcccacccataaaggggaatgggaccccccccgcctggggacaataaaaaccggggggggggggggtaccaaaaagggggcccccccccggggagaggccctaatgcccccgggctgcaggggggttctttctttttaccccaaaaa

SEQ ID NO: 40419 - DNA, 619 bp, Glycine max
  Clone ID: PAT_MRT3847_136499C.1
ccgggagtggtgagaacaaccctcatcggtatcgccctggaactgttgctcttcgtgagattacgaaataccagaagagcactgagctcctattcaggaagcttcctttccagaggttggttcgtgaaattggccagcatttcaagactgatctgcgtttccaaagtcatgatgtgcttgcattgcaagaggctgctgaggcataccttgtgtgggctctgttgaggacactatcttgtgtgccattcacgccaagcgtgtgactattatgcccaacgatattcatctgggaagaaggattcgtggagagcgtgcttgatttgctgcgttctgtgtttgtgaaaatggattgttggtgactgcgaatggtgtgttgttactaagtcctctgtcttgttgaagcctatacgttatctatcggaccaataggtgtttacttggtagtcctattaatcgtcattggtcaatactgcctaagacactgtgaagtgctgaatgctataaatttggcatgtattcgatttttctggatcctttattctctcgatttatttctggctagtgcagccactttgagaattgtattgcagcacttttctgttgccatctcatctatgtg

SEQ ID NO: 40420 - DNA, 257 bp, Glycine max
  Clone ID: PAT_MRT3847_13649C.1
aggctgtcgttgcgccaatcgcggcgatgttgttggtggtgctactcgcggcgagtgtggtggtggaggctcaggagaactcggacgtgaagacgctggtgaagcacatgcacgggaagaagtactgcgacaaaggatgggaatttcgagaatctcttctccaagcggaactcgccggtggcgcacgccgtcggattttgggactaccactcgttcatcgccgctgccgcgcttttcgagccgcaagggttcggcac

SEQ ID NO: 40421 - DNA, 291 bp, Glycine max
  unsure (1)..(291): unsure at all n locations
  Clone ID: PAT_MRT3847_1364C.1
cgtccgtaagcttgcaattcggctcgagattttcaagaaaataaaaaggatggtgctactttagctggccacttgagaggcctctccttacatagtcacaatggcagcagctctcacagtggaagctttgattttagtgattgatctcttaacttaaagaacctctttttttaacctttgaagttgatagtgtgtgtgtgtgtgggggggggggggggtntgagatcatgtgctttgagacccgggggttgtaaggtccatgtcctagcgtgataatgcttttactttcta

SEQ ID NO: 40422 - DNA, 205 bp, Glycine max
  Clone ID: PAT_MRT3847_136500C.1
gcttccacaaccctatcgcacatctttctcagttctacgatggagttttggggctgctcttggtgaggcaaagaaggataagcctgaaccgggggttctttacatgaaagttggggaacaaaaatttgtcttgggaaccctttccaggggaaaaatccttcaaatatttttggaattggttttggaaaaggagtttgagctttcc

SEQ ID NO: 40423 - DNA, 429 bp, Glycine max
  Clone ID: PAT_MRT3847_136501C.1
ctgtgcaaacaaaaaaggatatatctttgtctcctacattttgatctacaatatcaactggaagattgacacccattccggttgaagagttaccatcttcatctttaaacctggaagatcttttctgtcaccaaggaacacaattctagcttcataaaccccaaagaatgagcccagccaacctgaaatgcaatcaaagagtcagcaaaattaaacataatcaatatactttatttactcaaccatgtaatatcatatctctctcaaatctcttgactgccacgtctcctccaaatgaagataccctttatacacttttgcagatgcaccctccccaacaagcctatctcgattgaactccattgtagtatacttaatgtcagaaagtgacaaccttcttggcactttactcgtgtcaaacctacaact

SEQ ID NO: 40424 - DNA, 304 bp, Glycine max
  Clone ID: PAT_MRT3847_136502C.1
aatccatcacgccacgtgtgcgatggtgacagtgaagagcacacatctcagcaaaggaaattcaaacttgtctaacttggtggaaggaaggaactttgaagccatcttttaccacatgatccggggaccacgccatccttgcgcaaaaccaaccattagtgatatggaaaaataattcagatcctttctgattttttattttttttttatctaaaccccactttgtttctaggctttactctgattgaatttccacactccacacatggaagtccccatctctcaaaaagctattgctttttac

SEQ ID NO: 40425 - DNA, 545 bp, Glycine max
  Clone ID: PAT_MRT3847_136503C.1
gtgtgcaaggtagagtacaaactgtggttgaagatttggctactcaaggagaaagagctcaagccatactaggttggagagactccagggccacatctatcttcatcatcttctcactcatttgggccgttttcatttacattactcccttccaagtggttgcaattctaattggcctctttatgctgcgtcatcctcgctttaggagcaagatgccatcagtaccagttaatttcttcaagagattgccttccaaatcagatatgcttatatgatgaccggctttgctgtttctctttttatccatccaccacctattattgtgcacaaataatcacaatgtatgaataaacagaccttcaccattacacgtaaaattaaagagggtacagcaaacatgtgcatagtccccctccaatttcattagcaaaaacacactttctttgtatgaaagtatatatatatatacataaatcccaaagcttcagtttcagctatgaaaaaataaatattcttcaagaaaacacaaaaaaaaaaaagggcgg

SEQ ID NO: 40426 - DNA, 224 bp, Glycine max
  Clone ID: PAT_MRT3847_136504C.1
tgattcactgcatgcctcacgtatgcgttccagtttttagcattgttgcataatcaactggtttgaacatggacatacgtcaacacgctatcactccattagaattaattatggtcaaggctgcttcctccctctacttacggaaaaccacgttgttccagggtccgtccatttccttcatggccttggccacaggttaagacatgcagcaggaagaggtcctc

SEQ ID NO: 40427 - DNA, 130 bp, Glycine max
  Clone ID: PAT_MRT3847_136505C.1
gttgtcacctaatttgaatgcctaagggggcttcaaattgaaaaaccaaagttcaagttgcagggaaacagcattgaccatttcaactgccgaagttgttttttgacttaaaatcaatatctggcagatt

SEQ ID NO: 40428 - DNA, 428 bp, Glycine max
  Clone ID: PAT_MRT3847_136506C.1
atcacgcgtccgcccacgcgtccggcgacgggtgcttcttcacaggcggacctctgctaaatgacaagtgcaagcaggggaaaacatggattaaagctaacactctcctatctggtataggacatcgagggaagactgggatctaaatgcactaccatgaagtctcttcactgtactgaaccgaatggccatacaacgtggactcaagagaaaaacactagggcgttggaccgaagattagctagggtggcatcatctggggacaacagggtcagtgaggaaacaaccaccactagcagagactcagccgtactggttgtgcatactacagaagcaacgcagtgaggaggagtgcaaccgcctaacaatggggggcatctaaagaccatggtgatgaacattgtaccatgttttgtaactgctgaaag

SEQ ID NO: 40429 - DNA, 315 bp, Glycine max
  Clone ID: PAT_MRT3847_136507C.1
taataatcaacgtacaacagtataatcaacatatcctaactaacaggtacaccgagccgacatcgtttgatgtgtcatagcttattcccttctgtagaacctttgctctaatccttgctcagattcttggtgcattacgccgaatcttacacccttttatattgcgtatgccacgcttcaccttttgcaagcgcacagcgatgccactatgcgactacgccggcgaggtgcatgaaccgcttttgtttcatgaggcaccaatctcagtaatccattatgctcaaattcagtgacggggcgctccagcgcaccaat

SEQ ID NO: 40430 - DNA, 304 bp, Glycine max
  Clone ID: PAT_MRT3847_136508C.1
ccacgcgtccggcagaaagtgattgttgctcctagcaagaaccttatagctcctaattttgtgcttgggaatctgatgggggctcatggagagcactccagggctggtggtgctaaggtagacagacctgatgatgaaatgctgtctggaggaacacaccgccattgtctgaactacttttaaggataatgcgtatgcaaatcgttctagtatgtctgaggcttatgctatcgttgtaaatataaattacgaacttactgctgtgtcaccggtttctgtgtgacatgccatgacaggtatgttt

SEQ ID NO: 40431 - DNA, 730 bp, Glycine max
  Clone ID: PAT_MRT3847_136509C.1
actacttcagtgtaaaaaaagataataggcataacaaatattaagactttcaatttagaagtacatttgttacaacttatgttttttcggatattaatttaaaatttaccttcaaatggtaaatttcttttttaaaaaaactaatcccaaataatgttttacttcataaatcaacatgtgaaactctaatactccctgcgtttcttcttccagagaaagaaaaggcttatctaattaatttccagcatttattattttgtagccaaaaaacttgttaattaattaaaggtatttcaaaaaaataataatacaacaaaaaaataaagagaatcttatacaaaaaacaaacaactttttttaaaaaaatcttataaaaagacaggagaaccgcagacacgtttcatatgaaaaggttttattggtaagacttgagtgtttggataaaacttaaaaaaaggaagaatataatatgttcttttgtgtttatacaataaattttttaatttaatcttcactcagggttactggtgtaacattatgttatctattagaattataacatagtaaggacatgtgaattaaactaaaaaagagtcatacctatagagacaataggatatactttgggtcttatatggggacataacttacaattgaggctctatatattgctgatcatgaccaattaccaagttggaaatccacttccaccttggcttgaattacttga

SEQ ID NO: 40432 - DNA, 1658 bp, Glycine max
  Clone ID: PAT_MRT3847_13650C.1
gtcgacccacgcgtccggttctattttcgagcggcgccctttttttttttttttttttttttttttttttttttattaaacattattttttattttcaatatattttagtctataatttcttttatattttagccacactgatatttattgtttggatccgtccctccttataacatagatcactttaaagtaaattaaaccatggatttaaaggaaaaaggggattggtttaagatgaagtgcctctttcttgtaggtaactaggccatatgtttcactcatgtctatgtcttgtccagatgtgtgagttgcaggcagcttccaattgaaccaataaagaaggttggccagaatatactcaacagaagcaagcccaaacgtcattccggggcatgcccttctcccaaaaccaaatgtaataaattgcaagtcttggccattaaaatgaacccggctgttatcatgtctctctggaatgaactcttcaggtctttcccaaaactcagggtccctctgaattgcccatgcattgacatataccagtgtttttgctggaatatcataccctcccagtttcacactagatgctgtctctctaggagccaagagaggagcaggtggatgtaaccttagagtttctttgattacacatttcatgtagtccatttgattgatgtcattttcctctacttttgatttattccctacaaattttctcacctcatcctgggctttcttcaatttcattggatttttcatgagctctgccatagcccattctagtgctgattgatttctccctcttcgctctctctcagtgaccagagacagatgatgatggagatggcgaagcgaaacgctgtcgttgcggcactcgcggcgttggtgctactcgcggcgagtgtggcggtggatgctcaggagaactcggacgtgaagacgctggtgaagtacaagcacgggaagaagtactgcgacaaaggatgggaatgtaagggctggtcaatttactgttgtaacctcaccattaccgattatttccagacctaccagttcgagaatctgttctccaagcggaactcgccggtggcgcacgcggtcggattttgggactaccactccttcatcgccgccgccgcgctttttgagccggaagggttcggcaccaccgggaacaagacgatgcagatgatggagatcgccgccttcttcggacacgtcggcagcaagacctcttgtgagtagtagtactctccatcgataatttgttgatttagttttctgaacttcgttttgagattgcgcgcgtgtgtgagaatctgtttaggttgagctagcggttttgagattgtgagatctgtgtgtgttgtgatgtttgagattttgaatgatttggattttttcttgtgttgcctaatttgattgctatgctgtaaaccttggtttgtttggaactggtgtcggtgcggtcgatttttcatgcgttcacatagtcgtcatcacatttctaagtggctgttggatgacgattggacgactcggttttgaatgtgtgtttttaagtctgatttatcaaaataaaactcgagctgttcgatcttcatatgacagttatgagttgttgaatgtgtgaatgtgaatgcatggaaaattggat

SEQ ID NO: 40433 - DNA, 1852 bp, Glycine max
  Clone ID: PAT_MRT3847_136510C.1
gtttccaaagagaaaatgttactcatttcacaagctattctgaaagacaatagatacagttatgttccaacaatattctctcaatcctaaagctttacataggggaaaatccacaaaaaaaaaaaaaaagccaataaatcatcactccctgacaaagcctacacaaaaaaggggaaaagaaattaaaaaattacatttgtttgtctatgatcctcaatgcttattatcattattattctttatatttttatgaggggacaatcaactttactctatatatctcattgtcttgccaggggctatgtaatcttacgattgtatcttgatgaacttcaactgaaatttggactcaaccaagttttggtgtcaaaaacaagtaaaacaattttcaacttattgtttcagctcacttgctcaccaatcaagtccaaacccattatgagaaatgacaatccttggaagagcaaaaaatagaagtgaacaccatgtgctgacaaaagacttcttgcagatgctgtgagcaaaagaagtgcaagtgccagttccttcctataaagtctgtttctttttttctttgaaggggcttctgattgcttaagtttgcctaataactccaagccagactctgagtgtcttctcagaatcttttcttcatttgaagactttgactctctctcagccaaggctaacaaatctgattcagaggatctccctgtcttctttgtcactacccactcataagcacttcctagctgaaataatccagaaatcatggcattgaactttgtaactgacatggtgttctcaaatagaagataaggaactaggaaagggacagattttggggatggaaggatgtttaagaaagacatgatgatggggacataacatatcacccaaaggggcagttcagactcaggtatgaacattgtcaagggtagtatgatgcaaaacaaggtgaaggagtagaagggaagtataagtttcctcaacaggaagaacaaaaatattaaattagccttcttccatactgatatcttggaagttagtatagcaggaagacatagcctgaaaagctgcattgggccagagtgccaacgatgttgttgtttcttataagcttcataagactctggtaactcacatagaactttgacatcattaaggaagatgaacttccatccattcaagtgagctcgaactgctatgtccatgtcctcaaccgtggtcctctccaaccaccctcctgattcctccaaagcctttatcctccaaacaccagctgttccattgaatccaaagaaatttaggaagtagccattaacttgttgttccacctcaaagtgaaagcacaagttgatgttctggagcctcgtgagtagattctcatccttgttcacaaaggaccatctagcctggaccaggcccaagtcaggttttcccttaaaatggggaatggttagtttgaggaaatcaggattgggctggaaatctgcatcaaatattgccacaaattcatagtccttgacatagtcacatgacattgctgacttaagattcccagctttatacccagttctaatcaatctgtgcctgtacacaatgttcacccctttctctttccatgaggccacctcttctttgatgagcagctgtaaattcccatcatccgaatcatccagcacttgaatcaatattctgtcttttggccaatcaagttgagcagcagcaccaattgattgtgaataaacctctctctcattgcacatgggaatctgaacaaggaccattgggaagtttgaaggatcctcaccatcacatgcatctgcatcaaaggttggcaacaacatct

SEQ ID NO: 40434 - DNA, 559 bp, Glycine max
  Clone ID: PAT_MRT3847_136511C.1
ctgttaaaacccaactattttttctaggatgtcccaacttgactaaacccctgttgaaaataaaaaggaaacctcttctgaaaaaagggaagtgtaattgaacaaacctggaagcctccacacaagtagcttaaactgataaaaaataaaaaacggcctatacaaggggttaccccgagcaaaacccgaaagttctacgcttcttaggctgaacccctagaaccccaaaaaccctaggagaaagagcctggttggatgctaacaccgggaaacaaaaaccatagaaaagggttcgggggtagctttttatgaagaaactcccccggaacaatgacaatggacaagatgtttgtcttgagagggaaaccaatgtctctattttaattgctgaaaaagaggcagaaaaaataaaatctacggggcccaagtgtgaaataaatacctttgaaaacccactttctgcccgtgaaagggaaaaaaacccctccttaaaaccccgtggattttacccacccttaaaaacaaccccgttggttacaattttgctctaaggaacaac

SEQ ID NO: 40435 - DNA, 281 bp, Glycine max
  Clone ID: PAT_MRT3847_136512C.1
cacaacgtccccttttacatggaatttgcatttctacaaatagcaagcgatacctaataatggaggcgggtccatcgactattcaaggagatcggaactcaaaccttatgaatcaagccttccaacatcaacagcttactcaccaaatcaaaacttaccaaagaaattttatgaattcaattatagctcctaaaactaaccctttatccatatggaaaactcatcctaaaagaataatgtctgaaatgcataagaaacttataccaccttattcactatac

SEQ ID NO: 40436 - DNA, 306 bp, Glycine max
  Clone ID: PAT_MRT3847_136513C.1
cgctgcgcccttgcatcatagtgtgtacaagaacaagcggaatgactcgccaataatatgttgaattcccataaattgcgaagcactctcatttctgatcatcgttgacgctgatacctggctcatccatgactgttcctggtcgcacacaacaaacggttgtcggcatcaaaatcgaattttaggggaatcgttatcactatgcgtgcactcacccaactggtgaacgatcttatacccagataagggaggggacctactctgtctcacttactccgacatgtgcacaaccatcaaccacatagt

SEQ ID NO: 40437 - DNA, 2910 bp, Glycine max
  Clone ID: PAT_MRT3847_136514C.1
cggccgctcttcggcgcggtgcaagtacacacgacacaatccaaatcaagcatcaccatgttccgccaccgcttcctcctcatactgtaccccgcacaaggccacatacaccccgcattccaactcgctaagagactcgttagtttaggcgcacacgtcactgtttccaccaccgtccacatgcaccgtcgcatcaccaacaaacccaccctccctcacctctcctttctccccttctccgacggctacgacgacggtttcacctcctccgatttctccctccacgcctccgtgttcaagcgccgcggctccgagttcgtcaccaatctcatactctccaacgctcaagagggtcatcctttcacttgtttggtctacaccacactcttgtcttgggtcgctgaggtggcgcgtgagtttcacctcccaacagcgatgctgtggactcaaccagctacgatactcgacatcttctattactactttcacgaacacggtgaatacatcaaagacaaaatcaaagacccctcgtgtttcattgaattaccaggattgccattgttgcttgcaccacgggacctaccctcttttttattgggttcaaaccctactattgactctttcattgtcccaatgtttgaaaagatgttttatgatcttgacgtggagacaaagcccagaatacttgtcaacaccttcgaagccttggaagcggaggctctcagagccgttgataagttcaacatgatcccaatcgggccgttgattccctcggctttcttggatgggaaagatactaatgatacttcatttggcggtgacatcttccgcctctctaatggttgcagcgaatggttggactcgaagccagagatgtcggtggtttatgtctcgtttggtagcctttgcgtgttgcctaagacgcaaatggaggaacttgcacgtgcgctattagattgtggaagtcctttcctgtgggtcattaaagaaaaagaaaataagtcacaagtggaaggaaaagaggagctgagctgcatagaggaattggaacagaaggggaagatagtaaactggtgttctcaagtggaggttctttcacatggttctgtgggttgttttgttacacactgtggttggaattcaaccatggaaagcttggcatctggggttcctatggtggcatttcctcagtgggtggaacagaagacctaagctgcagggaggagttggaacagaaggggaagatagtaaattggtgttctcaagtggaagttctttcacatcgttctgtggggtgttttgtgacgcactgtggttggaattcgacaatggaaagcttggcttcgggggttcctatgtttgcatttcctcagtggatcgaacagaagactaatgcgaggagtgaatagaagatgtgtggaagacgggggtgagagtggataaacaggtaaacgaggaagggatatggtggtgtttcctcagtggtcgtaccaaaagacaaatgctaaactgatagaaaatgtgtggaagatagggctcatggttctccaacgcttcctcctcgtgacctaccctgcccagagtcacataaaccctgccctccaactcgccaagcgtctcatcgccatgggcgcgcacgtcaccattctcctcactctccacgtttaccgccgcatctccaacaaacccaccatccccggcctctccttcctccccttctccgacggctacgacgccggcttcgacgccctccacgccaccgactcggacttctttctctacgagtcccaactcaaacaccgcacctccgacttactctccaatctcatcctctccagcgccagcgagggccgccctttcacttgcctgctctacaccctcctccttccctgggttgctgacgtggcgcgccaattctacctccccacggcgttgctctggatcgaacccgccacgattaaacaacttgacctagaaaccaacccaacggtgcttgtgaacacctttgaagctttggaagaagaagcgttgagggccattgataagatcaacatgatccccatcgggccgttgattccttctgcgttcttggacgggaatgacccaactgatacttcgtttggtggggacatttttcaagtctcaaatgattacgttgaatggcttgactcaaaggaagaggattcggtggtttacgtttcatttgaagggtggacgtccatttttgtgggtcgttagagaaaaggtaattaatggaaaaaaagaagaggaggaggagctttgttgtttcagagaggaattggagaagtgggggaagatagtgacatggtgttctcaggtggaggttctttcgcattcttctgtgggttgttttttaacacactgtgggtggaattcgaccatggaaagccttgtttctggggttccaatggtggcgtttcctcagtggactgatcagatgaccaatgcgaagctcatagaagatgtgtggaagataggggtgagagtggatcatcacgtgaacgcaaatgggatagttgaaggaaaggaaattgaggcatgtttggatgtggtgatggggagtggtgacagagcaagtgaatttagaaagaatgctaagaaatggaaggttttggctagggatgctgcgaaagaaggtggctcttcagagaagaatctgagggcatttgtggatgatgttagacaaaaatttatgcatacacatgtgggtgaatattaattaagttcgtctctaactagctagtagtaagctgtaatgtgttattgtatgcttatgatgcatggcttcaaacattgaaagatgaactgaaaaaattaagaaattataagtcagttaataaaaatgtgcgaaaatggaacctcttcaataataacatgtgcgtgttgcgg

SEQ ID NO: 40438 - DNA, 228 bp, Glycine max
  Clone ID: PAT_MRT3847_136515C.1
atgaccctcttgagcgttggagagtatgagattggtgacgaactcggagccgcggcgcttgaacacggaggcgtggagggagaaatcggaggaggtgaaaccgtcgtcgtagccgtcggagaaggggagaaaggagagtctcttagcgagttggaatgcggggtgtatgtggccttgtgcggggtacagtatgaggaggaagcggtggcggaacatggtgatgcttga

SEQ ID NO: 40439 - DNA, 1458 bp, Glycine max
  Clone ID: PAT_MRT3847_136516C.1
atgttccgccaccgcttcctcatcgtgatgtacccagcacaaggccacataaaccctgcatttcagttcgcaaagcgtctcgttagtttgggcgcacacgtcactgtttccaccaccgtccacatgcaccgtcgcatcaccaacaaacccaccctccctcacctctcctttctccctttctccgacggctacgacgacggttacacctccaccgattacgccctccaagcctccgagttcaagcgtcgcggctcagaattcgtcaccaatctcatcgcctccaaggcgcaagagggtcatcctttcacttgtttagtccacaccgtgctccttccttgggcagctcgggcagcccgtgggtttcacctcccgacggcgttgctttggactcaaccagccaccatactcgacatattctactgctactttcacgaacacggtgactacatcaaaggcaaaatcaaagacccctcgagttccattgaactgccaggattgccgttattgcttgcaccacgggacctaccttcatttctattgggttcaaaccctactattgactctctcgcggtttcaatgtttgaagagcaacttcatgatcttgacatgcaagcaaagcccagaatacttgtcaacacctttgaagcgttggaacatgaggctttgagggccgttgataatttcaacatgatccccatcgggccgttgattccctcggccttcttggacgggaaagaccccactgatacttcatttggcggtgacatcttccgcccctcgaatgattgtggtgaatggttggactcaaagccagagatgtcggtggtttatgtctcatttggtagtttttgcgtgttgtcgaagaagcaaatggaagaacttgcacttgcgttattagattgtggaagtcctttcttgtgggtcagtagagaaaaagaagaagaggagctaagctgcagggaggagttggaacagaaggggaagatagtaaattggtgttctcaagtggaagttctttcacatcgttctgtggggtgttttgtgacgcactgtggttggaattcgacaatggaaagcttggcttcgggggttcctatgtttgcatttcctcagtggatcgaacagaagactaatgcgaagctaatagaagatgtgtggaagacgggggtgagagtggataaacaggtaaacgaggaagggatagtagaaaatgaagaaattatcaagtgtttggaagtggtgatggggagtggagagaaaggacaggaattgagaaacaatgcaaaaaattggaggggtttggccagggaagctgtcaaggaaggtagcggctcttcggataagaatctaagggcttttctggatgatctttgcccacattaagttgaagtttgaccatatggctgtcacatcagcttttccgtttctgaattttcctgtccgtttcatttttctttt

SEQ ID NO: 40440 - DNA, 366 bp, Glycine max
  Clone ID: PAT_MRT3847_136517C.1
ctaggcaccacctccaatcccgacacaaccagctcgaaattttccgcaccgcagaatgtcgtgattcttgtggcaaccagagttgttgttcttgctagctctatattcttctcctgtgtggcagtattgcatcaatgcatgttccgccaccgcttcctcctcatagtcactgtttccaccaccgtccacatgcaccgtcgcatcaccaacaaacccaccctccctcacctctcctttctccccttctccgacggctacgacgacggtttcacctcctccgatttctccctccacgcctccgtgttcaagcgccgcggctccgagttcgtcaccaatctcatactctccaacgctcaagagggtcat

SEQ ID NO: 40441 - DNA, 1437 bp, Glycine max
  Clone ID: PAT_MRT3847_136518C.1
atggttctccaacgcttcctcctcgtgacctaccctgcccagagtcacataaaccctgccctccaactcgccaagcgtctcatcgccatgggcgcgcacgtcaccattctcctcactctccacgtttaccgccgcatctccaacaaacccaccatccccggcctctccttcctccccttctccgacggctacgacgccggcttcgacgccctccacgccaccgactcggacttctttctctacgagtcccaactcaaacaccgcacctccgacttactctccaatctcatcctctccagcgccagcgagggccgccctttcacttgcctgctctacaccctcctccttccctgggttgctgacgtggcgcgccaattctacctccccacggcgttgctctggatcgaacccgccacggttttggatattctttatcacttctttcacggctacgccgatttcatcaacgacgaaaccaaagagaacattgtgcttccgggattgtcgttttcgctttcgccacgcgacgttccgtcgtttttgttgctgtggaaaccgagtgtgttttcttttactctcccgtcgtttgagaatcagattaaacaacttgacctagaaaccaacccaacggtgcttgtgaacacctttgaagctttggaagaagaagcgttgagggccattgataagatcaacatgatccccatcgggccgttgattccttctgcgttcttggacgggaatgacccaactgatacttcgtttggtggggacatttttcaagtctcaaatgattacgttgaatggcttgactcaaaggaagaggattcggtggtttacgtttcatttggtagctactttgagctttctaagagacaaatggaggaaattgcacgtgggttattagattgtggacgtccattcttgtgggtcgttagagaaaaggtaattaatggaaaaaaagaagaggaggaggagctttgttgtttcagagaggaattggagaagtgggggaagatagtgacatggtgttctcaggtggaggttctttcgcattcttctgtgggttgttttttaacacactgtgggtggaattcgaccatggaaagccttgtttctggggttccaatggtggcgtttcctcagtggactgatcagatgaccaatgcgaagctcatagaagatgtgtggaagataggggtgagagtggatcatcacgtgaacgcaaatgggatagttgaaggaaaggaaattgaggcatgtttggatgtggtgatggggagtggtgacagagcaagtgaatttagaaagaatgctaagaaatggaaggttttggctagggatgctgcgaaagaaggtggctcttcagagaagaatctgagggcatttgtggatgatgttagacaaaaatttatgcatacacatgtgggtgaatattaa

SEQ ID NO: 40442 - DNA, 604 bp, Glycine max
  Clone ID: PAT_MRT3847_136519C.1
aaaagcaaatataggacggcaagaaattaaaaccgttcactagtactatgtcacagtttttgtcttaaatgaacatttagatgaaaacgagacaacccagagaaaatcataaaaaaaaaaactcaataatcaatcttttttcttgtcttggttaatttcgtcaagaatcagaatcagtgccactatgaatgcatagtcaatatttggatacactgtaactatgaagttatctttacccaacgcaatgctttgaacagtgtgcttcttatgcatctgggcagcaatggtgagagattcaccagcataaacaacacaagatcgctcgaaccaacttcctttgaccttaaagtcacaaacttcttctttagtattgttagctaagaacacatctaattttgtctttagctggaaaactgatgatttctttacactaaagatcaaatctttcagctccgtgctttcaccacggaaaacttgccactgatcatgagctgacataatcttccggcgtagtgtgacaatgggttcgccggcggcatcaagcagacacggtgggcatggagggtcatcagagagcccttaaggttgaaacaattttgccatt

SEQ ID NO: 40443 - DNA, 977 bp, Glycine max
  Clone ID: PAT_MRT3847_13651C.1
tacggctgcgagaagacgacagaaggggataactagtcgtagtattatttcatcgattctctcccttctctttctctctgcgacaccagatgatggagacgacggcgaacgaaacgctgtcgttgcgccaatcgcggcgttgttgttggtggtgctactcgcggcgagtgtggtggtggaggctcaggagaactcggacgtgaagacgctggtgaagcacatgcacgggaagaagtactgcgacaaaggatgggaatgtaagggctggtcaatttactgttgtaacctcactattactgattatttccagacctaccagttcgagaatctcttctccaagcggaactcgccggtggcgcacgccgtcggattttgggactaccactcgttcatcgccgctgccgcgcttttcgagccgcaagggttcggcaccaccgggaacaagacgatgcagatgatggagattgcggcgttcctcggacacgtcggcagcaagacctcttgtgagtactactctcctatcgataatttgttgatttagttttgtcaacttcgttgagattgcgcgcgcgtgagagagagtttgtttaggttgagctagcggtttttgaggttgtgagatctgtgtgtgttgtagtgtttgagacttcgaatgatttggattttgttgttgtgttgcataatttgatttctgtgctgtaaaccttgttttgtttggaactggagtcggtgcagtcgatttttcatgcatttacatagtcattgaatgatttggatttgttattgtgttgtctgatttgattgctattttgtaagccttgatttgtttggaactgtattctgtgcattcaatttttttcatgcattcaggcaagttgttgcatttgtaactgactattggatgaagattggacgactcggatttgaatgtgtattttatggtctggtttatcaaaataagcatgagtcatccgatc

SEQ ID NO: 40444 - DNA, 347 bp, Glycine max
  Clone ID: PAT_MRT3847_136520C.1
ctaagcctgtggtgtaagcttcttgggatcgagtgttgtgttattttggcgcccctccaattcttttgaatcctcatgaccggcactccacccatctcatctctcttcgatcttaaatattgaatctttgaggggtcagaatcagaatgtcggcaaccatggagcagcaacgccaccataaagcgccccaacaacatgacgaagccgaagagatacaacctggccctttacccgtcgagcaacttcaggcatcgggcattagccgccacggacgttaataagcttaaagacgccggaatttgcaccgttgaatccgttgcttacactcctaggaaagaccttttgca

SEQ ID NO: 40445 - DNA, 106 bp, Glycine max
  Clone ID: PAT_MRT3847_136521C.1
caattctcagatagtaattaatttggtacacataaactattctcttgacatgatttggctcctctgtaatccaccgatctagtcatgcaagtgagtcaacaaagaa

SEQ ID NO: 40446 - DNA, 225 bp, Glycine max
  Clone ID: PAT_MRT3847_136522C.1
acctcttaatgaccaaccgtatattccatgaaccacaatggtgatatgaccaagcctactaatgggttttttgggtgaggggggcctaccattgcgaagaagccaatcacactgcgggtaaagagcacaggttttattttttttttttggaagactaacccacatggaaaaggatgtaaaaaaaaacacattagacaccaccccctctatgctttacagaagaag

SEQ ID NO: 40447 - DNA, 504 bp, Glycine max
  Clone ID: PAT_MRT3847_136523C.1
acgaaactaaatccactgcatcaaaaggcactgaatgtctacatataaacaacgttccccacaacagaccttctggacgggaaaaatctcccactcacacaaattttggttaaaaaaaaagaaacagtctatatcaatttattataaacgacaattacattcattatcaagtccattacggatcccatcatcagcatatcatgaaggaaggacctcaccgaattttttttactcttctgcagcactagcctgactaagatccacactcaggttagtaaccttgccagttatcaatggatgcatgctgggaacatcatacaccgttgactcaaagtgagtagtaacctactcacttggtgatccaaaccagatgtgcaaagtgggttcatggaccggctcatatcagccatatatatcaaaaaatatctcatcatcaggatctaaaagggcaattccaggtttaagatcaattggtgggtgaactgcctctggcttgggagatac

SEQ ID NO: 40448 - DNA, 477 bp, Glycine max
  Clone ID: PAT_MRT3847_136524C.1
ttaagaaaaatgttagggattatagtttttcctttggaacattactaacattggtagtggtcatgtttggcaggcttagctttggaattgcagttattttattaattgttgccacaagcatgagcagaaggcaggcctatggggaagggtggttgaatggtgagtgttatcttgtcaaaggagggatttacgttggtttagcaatattgatcatagtttcagtagaatcgttaatgggttcagctttgttaccaatgaagaccaatgatgaagccgatcagggtaacaaaatacatgcacaaacggaacggagtgacacttgagattaaagaattttatacattatagtagaatgcagactcagagtataaaatggattgaggaacatcaactgctcctaaaagagacatttcttttaggaataacttttttttctttcgacttacattatacgaaagagacatattcttttgtaaa

SEQ ID NO: 40449 - DNA, 767 bp, Glycine max
  unsure (1)..(767): unsure at all n locations
  Clone ID: PAT_MRT3847_136525C.1
aagtaataagggtgatcagacgaagatttttgatgaagagcatagagatcatgacaatacttctgtggttgaggagcctgaaagcatacaggagaagattattcaacagacaggcaccactcctagtgcagctgaaccaaaggaagcaagtaataaggatgatcaatctcagatttttgatgaagagcatagagatcatgacaatacttctgtggttgaggagcctgaaagcatacaggagaagattattcaacagacaggaaccactcctagtgcagctgaaccaaaggaagcaagtaataaggatgatcaatctcagatttttgatgaagagcatagagatcatgacaatacttctgttgttgaggagcctgaaagcatacaggagaagactattcaacagacaggaaccactcctagtgcagctgaaccaaaggaagcaagtaataaggatgatcaatctcagatttttgatgaagagcatagagatcatgacaatacttctgtggttgaggagcctgaaagcatacaggagaagattattcaacagacaggaaccactcaagtgactggagagcaacatgttcaacctgcagcagatatttcttcttcatctaaaaggtctgctggtactgtgcctactcctgtccgtccttcatctgaaaattctcctgctgctgngcccactcctgttcatccaactggccttggtcgtgcagctccattactggaacctgcatctcgggtagtgcagcagccccgtgcta

SEQ ID NO: 40450 - DNA, 151 bp, Glycine max
  Clone ID: PAT_MRT3847_136526C.1
tacttctcctacctaacgaacaggttaagacactgcacactttgctgtccgccttggccgagcagagcttggccttgaccctcggttctgccctagaggactctcagtcacaacatacaccgctgacgagcggagagagcatcgataggca

SEQ ID NO: 40451 - DNA, 545 bp, Glycine max
  Clone ID: PAT_MRT3847_136527C.1
attatttttttttttcaatattagttgggctacttttataatatttatgcaagaaaagttaatgacacaagttttacatatcaaattaataaaaaataagattcaaaagtgtgacccataaccgacaaatcaatgtttggaaatgaccataaaagacataaaactaaattgatttttttaaaagataaaaaataaacaaaatataaacacaaaagactaaaagtgcatttttgtcattataaaacaatactgtacatagtatataggatataattgccttcgaactcgagaaaaagttcaataggggaaaaatgtacatttgaaacactgtattggtggctatagtatttgtccacattgaaaaatccatgaccttgaaagtatggaaacatcttaacatgtgtggtctttttctttatttgaggctgaagttttatctacatcgtggtggaaagtaaaaaaaccgtgattagtaaataccacagttacttagagcgcagacgaaaaactgtggcttaaactttataaaacgatcttttcacatg

SEQ ID NO: 40452 - DNA, 1225 bp, Glycine max
  unsure (1)..(1225): unsure at all n locations
  Clone ID: PAT_MRT3847_136528C.1
acgacccacgcgtccggcgacaccctccttctatctttctgtgcttcaattctctcttccacagatgggcgttgccgttctttaccctcaaggttagcagacgcccaaaccggatagttgaatttttaacttgtctgttcttatcttcatcctacgccaatagcccaaaaccttgttctctttttgtggttcatttctctcttccagatgccacttgccgttcttcaccctcacgattttctcaggaaaaacccatctaaccagtaccagaccataatccctcactctcccaacatgaatcctaataagtctcatcggacttcccgaaaccgtaagaagcggcccgatccaagcccacaaggcgttgtcagcccagcccggctcacattatccccgaaaccccaagtcaaaaacaagccgcagcagcaactcgtcatgggtcaggtcaaaatactcaaacgcggccaacttttgacccaaacgacgccggatccaccgccgcagacggaaatcgtcgatcagaagttaactccgcagacggaaaccgtcgaaaaaaaggacttaacttcaatcgtagatggtttatatgcaggctattcgatgttggtgatgtctccacctcctagctccgttccgttaccggctttcatcactaagaagattgcggttgttagtgacgccacgagcgacttgcggaaaatgttacggcttgattttccctaatcctgtggcggtttgtgaatgaacgaggatttgaacggaggttgttggtgattagggcattgtagtgctcgatcttctcttattttttcagcgggaaggtcgtgtcacgaatgcaagtctcttattgtttagaactttcttcagattgccgtacatacatgttactactgggattagtcttcgtactttttagattaattactttgtgatactaattattagttttaaggaataggcttctgtatatctgtgtaatgctttgtaagtatttaggatatagaagcattttcttcctctctcaattatgtgtcctagtcttttaagtttaatgtttctatctcttttgttagcatttatatttacgaattcgtcatttaattagggaattcctgtaattgttgatttatggaatacaaggaagaaaatagtttgttggatcaaaaaaaaaaaaaaaaaaaaaaaanaaaaaaaaaaaaaaaaaaaaaaaaaaaaaaaaaaaaaa

SEQ ID NO: 40453 - DNA, 379 bp, Glycine max
  Clone ID: PAT_MRT3847_136529C.1
aacgtcgcatcagaagaacacatagcagtgaactgtggaggagaagcatatggcttcctcaaccatctctgacccagctgttaccagctgtcaaccatgcacaagcagacatagttactacattcactgacctaaagtccaagactgccttaccaaccagaaacaccaacaatgacattacctccattggtagcaacactggaagagtgcacttcatgcaagcgtatccagcacataacaagaacaacactgacactgtttcctacctggcacacctttatgatgcacaatagtcaaaggatgaagaataccttattatgaacggatggatgaattgcttgcaattcaagtaggagcaccgtatctactaccataagca

SEQ ID NO: 40454 - DNA, 1128 bp, Glycine max
  Clone ID: PAT_MRT3847_13652C.1
tcaccgcagtctgctccaccccaatgctgatgcagtggatcacacatttaccatgccacaaagttccttcgagcattatccggcagaggaggtagttgacaaggtggtgaaagaggcaataagcaaaccatggctacccttgcccttgggtttgaaacctccttccccagatagtgtgttggctgagctatccaggcaaggcatttccaacatccctccaaagggttcaaattcatgctgacctggatgcatgcaccaaagagagtggttctgatggtgaccaactacaaaagggttccacctgatcaaacaccctgttgcaattatttttgttttctctaagtgtatgaggttccaacttgtagtttgagtgggaataggagttgttggagttgggaccattttgttttgtttatttggtcccaccaaaccaattttaaggtctctcctatgctgttgtcagctcgtacgtacaatactcacttaccatgatgcaacaaccaaagtattagtagacattgttcctatccgaagccacatgccaaaacaaggcaacaaataataaatgatgagaaaagtcagcttctgcttttaatgcagtgcaggacacccgttaggcaaattggccggttgagaattggccacgcatctcttgatgcttctctacacaaatttttgtggttgtaaatacttgctgatgtgtgcaaactttaacggggatatgatattgttgtaaatgtggagcttttggggggcataaagtatacccttaacagtgattttgaagggagagaaggggggtctcgttttgtgtcgttgagtgtggggtgcctaataatgatggagaggataggatacactttgtgaataaatatgagtacactcgactttgacggatgctaactcttcttgaatttgttaggatgtttgctcaatttagaattgacttgtttattctttcaatgttcctgcttttttttttttcctttttatcattgacaattgttagtctttcaactttaacttgttgtgcggcacgtgtcaatgctgatttcttttttattttgttttacttttgtatctcttcgatagcattgagatcaacaaaaatatatgttttttctcctt

SEQ ID NO: 40455 - DNA, 409 bp, Glycine max
  unsure (1)..(409): unsure at all n locations
  Clone ID: PAT_MRT3847_136530C.1
aatattttttttttttttttttattttttttttttttttttaatttaaaaaaaagagggaaaattgatttaatattnaaaaatgaactaaaattcccataaaaattacagatacacaagggaaaatttgtcctggtttctaatgggctaatatacctttacaaggaattctaaaaaaactttttttaaaatacttttttttattcaatctttactattgattaaaatttataaaaaactacaatataatgaattcggtatattaaataaatagtgatgatccataaattattggaattttaaataaaatttatattattatgtaaagtgtttaaaaaaaatatttgctaaatttttttatagatttttttaatactataaaaaaaaaaaatttgggggttaaataattt

SEQ ID NO: 40456 - DNA, 260 bp, Glycine max
  unsure (1)..(260): unsure at all n locations
  Clone ID: PAT_MRT3847_136531C.1
gtgaattgtgaactangaaatgaatcaaaattcgttccccaattagcttctgggtttttaatgtcacttttgtaactgaagagcactcggtggctnattgaagagtagaaggattttccttaacaaggccttnctganggcatcaactagcatgcttgggttctgtcacctttaattgccaatagcggagaccagagagattattgtntaacgtattccggcgttnaacnnnggggcngccnggnaaaaaccnccgcccc

SEQ ID NO: 40457 - DNA, 253 bp, Glycine max
  Clone ID: PAT_MRT3847_136532C.1
ttcgttaatgatctcttccccatctgttaccaatgtctaccgctccggcgccggcatggatggttcattcactgacctcaagttcatggctggcttccccaccagaaacaccaacaaagacattaccttcattgctagcagcggtggaagagagcaatgcatgcaggtgtggacaccaagatacaagagaagatggggtacactgttctatactgactcaacttatgatgcccaataggcgaaagacataaat

SEQ ID NO: 40458 - DNA, 221 bp, Glycine max
  unsure (1)..(221): unsure at all n locations
  Clone ID: PAT_MRT3847_136533C.1
catgcacgcgtacgtaagctcggnattnggctcgngntngcanngngntgcgncgtgncgtgngntgtnnctctgtntgncgtttttgtnttcagacgaaaccctaactccgcatcgcaaccatgtcgaccaagcaangcantcangctaagcctttgannaaacccangtctgataagaaggattacgacgannctgacatggctaacattcagaagaaa

SEQ ID NO: 40459 - DNA, 609 bp, Glycine max
  unsure (1)..(609): unsure at all n locations
  Clone ID: PAT_MRT3847_136534C.1
atatctcgagcatgttatgaagatacaatcccgcaagactttgtagctagcagaaatgaanaagcgatgagcatcaaggtgtttgctgatgtgaataatggaacattaagagcataatcgaggcagtgttaggccaagaccataccacaccacaacttctggagcgagcaatggctccgtagaggactgcctcaacgatcaccacttggacatcacagattcccaccatctccagtacccacttccagcagaatcctgtgccggaacatcaatcctgcgactgaactgacgaataatcccgccacttccgccggatggccgaggcccacagatatgtcgagtgggggaccacaactggttcgtctcaagacagccgatgtgctaataaaaatgcctactataacccttgccattatattcgataatatatcgatcgtcacaagctattcatgtaattattactaaagcttttgattactccctccctctatccactggtgatagactatgtcgctattatggcgaatttctccgatagtgcaatagcaataaatcacgtcacctgaactgaactaattcacgtgtaatagatgcaaagaaaataaaaac

SEQ ID NO: 40460 - DNA, 532 bp, Glycine max
  Clone ID: PAT_MRT3847_136535C.1
ttcctcaaagatctcttccccagctgccaccactgtcaaacgagcctacgccggaatgattgctcctttcactggactcaatcacataggccggcttccccaccatggaagaccgcccttgacattacctccattgctatctaccctgcgaagtaggcaatgcttgcaggaggggccaccattttgcaagaagaaatgagagactccttcccacctgccacaccttgatgacgcacaacgggcaaaagaagtagaataccttcctacgcacgcatggattcctcgtgtacaattccagttatagcatcggttcgtgtcccgcgattgctacaggacaccatgatactaccatggacgctactggaccatgtacatactgcctctgtctgcttacactgatgcttctcacgtgctcaaagatcttcaagatgctaatactgcataccccaacggcttcatccgtatcatcggattcgacaacgctcaccaagtgcagtgcatcagcttcatcgcctacaagcccccatgcttc

SEQ ID NO: 40461 - DNA, 207 bp, Glycine max
  Clone ID: PAT_MRT3847_136536C.1
cgcaggatgtgacattgcaggttgtttttgctacacccaaggggggatttattccttcgcttatacactaatcatgctacatactctcattttaaacccgagaggtaagtgacaccgcacttttatagtgtatcattatccacaccacacagttaacctttcgattaagaaaagtttcgacgaggtcaacacggtctgacatcaccc

SEQ ID NO: 40462 - DNA, 698 bp, Glycine max
  Clone ID: PAT_MRT3847_136537C.1
gaattctcggttggcttagggatatattcccaagcctgtgagattatatgttcggaatgatgctgtggctgctttagcaagtggaacaatgggtaaagttcatggttgtgtattaattgctggcacagggagcattgcatatgggtttactgaggatggaaaagaagcaagggctgcaggtgctggacctgtcttaggggactggggcagtggatatggaatagctgcgcatggactaactgcagtagtaagagcccatgatggtcgtggcccaagtacaatgcttacaagtagtattttacaaacgcttggtctttcttccacagaagcattaatcgggtatatatgctagttgtatagttgttcttttcatacatatttggtgaagtaaataactagtatattgaaatcttactgtttgagatgtaacaaaaaaccattggtgtcttcaccttacagcttaatattttagaattgttggttccaacacagtatcaaagcctctatgaccaagtagtttagagtttgatctgttccacccttattcttgtaataacaacttaaattgaaaataaatacctataagttcacatacaagtcataataaatactgaaagtattaaaacacagagaacagagagatagaccagaatgaagtctcaggtgactgaagtcagaacacaaggtagatactgcga

SEQ ID NO: 40463 - DNA, 978 bp, Glycine max
  unsure (1)..(978): unsure at all n locations
  Clone ID: PAT_MRT3847_136538C.1
gcacctacagtttactttcttgtagcttggctcgaaatcctttaccccctccaaattgttaattctacaaaaaactgctaggttaaattgtgtaataagttgttagtttagttgagaagttgagagggcttgtgcaagacctagttagaagacgtgagttgccttgtgaaggttgggagttggtctttcctggaggcaaaagtgaaggtgcttgttctaaatttgcctctgcgcgcgattaggctgaagctcaaaattctagctagcacatgggctctaatattgtttatgttggctgtgttgcgagagaaaataagttttgtttcttgaatgctaaccttcctgcatttgttttctgcacttctagctactattatctcctgcacttctccttgcatttcagaaagctcgttctgaaatgcaatgagaggtttaagatacaataatactgagagtgcatgatgcaatattagcctaacctcccaccaaggctttgcaaaacaggtgtgaaatgagaggccctctttgggagagtttaatggacttctaattgttgttaactcaggacctcatgcatggtgaatgagttggcccaatctttacatggcaaacccaaacaagaatgaggacaatggatctcttggcgaatggcgcctttagaaggaatgaagctacattggttccgagcgattggctaggatggaaatgacttgcttgaggtgggtcacgatgatcttgataataatcttgttgttacattgcacaagcttatggatcagtattacttcaggatttctaggttgtctatcttaggaatgagcactagtgagattatagaaggaagcattggataatcattgtcgaggttccactaatataaggaagatcttgttgtttaaatagatttgaagaaattcatggttaatatttcaaggttaactatgtcattgattaatttcctagagtnanngagcaaag

SEQ ID NO: 40464 - DNA, 361 bp, Glycine max
  Clone ID: PAT_MRT3847_136539C.1
caaatggccaaagtcttggaatcggaaattaaaagggggttgctggacagggactacaacaaccaacccccggcccaattttacaaccccgccaagctccaaaggtggacctttttccaagccttaatcgccaagttcgtggcaaccctctttttcttttacttaacaatcctaaccgtaatcggttacaacaacaaaacagccaccgccgccaagccttgaagcggcttcggcgtcttcggaatcgttgggccctttgaaggcataatttttgccctcgtttatggaaccgccggcttataagggggacacataaacccggcggggacgttcggttggttttagccaagaaaggtgtcct

SEQ ID NO: 40465 - DNA, 199 bp, Glycine max
  Clone ID: PAT_MRT3847_13653C.1
accgaagccctcgtacttggacatcaagactccgccgaagctcaccacgaaccgtggcgtgaacaaggctctggtgaagagcgtgccgcaatccaacgtgggagcgctgcacgcgtagaagagaggtgatgtaggagatctcaagcgcgtcatggcaaactgattcgacatggacctgatccacccttcagagattttc

SEQ ID NO: 40466 - DNA, 280 bp, Glycine max
  Clone ID: PAT_MRT3847_136540C.1
gtcctcatgaaaaaaaccgggtgtttttcatctattgcttatcaacgaaattagtattcatttctggggcaaactggctcttattaaaaatcttttttcagcccaaaaaagtgatatataaagaatacacaatctaggaaactgtcacatacaatgactgatctacctgctatcgaaaatgattaatggtcaagaactccatcttataaatctctttttaaacgacgaattcatatcaaatcttataacgaaatttctagcaatgacattcattgaaatt

SEQ ID NO: 40467 - DNA, 333 bp, Glycine max
  Clone ID: PAT_MRT3847_136541C.1
acgctacgcgtacgatccaacggcttcagagatgaaactttcgaacccactgagggagactaaagtgcggtaactcgtcctgaatatctctagtgtctagagtagcaatcgtgtcaccagatcctccaatgcgtcatcatcaacttatggataataccacctaccttacaaaatcatgttcacagtctccgtcatcaataccaacaataactaaaacaacggttaccatgacaactacatgagataccttggcttagcacctgtgtcacaaactccagaatggttatggacctagtcaccatactagggaagcttatcgacaacgttggattt

SEQ ID NO: 40468 - DNA, 323 bp, Glycine max
  Clone ID: PAT_MRT3847_136542C.1
agcgcgtcggaacctgtttccctgagtggtgcttgggtaggcatccgaacgaacgattcggactaaataccataaagtgtgctgggaggttcggtcacagatttacatcaaatgaaatggaagtaatttaacctatagctggcttacccaccgacggcgggatgcggtccaacctaattggtactttacccaacattggcccggaactatagacccgaccggaaatacgagactaagctatcccagatccggatcctggttgtgattatttccaaggtgaacctcgtagacacctactatatcggtggttggctgagtacgta

SEQ ID NO: 40469 - DNA, 822 bp, Glycine max
  Clone ID: PAT_MRT3847_136543C.1
aatttctctttacaccatgaaatacttggtctacaagtttatgctaatgtacttgcgccccaagttcaactccatccatctaccaactccatcccaaagcaaacactacatataagcacagccacatccatccttttctcatcaattaatttctcgacttactttttcccatttttttagcccataactccaactcaccaaaaatgaagagagagggtagacaacatggtatggtgaggtcttatagaatcctaccaaattcacttaaccctcgacccaatactcgattcatcacccaatttgatgcccctcccactgctggattcttcgtaaaagtgtcctctaagccaaccaatcactccaagttcactggcaagtgtggcacaccacgttgcaccggttgccaccttcacccggcttgcaagtccaaagacaagaccaaaggcacccaaaagcgcaaacactggcgagtcatcgtagatcaacccaattcagatttttttgggttgtctgcaactgtgacacttgacaatctttctcatgattactatgaagatgaaagtggtgaccgtgtagattattctggcactttggatgattatgatggggagaataataatggtaacaaatgtgtttctgaaattgggggttcatttcagatggatcaagttgcggaagatgaagattggcttttggtggaatcttgttcgtgattgatgatgttgttgtttataattgatgtgtttattttacaattgcttgaaaggattaataaaggttatatttggattttgaacaaaaaaaaaaaaaaaaagcccctaa

SEQ ID NO: 40470 - DNA, 338 bp, Glycine max
  Clone ID: PAT_MRT3847_136544C.1
atctgtatgggggcaaggctgctgctactgctactgcacacagcgtgtcctcgcgggcataccttgaaggaaacgcggtgaaagaacctagaattctgatatcagaactgtgtcaacacttctatgctctacggatgggtctactggaactggaggctttttttccatcgggtgccaccaatagtctatatacaaaccggaccaactgatagccatgtccccttcaggtggacggaatgagacaatgcgaccagaggacatgtttgtgttatctcacactggatcatgctggcggctacatattccaagctatcgctaataaacccttccaagcgttt

SEQ ID NO: 40471 - DNA, 1361 bp, Glycine max
  Clone ID: PAT_MRT3847_136545C.1
gttttgggtgtcttggatcagcgtgctttctgatagataaggggtttttgtagggtttattctattcatccaaaaacaatggggtctttggaaaataatggagtagacaaagcaagggatgaacaagaaccaattctaatggagcaaagccagaggttttgcatgttccccattcgctacaagcaaatttgggagatgtacaagaaggctgaagccagtttctggactgctgaagaggttgatctctcttatgatgtacaacattgggagaccttgtctgtctctgagaagcacttcataacacatgtcctagctttttttgctgcttctgatggaattgtcttggagaatttggctgcaaggtttctgagtgatgttcaaattcccgaggctcgggcattttatgggtttcagatagcaatggagaatattcattcagagatgtacagcttgctgctggagacgtatattaaagattcaagagaaaaacataaattattcaatgcaatcgaaaatttgccttgtgttgcaaggaaggcagaatgggcattgagttggattcatagttccacttcatttgcagagagacttgttgcttttgcatgcgttgaagggatatttttctcaggaagcttctgtgccatattctggcttaaaaagagaggattgatgccaggtttgacattctcaaatgagctaatctctagagatgagggccttcattgtgattttgcttgtcttctgtacagtttgttacggaagccgctaatttctgatcaggttcataagcttgtacacgaagctgttgaaattgaaactgagtttgtgtgtgacgccctcccctgtgcattgattggcatgaactcagtgctcatgagccagtacataaaatttgttgctgacaggctgttggttgccttggggtaccaaagaaagtacaatgtggaaaatccctttgattggatggagtttatttctttgcaaggaaaggccaactttttcgagagaagggtgggtgattatcaaaaagcgtctgtgatgtcaagcctccaagatgccgggaaaaactttgttttcaagcttgatgaggacttctaattatgatttatctgtttcagcttcaattattctgcggatatactgaattaggcatcggaaatttcatttactatttttttttcagtaacatgtttagtctacacacataacttaagtgattcctagccgctggtatctatctgcactcaggtcacttgtataatatgtttcgttatattcctaatggcatgtaatatttgtaacggtagccaaaacggcctagtcatagtcattagtgattaaggagaaaaaaaaaaaaaaaa

SEQ ID NO: 40472 - DNA, 590 bp, Glycine max
  Clone ID: PAT_MRT3847_136546C.1
tacggctgcgagaagacgacagaaggggagaaacaaggcatggaggttaacattgagaaaacgttgctaatgtgtaagagtttcatgaaagaggtaaagatatggggttgtttgaagcagacaggggtcagcctgagatacatgatggagtttggttccaaccccactcagaagaatttgctcatttctgcacagttccttcacaaagagcttcccattagaattgcaaggagagccattgagcttcactctctccctcatggcttgtctcacatgcctcctgtcttgaagacattggtacttggattctttccgtgaaattatatctttccctgagatcaagaatatgaatgacgagaaagaattcaccgaactgattaaggccatcaaggtgagacacaacaatgtggtacctacaatggccttgggtgttcagcaattgaagaatgtttttgaggatcctgatgagattgatgagtttcttgatcgcttttacatgtcaagaattggaattcgtatgctcatcgggcagcatgttgagttgcacaatccgaatcctcctcccaattgtgtaggttatatacatacaa

SEQ ID NO: 40473 - DNA, 805 bp, Glycine max
  unsure (1)..(805): unsure at all n locations
  Clone ID: PAT_MRT3847_136547C.1
accagaaggcgagaagacgacagaagggtacggctgcgagaagacgacagaagggtacggctgggagaagacgacagaagggttcgggtgcaagaaaacaacagaaggggtgttggcagaggattgatgggctatcttggaaataagggatccatctcaattagtatgtctgtgcacgaaactagcttttgctttatctgtagccatttaacctcaggacagaaagaaggtgatgaactaagaagaaattctgatgtgatggagattcttaagaagacaaggtttcctcgtgttcaaggtgtggacaatgagaagtctccacagacaatccttgagcatgatcgaatcatatggcttggagatttgaattaccggattgcactcttctaccgatctgctaacgcactcgttgagatgcaaaactggagagcattgttaaagaatgatctattgagtgtagagcggtggtggtggtggtgctgggtgggatgttaatgaagatggatatgccatgccaggacactcaaggtactgccttgttgcaagtaagcaaatggtggggatatatcttaccatatgggtgagaagtgaactcaaggatcatgttcaaaatatgaaagtgtcttgtgttggcagaggattgatgggctatcttggaaataagggatccatctcaattagtatgtctgtgcacgaaactagctnttgctttatctgtagccatttaacctcaggacagaaagaaggtgatgaactaagaagaaattctgatgtgatggagattcttaagaagacaaggtttcct

SEQ ID NO: 40474 - DNA, 1200 bp, Glycine max
  Clone ID: PAT_MRT3847_136548C.1
cttatgttggccatccaaatccgttaaaagaaggtcaagatctattcagaaaaggacttttaagtgaagcagttctagcattggaagctgaagtcctaaaaaaccctgagaatgctgaagggtggagactgcttggaatagcacatgcagagaatgatgatgatcaacaggctattgcagcaatgatgcgtgcacaagaggctgacccgacaaacctggaagtgcttcttgctcttggtgttagtcatacaaatgaactggagcaaacagctgctctgaagtatctatatggatggttgcgccatcacccaaaatatggaacacttgccccgcctgagatggctgattctttgtactatgccgatgtagctaggttattcaatgatgcagctgaactctcacctgatgatgcagatgtccacatagttctaggggtcatgtacaacttatccagagaatatgacaaagccattgcatcttttgaaagagcactgaaacttaagccacaggattactctctatggaacaagctgggtgcaacacaagcaaacagtgttcaaagtgctgatgcaataatggcttatcaacaggcgctggatttaaagcctaattatgtccgtgcttgggcaaatatgggcatcagttatgcaaaccagggtatgtatgacgagtccgttcgttattatgttcgagcacttgccatgaatccaaaagcagagaatgcatggcaatatttgagaatttcgttgagctgtgcttctaggaatgacatgttggaagcttgtgatagtcgtaatttggaccttctccagaaggagtttccactacagtaaggcttgcagtagatgcctgcttctatagaaatttcttggagaactaaaaggccgatcaagtgattaagcctgctggtgaatacgaggcattattctatcaatcttggaacatatggtgtatatcatgaagtacatcaacctacactggttttaggcactgttacagactccatttcttgatgttacaaaagctatttatcatagaacagctgcagtagtaaagttaagggattgtggctttccattataaagttgagtttattgtgtatgtacatatatatacaagtatacaagattagtcgcatatcatgtatctaatttgctatattattacttgataatatattatcctataacttaatcactg

SEQ ID NO: 40475 - DNA, 470 bp, Glycine max
  Clone ID: PAT_MRT3847_136549C.1
gaaagatttcgggagcttgaggattactggaatgagtctcaaggtaacctgagacttggtcctcctgctccagacgggtggatttctgaatttagtcaacaaagggagaaatatgataatcccgattcatgggctaactcatttgagcaacagtatggtgcaaatggttgggtgtctgaatttgaacattcccaattgtcatcagtagatcaaatgcgaggtatgaacatgtctaactttgctgcaagggagcagactcgtatgcttgcaaacacgttggcccaaaatggtgaccctaaatttcagaactcaaaattccttcaatttgtgtcaaagatgagccgtggtgagttgattattgatgacaatcaagttaaagagaatgcattacctgcatctggagattgggcaacagaatacaatcagcaatataatcatggtcatgcatgggctggagaattttgaatgat

SEQ ID NO: 40476 - DNA, 826 bp, Glycine max
  Clone ID: PAT_MRT3847_13654C.1
aaatggccgctgaaacccttttccagggatgcatcaagatgcatgggcctgtccagtgttaccaatcccccctcaagctcctggttttccttactctcagaatatgcctgcattgctcaatgctgatgcagcggatcacacatttaccatgccacaaagttccttcgagcattatctggcagagaaggtagttgacaaggttgtgaaagaggcaataaacaaaccatggctacccttgcccttgggtttgaaacctccttccacagaaagtgtgttggctgagctatcaaggcaaggcatttccaacatccctccaaagggttcaaaatcatgctgatgacatggatgatgatgatggatgcatgcacaccaaagagtgtggttttgatggtgaccaactacaaaagggttccacctgatcaaacacaccctcttgcaatttatttttttgttttctcaaagtgtatgaggttccaacttggtagtttgagtgggaaattggagctgttgttgggaccatttgttaaggtctctcctatgctgttgtcaggtcgtacgtacaacactacttacttaccatgatgcaacaaccaagtaaagtattagtagagattgttcctatccgaagccacatgccataacaaagcaacaaaataataaatgaagagaaaagttagcttctgcttttaatgcagtgcaggacacccgttatgcaaattggccagcttctctacacaaatttttgtggttgtaaatacttgctgatattgttgttgtaaatgtggtgcttttggggggcataaagtatacccttaacatgtgattt

SEQ ID NO: 40477 - DNA, 447 bp, Glycine max
  Clone ID: PAT_MRT3847_136550C.1
aaaccttgaaactggattgacaatttatatgatactaatttgttaaaatatgaaccagacaccatattactggggattctaccccaccagtatggaattttacagcccattccatgatccttatcattatgatacacactgcagccacgtttagcacttctgaaatctgttttactattcttgtcaccttggagaagaaagataaatagctgactgagcatgatcacggaaccaatatcacgatggatgatgctcgatgttgttatcgagctcgtgcatctttgcgcccagaaccttgtccacttgcttgcgatggttcccaagacgaaatgtgggatggcctgcacctgaaactcctgcgccacatctggtgattcgtctgctgcaatctgtggcaaatcaacgtctgagaacttgacggccatggcgtgaatcgctggctctatg

SEQ ID NO: 40478 - DNA, 2013 bp, Glycine max
  Clone ID: PAT_MRT3847_136551C.1
ggatgcaataatggcttggcctaccgccgctgggcttcagtgccgtgcaatgccccgggtggaagtaagtaagcatagcgaataatatgataatgctgattcatgggctaactcatttgagcaacagtatggtgcaaatctttgagaagacgacagaagggattcccaattgtcgtcagtagatcaaatgcgaggtatgaacatgccaaactttgctgcaatggagcagactcgtatgcttgcaaacacgttggcccaaaatggtgaccctaaatttcagaactcaaaattccttcaatttgtgtcaaagatgagccgtggtgagttgattattgatgacaatcaagttaaagagaatgcattacctgcatctggagattgggcaacagaatacaatcagcaatataatcatggtcatgcatgggctggagaatttttgaatgataaggtttatcatggacctgatcagtgggcgaatgaatttacaagtgaaggacggcagcatgatgcagttgatgatcagtgggttaatgaattctcaaagttgaaagttaatgattgggcagatgaatttggtcagcagtttggtgaaggagccttaggggatagcacttctgatagttgggcacaagcatatgatgagttcctaaatgagcaagtggctgccaagcagcagttagacagcttcgaggggtgtgtatgtcttttccatatttaaatccttatgttggtcatccaaatccgctaaaagaaggccaagatctattcagaaaaggacttttaagtgaagcagttctagcattggaagctgaagtcctaaaaaaccctgagaatgctgaagggtggagactgcttggaatagcacatgcagagaatgatgatgatcaacaggctattgcagcaatgatgcgtgcacaggaggctaacccaacaaacctggaagtgcttcttgctcttggtgttagtcatacaaatgaactggagcaaacagctgctctgaagtatctatatggatggttgcgccatcacccaaaatatggaacacttgccccgcctgagatggctgattctttgtactatgctgatgttgctaggaaatttaatgaagccactgaactctcacctgatgacgcagatgtccacatagttctaggggtcatgtacaacttatccagagaatatgacaaagccattgcatcttttgaaagagcactgaaacttaagccgcaggattactctctatggaacaagctgggtgcaacacaagcaaacagtgttcaaagtgctgatgcaataatggcttatcaacaggcactggatttaaagcctaattatgttcgtgcttgggcaaatatgggtatcagttatgcaaaccagggtatgtatgacgagtccattcgatattatgttcgagcacttgccatgaatccaaaagcagagaatgcatggcaatatttgagaatttcattgagctgtgcttctaggaatgacatgttggaagcttgtgatagtcgtaatttggaccttctccagaaggagtttccactacagtaagggagggtcagttccactgtggaggtggttgcttgaacatgaatcctaattttccttaaaacttttggatgagtaaatggcacattttctgccattaaagctcgcagtagatgcctgcttctatagaaatttcttggtgaaatgaaaggctgatcaagtgactaagcctgcaggtgaatacgatgcattattctagcaatctttgaacatatggtgtatatcatgaaagtacatcaacctgttacactgaatttaggcacagttacagactccatttcttaatgttacaaaagctatttatcataaaacagctgcagtactaaagttaaggattgtggcttccattataaagttgagtttattgtgtatgtacatatatatatacaggtatacaagattaatcgcatatcatgtatctaatttgttatattattacttgataatcaataatccatgttt

SEQ ID NO: 40479 - DNA, 480 bp, Glycine max
  Clone ID: PAT_MRT3847_136552C.1
tttttttttttttttttttgctataaaacaaactcataacaccgtagaggctttattgtagattattagaaattgatgttaaatcaaagaaatcttttttaaaaaaagaaacgaaaattaaaaaaatcaagaaccacaaaaaggatccaagaaaaacaaaaaaaaaataaagaagggaaagtctatttacaataagataagagggggtttttcttttcttttttcaattcatgaaactttgacatatgaatctaccttgggttgcagagcatgatatccaacatcctaaaccaagctacgcgtaggcgaggataaaccctgttcctggggggtcttggatctctgaccacatattccattggttccacaaaccgggttaggcttcggattgggggcccctaaaggggcagaggaacccgcaaaaaagccacagtgaagaacaacctgcacatttttcttttctttttcctctttctttgg

SEQ ID NO: 40480 - DNA, 430 bp, Glycine max
  Clone ID: PAT_MRT3847_136553C.1
cgcactctctaatatcccatactatgaaaaacatcgatatggtgcggacgaattaaatgaaaccttatatgaagaatgggtacacaatggctacgcaccggctttgccaaacactcttaaaaatgacaacaagctgtagtctcttggctacaatattgcattctcgccacgaaaatatctcgccaataagggccgtgcaatagcaaaaccaaataagggctgttttcacacatgggatcgagtcattgtcaaaggaccacattttatgactcccaatgctcttttatacaaatcagcaatgagagagaatctgttgaggcacggatacagaattgttggaatcattggagaccaatggagcgatctgctatgagaccacagaggcgaaagcaagaccttaaagcttactaataccatgtactacattgag

SEQ ID NO: 40481 - DNA, 346 bp, Glycine max
  Clone ID: PAT_MRT3847_136554C.1
atcacacgtccgcccactcgtccgcccacgcgtccgggcaacgaccttgctggacaaatttgaggaacaatggctgcatcttttacctaaagttgctgaggaggaaactagacactttgaagaagacacatacgcatatctagacattcagcgtgctctcgaaaccacttttgccaatacgagcacgtaaaggtcaatgcacgctcatgtattaagccgaatgagtaccctgaggacaagaataagatgacaaggcgagattctggtgattcttccgacatgacaacaccaatcaagaagagactatccacattgtgattcattaattgcaccataatagacatta

SEQ ID NO: 40482 - DNA, 278 bp, Glycine max
  Clone ID: PAT_MRT3847_136555C.1
tccaaaagccgtgctaccaacctgacttatgtaggctccaattatctgtcgtatggctagttagagaatatcatgtagaaatgggatgttgtattgtcagtatgtatatctacaaaaaaatccttagatttgaacagctagtgaaatgaatatatgttgtatgtttggaaaatccggttggccattgaattcgcaagtggaaaacttcaatttgatgccaaaataatgttttttacttgtatgaaattatatgattatacaagtaaaattctggagag

SEQ ID NO: 40483 - DNA, 522 bp, Glycine max
  Clone ID: PAT_MRT3847_136556C.1
cctttttcatcttcttcctcctctcataccaccttcacttccatgaagccacaacatcaatatcaatgacaacaacagtttccaccgatttcctccccctgttcaacccccaccccaaccgcaccaattcccattctaattcccgtacactcccaattctcaatgaaaccaccaacatcaaccgcactctctcttccgtttccaagccccaaacccataccctcgatttcaaagacacccatctcctcaaatccctctcccgatcctgcaaagccggcaacttcaacgagtccctctacttcctccgccacctcgtcaacaagggccacaaacccgacgtcgttttgtgcaccaaactcatccacgggctcttcacttgcaaaaccatagacaaagccattcaggtcatgcacatcctcgaaaaccacgggcaccccgacctcatcgcctacaacgccatcatcaccggcttctgcagagcccaccgaatcgattctgcataccaagtgctcgacagaatga

SEQ ID NO: 40484 - DNA, 794 bp, Glycine max
  Clone ID: PAT_MRT3847_136557C.1
tttttgaaataaacttgatgataaaactattaatagcaaaaacaaaaatttgaggccaaaaggcaccaaatcagttatgggaaagggtccaaaatattatcagtgtgcaaacagatgtatggatggtgctaagtaagacatctattttcaaagcagtcataaaactcactgctataagcaatcagatgaagaaatgtaagatggtatcaaagcagtgacaacggctcatcattaaaaaatggtgtgttcctcagtagaagctcctggcagtcctctggcctaattaactttgggtcaaaaggttctctatcaggtagaactagcccttgtttcaatcggccaagacgccttgagtacagaacttccttggaagtgactggtagcctaacgaactgatactcttctaaagctgatccaagcttttctggtccccacttctctatgcatttgcctaacactgctgcatccaatattgacatgttagtgcttctaaggcagtgaggagttgtggggtgagctgcatcccctaccaataccacattgtcccaaaagatcttctctaagggatcactatcatatatgaaatttaagaaagggtcctttgtttcctttatgacctttaccaactcaggaatccaaacttgttccgcttcttggtgcattttctggatcatgtcattgtttactttcattgtcaccgatgttcccttaacttcaggttcaggctgattcacataccaaatccaattgagcttcttgttttgcagctcatacaacacagtgtgctcgagccg

SEQ ID NO: 40485 - DNA, 377 bp, Glycine max
  Clone ID: PAT_MRT3847_136558C.1
ggagacgaagaagtgaagagaagagaagagaatggatttggatctgaaaagagaatatttctggaggaatggattcatacaagatcatgtccatagaggattgtagcacagccagagagtaattggagttatatctttgttgaactttcagtatctcatactcattgatcagatctttgtctttgcatataattgttcaagattgtatttccatttgtatacgaatcctatttgcaatattttatttattgttctctcatatttgtagttcatgatatttattatacttggttacttgttatgtgttcttatttttttttattgtaattctagtttatttttatttattttttttatttacatttttatctaatttt

SEQ ID NO: 40486 - DNA, 1778 bp, Glycine max
  Clone ID: PAT_MRT3847_136559C.1
tccttttctcttcaatctcaggtctcccagtcacactttcactgtcaaaccaacatgaatcttttactcgccgctgtaactctcctcgtcttttatgcggcgaaatttttttactcaaatttctgggtcccatggagaacagagcggcacttcaagaggcaagggatagggggccctggctaccgtccgatcttcggaaatacatcagagatccgacggctctacgcagaagccaagtcagaggcaagtgcatcccctcctccgttccaccacgacatcatgggacgcgtggctccattctacgaccggtggtctcgcgcgtatgggaaaactttcttgtactggttcggttcgacgccgcggttggcggtaaccgaaccggacatgattaaggaggtgctcatgaacacgcgcggggagtatgtgaaagttccgttcaaccctcagtccaagttgctctttggacagggccttgtgggcctcgagggtgaccagtgggcccttcacagaaggatcataaacctcgcctttaacttggagcttgttaagggatgggtgcctgatattgtggcaagtgtgacaaagaagctggagagctgggaggaccaaagaggaggaagagatgaatttgagatagatgtgctgagagagcttcatgatctttctgcagatgtaatatcaaggactgcttttggcagcaattatgaagagggcaagcatattttcaacttgcaggagcaacaaatgcatcttttctcacaagcagttaggagtgtgtatatccctggattcaggtatttgccaactaagaagaacaaggataggtggagactagaaaaagaaacacgtgaatcaattctcaagttgattgagaccaagagcaatacaagagaaaatgcaagaaatgtactaagttctttgatgtgttcctacaagaatgatgctgggggagaagaaaagttaggtgtggaagaaattatagatgaatgtaaaaccatctactttgctgggaaggaaacaactgctaatttgttgacttgggcacttcttctattagcaaaacatcaggaatggcaaagcaaggcacgcaaagaagttcttcatgtcattggacgcaatcgacttcctgctgcagacaatttaaatgaccttaagattgttaccatgataattaacgaaacacttcggctctatcctccagcagtaatgctaatgaggcaagcctctaaagatgtgatgcttggaagcattaatattcctgctaagactcaactctttttggcattgactgctgttcatcatgacagagaaatctggggagaagattaccataacttcaatccgatgagatttagcccacgcgtccgcccacgcgtccgattctttcccttcggattaggccctcgaatctgtgtggggcaaaatttggcattggttgaggcaaagattgctcttgctttgatcattcaaagttacagttttgtgctatctccaaactatatgcatgctcctatactatttgtgactttgcagcctcaatatggtgcacaaatcattttcagaaagatatcatattgttgattgttgttgccttttcccacttctccccctctgtaactttaaactccgtaaatggggaagcattgtagctataaatattgtgctttttttacttgtgaaagcttatgtagcctatgttgataactggtgaaagtttttcaggttaaagcagcataacttaaattggatcatcaaatatataaagatttggcatgcaa

SEQ ID NO: 40487 - DNA, 518 bp, Glycine max
  Clone ID: PAT_MRT3847_13655C.1
aaacggcccttttggaatttaaaaaacaacctgcagttccttggaagatcataacacatcgtcttttaatcgctcccatccccatgaacctgcagtggtctcggctcattgtgccagcccttttaaaggaaaagagctctatttttctttgcataatatattacagattttcttcctagatcatagaccaggggaggaatattcaagggctctgaccatggtgctcgatggcaacattgccctgttttttgacctccccctttgagcccgcgggagggttgttctctgagagcatggccatggctgtagagaactcctgtgaataaatagaacaggctcttggccatgttcttccatgaggcttggtcctcttgtcgttggctagttggtgacccactatcaggagaccctggctggctaatatgtgtctgtaataagggacgggtacaatcatgggagagccaccgtcttgggtgacgtactgcaccgtcttaaggtctggactggcttcagggccc

SEQ ID NO: 40488 - DNA, 771 bp, Glycine max
  Clone ID: PAT_MRT3847_136560C.1
acgcccaggctcgaggcaagaaactccatagcgaaaaagaaaattcacgttatattgttagtttattcgtcatttctttctttgagtagtaatggcaagcctcaaggttgcatttgtggttgctgtgctatacatggttgtggtgagtgcacacatggcacatgctaggatcaactgcggccgtgtcgcggtcgcggtgtctccgtgccttggctaccttcgtcgcggtggaaggccacaggcgaggtgctgcaacggagtgagaaacctccacgccctggccaagaccaccgtggaccgccggacggcgtgcaattgcctgaaaacctttgccagaggtcttggtaggggtgtcaatgccaacaacgcagctgcacttccaagaaaatgtagagtcaacatcccctacaagatcagcatctccaccaactgcaacacgatcaggtaaggatggatctggtataaggaagaaacaacagggcaatttttcagtcacagggcactatatatacgataataatagtgctgctgaattaactaatgaaaaataatgggagggcgatgagggctctacttgtgcgagtctcttcttggtctcggtgtgtcccttagttgtttcaggctttggtccagtaattatgttattattgtaagtacgtgttggctgaaatttctctcatttggttgttgcatgtaataatggcatatatattgtgctgtaattccttgctacttgctactttacatatgaaaaacaattgcacttgtgtt

SEQ ID NO: 40489 - DNA, 1761 bp, Glycine max
  Clone ID: PAT_MRT3847_136561C.1
ctcgagccgattcggctcgagcaaagaggggatccaaagaaaaccttcggttagcagtgtaaaatattcattgcgaagctgcaccttccttttgagaagctgaaccttcctctgcacaatctccttcaaaaagcttctcatccatggcgaaaacgctcatttcgtctcaatcgttcatcggcacaccgctcccctcactccctcgccaccacctcccccaccgcaccaggctcgtcgccaccaaagtcctcgtcagcctccacgaaattcccccaatccactccataagccgcaacattgacttcgccggaatcgtgactagagccgaaggccttctctacacgctcgccgatgctgcggttgcggcggaccctgcggttgctgcggactctgcggcttccaccaccgatgctgccgtacagaagagcggaggctggttcggcttcatctccgaagccatggagttcgttctcaaggtgttgaaggatggcctttctgccgtgcatgtcccttatgcatatggatttgctatcatattgctcactgttatagttaaggccgctacgcttcccttgacaaagcaacaggttgaatctacactagctatgcaaaatcttcaaccaaaaattaaggccattcaagatagatatgctggcaatcaggaaagaatacaacttgagacgtcaaggctatatcggcaggctggggttaacccattggcatgggttgtttaccaactttggctactattcaagtctgtattggtctctagcaagctatatcaaatttagcaaatgatgtactgggatcccctctttgggtggtcctactaccattgctgctagacaaagtggagctggaatctcttggctttttccatttgtggacggacatccacctttgggttggcaagatactgcagcatatcttgttttacctattcttcttgtcgtttctcaatacgtttcaatggaaatcatgaaaccacctcagacagatccttctcaaaagaatcaacttcttattttaaagtttcttccactcatgattggctacttctcattatctgtcccatctggactaacaatttactggtttataaacaatgtcctgagcacagctcaacaagtatggttgcgaaaattgggaggtgcaaagcctgttgtgaatgaaaatgctggtgggattattactgcaggacgtgctaaaagatcagattcgcagctagcaaggaatggtgaaaggtttaagcagttaaaggaagaggaaaagaagaaaaaggtaagcaaggcactgccagtggaagaagttcagtcactggcttctgtttctgcttctgatgatggctcagatacagaaagtgacaataagggacaggaagatgcagaagaagcatacgcttctaaagttggcgaagaggttcaaaattattctagggggagcaaaagcaatcgagggaaagaagaagcaagcgttcgaagcggaagcgtgctgtataaaggaccgcatacaattagtttatagtgagttttgtatatctcaagagattatagcatttttgggttggctattaattaaatatatgtaatttaattcactaaaatatctttgttacgtttaagttccacatgttagctaaagcaattagtcttgtgacgtgtttaattttattaagatttatccccccttgaaactaggagtataaaaacttatactccttctgatccaaaataatacagtaagtagttcttttaaaaaaaa

SEQ ID NO: 40490 - DNA, 1127 bp, Glycine max
  Clone ID: PAT_MRT3847_136562C.1
gacgcgtccgcccacgcgtccggacgtcaaggctatatcggcaggctggggttaacccattggcaggttgtgtaccaactctggctacaattccagtctggattggtctctaccaagctttatcaaatgtggcaaatgagggactgctaaccgaaggtttcctttggatcccctctttgggtggtcctactaccattgctgctagacaaagtggagctggaatttcttggctttttccatttgtggacgggcatccacctttgggttggcaagatactgcagcatatcttgttttacctattcttcttgtcgtttctcaatacgtttcaatggaaatcatgaaaccacctcagacagatccttctcaaaagaatcaacttcttattttaaagtttcttccactcatgattggctacttctcactatctgtcccatcaggactaacaatttactggcaagtccgatttggtccgaaaactccagtaatggtttataaacaatgtcctgagcacagctcaacaagtatggttgcgcaaattgggaggtgcaaagcctgttgtgaatgaaaatgctggtgggattattactgctggacgcgctaaaagatcagatttgcagccagtaaggaatggtgaaaggtttaagcagttaaaagaagaggacaagaagaaaaaggtaagcaaggcactgccagtggaagaagttcagcccctggcttctgtgtctgcttctgatgatggctcggatacagaaagtgacaataagggacaggaagatgcagaagaagcatatgcttctaaagttggcgaagaggttcaaaattattctagggaaagaagaagcaagcgttcgaagcggaagcgtgctgtataaaggaccgcatacaattagtttatagtgagttttgtatatctcaagagattatagcatttttgggttggctattaattaaatatatgtaatttaattcactaaaatatctttgttacgtttaagttccacatgttagctaaagcaatttgtcttgtgacgtgtttaattttattaagatttatccccccttgaaactaggagtataaaaacttatactccttctgatccaaaataatacagtaagtagttctttt

SEQ ID NO: 40491 - DNA, 239 bp, Glycine max
  Clone ID: PAT_MRT3847_136563C.1
attatttttttttttttttttttttttaaatagggcccattatgtatatataacaaggaattactatatgcacaaacaatgtattttaggggaatccctagaaacacgcccttttttttgtgggagtgggttggcaactaggactaatcggcaagatagaaccaacacccaaaaatatggcgaaactacccgccttaaaaagccaaaaacttaccgaacgcatgggcggacacatgagt

SEQ ID NO: 40492 - DNA, 493 bp, Glycine max
  Clone ID: PAT_MRT3847_136564C.1
ggctcgagctaaaattcatatatcacctatcaaggttcctaggataattcatacaatgcagcgggatgcgaaaacgggtatgaaagctgatgccagctacaatgccaagaactacgcagagataacagtgcaccacaactgcgaaggccactgtatgcattcaaccacagctatggcagccatctagtggaatactgaagactcatgatataagtgatgctaacccagaggatgctcctacatgtttcgcacatgttgaagagtgactcaaatgatatgtctgcttcaggggggaaaaagtatctatttaataagatgacatctaagacaatggcgacaatcatgcggcctcaaccaactgcggagtttattgcatagtagccagaagacaataatgacatagctattggcatggcggacatttacatactcatccaagatgctagagtggacgaaggcaacactgtctaacagggcatcataagagaatgac

SEQ ID NO: 40493 - DNA, 400 bp, Glycine max
  Clone ID: PAT_MRT3847_136565C.1
gccacgcgtgcggggaaatggatcatattcagccgaacataaaccaattctaaggcattacaaagctgcccatatctgctattccagaaagatctcaacctcattctatacctgatctctctgcacgtactttttgtggcaccatgcagattaatcttacgatcaatgaaatcaccagctatcttgtcttaaactccgatgaactagtcatacaaaacactcacttgactaactctcaaagacaggtgagtagtttttagtgatcaaaatattctgtttaagcacatatcgaaatctgagtactgggctttggtggctctgttccgggcttaatttatccagcagtaaactccattggatgttggtagggatactgatgatgacatactacttttgctgg

SEQ ID NO: 40494 - DNA, 388 bp, Glycine max
  Clone ID: PAT_MRT3847_136566C.1
gctgatttcaaaactctattttcgatgttaactcaatggattttaacatttagttcactctagtttttaacattaattgttggcttactaatcgtttcatgtgatttttgtgcttgtatcccacagcctcgtcatgcaacccagcgaagtacatgtctggtcgatgtggaggaacaacgagattcatagtcttaattggtggtaacttgtgcttatttcatgtttccaaaaccgtttaagattaggaattatcatcaaccactatcttattgctcttcaacgttcactttgattagcttcagatgcaaattaaccaagtatatataggtactcattggcgaacattgcggaaacttaattacagggttttgtattggcgtttcactga

SEQ ID NO: 40495 - DNA, 771 bp, Glycine max
  Clone ID: PAT_MRT3847_136567C.1
gatataaagaacgaaaaatccactaacagcagcaagcttatctctgcagcattgaacaccaattgaacaccaatctgcagcattgaacaccaattcaacgccaatgggtcaggaagaggaaaaatcccaagaaaacaaagtggaggagaaaaaagtagaagaagaagaaaagaaagaagaagagaaaaaatcagatgagaagaaattcaaggagaaatctgcgccgccagaaatcgtgcttaaagtgttcatgcattgtgaaggttgtgctcgcaaggttcgtcgctccctcaaaggattcccaggggtcgaagatatactcacagattgtaagtctcacaaggtggtcgtgaaaggagaaaaagcggatccgctgaaggttttaaagagactacagaagaaaagccatagaaaggttgaacttctctctccgatcccaaaaccccccccggaagaggagaaaaaaccccaagaggaccaagagaagccccacccagaggagaagaaagaagagcctcgggttatcccagttgttttgaaagttcacatgcattgggaagcttgggcccaggaaatcaagagacgcatcgagaaaatgaaaggggttgaatcagcggaagcggatttgaaaaagtcggaggtaagcgtgaagggggggttcgagacagcgaagctggtggagcacgggtccaaaaggccagggaagcatgcagtgatagtgaagcaagaggcagagaagaaaaaagaagagaagaaagcagaggaagaggt

SEQ ID NO: 40496 - DNA, 136 bp, Glycine max
  Clone ID: PAT_MRT3847_136568C.1
tgtgagggggcttcagaacgtacgacggcgcgtctggtgtatgttcttatgttatcggcgtcatttctccatttatataaacttatgaaaaagctttaatagatgacacctttgtcagcgttcacatcactgctaa

SEQ ID NO: 40497 - DNA, 282 bp, Glycine max
  Clone ID: PAT_MRT3847_136569C.1
ggaaaaggaatttggtggtttattactaaaacttaatggaaaccccacaaccgggtaccacccaaaaatgccccaattaattgaaaagccatccttcccccttctttttattttttgaccaattaatttaaggggtcccttaaaccgggccggacttttcactttcacttgggatttacctttcaaaatttttttccctggtccgaattggccggcccttggaccccattagaaccgggccggccaaaaggcccttaaaccaattgaacccacttgggcaaa

SEQ ID NO: 40498 - DNA, 827 bp, Glycine max
  Clone ID: PAT_MRT3847_13656C.1
attaatgatcccgttatgggtcatgaatgtagtttcatcttatgctaccaatacactccctgtggtttttgaccgtggccttattggacccttcccatgactggtgtgaagctttttcaacatatcctcgaacatatgacctgcttcatcttgatggactcttcactgcagaaaacccacaggtgtgaaatgaagaatgtattgctcgaaatgcatcggatcttacgtccttgggggcacgcaatcattcgtgaatccagttattttacagatgctatcactaccattggtaagggtatgcgttgggaatgtcgtaaagaagatactgagaatggcagtgacatgcagaagatattaatatgccagaaaaagctatggtactcatccaaccagggttcaagatgacaaactatggaacttaagccatgtaactggtaagatggtggtggttagagtagtagtatagtgaagtagaagcaaagggaagcgaattcagagatgctctgggcatatattgacccaaattctataatataatgagccaagaatcagccaagttcaaatttgtcaaaagaacaaggggtaacccactaaatctctgattttgttaatttatagagaaaaaaaatcatatatacataatatatatatcgcattcccatgagttgctgccatttgaaggacagtgatatttttgtacagaattgttttacgggcacttgtattattgctgagcatgatacagtaatactctgctctttattgtcaagtttcaatgattgtttttattgagttggtaaatgaccttttggtaaagtggagaattt

SEQ ID NO: 40499 - DNA, 304 bp, Glycine max
  Clone ID: PAT_MRT3847_136570C.1
gtccctggttggagctccggccatggttatcgcattctctcttggaatgggagctatgccatggattataatgactgatattcttccaatctacattaaaggcctagcgcgaagggtgacctcactcgccaactggatgatatcctggttggttacattgacaacaaatatgctgatggattggacctctggaggaaccttcaccatatatgcagtgatatgcgccttgactgtattattggttaccatccgggtacctgacacaaatggaaagactattgaagaaatccaatggtctttcaga

SEQ ID NO: 40500 - DNA, 320 bp, Glycine max
  Clone ID: PAT_MRT3847_136571C.1
ggctcgaggccctcacagtcacctgtgctatattaagcgcgctcctacgcgctcgtggcaacagtgtgcatgcgttgcaaaccctaactacctcatttccatggtgttacaaaagcacacggtcgaagagggagaccctcgagagggtgacatcaacctgatcacacagtacgagtaggagggcttcacagcggatgcccagtgacctaatccccggaggcccacacctatagggggtttcagagtaatggagcctacgcttcattcatcctcactggagacgatgaacgactctttcaccgctctataggagagcaccg

SEQ ID NO: 40501 - DNA, 331 bp, Glycine max
  Clone ID: PAT_MRT3847_136572C.1
gaaagtgcaagagtttgttgtgagctataagcaagtttatcgtgaggataataggaagttgtttgcttttctttgatgctgcagtaattatggtaacatggacatgccatggcgcacgctaccaaaagttccctctccgaatgaaaactggctatggtgagcgttcttcgcaggtaaaatgcgcacgttttacgcttgctgtggtatcacacatcatccgagcctttaaaactactcctgaacagtgcgttgatacatcaatggactacattaatggtgaacaatttagatcatactctaaaacacttaaccaacaagctttcatttatgc

SEQ ID NO: 40502 - DNA, 745 bp, Glycine max
  unsure (1)..(745): unsure at all n locations
  Clone ID: PAT_MRT3847_136573C.1
agagagcagaaactggagaagagaagccataaaaaaatcacagatctaaccaaacttcaatttcgattccgattccggacaacctttcactctgagtgatttgagctcaagtaacatccaaaaaaatgcttctggacaagaatgatactcaggaaacccattacgaggttctcaatgtaaaggaagatgcaaattatgaagaaattcgtgctagttatagaagtgctgtactcagcttacatcctgataagctattgaagacgtccgagacatccagcagcaatcaaacagcggaagagagatttcttaaagtacaaaaggcgtgggagattctgagtaattcaagctcccgctcgttttatgataatgacctgcgtagttcaaggcaggatgtcttggctgctgatgttgccgaagatttgagcttgcaggatatgatgattgaagatgatggagaagcattggaactgttttaccaatgcagatgtggtgattacttctctgtagactcgttggaattgaagaatatgggatattccttattgagggagggaagtgggatatctataatgaatgttgatacatcaccaggatcagtgattcttccttgnggatcttgttcgttgaaagctcgtttgctaatcaatatggatgtcaattgaaaataaaatggcaccatttttttatatgaataatgacgacagagatttctaacattttttttatatgaaactgcattttgcag

SEQ ID NO: 40503 - DNA, 403 bp, Glycine max
  Clone ID: PAT_MRT3847_136574C.1
agccttcggttgggtggcaactttggcaagtggatcaaaatcctggggaaaacctttttaggagaagggtaaccaccattactgggtcaaaaaggaattggggttataatgactggccagccagtcagccacctccaaaggaaagaagctctatatggggttgggatctcgaggcaaacaatgatactgaaactctggaggaatatcataaagagagtggcaaggaattaagctatggtaccttgaaggcggtcttcgcaataaaggcttcaagcgaccaccttatattaagaatacactggatgatgtttcatcttcattgggggacacttcagtccagaatgaaggatctttgcctacagcaaggacttcaattggttctgatgctcgtgttcaggacaag

SEQ ID NO: 40504 - DNA, 145 bp, Glycine max
  unsure (1)..(145): unsure at all n locations
  Clone ID: PAT_MRT3847_136575C.1
tagacccaccgcaagancttcccaagaacagcccncagcgtctcnttaaggagctcgccgagcgcaagtnnccctccccgcgaaccccacgcgctcccccgcgaagattcatcctcacgcgnccgctaganganaaaagagtcgc

SEQ ID NO: 40505 - DNA, 1983 bp, Glycine max
  Clone ID: PAT_MRT3847_136576C.1
aatgataaattattctttttatatattttctttcttacataaaaagtatacaattttatatattatagaaatacaatttgtcaataatatgagaggtagggctgggcagctatcaactaccacaactaatctgaccaatctatcgatccatccacccgttttgtcaagcttatgccctcttttttccttttcaactgtgtttgatatctccccatcacagtgaaatgtatatatataaacttctttccacacacctctttgacaaattaaccatccaatccctcatttcttccttcaactctaaaaatcaccacactaaaaaatgaaccatgttgagcatatcgcttatgacatggtcatgatcactctatccatatctctcatcgttcttgccatcatcctcttccttgcttgcaagaagaagcccgttgaatccgaagaaacacttcccgtgaagctttgtgctcgtgcataccccttgatggaaatcgatgctgccaccgatggcttcaaccccaggagaatcattggccagggtcgcttaggaaccgtgtatgcagggacactagacaaagaagaacaacaacttgtagccttgaagcgtattcacccctttcttgtgttgagcaatgcagggtttggtttctcatccgtgttgaagtggctctccttggctcaacaccccaacgtggttccaatcatagggttctcagaagcacccggtgagagagttattgtgatggagtttgtgcacatggcaagcttggacttctacttgcaccaaaaccaagatggggcttcgcttttggattggaacaagaggttcaggattgcagctggagtagcaagagggcttcaatacctgcatgaagtggtggcaccaaacatagtacatgggtgtgtcaagtcctctaatattctcattgatgttaacttttgtgctaggatttgtgattatgggcttaactttttggcacctgtggaaaagagggggatagtggggtatgtggatgatgagtattggagtgaaagaaggggtggtgtagctaccaaggaaagtgatgtttatgggttaggggtggttttgttggagcttttaagtgggaaagggtgtgagggaggaatgttggtgaagtgggctttgcctttgataagagaaacgagttttagtgaacttttggatcctaggttggtgattccttctgacatgaagcctttggttagattagccaaagttgcttcagcatgtgttggtaattcacgcaaatgtaggccttcgatggctcaagtggcaaccattttgaacaacttagaaacggaagtgtgtctctgatcttcatgatgatgcagtcaaaagtcaatttgattgaacaaattgccttccaattttgtaccaaaaaaatggggtctgaccaattaccaagaattggtataaaaaaggcatgtgttctagtcagaaaaaaaaacttggtcttatgactcttatcatatgattagttaccaaattgattgaaatgaagatcgaggacaatattagtgaggtaagttaggtgagattgacattcatcggatggcagtaattggtaagaaaattggtgggtttttgatgagggaggggccttatggcttatcccctatgttgtgacaggctaaggagtcagagaatcatttttggtggggaattttgaaagagaaaggtgggacggtgccgttgtcgttaggacggtgaatattaatctctggttccgtgtggcatggggatccttttgctaatgaaagtgaccttctcaattatctctttcatttttatttttcactcttagtttccatcagcttttaatgtgtgtatatgtagttagctatgtacctattttttccagcttgtgattacttagccatacagagttttagattttgagaacttaatgtcgtttttaagtttacacaaagctttataacagcccttataaaaataatttcaac

SEQ ID NO: 40506 - DNA, 328 bp, Glycine max
  Clone ID: PAT_MRT3847_136577C.1
acttgaggctgttggggaagctgcatatgctgaggacctggggtgacaataccagcttacaatccccgcaaatggggctgatatcataaacctatatgctaaccaaatcccaactatggtaatcttgatatctggaagacgatgactcttataaccgcagatattggaaaatattgatgcccttgatgctgcttgggtgccaagaaatgaaggatagggaattatatatgtgatcttttgcaaacatgacttcaaagataaactaccaaagacttggtttaaaagagtagaaccgactatttcccaaattggggttgataataaacat

SEQ ID NO: 40507 - DNA, 439 bp, Glycine max
  Clone ID: PAT_MRT3847_136578C.1
ggggggaaccctcctttggggcaacaaaattcaaattacctcaataaattaaattttaaaaaaacaaagcaaaaaaaagggatttggggggaaaaaaaatgccccccaacccccggggtttaattaccaccctgcctgtttggagggtataaaccccccctaaaataactgattgccccatcaaatgctttttaaaaaaactttaaccccccaaaatttcccaagcccaaaaaaaaacccccttacataaaaaaaatactttggccccatttttaaaaacccccccaagggttatcgggggtctttagccggtgggctaaaacattggatcaaatttttgtttttactcagctcctccaggtttttaatcctaaaatttttactttcactccccaactccattaacttggggattaacgggactttttccctggttttt

SEQ ID NO: 40508 - DNA, 374 bp, Glycine max
  Clone ID: PAT_MRT3847_136579C.1
cgtcctcctctttggggggggggggggggggggggggggcggggggagggggagggggggggggggggggggggagacgtaaaagaaagaagatagcggattaagggtaagcagataagcacacaaaattaggatggtgtatggaccggataaggagcgttgaccgcacaaaaaatggctaggggttcgacataatataccaaaaaacaatgaaacaactaactgacccgtggcgctgggtgaaaaggccccttaccccgcggggcttaagggggtctaaggggaaaaaaggtaccagtgccaaaacgatttgataggctaagcctagagacctaaggtaaataccaaagccgcacccacggcaaacacccatt

SEQ ID NO: 40509 - DNA, 519 bp, Glycine max
  Clone ID: PAT_MRT3847_13657C.1
ggctcgagctttggagtaatgaaaatggaggagttgatgtgtctctaaaggatggtttgttttcacaaataggaaaagaaagtgctttgttagagcattcattgattccagagttttctgatggagagggagactatacagaggagtttgctggtttcatgggcagaaataccagccatggagtgtccaaaagtaccaccacaagtccactaaggtcacgcactcaggcaactgttgacagcataaaaatctttgagacccctaggaagctcatccactctcttcaagattcaagtgatctgtctttgggttgctctaagaaggagcagaatggaaggtataggagtctatcctcagacgacaacatggagtggagtccatcttgtaagtataaccaaaacggtttctcagatgacatgaacaagtgtgatagcgaagtaatcgaaggttgtgctgaggttgagtttcaaggtggctcagagtcagtctcattaacaaatgacaacaacattctttgta

SEQ ID NO: 40510 - DNA, 305 bp, Glycine max
  unsure (1)..(305): unsure at all n locations
  Clone ID: PAT_MRT3847_136580C.1
aaaannnngggngggaagttttcaannacaaagccacaaaacgcagcnnangaagcaaaaaanangggaaggcgacaaaaaaaccnangnacacaaanggcggaccanacggaaccanacaccgccaaaaaggnacanccaagcacccnccnnccctagcaanncaancacagccngnnncnncanangangcagggcaacggnccccaaagaaacccaaannngnngcanacgggggaggaaaaccacccnccaaaccacgaaccacanggggaagcccaccacaannggaagaaacccaccca

SEQ ID NO: 40511 - DNA, 296 bp, Glycine max
  Clone ID: PAT_MRT3847_136581C.1
attattattcttccatttccattaaaaagaaaatatcataaatgggtattttggcgattcgaggacgaaatcacctcccctgtggctcctgctactctttacaaagctctagtttcagatgccgtcaacatcatcccaaaggctcttgattccttaaagagcgttgcaaactgtaagggaaatggtagcttttgtcacattcattctgatatcttttgttttttgtttgtgaaaccaatgtttgtctgttcttgatggtgatcaagtttctacgtttttatatatttttatttttt

SEQ ID NO: 40512 - DNA, 473 bp, Glycine max
  Clone ID: PAT_MRT3847_136582C.1
aggctgcgagaagacgacagaagggtattctgagtgttttgatgtagaggagtctgtggaatctgaagttgatgatcctgagcaagaagaggaaggggttaccaaatttgataactgtatagaagaggaggaagttaagattgtggctgcaaatgatgaagtgatggggctgaggaaagaaatcaacagacttggtgaagagaacaaggatcataaagatcaaattaaggagaaatataacgtttatgatgaagttatggtgttgagggaagaagtagaaggactcagaaaagagaatagagtgcagaaggatgagctcaaccagaaaagtatcatttgtggtgaagtaatgatgttgagggaagaaatagaacgactcaaagaagagaatagagagcagaaggatgaactcaaccagaaagatatcatttgtggtgaagtaatgatgttgagggaagaaattgaaggactca

SEQ ID NO: 40513 - DNA, 142 bp, Glycine max
  Clone ID: PAT_MRT3847_136583C.1
gcagattaagaagatggaagttagtaagcgcaacaaatttttatgtgaatagtgagggaagtatgctgtgaagaggagagctgtacgaatatggtgatgcaaggactgtggtaaaatgaatgcaggcggagcttatactatg

SEQ ID NO: 40514 - DNA, 465 bp, Glycine max
  Clone ID: PAT_MRT3847_136584C.1
ttctttcttgttttcggaagaatgttggtgtttttttattatttggtgaaacttttttgcttgtttttggcaaaaaaaaaccctccaaatttttatgcgcgcccttaaaaggaaaactggggtattttcaaggggggggaaaaaaagggccaaaaggcaaaccagggtttctggttaaccaaaatcttgttggggaatggcttggattcccaatttttttcccccaaaggggaagggggggggggcccttatctttaaaccccctaaatctttggggggtttcccccccttttggaaaaccaccccgaaaccaggtttttccaaaggccaatggtgggggccttttccaaccgggctcaaaggggcttttgtttttgtgacataagaaaacctggttttggaaaaacatacccttgtgggaaaaccgacgtttgccttgaccaaggaacactttttaataagggg

SEQ ID NO: 40515 - DNA, 345 bp, Glycine max
  Clone ID: PAT_MRT3847_136585C.1
cccaaaaaaaaaaaattggtttttacgaactaatcttccgatttttttcttcccttcccattaccggggggggggataacaaattgcccgataaaagggggggtttcaaaaggggggggagaaggggccacaatggcaaactttgccgggcatataagttatgttttttttgaataaaacattaagtttaacaggggggggtttggctccgcagaaacccccctggaaaaaaaaacaggggaagcgccggtaacaaaacaaaaagatactggtgatttgggcccctcattttttggggcaagaccaccgattaactcttttaaaaaaaaatttgctccattttac

SEQ ID NO: 40516 - DNA, 301 bp, Glycine max
  Clone ID: PAT_MRT3847_136586C.1
aacacgagggaagggattttttattaggtggattttatggttgttaaaacagcatatttcagcatcaaaggggtatggaaatattttttcctatcttggtgagcaaggggtaaatataaactgggcaggtttgatgttgaactttaaaaaccaaaacacatttattttattgaaaattctttttggaaaaaaaaaatagggggtcattctaaacatccatttgttttaaataaaattggcaccactcccttgtttgaagccttcaaaaagggacaccaaaaatttgcttttttttttgtta

SEQ ID NO: 40517 - DNA, 294 bp, Glycine max
  Clone ID: PAT_MRT3847_136587C.1
attcttccccactttatatttacatgcctctcccaaatctccctccaaacaaatgtcttgggggggggggaaaaaaaacgcacccggcccccccccgaaaaacaagcaagcctttcccaaaattcacctaaaacagggggctcctaaaaattcaccccaccgggttcctccccccgggggaaaacccccccccaaaattttttgggttgagacccccgccccctttccaaaaaaatccaaagcagaaaaacccccggggggggggccctccccccccctttttcttttgggggg

SEQ ID NO: 40518 - DNA, 862 bp, Glycine max
  Clone ID: PAT_MRT3847_136588C.1
cccacgcctataacaaaaatgagtgacaaaaacaacatggttatagcctccaaaacagccactggtagttcttcatcatcttcaagaatgtccacaaaaacattctcgggactcggaaacctcgtcaagctccttcccaccggcactgtctttctgttccagttcctcatccctgtcgtaaccaacagcggacactgcaccactcttcacaagtacctcactggctctttccttgtcgtatgcgcattcaactgcgccttcgcctccttcaccgacagctacaccggcagcgacggcgagcgccactacgccctcgtcactgccaaggggctttggccttcgccggcgtcggagtctgttaatttatcggcgtataagctccggttcggggacttcgtgcatgcgttcttttcgctggttgtgttcgctgtgcttggactccttgacaccaacaccgtgcggtgtttctacccggcgtttgagtccgctgagaagattctgatgcaggtggtgccaccggttattggagcagttgctagtactgttttcgttatgttccctaataatcgccatggaattggttaccctacaagctctgattccaacgatacccaacacaagtctcagacttgagaatatctctgtttcatatatatgcaccaatttgcatattttggtcgagcttgatttataccgattcttgcaatgtttatatgttattcttaatcattcaaaggtttattttatatatttgttaaacagaaacatgttgcttcaatttttttattttattttagatgcaaagcttcttaattaagagaatttactcactcccgtgtaaaataattgttaattgttgtaa

SEQ ID NO: 40519 - DNA, 478 bp, Glycine max
  Clone ID: PAT_MRT3847_136589C.1
cctgcgttcgttatacaaaatatattcttatttttttcttagccatcttaatggaattacaatctttacctccaacattacattgtttagctgcaaattcaattcattaccaaaagaatacatacctgcaaaattactgctaaaaaacaaatactccaacaaagagattagaagtacactacccatcacaggatccatatttagtacgtttataaagaaaacgcgctcacttacagggaaaacggataagatgcccttgttggcacacttaattgcaacgtggattaatactaatcactgaaacatagtcttattattcggtgacgaaattttctctttaattctgagttgcaaagttttttaaaaagaaacttttatgttgaaggggaaatagcattagttcccaaaatagtataattggaaaccatccaagccttgagcaagaataccatttttggcgtatctggcaggataactt

SEQ ID NO: 40520 - DNA, 448 bp, Glycine max
  Clone ID: PAT_MRT3847_13658C.1
acttttcttcgaaaccccatatcagcatcgaactaattattaactaaaaatgcaataaattgaataaaatgatggaaaaaaaaacatcatatcctctttcttctaagaggattccaagaaaacacagtggttaggttatccaaagtctgtagtatgattattcaaagctggaaatatgggcttaataatctttgacacctcccttactaagtttatgactttaattaatccttactcatatccaatcagtttaggtacacgtcgttttcatatccatcaatatatggatccaccgatccagttaaaattatgtagacttaattttataccataaacttaaaagtccaaacaattgcagttttactggctatgctctcggctaactactttgaaagagtaaaaaaatagaccatcttggtatattctataagaatcccactggtaaatt

SEQ ID NO: 40521 - DNA, 225 bp, Glycine max
  Clone ID: PAT_MRT3847_136590C.1
cagattcaaagccattatgatacatacatacagatgcgaccattatgttttggaatgacaaatatgggattatccataaataaagtttttccggacttaacctacggataaaaccagaagtgaaaagtggatcatataaaacagccgttgggccggccaaagcaacacgagagctacacactgatggcctgtattggtatactttcacagcatatgtcagtgacc

SEQ ID NO: 40522 - DNA, 386 bp, Glycine max
  unsure (1)..(386): unsure at all n locations
  Clone ID: PAT_MRT3847_136591C.1
tagctattttatgggaatcgggatcagagtctgtagctcatcaaggcatattttcatggggctccaatgagcactatagttcttctggantgaagcctacggtcactgtgggcacaggatgtaacattgacctacccacaacctgtacatgtagatggctctatacaagggggtgacagctggcacaacaatatgaagaatccccacactctctcaggtgaacacagtgatggcacatagaatatctcgacatggacactacatagcgaaaggggcatctgcccttgatgaatatgcaaatatcagaagttcacttacacaagacatatttgaatacgttgatctatctgactatggctatgcccagttgtatagagcatatgctg

SEQ ID NO: 40523 - DNA, 280 bp, Glycine max
  unsure (1)..(280): unsure at all n locations
  Clone ID: PAT_MRT3847_136592C.1
tcgattattgtatgtacagaatgggctgagtgtatcattgatgtncgtatttcttcgagtcaaggtcaatttaatgggcagtctgtttctcattaatctccagacaaaaaatgctaccttgtttggtatttttagcttccatatggcatgaaaaattccttctgtgttatcatctttttggttcttgtccaatgattggtattcacttctaactgtgtgttttccagtggtatcatttgtccatacccatttatccaattgttggagatttatattaaag

SEQ ID NO: 40524 - DNA, 266 bp, Glycine max
  Clone ID: PAT_MRT3847_136593C.1
ggggacagaaccaccaaggacaactttttttaaaaataaaggcaaacaacatttgaacctaccactacatagcaccacactggtgattcactcacatccatccatccctccctagcacatttatttgccccaccgaattacagccaaacactttacttgcttggtaaaggggactttaaggtcaaacccaccatcctttttttgctttttttttttaacctttggggtctacaacctatcattacctttttgaaccggacgcgtgg

SEQ ID NO: 40525 - DNA, 245 bp, Glycine max
  Clone ID: PAT_MRT3847_136594C.1
ggcgaaggacgttgaggttgctgagcgtggctccttctctgggaaggactaccaggtccctccaccagcaccactcatcgatgctgaggagctcacaaagtggtccttttacagggctcttattgctgagttcattgccactttgctcttcctcgacattactgggctcacagttatagggtacaagcaccagacggatcatgctgatgcgtgtggtggggttggcattctgggcattgcatggg

SEQ ID NO: 40526 - DNA, 190 bp, Glycine max
  Clone ID: PAT_MRT3847_136595C.1
atgacacacaatcagactcacacgtatatgacagctccaatgttgcactacagggaataggatgcatggatcacgctagcgcgtgctacaaccctgctcaagaacgagatgctatattggtagtcacctatgcgtacaccaaagccatctcccaatcggatgctgctcatgatgcatggatctgctgcta

SEQ ID NO: 40527 - DNA, 292 bp, Glycine max
  Clone ID: PAT_MRT3847_136596C.1
cacaatgcattgaactaaggatttgatatcccatttcattcttggtctagcagtattagggatgttttttgtacttggggggaatagtatataaaatttacagatcttgtgtgtcggtggttacctagtttacagcaagatctttgattccctaatacttgttctgtatattgtattagttaaccatagttctgctcctgttgatgctatgctgtatgtaaatcagtaccacttgtactgctttcactattatttataatatatatctagttgtgccgacctgggcaggtgc

SEQ ID NO: 40528 - DNA, 298 bp, Glycine max
  Clone ID: PAT_MRT3847_136597C.1
ttttgttgttcagcaaattgggtttgtaaatattgaatttgaatcaaatccatgatttgggttggctgactttgttgacttggtcctgtcagttctgaaaaatcattttaaacctagaattgcgttgtgtacttcaaagcaagcaaatgcacaaaatttgatgttaaaagttgatataagacttagaaatgcccatgtttttttaaagggaagtatcgagtgggatgtttcagtatgagagctaagagtttgataagtaagaagcagattagtacaagattaagaaaaatgattaagt

SEQ ID NO: 40529 - DNA, 725 bp, Glycine max
  Clone ID: PAT_MRT3847_136598C.1
cttttgactccgaacgagcttgaccgcgaaaagattggtcattggtgatcgcagtgttcaattcaataagttctgggattgattcttttacaaagagaatattgccttttttgctctgagatttatccgttcatttcttttattccttttcttttaatggtgatgcttgaatatcagagcaagattctggtgttattatgtttagattaaagagttgtgaaggccctgtgcgctacttgtatcagcaaacttggcatcacctttatcataacaatattatggcttatttagttggttatgatccttgttcccacttgagcaaggccttttctcagtacccttctctttctttttctgatcgtggtagctacctgtctttcccatttctccgtaatcttgtttatgctaatgtttttggggttagcagaagcattggttttggtactagaggttgtagctttgacactagtggtagctgcagtggtaatagtgataggatctttgtgagggcaaagacaaggtcccgtggctttgcatcgaatcgccgccagccgatgttggctgatttggagcaaaggaattctgttaggagtgatgagagtgatgctactttggttaaggttgataatggatctataaatggaagtcctgctaagcctccttgtttcagtgatcatcgattatcccagaaacttgtggttgctgttgatgttgatgaggatatg

SEQ ID NO: 40530 - DNA, 928 bp, Glycine max
  Clone ID: PAT_MRT3847_136599C.1
atatgttgtctctcttctttcttacttttttatattctataatttgtattgcatatacaaccataaaaaattataaaattatattttagtttgtttctatgtttagtaaatttttgctaaaattcggttgattaatatttatataataatatatttttctacatcaatatcaaataaaaatactaaaattaatttattaaatatattttattacatatagttttaaattaatttattagtaatataataattaaattatttatagtttatttaataaaaaatatcacaagcataattcaggagaaacaatcatgttttattcacgctagataaatcttattaagaaatggtataaaataataataaataattttatgtacaaatattttaaaatactatttatattatgaatttaaaaaatttatattaattattaatttaaatctaattaattaatatatctactataaattagtattttgattctatgtttaataattttatatacaattttttcattaacatttatataatatgttaatttttttacataaatttataataaatattttaatatttatctattaaatatatttttattacaaaataattttaaattaattcatcgataatctcgtacttttataatagagaccacaattaattcaccgataaaaacattttgcttaaaaatcatataaaataattttaatacaatttcataaaaatcttttttgtgttcaataacacttattttatgaggatgaaatttttatactaaacaataattaattaatatattattactaaataatattttggttctatgtttaataattttatatatgaaatttttttattttgaaattatttttattttatattgtaatttttaatatacttatgaatatcattattattttttaat

SEQ ID NO: 40531 - DNA, 135 bp, Glycine max
  Clone ID: PAT_MRT3847_13659C.1
gaaggtcgccgaatcgccgatcacgacgtgctgctgaccctggccgaatccatcggtgtggatcccctggccttcaacgccgccttcaatgaaatcctgggtgctgaaactcgctcgcacatcaacgacagccgc

SEQ ID NO: 40532 - DNA, 238 bp, Glycine max
  Clone ID: PAT_MRT3847_1365C.1
ttcactttctcacgatcccatagtaaccttctctctcttctttctgccactttttctcagtctttaatggctgcccgcataaaaattccgcgttaaacaatcgtgggtcggtgcaagttagcatttttcttatcttttgggttgtcaaaaagaaacccaataggaaaagtcttgttctttttcttttggggtggtctttttttcttttggtaaaatttgatgccagtttcaccaaaaa

SEQ ID NO: 40533 - DNA, 1016 bp, Glycine max
  Clone ID: PAT_MRT3847_136600C.1
aaaagaggtccatgccctccccgctctaacaatatataatgtaaccaaaccccttatcaatactacttcagagttaagttgagaacataccaatctacaataaacgatgattctcattatctccctcattttttctcttctctctttctcccatgcttctgtcctagatttctgtgttgcagattatgcaggtcctattggacctgcaggatattcctgcaagaagccttcaaaggtcacagcagatgattttgcttacagtggccttggcattgctggtaacacctcaaacattatcaaagctgcagtgacccctgcatttgatgctcagtttgctggtctcaacggtcttggcatttccgcagcacgtttggacttagcagcaggtggagttataccacttcacactcatcctggagcttcagaattacttgttgtaattgaagggagcatcctagctggattcatttcttctgccaacattgtctacctcaaaactcttaagaagggggatgttatggcattccctcaaggcttgcttcatttccaaatcaatgcaggcaaatcttcagccctggcaattgtaagcttcagtagctccaatcctggtctacaaattctggacttcgctttgttcaaaagtagtttccccacaccattgatagtacaaaccactttccttgatgctgctctggtgaagaagcttaagggtgtacttggaggctcaggctaaaccatgggaagttatccatgaaagagactgaagtcaagcaagcatattgtctattacctttaagtttatttatctccttggtctacaatttggatttagtatgcatgtgtaggtagaactcttctttcagcaggctttgtagttgagtaataaacttaagctgatttggttattgttgttgtgatgtttattgttatcaagtttcagttgaagcagatgatttcgtacttgagaaaattgagctatgagatgaatttaatatggggcctattctcagtgttcc

SEQ ID NO: 40534 - DNA, 528 bp, Glycine max
  Clone ID: PAT_MRT3847_136601C.1
gagaagagaagctaaagaaagaaaggagatgggagtggagaagcagttgttgaggtctggcaccggtccgaagccaattcccggtcagaacgtaaccgttcactgcactggtttcgcacaaaggatcctggccagaacccattcactttcaaaatcggccaaggttctgttatcaaaggatgggatgaaggtgtgcttggcatgcaaattggtgaagttgctcgtctccggtgctctccggattatgcttatggtgctggtggctttcctgcttggggaatacggcccaactctgtcttggaatttgaaatcgaagttttaagtgcgcaatgaaaaccttggtagtctgtctctgtcctaaaaaataaaatttttccattttcatggacttgtacaatggtatccccccattgtgacttgtgggtgatatctacagtggttgagttgtccaagtgaaatactaaataactttttgaagtgatctcaaactctctaatattatattgggtagcctttacttttttcccc

SEQ ID NO: 40535 - DNA, 577 bp, Glycine max
  Clone ID: PAT_MRT3847_136602C.1
tttggagaagtagagaatcataagaaagcaagaaagaaaatgggagtggagaagcagttgttgaggcctggcaccggtcccaagccaattcccggtcagaacgtcaccgttcactgcactggtttcgggaagaacggtgacctttctcagaaattctggaggttacctaccaataccatttctcttcctttccttccattcattcattattaattaactctccttatcttacgcttacagcaccaaggatcctggccaggaccctttcactttcaaaatcggccaaggttctgttatcaaaggatgggatgaaggtgtgcttggcatgcaaattggtgaagttgctcgtctccgggtactattatcaattctttgctcttacttcttcttgttcccacttgaaaaatattacatacaatatgtgaattgttgacattatctcctataaatcttacttttctctcattacgaaacttttactactctttgatttttatgttacttattcccactttaattattgtgattgtcatacgatcaatcgtgtttttcccttggtacaaaaacttgtcgctat

SEQ ID NO: 40536 - DNA, 437 bp, Glycine max
  Clone ID: PAT_MRT3847_136603C.1
aataaaccaaagagcaagcattagaatgtgcggggactgttaacaacaaggatggcgttacacatgggaagcacagtcccacatcccaacgctgcgtttaacgctcttccctaacgacaaaaccctaaacccttctctccaatgcaaagacctcgccgtcgatcttcactcctcccactccttcctcactctcacagcctcctttctctcccttagggttccgctccccgccgtcttggtcgatggcgactctccggtcgctttccggcctctctccgaccacatcgaggtcaagctcctcctcctcctccccgtcgaccaccccatcctctccgccctcgacctctcccaaaccccgccgccggaccctctcgattcacaatccgatgtgaaaattttgtcttctgcaggagaagttgacttctactgcagaactt

SEQ ID NO: 40537 - DNA, 1591 bp, Glycine max
  Clone ID: PAT_MRT3847_136604C.1
gagaagagaagctaaagaaagaaaggagatgggagtggagaagcagttgttgaggtctggcaccggtccgaagccaattcccggtcagaacgtaaccgttcactgcactggtttcgggaagaacggtgacctttctcagaaattctggaggttacctacctatatcatttctcttcctttcctttcctttccttctttattaattaactctccttatcttacacttacttacagcacaaaggatcctggccagaacccattcactttcaaaatcggccaaggttctgttatcaaaggtatctatgtataccaatccactaataatacttaccattttcactctcttcctcttgcttttacatacataatactattgatttgtataagagtttgtatcttgattcacatgtgtagacacctaatatctttttcccattttgatttattttcccactgtaggatgggatgaaggtgtgcttggcatgcaaattggtgaagttgctcgtctccgggtaatatttctatgctcttacttcttgttctcacttgaaaactattgcatacattatgacattatctcctataaatcttactttttctctcattacgaaacttgtagctattaactaagtactagctattctttgattttgatgttacttgttctcactttaatcattgtgaatattatgcgatccatcttgtttttcccttggttctgaaacttttcgctatatataaagatggtcaaaatatcctagtgtcttagaatctttgtcatggctcagattgtcacttgttggaaaatccttgatgtctattttcaacgcaacatatatatgctttcatgtgcataattcaatttcttttttctgacattatatccaactgagtgttcttggtagaggtgacattacaaaattagccttaccatatgttgaactttcctgggaaagggaatccatttaaggttgttggtcccaaattcattgtatttccttgattcttagctcttggtttgtttgttactttcttcttaagtggaaggttattaaattgaatagaccctgttgttcatattgttgataatcttgcagtgctctccggattatgcttatggtgctggtggctttcctgcttggggaatacggcccaactctgtcttggaatttgaaatcgaagtcttaagtgcgcaatgaaaaccttggtagtctgtctctgtcctaaagaataaaattcttccattttcatggacttgtacaatggtatccccacattgtgacttgtgggtgatatctacagtggttgagttgtccaagtgaaatactaaataactttctgaatgatctcaaactctctaatattatattgggtagcctttactttcttccccatttctttgcaaattaatactactattatctagcaatgcatcaccttaggttctgcttccaagtgaagggctatagatgtttttgtttatcataaagaatctagtccttgaccattcaccccaagtttataattgtgacatcacatttcgtatagattgataccagactttgctattgctaataataatagcgttatt

SEQ ID NO: 40538 - DNA, 470 bp, Glycine max
  Clone ID: PAT_MRT3847_136605C.1
acaccatccaattggcacgaacaattttatatattgttgggctgtatgtataggatcaaaaacgacactaaaggaaattataccctacataccacaatgccgatgtacttgcaattgcaagtgatagccctgttaaaaattgtgaattgtcagtgcttaaaaatggtcccatttaacaacatacacttgaaaggaaatttggcaatgacctatagaaaatagatactaccttgctcccttggttcattaacgatagtatccccacggccggccgcagaatcgacttgcatcgcaagggataaccggccccacccctaatgttcctgtgcactcccgtgtgctgctggccatagatagctagaagattgctgattcatgaggcctcctcacctagaacttggcagacccactgtgcccggacctgatgattgctagctgcatactaccaaacaggccacacctggcactgg

SEQ ID NO: 40539 - DNA, 479 bp, Glycine max
  Clone ID: PAT_MRT3847_136606C.1
tcgagacggctgcgagaagacgacagaagggcactatcatttaccaatgatctattttagaatggaataatattctctatcatggctaaattctttcagaaacgaatgctaataaaaatatatataaataaaacctctagctagaggccatatctaagtattcattttttttacaactacttatcagttcttacttgtgtttttgaaattccacaatataaagtataccttgattttactctttcaaaagacattactttattgttaatgcaaaattatgcttccttatgcaggaattgaaccacagaacgaaagagatgagtcaaagcgcacactggtcaaatcctttcttttacgaattagcagacttgctaatttagagaaatatgtgcagtgtgcttactgtaaaagccgttacatgtttggtattgttgagttgggccaaagctttgaataccataaagtttgggctttatata

SEQ ID NO: 40540 - DNA, 113 bp, Glycine max
  unsure (1)..(113): unsure at all n locations
  Clone ID: PAT_MRT3847_136607C.1
aataacagaccgataccatccaaagcgttcttgttacgcggtccgagtaaagcaaagccttaatgaatacntaaaaaacatgtttgcaccaagaatagccatcaaggaatcaa

SEQ ID NO: 40541 - DNA, 269 bp, Glycine max
  Clone ID: PAT_MRT3847_136608C.1
gtagtgcatcatgatctacgaataaaggtgccgatgataaaacgtaaggctatcagatagcccgtattgatcaaggggaatcgggcagtactcgaggtctcaaatgtaccacaagagcgggcagttcggctatctaggccacaaacggctgcgttttcactcgccacggcgctaaatcccagcctgaaactcccgctgagaagtcaccccctttttaccctgctgtcgatggcacgaaactccttgtcaactagcataaattctaaccc

SEQ ID NO: 40542 - DNA, 1507 bp, Glycine max
  unsure (1)..(1507): unsure at all n locations
  Clone ID: PAT_MRT3847_136609C.1
ttntcagngaacgggntttccttaagtnggnagattgcccatcaggaaatagnaaacccattatcccagtttcaataactganaaccatatataaagctgaggcattatttcttcatatataaagtgtatatttctgtaagtgggagatacaaaacctgtattgccatgaggagggcaaaggagaaactccagagaaatctccatctttattataccatggtaacttaattcaaattatccaaagaaagcttgtttagcatcaattgcttaatgctcaccctataattgggcatcaattagaagtagaaaaatgatctatctcaagttacataaccttccttattttgtctttgacatttcacaccaacatcttgaattgctccgcaggatgagatgaacccctccaattaaatttgtgccaaaatgtgtaagccagcactctgccatgaattgtgagcactagaggcagaattgcaacaaccccaaaacttctttctcaaggcccttaaattgcatgttattgtcatttacatacacgaacaaatgaatacatatctctctctatttacaatatgagtcaataattaaaaatggcctggtcccagccaaagacttccatcagactatatctccaagattgaagctgttctctgatgtggaggtagagatggtgattataccatcacagtcagatacactatcttgcaaactcagtaataagtgggagtgggaagtactaaaaccggtggacggcttggttcttgggacaagaggcacttcagcctcacccacgaggatctgaaccacacccctcatagtaggtctagtcaatgggtcagggtgagaacaagctagcccaaccaagagcatcttcctcatctccccttcatcaaactcgccctcaagcctcggatcagcagccattagcaacctagcttcccggtgcaaactccaaacccattctactaaattgcagctaatcccacctttaccacccccattggcatccttctctatcggtcttctcccactggccacctcaagaaccactgcaccataactaaacacatcagttttctccgtagccttccccgtaagaagatactcaggtgccaagtaccccattgtccccgcagccaccgtggcatccggcgacttatcatgctcagtttgcctcgccaaaccaaaatctcccaacctggcattgaacccttcatccaacattatgttactagtcttaatgtccctatgaatcacctgattctcacactcttgatgcaagtaggccaatgccgaagccacacccaacaaaatcttgcctctatgagcccagggaagcggcgtcctagcctcaaacaaagccttatccaaactcccattaggcatcaagtcatacaccagcaaaatctcccctttctcatggcaccacccttgaagccgaacaagattccgatgcctcaagcttccaatgatagacaaccggacgcgtaagcggacgaaagggaa

SEQ ID NO: 40543 - DNA, 460 bp, Glycine max
  Clone ID: PAT_MRT3847_13660C.1
gcagatcttcgtgaaaaccctaacgggttaaacgatcacgttggaggtggagtcttcggacaccatcgacaacgtgaaggccaagatccaggacaaggaatgcatccctccggaccagcagcgcctcatcttatccgggaagcagctggaggacggtcgcaccctcgccgactacaacattcataaggagtccacgacttaccttgtcctccgtctacgtggcggagccaagaagcgcaagaagaagacctacaccaatcccaagaagatcaagcacaagcacaagaaggtcatgctcggcattctttagttctacacagtcgacgattctggataagttcacaggctcacgatggagtgcccctacgcagagagcggcgccggcacctatatggctgtccactatgatcgacactactgctgcaagtgcggcgtgacctacgtttaccagaaggccgat

SEQ ID NO: 40544 - DNA, 1191 bp, Glycine max
  Clone ID: PAT_MRT3847_136610C.1
gttacgcttcgctgtctctctccctccaaaatcaaaatcgaaatcgaaatcagcaaaaccctaaaatataacccttagaatagtgaggtgcgcgcagagcaataatagggcatgacatgatgacaagccacgaagaggatctggatctcctcctttcccttgacgagagagttgctgaaacccctccatcttctcccacaatctcagacgatgatgatgatgaacttgaacttcccaaccaaagggaaagggataaacccgacatgtccgttttcaaaagcgcccttcaggattgccttccttacgatccccccaaaccaactaacaaacccgttattaatgttgattcccaccttgaaaagttttcgggccttcgaataaggaaccaattgttaactcctgccgagcttaaggaacatttttcagacattcgttttgttcggctgtcggttatcaagaattccttagttggggatactgtttctggaagttgggccactgttggagtattgaccgagaaggggactcagaagacaagttcaacagggaagagctattgtatatggaaaattggctgtttagatgaaactactgtttctcttttcttgtttggagatgcttatcagatgaacatgcaagagcaggctggaaccgtctttgcactctttaattctaccgtccgcaaggataatgcgggtaatggtttttctttgagtatatactccaccagacaaattatgaagatgggcacctctgttgattatggagtttgcaaagggaaacgaacagatgggatggcttgtaccctagtcataaataaacgtcatggcacatattgtaaatatcataaatcaaaagcatcagagaagtattcctcaatgcgaactgaactcaagggaggaaacttaagaacagcgtttaggcctatgggttacctcaaatcagaaggaatttacttagttgaccctcttgctgacaaaacaaacttgaagaagtctcagcctgtgaaattattgtcccgggatggtatcagaaaggcattgagcaatgcaggaaaagtaacaacagcttctcattcgcaagggattaggtttctttttgaggttgcagccaagtccgatccaaaaatgaagaataaaggatcaaattttcaaatgttcaaaacaaatggccagagaagaggaaatcatc

SEQ ID NO: 40545 - DNA, 314 bp, Glycine max
  Clone ID: PAT_MRT3847_136611C.1
gttttatttatggaaggctaggtatatagagaaaaaggacgtaattctattacgaaattattgtttatttaataaatttcctaatgtgaaaacaaatattatattttaaacatttttgaaaagtgaaacatctcagtatcaaaaaataacagaaatcaatagagattccgaaagtagtggtgagcgaaattggattaaggaataaaaataactactaaactaatcagtgtgggggaattgacccagcaggtgaaagtcctgttaaaagcccctggtttaaaaaatatataattttttttaaaggggggaaaaag

SEQ ID NO: 40546 - DNA, 207 bp, Glycine max
  Clone ID: PAT_MRT3847_136612C.1
ggctcgagcgaccattaaatataccattttatttttcgcgatggggtactacccaagggggggaggtgtatactactattactaatcctctgaacactgaatgttgagatatttccacctgaagaatcgatgctgcacctactaattttggataacagacgagtgggacatccgtttggctttgaccaaaaaacgtctcatgtacgc

SEQ ID NO: 40547 - DNA, 284 bp, Glycine max
  Clone ID: PAT_MRT3847_136613C.1
tttttattttttttcctatacctttttgtagcaaattggaaaacacctttgcgcaatgagagaaaagaaagaaagtgatgcttccagagttgcatacttgcaatatctagaatttgatttgtacatccaagaatataagtataactataacatacctgaactacttatagctccagattaattctgggtctcttatgactaccaactcaaataacttcacagatccttgaacataaccttagcaagaaacaagagtttgcctatatctaatttttctaacctag

SEQ ID NO: 40548 - DNA, 235 bp, Glycine max
  Clone ID: PAT_MRT3847_136614C.1
tcgggattagattcatttcatccacacactaattttggtgcaacatctatactagatttttcttcttttttttcatcacgttctctattccattatgtaacaaatttgttgttgctcaccaccgccaaaacccaccttgttctccgatcgattcgccattgtcagaggcaatttttggcgacggcaacgaccctcctccttcgatccaattaacgcacccaaaaaatactcacgc

SEQ ID NO: 40549 - DNA, 610 bp, Glycine max
  Clone ID: PAT_MRT3847_136615C.1
ctcttctcgcgtctcactctccaccgatacagtttcggactctctctctctccgattaccgcacaacaccgtatcgccgttcagggtttcttcgctcctctttggatcttcctcccttcgcgtcgttcgctttgattcgttaattttttttcttgcttctcctgtcttggctcgagatccgggccaagcacagaagaatccgattctgatttgcatttcgtactcactggtttggcttgtttttggctctttgtataaaatggcttcgagcgaggggtttctgactgatgggcagagggaactgctaaaaattgcaagtcaaaatgcggagaatctgtcttcgtcgccgaagtctccgtcgtccttgctttctgaccatcatgtgaaagcccctgctggtggtaagtcacaaacctctgggatagccgtgaggcatgtgcgtcggtcgcactcgggaaagtatgggaaggtgaagaaggatggtgctggtggtaagggtacttggggaaaattgcttgatacagatattgattctcacatagaccggaatgatccaaattatgacagtggcgaggaaccctatcagctgggttggaactactgttgctga

SEQ ID NO: 40550 - DNA, 204 bp, Glycine max
  Clone ID: PAT_MRT3847_136616C.1
ctactgaactaaaccttaccgatatggagccttcggactttcacggcaatcttattcatttcacagttactaatacttactccacctttaacgtatcgaaacattaaattattgattatctctcaacaatcttttttgatgaacccttggctttaaatagtcattctttatcatcttattttactatcacaaccccacttcctt

SEQ ID NO: 40551 - DNA, 414 bp, Glycine max
  Clone ID: PAT_MRT3847_136617C.1
cgcgacatcttcttttacgtattgaatctcacaattggctaaattagatcttttggtgctctttgaataaataaagctcttttctttattttgtacatatctctgctctcatatctcatcaaccttaacctctcctataccacctacaagctgatcgcatagtacatattgatctatagatcacgaatggacctttcgtgcaatccaatgactatatcattaccacttaacaacccttcacatcttcccaagtagcactatcattgtaccatcacatgtcaatctactgttgaaaacaatgaaatgattttatacccacatgccattttcatgcatccattcacaagtgctaacaatattctagttatctgtgatgcctacactccttctggaaaacctatttccacttacaat

SEQ ID NO: 40552 - DNA, 342 bp, Glycine max
  Clone ID: PAT_MRT3847_136618C.1
gtacggtctagaatcccgggtccaaccaagcctccaaacggcggaaaaaaccaacaaaagggaaaaccaaaccaaaaattggttcattaattgttcggggtcaactgttcctcaaaaatccgtcatcatcatcatcaatcatcaacgttgattgaagaagatgccgatcagaaacatcgccatcggaaggcctgaaaaggctactcaccccgacacgttgaaggccgggttggctgagttcatctccaccttgatcttcctgttcgcccgttcaagttccggcatcgcctacaacaagctcaccgacaacggcgccgccaatcccggcggcctcaactccgc

SEQ ID NO: 40553 - DNA, 198 bp, Glycine max
  Clone ID: PAT_MRT3847_136619C.1
gccaaagcatttcgctttttgctacctgtagagaagacccagtaaaaatgatcgagatagaattcaacggtcagtagcattcgatagtaggagaccgaagcaccttacatttttgctatgatacacctcaacgggaacattattactgatgtggtgcgcagagagatcattgtttacccattgaccttggaaatatta

SEQ ID NO: 40554 - DNA, 193 bp, Glycine max
  Clone ID: PAT_MRT3847_13661C.1
ggttttgcaaatcaacttaccaacaaacaaagagaagtatggagaagatgcttgatgaggaagagaccttctaaatcttgattggctcgaaagcgaggtctcgtcttttgctttggggggtccgaagagaaagccatggtatgatgggcccggtcgtgcttatttatcggcacgtatgaccaaagattggatt

SEQ ID NO: 40555 - DNA, 123 bp, Glycine max
  Clone ID: PAT_MRT3847_136620C.1
tcctagtccaccgtattacagagttcaagatatactatgatgagagcgcggttcccatgactgttgctgcgagttgatcacctggcatccacgtctgtctcatctggcattgcgtattgggaa

SEQ ID NO: 40556 - DNA, 842 bp, Glycine max
  unsure (1)..(842): unsure at all n locations
  Clone ID: PAT_MRT3847_136621C.1
ccttcccgcctccaccagttttactctattggataaaaaaagtaatggcaatatggcgtttagggattctcagaaaacttctgaagaacaagggaatgttttcaagggttcttcagctggacaggttgagactgccagacctanagctagtagcaccagtcagttattccccccatcattgcatcagtgtcaaacatcttttgtttcgtctagatccagagcatcagatataactgaaaataacaatacgagtaatgcaacccaggatgcgtcttatggcaaaattactcatattctatcttcctcaagtgatttttctaacgcaaaggtgcagaagtgtgatccacctatgaatagcaatggttccagttccaccataatgaatttctcccattttgcaaggcctgctgctatggtaagagctaatcttcatagcattggcctgaagtctggtttgtcttcatcaagatcagacagtatggaaatgaagaataaaggtgctgctgcaactagcagcaatcctcctgaatcaattcttgttgattcaagtgttgaatgtttaaaggaaccgatcatacaatgccagcaaggttgtggagcaatccaaggctgatgtgaactctttgctgccaaaatctgttgaacagaatgctgtgccttctaagcagtcagagcctgctggtaaagagagtgccgctaagattgatctaattcccaatcaagttcctggtgacaatggcactaacgcacagccagctgctgaaaacagtaaggagccagcagtagcctcttcctctgtttgctctggcaatggtacccttctgtcgtcttctcgcagccgt

SEQ ID NO: 40557 - DNA, 359 bp, Glycine max
  Clone ID: PAT_MRT3847_136622C.1
agaatatcttatcttgaggaaggaagacatggatttgtcaacatttgagttgtcaaccattgctgaagccactaataatttttctagcagaaataaactgggggaaggtggatttgggccagtgtacaagggtacactaatagatgggcaagacgtagccataaaacgacactcacagatgtctgatcaaggactgggggagtttaagaatgaagttgtgctaattgcaaaacttcagcaccgtaatcttgtgaaacttctaggttgctgcgttcaaggaggggaaaaattgttgatctatgaatacatgtccaacaagagcttagactacttcatctttgatgaagctagaagtaagc

SEQ ID NO: 40558 - DNA, 473 bp, Glycine max
  unsure (1)..(473): unsure at all n locations
  Clone ID: PAT_MRT3847_136623C.1
gtcaacaatgccaatgcaccatcttctcatttccttccttatcttctctctcactcctactccgacaacctccctcaactccgacggcctctccctgcttgccctgaaagccgccgtggactccgaccccaccggagttctttcctcctggtcggaaaccgacggcaccccatgccactggccgggagtctcctgctccggcgacaaagtaagccaagtttccctcccaaacaagaccctgagcggttacatcccctccgagctgggcttcttaacctccctcaaaagactaagccttccccacaacaacttctcaaacgcgattcccccttctctcttcaacgccacgtcactcatcgttctcgacctctctcataactctctnctcggttccctccctacagagcttcgctccctcaagttcctccggcacgtggacttatccgataacctccctcacggttccctccccg

SEQ ID NO: 40559 - DNA, 521 bp, Glycine max
  Clone ID: PAT_MRT3847_136624C.1
gaattagtggaattattcctgttttagaagattttaatatctagttgcaccaaaggcatgcagagggggagtttcacagctcttggactaatcaacccttgtactggggagctaacagcattgatgatactttctcctggtgttgaaagtatgcaggcagcgatgaaagcataatactttgcagggaataagagtacaatcgtatagataggggttcgggtagaaatgcatgaaattatgcagtcaggaactagattctcttgctgccaaggagggtaagttgtgcttatagtgcctattacgctggagagtagcaactttttgtactgctttggcttggtctggtcacaccttgtgatccaacctatttcttctaataatatttgttttccctcttaaaaaaaactggtggaattgtactcatctcattgctggacgtgaaaaagagacatggtgtgtattttgtgcattgtcatcattcaagattcaaacctcagtttattccatcaatgctacaactc

SEQ ID NO: 40560 - DNA, 266 bp, Glycine max
  Clone ID: PAT_MRT3847_136625C.1
gtggaatgaaagctatctgttaataatcttctcacaacaaacatagctcttattgttaaaaaatataccccggaagctccagaagctactttatgcatccataataataataaaaaccatgctacaaaatttgcatctcaaccaaaagatggaagtgcttaccaagggtacagcaaatttttccgctattatgcccagatccacatataatttctggaggaatggattattcaggtccaacaaatgagtttgattgtgtaactggc

SEQ ID NO: 40561 - DNA, 152 bp, Glycine max
  Clone ID: PAT_MRT3847_136626C.1
gacactctaagcgaagcactctagtcacgacgtatcaacatatggctaccacagatatctaggctctatgcgcttcttgccctgttctgtgagcgcatcaaatgcgttcattataccagagtgctcacttgcgcctagtgccaggattccac

SEQ ID NO: 40562 - DNA, 461 bp, Glycine max
  unsure (1)..(461): unsure at all n locations
  Clone ID: PAT_MRT3847_136627C.1
aacgcatagtcacatactacactagggacagaactctgaatcgagctggtgtcgtgtcccagttgaatagaattgcatcttgaaagatggcggacgaagagaagccaaatggagaagaacaagtgaaggacaacaacaacaacaacttatacgacgccgatcagcgtctgatcttggagccttgcaagatcaaggcctgtctgatccctctcttccccgaaacttctagaacctactctcggcaactcctccaatggtccagtcaaggttactccctgcgacgcatactcttcatctccattgggatagttgcacttggagctctgttaagacttggtgcttttacgctcttttntctggctgctactggaaatgccattttcgtcttccttctcaaatctttggctgtggctggaggcttcttgggtctggactttgcttttgtgacagccatatataat

SEQ ID NO: 40563 - DNA, 365 bp, Glycine max
  unsure (1)..(365): unsure at all n locations
  Clone ID: PAT_MRT3847_136628C.1
tggaaaatcaagacattttggtttcatagaatttgaatctcctgaggtagtagttgtttcagctgactgatcaatgtattgtgacttttggctactattacctcgttctaatataatgctttgatttataggtagcaaaaattgtggctgatactatgcataattatctcctttttgaacaccttctccaagtttatgtaatacctccagagcatgttcatccaagaatgtaagttattcataaattttttccatatctatcttcttttaaggattcattacatggttttcttaatcctaggctgttagtgtctaactgnctattctcttttcatctcctttctttacttttgtacgaaaaagaa

SEQ ID NO: 40564 - DNA, 331 bp, Glycine max
  Clone ID: PAT_MRT3847_136629C.1
atccccatccttggctgttaaggccgtgaagctgggcccatcacgcctcactagggggaatgctgagcctgaggaataccgtgaccaaccaggtctccttaggaagcccatggtaccgcccacaccgagtcacttacttgggcccattctctgcccagccccaggcctacctagccaattagtacccaaccgagtacggctgaaacactgctgagctgtctgcagacctacattcgttctcacagaacctagatcttttagtgatgcactacaggtgggccatggtcggagactaaggctgccctttccctgattaggtgacccgcaacga

SEQ ID NO: 40565 - DNA, 222 bp, Glycine max
  Clone ID: PAT_MRT3847_13662C.1
tacattaagctgttgtctcgagcctggacaattgggttcatgaaaagaagatatcttgacaaaatggctcgctacaaaagccaacctaaacaatgctggcttacacacatgggatctggttattctaatggatccacatattatcacttcaaatgcacttaaatactaatcagcattcatagagaatctgatgaggcggggatacaaaattggtggaatctt

SEQ ID NO: 40566 - DNA, 702 bp, Glycine max
  Clone ID: PAT_MRT3847_136630C.1
aattctcgagccgaatcgacgacgtgttcctgccgcgtccgccaccgctccaccacgcagcatatactcacagcaataacagcattgcactgaaccctaactcatcactgcacttgcgaagacacagccacaatcacgcatcgctgaaactcgtcatcacactattagactcactagcactgatctcctcctcctcctccgccgtgaacgttggtggtcgacgacggcgttgcggttcatacgttgtattcctggagtgatgttgaatcatgtgagcaataataatagctgctcatggctgttgtttgtagcgaggcactactctagaattcaacccccaaggccggtttctgttgaaccagtaatcagtgtttctaacaatattgcccgcctggatgctcccaaagaaggtcctaaacccagacagctactatcattgccaccttttcctggtcaccccttgcccgacaagagctcaattagtggttctcgacagcgtgattatgttactgctgtcaattggattaagtattacttcaagggcacatggggttctgtcattgaatcccatttcagggagggtcttgtgcaaatggaggctgatgactcttccactcagaaagaagagcagatgaaacctatgccaaagattagaccaaatgaagtgatgaaacgtggtgccagagttcatgtgcctgtgtc

SEQ ID NO: 40567 - DNA, 438 bp, Glycine max
  Clone ID: PAT_MRT3847_136631C.1
gggaaaaaatttgctgacaaaggcatggatgaccacgaccttgtcaccttagttggggcacacaccataggccaaacagaatgcagattcttcagttaccgcttatataatttcaccaccactggcaattcagatccaaccatagaccaaaacttcttaggccaacttaaaaccctgtgtcccaatataggagatggcttgagaagggtatctttggacaaagatagtccagccaaatttgatgttagtttcttcaaaaatgtacgtgatggtaatgcggttctagagtcagaccaaaggctgtggggagactctaatacacaaagcatagtgcagagttacgctgggaatataagagggttattggggattagatttgattatgaatttcgaaaggctatggttaaattgggtggtgtagaggtaaagaccggttca

SEQ ID NO: 40568 - DNA, 941 bp, Glycine max
  Clone ID: PAT_MRT3847_136632C.1
tggatcctgtagagcggccgcttttttttttttttttttttttttttttatcaaagactccaacggtatatcatttcttataatccaaaaaccctaataataattccactcggtctaatctaaagcagcagcagtagcaacaacaacaaaaattaaaaggcttgagaaataaaataaaataaaataaaaaccacgaaaacacgaaacgagaagcataaaacaaagtcttatttctcaaagcagaagagcctccatcatcatcagtacctcctggtgaaggggaagttctgctgaacagggacaggatcaacctgggtgatgccggggatgtcgttgataccgagggagtggagcatgtcgagggtttccttgtcgacctcgatgtggtcggtgttgatggcggagacgtcggggacgaagtccatgcggcgctcgcgctcctcctcctggagcttgagggagatgccgcgcacagggcccttctggatgcgcttcatcaggtgcgtcgagaaccccgcgatcttgttccttagcctcttcgacgggattatcgccacttcctccagaagcttcttgttcgtgtggaagtccagggtcatgcgcgagtagtgacgctctatcacctgccgagaggatttcttcaccgtcttcgttctcactcgacccattctctgcttgttcttctgttaccgccgctgtggttcccttatgttcttgttctctctctctctctctctctctctctctctctctctctttttcctttttccctatcttgtgatctatttatgagtgagaaaaacaaaagtgagaaattgtgcgtgtatctggttgctaattcgagtgctattagtctgtggtttggttggtttgtaaccccgctacttgggttatgtttgattgtatattatcctagagaaataaaaattttaaattatcag

SEQ ID NO: 40569 - DNA, 200 bp, Glycine max
  unsure (1)..(200): unsure at all n locations
  Clone ID: PAT_MRT3847_136633C.1
ttttacgaaaattatcttttttttaaattcaaattttncttggtttaattaagggggaaggaccccctcaaaataaatatacaacaagatagcgttttgaattgaacaaaacacgggcctgcttgggttaaaccaattggccttttacaatacggaaccaactcttccaaccccattatgaaattgcgtacccaagaagt

SEQ ID NO: 40570 - DNA, 287 bp, Glycine max
  Clone ID: PAT_MRT3847_136634C.1
tgttcggggacgcgtgggttctttgttgtcaagccaactattgcgatcatagatgaccttgtttatgtagtcaaacacttctccttaaccactgagagccttggacgtgagcaatggtgtatatttaggatcatacatggaagtatgctcatatggattggcgcatggcagatgggtgtcagggaggaaaaagaggaactgacctgagcgcttctatgaatgttaagcaacagatcgagcatggctgtgttaattgtacagagtttccttgtgggattcggagggga

SEQ ID NO: 40571 - DNA, 429 bp, Glycine max
  Clone ID: PAT_MRT3847_136635C.1
caaagtctcattattactattagagcctccgagaagttccaatctttttcggctcttttctccaccgcactgaaaccccatattcgttcgatccggtagaagtttctgttcctctttggtgtgtgaatcttcccaaaagggtatgttctctgctttctctggtgttcattcatttggggtggtgctattcctatgatcaataacaataaccatcacggcacacttttgaggttgatttgtgtgattagtgtttctgtttttaagttctcaagttccttgtaataatagttttctgaattggggtttgtctctatagcaaaaaatggataactcaaaaaacaggcataatgacaatttgggtgtgaacaaaatgggaaaaaacattaggaagagcccattacaccagcccaattatggcaacccacacaa

SEQ ID NO: 40572 - DNA, 2554 bp, Glycine max
  Clone ID: PAT_MRT3847_136636C.1
gcgcaacgctcggggaaaggcgcgtggggtggtttaatagtatcgaacggccatgcatgccgaatcctcctacactcactcacacacacaccaccctctctctctctctctctctcaaataaaatcgtatcacacactttctttctttcttccttctctcacactgacatcaccaaagttttcctttcgttttcgttttcattctctcgccagcgagaagaagaagaatcccctgcagccgtgctctctctctctctctctctctctctactcctcctccgttgatcatcatcatcatccatggcggttcctccgtcggtcgccgccgctccggcgtcgctctacgtcggcgacctccaccccaacgtctccgacaaccacctcgtcgacgcattctccgacttcgagagcctcgcgtctgttcgcgtctgcaaagactcctccaccggcaaatccctctgttacggttacgtcaacttcgtttcccctcaagacgcaattcgtgcaatcgagctgaaaaataactccacgctgaatgggaaagcgatgagggtgatgtggtcgcgtcgcgatcctgatgcgaggaaaaatgctatagggaacttgtttgttaagaacttacctgaatcgatagataatactggactacaagatatgttcaaaaaatatggcaatattctgtccagcaaagtcgtcatgtctgaggatgggaagagcaaaggatacggctttgttcaatttgaatcagaagaatcttcaaatgttgccatcgagaagctgaacggctctactgttggtgataagcagttatatgttgggaagtttgtcaaaaaaagtgatcgcattttgcctggccctgatgctagatatacaaatttgtacatgaagaatttggacctggatgtttcagaagcaacactgcaggagaaattttcctcttttgggaaaattgttagcttggttattgcaaaggacaacattggaatgtccaagggttttggctttgtgaactatgataacccagatgatgctaaaaaggcaatggaagcaatgaatggatcaaaattaggttctaagattctcggctcgagcagagcacaaaagaaggctgagcgtgagcagatcttgcaccaccaatttgaggagaagcggaaggaacaaatcttgaaatacaagggatcgaacatttatgtgaagaacattgatgaccatgtaagtgatgaagaactgagggatcattttagtgcatgtggcattataacttctgcaaaaattatgcgagacgacaaagggataagtaaagggttcggctttgtctgcttctccactcctgaggaggccaataaagctgtgaacacatttcatggattcatgtttcatggtaaaccactatatgttgctcttgctcagaggaaagaggataggaaagcacaattgcagctccagtatgcacagcaagtggcaggactatctggaccatcaactgccattatccctggtggatatcctccttactactatgcagctactggtgttatttcacatgtgcctcctcgagctgggctgatgtatcaacatctgccaatgaggccaggatggggggctaatggctttgcactccctgctagatcattccaacaatcaccagttcctgcagtttctaacaataccaggcagcataggcaaaacaggggaaggttgaatgggaatccaatagcacagggaaatactcactctgttacttatttaccacaagcccagcagatttctcagccagtgatctcttcaagtactcagcagagaaccggacaggctaagtacttacctagtggacgccagcgtgacatggaaaaaggatctggatcctcatctagtggttcaaactctggcagagggtcccaggggtcagaaatgctgcatagcatgcttgctggtgctgctcctgagcagcagaaagagattctcggggagcatctttacatgcttgttcataaactaaagcctaccctagcagccaaaataacagggatgcttttggagatggacaatggagaattgctgcttctcctggaatcgccagagtctctttctgccaaggtggaagaagctgtccaagtgcttaagaactctaagaccaaagtttctggccaggacgtacttcattcaaatttcctttcagctgaggttgcagttaactgaaagactttaacctgatgattcttgtttgagtatagatcatgaagagcttgaagcctccaagaactcagaaatttgagacatgagttttgacatcaatgattactttagtgtttcttctacagtatatttccttatgaaaaatgactttctgttttcttggcttaggtctgacaaaaattgttggtgactataaaaatcagggacaaattttttttttcggattttgattacatggattaacttcgatgaatcttggttcaatatttttcatttcgcattcatatgttatacacatgtagggtatattcaacgcatgtaagcaattctgaatagacaacaatatgcaagcacatca

SEQ ID NO: 40573 - DNA, 297 bp, Glycine max
  Clone ID: PAT_MRT3847_136637C.1
attaattatattggttggtttttttttgttgaagggccaaaccataaattttggatacatcttgcctctgcttgttcagcaattttaaaaaaacataaaactatgtatactatgtacatagctgagagtttatttgctcacattgacccaactcaggggggaaagacctacctaaaggtttaatggtggcatattacataaaacctcatgcttccaaagtctaaacgacctattcttatcaccaagctcctttcccaaatgtccccctgtccggacccaccccaccgagagaaacaa

SEQ ID NO: 40574 - DNA, 249 bp, Glycine max
  Clone ID: PAT_MRT3847_136638C.1
gggggtaagcaagaggcattaaattattgttttgccattttttttaccgaaaaagggggtccccggggtccaacatttaatccccaatccaagtggtccttttaccaaacgggaagggaaaattcacaaacctggtaaaaaacaaattcaattagaggattacagggcttttttaactgagggaaaagaaactcacttgaaggaagcaatagggggctttcctttataaaatatccccggacccgtggg

SEQ ID NO: 40575 - DNA, 359 bp, Glycine max
  unsure (1)..(359): unsure at all n locations
  Clone ID: PAT_MRT3847_136639C.1
tgagtttacatgcttagttctgaacgtggatgtccctttcataatatctccctctttatttccaagaaccttcaactctatctccaccttaaaaggttagggtaaaataatatagttgacaacttgacacaatgggatgattattgaagaagctgaagggagcacccttctggccttctagccctttattctccttcccctgaaccctttttcttatttatttttttcacaacacccatctctcccaaatgcttatcttgatttgaaaatggccatatagagaaggtagaaaactggcatgttactcttttctatattatcttttatttctgatgagctataatgattcangttggatc

SEQ ID NO: 40576 - DNA, 492 bp, Glycine max
  Clone ID: PAT_MRT3847_13663C.1
attgaattggagcggagcgacagagcatagagagaaaaaagtttattacaggagtgcgaaagaaaaagggggcacaaatataaagttccaaacaatcgccaccccaaaccaaagcactgtttctttcgctgtgcggattttccctcaaaatggcaattgctcgctagtcgccagcaaggacacacaaaaacaaacagaagaaaagaaaaagaaaatgcaaaacgagagtgtgaatgtgaacgacaaaacacaacaacaacatcatcgcagctcttaaaagaaaaaaaatctcagagtggaagaagaaggggacgatgcattatttttcactacacgcttttgctccgattgattcagattgagaaaaaaaaaaaagagcttaatcaccggcgagaggcttttatgatgctttgtggtcattctgtttgaatttgcgagatcgaatacagccatggattcgcgactacgataggctccagtctttcgcggtca

SEQ ID NO: 40577 - DNA, 349 bp, Glycine max
  Clone ID: PAT_MRT3847_136640C.1
ttccttgataagcacctttccaacaagacatggggttttttgggggtggctcttttctttcttaaaagccaagcaaatgccatttttagaaaggaaaattttttttcttctctccaaggggggttaaacttttggaggttttaaaaatacaaacctttggactttttccccctttgaaagggcaggcccccttccatttacaaaggtttttcaaaaattgttgcggtttcccgaacccgggggaggggggaccttttaaccatggttttccccgccagattttcccgaccggctttacttactaaaaaagtgtaaaaggcggccatttttttcccctggccaaactggg

SEQ ID NO: 40578 - DNA, 420 bp, Glycine max
  Clone ID: PAT_MRT3847_136641C.1
gtttccgtcatcactgtatgacgtcctccttctttgggggggggggggggaaacgcaagctagttaagaagacactagacaagggcaagggcgtagcgaacgaatattaaatccgcataaaccggcagggctaatgcgtgacttgtgtaaggtaaggagtgatagcaaagggggacgggataacttcacactattaacccccgtggtttggcattacttgtaaacgacaaaagtactagccttaatagactaagttgcataggtgggagtgtacttaagggtaagtgggtgcgtggtgtccgagttccaacggaaatgttagttggcagcgcgttcgttacgtgtaaacccgtaaacaagggcttgttcccgacttggctgtattcgcctaggcctaaacggtgtacagcggtggcatta

SEQ ID NO: 40579 - DNA, 465 bp, Glycine max
  Clone ID: PAT_MRT3847_136642C.1
ctgacgcgcgggcacgcaatgcgcatgactccgccctgcctaagatgtctgcattctcacccttaatttgcactcatacgctctgcctctcttatagtctatatggcaagccctacgactcagtcactcatacagctacgcccacatataaaagcccgcggttgagattctagtaaccttagagggtcgagcttaggccgatcctgagtgtgtgaatgaatccgagtcggggacggccccagtacaggcctatgcagtcacaggagaagaagccaaagcctcaatgacaacaagctatgaaacgcccaagatgagactccacgaacagaaaattctgctactacgacacggatagtctgactcaggcaggatgtctctgccagtcttgcacgagatatcgcgcacaatgaggaacactgaggaatgtgccactaggtggaggatgcaggaagctgagagcatgct

SEQ ID NO: 40580 - DNA, 1036 bp, Glycine max
  Clone ID: PAT_MRT3847_136643C.1
tccggtccggattcccgggtcgacccacgcgtccgaaaagagggatgtgactatataacattatcagaaacaaaggatgtggtgaagctggagccacgtttgaggtgtgagcaataactctgttacggaagaagaaagtgagagtgaaaatgctgctgcaaactcaattcctctcttgttgggttcaacacttgtctcccgggcaaacccaaggcagattgttcttgagaatcaatatcaaatcagaaaaggcttcttcagatgattctggtccctcaaaaaccggggtggggtttggatcatcggacactgctgctgtgcctgtgagcagtaaaaagaaaaagaaggcgcaaagagaaagggcgtccataattcggcgaagcccgcttgaaaaacctgcatttgtttctgaacaacaagtgggtaaggccaaggaagagaacaaaaatgaaagcgcttttcttcttgcctggctcggtttcggcgttgtcattctcgttgagggcattgctcttgctgcatccggcttcctaccagaacaatgggaccagttttttgtcaagtttctctatccatcctttacccctacagttttcttgtttgttgccggagcagttgcatatggagtgtttaagtatttgcagaatgaaaaaatcacagagcagaaataatgtcacaggtataatataaaaaaacctgatgctctacgtacaagtggcagtgactgcaatcatactctggcttcagtttcattctattcccccttgatatcggaatgaaagatgacaagaaagctatgtgaactctggaaaacccctttaagaaccatttctattggatccctgatgacaacacaacttggcattatatggccaagtaatagagattccttgtaattaagtgtccttttagctatgaatcttactctaccttggtgatatttgaatttgaacatttctcatgtaggtttcctcgtaaaacactagtacatcgtgctttacatcaattttccccctggttattggaatttgtcctt

SEQ ID NO: 40581 - DNA, 342 bp, Glycine max
  Clone ID: PAT_MRT3847_136644C.1
agattgcaggaatatgtggttcacttcgaaaagaaagttataataaaggattaattcttcgtgctcaaaaattatgtgctgaacatgttaaaggagctaccataaacattatcgattggagtaaattgcccgtttataatcaggatgatgaagttgatcctccacaatcggtacttgattttagaaaagaactcgctgaccatgacgcgatattaatcgctacttcaggaatataattggagtattccaggtccattaaaaaatgcgttagattgggccgaaggagcaggaataacctttaatgttactactggcgaaaaagaacctagaccaattggtgat

SEQ ID NO: 40582 - DNA, 424 bp, Glycine max
  unsure (1)..(424): unsure at all n locations
  Clone ID: PAT_MRT3847_136645C.1
ccccccnccccccccccccccgccccccccccccccccccccccnnccccgccgcacgctggaggcgggggcgcgggttctcctttgatagaaacaactctatctgttctatttatttatcgcttattgaacaatgggttacaagatggctatactgatcctaggcctgctgacacatgctccttttgatctcctcatagatggcagccagaaatttaaaagagggtgaggctggtccatagacaaatgaactggctgatgccaaattagttgctggcgaggctgatcaagaaacaaatgaagtgattgataccagaggagttggtgcgggtgaggctgatcaagagacacgtgaagtgcctgataccagattatatgctggcgaggctgttctacagacaaatgaagtggctgataccaaatt

SEQ ID NO: 40583 - DNA, 2825 bp, Glycine max
  Clone ID: PAT_MRT3847_136646C.1
atacccttataacttttttgtgccctaaaaaccagaccaagggtgttgttcttcaacttgttagcacaaagctcgagccgtgattgtctctaactactacaactatttgatatatatagtgtcggcttaatttttaatgtccaacttgttatgctgtaacattaaaataaaagggagaatggaagcaaagttgagcaagaaaaccgttttggagttatccgaagaccataaagttgatgagaagggaagaatcagcacctataaagttgaattcattgtggactctgattttgggatccctggtgctgttaccgtggttaacggctttgacaatgagttcttcttggaaagcataaccatggcacaaaatgttcattttgcttgcaaatcttgggttcaaccaaacaagcttgacccagagaagagaattttcttcgttaacaaggtgtatctaccctgtgaaacaccaattggggtgaaagaactaagagaaaaggaactgaaacagctaaggggtgatggatggggacttagggtatcttctgatagaatctatgactatgatgtatacaatgatttgggtgattcagacaaaggagataggtttgcaaggccaacactgggtggtcaacacaacccttaccccacacgttgccgcactggacgaccaccatctaccgttgatacgaaaatggagtcacgaccgagtgatgaatcagagttaatatacgttcctagagatgaagaactgggggacataaagcaagaagtcattgatcaaggaaaattgatggcaatgcttaagaattatgcctgcgttagtagataaaatcatgggcaatgaaggagttttcaacattgattactttattaaagaatcagggcaatctattatgttcaacttgggaggtgccgtacaggaattttttaaattcgatcctccaaaaacattttcaagggaaaaatcacatttcttactggatgatgaatttgggcgtcaagtgcttgctgcgttccctctaggtattgaaaggctaaaggttttccctcccgcgagcaaattggatccctctaaatatggttcagtagaatcagctttgaaagaagaacacattataggccatattgaagggatgtcaattcaacaggcattggaagagaataagttgttcatgctggactatcacgatgtttaccttccattccttgatcgcattaatgctcttgaagagagaaaagcttatgcaacgaccacaattttgttcctcaccaaaatgggaactcttaagcctattgctatccagcttgctcttccaactgggaatccaaatacttcatccaagcaagttctcactcctcccaaagatgccacctctaaatggctctggcaacttggcaaagcacatgtttgctccaatgatgctggtgttcatacacttgtgcaccactggttacgtatacatgcttgcatggaaccgttgataattgcaactcatcggcaattgagtgtgatgcatcctatattcaagcttctgcatccccatatgcgatacacactcaagacaaatgcaatagcacgtcagacactcatcaatgctgaaggtaccattgagacagaccacactccagggagatactgtatgcaatttagctcagctgcctataaagattggtggcggtttgacatggaaggttttcctgcggatctcataagaagaggtttagcagttccagatgcaacccaacctcacggcattagactacttattgaagactacccttatgcagctgatggactcctcatatggtccagcataaagaagttggtcaggacctatgtcaaccattactataaaaattccaatgccgtttcttctgacaacgaactccaatcttggtacagagaattcatcaatctcggacaccctgatcataaaaatgctagttggtggcctaaacttgacatccctgaggatctcacctccatgcttaccactgttatttggcttgtatcagcacaacatgctgtcttgaactttggtcaatacccatatggtgggtacgttccaatccgtccaccactaatgcgaaaactaattcccaaggaagaggatcctgagtactcagattttgtcatggatccacagagatacttcttatcatcactgccaagtttattccaggcatcaaggttcatggctgtgatcaacattggttctgcacactcgcctgacgaggaatatataggacaaacaaaggatttgtcctcttggtcgggagagcctgagatcattgatgcattcaatcaattttcaatggagatgaaaagtattgagatggagatcaagagaagaaatgccgatccaaaacttagaaacagatgtggcgttaacgttttaccatatgaactgcttataccaagttctgaacgtggggcaacaggacgaggagtgccaaatagtgttacagcctagtccaatatgtgtacaaaccagcaactgaatcaatgttctattattcttcaccttagctggactaaaatggatttaatatttgatctcctaaaaacaaaaaagaaaataaaatgcaaaagggaataatgcaggtttgaaatcatctgtaagtatcgtgtactgagtagcattaagaatccttcttggtcaaaaagaatgttgtgtatgttttattacagtttactctagtctggtgcatgttttaacttgtacacgtttatgccctgatccagagtataatgtaaaaaaaaaaaagttcaaaatgtgtgaactaaaaactatgcctcctataaatatattcttatgtggtcg

SEQ ID NO: 40584 - DNA, 368 bp, Glycine max
  unsure (1)..(368): unsure at all n locations
  Clone ID: PAT_MRT3847_136647C.1
gagagagagaactagtctcgagtttttttattttttttttgttcttttacttgcatatagtgatatgtaattttcctgaaactacatcaagtaggccatcatatccttatagtggcaaagatgaacctacacatgttacacagaatttatagacatgtgttatggcaaaatacatcagtccttggtctctagtttaaatggttgtttctaacaagaaatagtttgggtggattcttatccgttgatgtaggtaatctttgaccatacctttcagaaataagttattaaccttatcaaatcatgtcagtaagcacctagaaatgggtaaatgtacagcccaatagttcttgataaaaannnaaaaaaaa

SEQ ID NO: 40585 - DNA, 254 bp, Glycine max
  Clone ID: PAT_MRT3847_136648C.1
ttgttcatgcatcctccaccagctaatcttattcggagtcccatgaattaatcgtcgttcatgcatcctccaccattgtgtctggatccccacgaatggattgcctagcgctgttcgtacatccttcatcatcaaatcttattcggagccccatgaatagattgacgttcatgtatccttcaccatcgtgtccgaagcaacacgaattgattccctagcgctgttcgaggaacctccatcatcatatcttattc

SEQ ID NO: 40586 - DNA, 392 bp, Glycine max
  Clone ID: PAT_MRT3847_136649C.1
gtcttctccattgcaatgagagcattaaggtgaaggatacttttgaaggcacttcaatattttagtaaggattttagctgaatgacagcaatggtcataaatatgtacatgatacttgtgatatatttatatgtatatatatatatatgagttgaggtgaaaaaaaaaaaaaaaaaaaaaaaaaataaaaacaaaaaaaaaaaaaaaaaaaaaaaaaaataaaagaatatgacattaaaactaaaaaaaagaaagaaagagtcgtcgtggacaaattaccttcgcgttaaagggcaccaaaacatgtacggcatcggcaatttcccccacttcccgaagtaccccgtcaagttccagttactggtcgagcactggaacgtggccggcaacca

SEQ ID NO: 40587 - DNA, 185 bp, Glycine max
  Clone ID: PAT_MRT3847_13664C.1
acgacgcgtacggaatatgccaatatggtttcttcgacgaaataactagacattgttcacggagtacttaaattaaagctaatggagcaagatcctaactaccaagacctcgatatatcaatcttataacaatctacaactgtacaagcagaaaactctacaaaacagcggcatagatatgctaa

SEQ ID NO: 40588 - DNA, 806 bp, Glycine max
  Clone ID: PAT_MRT3847_136650C.1
tccagtgcaacggcgccggcggcgcccccccggctaccctcgcccagttcgaagtccaccacggaagcaacgactacgcctcctacggcgtcagcctcgttgacggttttaacgtccccatgactgtgaccccgcacgaggggaaaggcgtgtgccctgtcgtgggttgccgcgacgatcttcttgccacgtgtccacacgtgctgcagcaccgtgtgcctgcggttcatggacccgttgttgcttgcaagagtgggtgcgaggcttttcacacggacgagctctgctgtaggaaccccttcaacaaccctagcacgtgcaaggggtctatctactcctccttcttcaagcatgcgtgccctgccacgttcacttttgctcatgacaccccctcgctcatgcaccagtgttcctccccgcgcgagcttaaggttatcttttgccattaattaatagaaggggccaactccaaagcttttgtgttaaggtttgggtcattgtttagtgactcgactctcttgtctttctaataagatcctgcgtcgagactaaaaaaaaaggaaagttggtgaaaaaaaaaaaaaaaaagtagtcgggggtctttgttggaaagtctttgtaattttttattttctttggttaaaaagcttgtgttttgtgattagtagcttgaaaaaaaacaaaaagggtaattttttcttgtgttttaaaaaaaaaaaaaaaaaaaaaaaaaaaaaaaaaaaaaaaaaaaaaaaaaaaaaaaaaaaaaaaaaaaaagggcggccgctcgcgatccggacgcgtgg

SEQ ID NO: 40589 - DNA, 738 bp, Glycine max
  Clone ID: PAT_MRT3847_136651C.1
ccacgcgtccgagtccaggttgctctagctgcttcatcaatcaagcttgaaatcgatagacataaaaatgctgagacgtggtttacaaagggaacatttgagaggtttgtgcggtatgttagcacgcctgaggttctggaaatggtcaatacctttgatgcagagatgtcccaattagaagcagcacgaagaatatatgctcagggggcaggagatcagcgttcagatccacaaggtgggaatggagcaggagccataacagtggcagatgcaaccacaaaggagctcctaagggcaattgatgtacgattgagtgcagtttgccaagacctaaccacagcatgtgctcgtgcaccagcctccgataacaatccccacgtggtttcacatctcaaacatttcgcagatcgattcggtggttagcatgccagaggatttggaaataaatacatcctttgatgcagagatgtcccaattagtagcagcacggaaaatatatgctcagggtgcaggagagcgttcagatccacatctgacatgttctttgcaattagagatgtacccaacacagcccagaaattggaccaacccattttgataccgtagcccatgtgaggaatttgtcttatcaatatttaccagtcttaagattaatagttgcttgtatcttgtatcaaacaattagtttcctctttagttatcttgctggctttgtctgcatgatcagtatgctgcctt

SEQ ID NO: 40590 - DNA, 313 bp, Glycine max
  Clone ID: PAT_MRT3847_136652C.1
ggccggccaaaagggaataaaatcaactggcttccaaatagttttttacaaaatttcatgatcctaatcggaatttttttaataaaaaaccctctaatttctctggtatgggggattaacctttttttttttgacagttttccgggcacttacagaaaccttgttttcaccttcatttttttgggcttgctcattggttaccgcaacttttgaaggggggacctttttttcacctccatttttttgcactgggccattgttaaaaacaacttttgaaaaattgattcgactttttaagcgcaatttttcaccc

SEQ ID NO: 40591 - DNA, 574 bp, Glycine max
  Clone ID: PAT_MRT3847_136653C.1
gacacgcgtccgtacggctgcgagaagacgtcagttgggttcgttcatcaatcagttagtttttattttaaagttttaaattcgctctatgcacccttaggggtcccttttgttgctttacacatctttatcttcattcttctaccatcaatgatctcatttccttgtgtaaagcgagtttcgaccaatcgtttgtgccgtaatctcattttatcattgtaaaataaagttttgatagatcgttcgtgccataatctcattttatcattgtaaaataaagtttcaaccgatcatctacttcacaagttgtcttttaatgagattgaaagtaaataagtgaaaccaaagttaaaatcaacatgtaatcgagcttttatccacaaaagtcgcttgaatctgtttaaggtctaacgccttaacggtctcttttacttgtattggttaaaatgaacctttcaaaagtttaaaatcaactctacgcataactttcttacttctaaagaactacataggtctgagttcctcatcgcacttgaggatacgtaggagcaaaggtcttgctcttgtcgacccc

SEQ ID NO: 40592 - DNA, 527 bp, Glycine max
  Clone ID: PAT_MRT3847_136654C.1
gggtgtctcaaatttttcatctttcacatcatgaacatcacataaccatcatgctcttaccttagcaaattttctttgtatctttatgctaagttgctgctattgctaactctgtccctctcataagatcctatctaaaaattcatggcaccctcaattgttttgtctctactaccccttcttctggtttcaacttgttgttatgcgcaaccccttgaagagggttttatctctggggtcatatctgacaagggtcttgaatatgccaaggagttgttgatagagaaaggtattgcctccattgttatgcttcagctgccagagattgagaattctgcccaagtccctttggttggaaatgctaaagtggttctttctgacatcacaatcaaggatgttgaagtcaattcttcatctgttaagactggggagagtggcattgctctagtgatttcaggtgccattgctaatatgagtatgaggtggaggtacactgtcagctcttggttaatcccatttggaattca

SEQ ID NO: 40593 - DNA, 459 bp, Glycine max
  Clone ID: PAT_MRT3847_136655C.1
ctcgaatcagatagcttcttgctggaaaaaccatgaagtctgcatctgatgatggaccgttgtaactacgcctagtgctgaatgagtatctacgatgcacatccagtaaggattacgccgttcatgataggtatactcagctctgaaatgagcggaagcggagattgagatcaagtgctgctccagatcaccttgctattggcgttgctgctgtctgacacgtaggcgctgatgcatctggagcgattgatcgtaagccactagacattgctcgtggaggcttacttgactcgcattggttcatggaatctattcacgtatatgatcattctggagacgggagcgcccaccacatttataatcttgggccactaggtggtgaccacctatctgacatgattgttgacccttactatctggatggagagggtaacacattcaccagcctcaaaggtgtgc

SEQ ID NO: 40594 - DNA, 853 bp, Glycine max
  Clone ID: PAT_MRT3847_136656C.1
ccacgcgtccgcccacgcgtccgacggctgcgagaagacgacagaagggggtccgaagcgatcggcaggcagtgatagcaaagagaagatcatttcataatcagactcacctaactccgccatggctgctgttccctctactttcgctctaaccaaatctgcattgtccataaacaagctggaccactctctggtcaagatcaaaccatacagcttctctctgaatctaaaccgtctagggaggatggaaacatctttaaccagaaggcctctaacaattcaagctacatatagtgatggtggaaggcccagcagtgctagtgtatttgttggtgggtttctcttgggaggattaatagttggtactcttggttgcgtgtatgcacctcagatcagcaaggccctagctggagctgacaggaaggagttaatgagaaaattgccaaagtttatatatgatgaagaaaaggctttagagaaaacccggaaagtactggctgagaagattgaacaactgaatgctgccatagatgatgtttctgctcagctaaggtcagaggaggcctcaaatggagtagctgtgaactctgatgaaattgaagctgccacatgagactgctgcagtgatgtcatggtacacaatcggctattactctgtccagtaaaaatcttgttggtacaaaatgtatttgaatttcttgtaatatctttctatttcttcttaataataaactaagttgttttctgtttttggccaccgctactgtgggtatatagtcgtactgtttttatggctgatttcttgtgttctattggccatttagttatagtgaaaagtttccatgattggcat

SEQ ID NO: 40595 - DNA, 743 bp, Glycine max
  Clone ID: PAT_MRT3847_136657C.1
tagaagaaatagaagatattcaagaattcaaatacattttgaccaacaagatttttactggacagagtaatagccgattgtgtaccatgacatcactgcagcagtctcatgtggcagcttcaatttcatcagagttcacagctactccatttgaggcctcctctgaccttagctgagcagaaacatcatctatggcagcattcagttgttcaatcttctcagccagtactttccgggttttctctaaagccttttcttcatcatatataaactttggcaattttctcattaactccttcctgtcagctccagctagggccttgctgatctgaggtgcatacacgcaaccaagagtaccaactattaatcctcccaagagaaacccaccaacaaatacactagcactgctgggccttccaccatcactatacgtagcttgaattgttagaggccttctggttaaagatgtttgcatggtcccttgacgatttagattgagagagaagttgtatggtttgatcttgaccagagagtggtccaccttgtttatggaggatgcagatttggttatagcgaaagtggtgggaagagaagccatggcggagttaggtgcgagtgagtatgaacaatgaaatgaataatttgttagataatatcacagcgagcaagtgatgatgtaagtaagagaaagctaaacactttcttctctggcgatgggttcagacttcagacaaatgcggatc

SEQ ID NO: 40596 - DNA, 307 bp, Glycine max
  Clone ID: PAT_MRT3847_136658C.1
tgttcccacgccaactgtttaagcactacacagggattccctatgatgcggggatggaatcttcgtataaaagagtgaagtttggcttcgcttactggttaacgaaaattgtcaagcgctgtaacagggatgagacggtgctgaacattattaatgccaatgaggctgtatataaggttcatcattacgcaaagtgcaaacgattatgcactctctgtctataccgctatatggtgctactagtgggggaatggtggatgtatgcacagattaaatgtttggcttggacagttcattgctaaccacc

SEQ ID NO: 40597 - DNA, 245 bp, Glycine max
  Clone ID: PAT_MRT3847_136659C.1
gcacgcgccttccaatggaacaagagcgcagaacgcaagaaagcctcgaaaagggaaaacaacacagggcagagcccccacatgactaagcaacaagactcaggagcacacgccacagaaagcaaggagcaactcagaggctcgacctgagagcccaaacacagcacaagggaggaggcagccgaaaagacctagcccctgtgacgctgccaaggaggagacaccattgggcaccaacggaacca

SEQ ID NO: 40598 - DNA, 142 bp, Glycine max
  Clone ID: PAT_MRT3847_13665C.1
cccacgcgtccgtcagaaaacatcataccactcatacaaaatcatactatccaccaacacaggatacgtttaaaattaacggaggccaaccaaattcacatatacaaccacatcgaaaacaccaaccccattatacacatta

SEQ ID NO: 40599 - DNA, 250 bp, Glycine max
  Clone ID: PAT_MRT3847_136660C.1
gccaatcattttctcacgttggcaattaattagtgcttattattaattgcacaatggcctcagaaaatggagagaaagtggagataggtttgaatgcagttcctcaagagacacataagccaaagaaggattgggttcttttgtccctcagaatggttgcattttttgccactgcttctgccacacttgtgatgacttttaacaaacaaaccaaaagcttcgtagttgccaccgtcggtagcactccaat

SEQ ID NO: 40600 - DNA, 540 bp, Glycine max
  Clone ID: PAT_MRT3847_136661C.1
ctatccaggaaaaaaggtttaaaggaaaagtatttaaaaattaatcttattttttacttaaaatttaaaaattaaataatatcaattacctttcttaattaactaaaaataaattatttttttgtttatataagggaaaaaaaactataagggtatcactaaatataagggggggttaaataacccattggggttaatagtttctatctttaagcctttaataatttaaaagggatttttaaaatttttaaaaattaatatttaaattttttttaaaaaaaattaaaagagagttaaaatctaaaaaaaaaattccttctaacctataaattataaaaattaaaaggcccgggaaactaaagagaggacccgaataatttaccctaaaggtggaaacttgaaaccctttaactctgcctgcaagtcatacatagccaaagactaaggtttgttgaccaagcaaatataaaaagaaaggatgtgtcgcatgtacactgaaacgcgtgacccctcgctggaacttttttcaactttctcttt

SEQ ID NO: 40601 - DNA, 250 bp, Glycine max
  Clone ID: PAT_MRT3847_136662C.1
gaaaaaaaaaaaaaaaaaaaaaaaaaaaaaaaaaaaaaaaaaaaaaaaaaaaaaaaaaaaaaaaaaaaaaaaaaaaaaaaaaaaaaaaaaaaaaaaggggcggcccgccaaactagtgaacctcgtcaaacccgggaaataaattccggaaccggtccctggaaggccttaccagattttccctttatagtgggagtcgatttaaaagctttggcggaaatcatgggcaataacttgttcccctggggaa

SEQ ID NO: 40602 - DNA, 862 bp, Glycine max
  Clone ID: PAT_MRT3847_136663C.1
aaatactccgaagtgggaaggacacgcttgtttacgcaacgcaggtgattgttagtttgttacccgttggattcgatggactacgatttcagaagcaggtcgggcccacaacctccgatttaccgtccgccaccgccaccgtcaccgatgtaccgtccatcaccgtatcagcagaatcctactccttcttcaggatttggcgttagggttggtataaagccagaatataggatcacaccgccgcctcatttatcatcccttgcgggagataatccacggagcaacttccaatttgattttggattggagagaaaaattttagccgaagcagagaaggataacccaaattggagcaaatttggatcagaaaatgttccgactaaagtttctgattcatcaacagcaaaggttactgctttggatcccattgtgagcaaatttatggccatggggcttagccaagaggctgttcccattgccgttgaaaattatggtgataatccaaccaaagttcaggaattcgtcaatggctacacccttttgcgtgaaatgggattttcatcaaatagcgttgctgacgccttggttatgaatgacaatcatgcggtcaaggcgctagcacatttccttaatggctcatcgtgagactcctgaagcaatatgttgggtgtatcgtttattgatcaaggaatgtgttagttccttttgtataatgataaaaaacggtctcatataggttggagcatgggcaatctgttgttgtctttttgttttacacaaatatacgttgaagagtcgtggaattggtttgaatggattggtagttccttagagataacaaatagaatctgtttcccccttt

SEQ ID NO: 40603 - DNA, 681 bp, Glycine max
  Clone ID: PAT_MRT3847_136664C.1
cttatatgaggcgtgatagcgaggaggaagaaatgaacaccaagtcaccaatattctttcaatatcgcccaaaatgaacaccaagcctccgcccgtgaccgccgagaagaagatgaagaagaagttggccacgtcggtggagaagccagttctttcgttcgtttagcattgaaagcaaccagagggtttgttcgttgcctttcttttatttctcttcgtgctctcatctttcatcttctatttgttcattctagagtcacaagatgttgaagggtatgtctcaagggtcgatttcgtgaagaacaggtcactctctctaatctcattcgggatgtgaattgtgcggcaaaacgctcttgatctctcttgagggccttgtcgaggatgggttgttggaaaaacacgagcttcctcaaccaatgctgcagataggctgatttcaagtgaagggaaactcaaaacacagcttgagaatttttgaaaggatcctgacatatcatgtgagacactcatttagttgcaattctaattaaatatgtatgaatgcccactggcttcagcgctgtttgtctttaaaatgataatttgtttatacaattgttttatattatttacatgtaagtgtacagtaagcttgtatgcataatttctttttgcaaaaaaaaaaaaaaaaagccccta

SEQ ID NO: 40604 - DNA, 991 bp, Glycine max
  Clone ID: PAT_MRT3847_136665C.1
gaatccgaagtgggaaggcacacgcttgtttacgcaacgcaagcgattgttagttgtattcgatggactacgatttcagaagcaggtcgggcccacaacctccgatgtaccgtccgccaccgccaccgtcaccgatgtaccgtccatcaccgtatcaacagaatcctactccttcttcaggacttggcgttagggttggtataaagccggaatataggatcacaccgccgcctcatttatcatcacttgctggagataatccacggagcaacttccaatttgattttggattggagagaaaaattttagctgaagcagagaaggataacccaaattggagcaaatttggatcagaaaatattccaactaaagtttctgattcatcaacagcaaaggttactgctttggatcccattgtgagcaaatttatggccatggggcttagccgagaggctgttctcattgccgttgaaaattatggtgataatccaaccaaagttcatgaatttgtcaatggctacacccttttgcgtgaaatgggattttcatcaaatagcgttgctgaagccctggctatgaatgacaatcatacggacaaggcactagcacaattgctcaatggctcgtcgtgagactcctgaagcaatatgttgggtgtatcgtttattgattaaggaatgtgttagttccttttgtataaatgataaataatggtcaaatataggttggaacatgggcaatatgttgttgtcttttgttttacatacatatatgttgaagagtcgtggaattggtttgaatggattggtagttctttagagataacaaatagaatgtatgattccccctatgttatgtttgcttttggccaagaccttaacttcctagctattccgttggctactatagagcaatggaaatgcgttttattgctaaaccaaagtggaagaagaatagcttgggaagggctatggtggttttttattttttt

SEQ ID NO: 40605 - DNA, 797 bp, Glycine max
  Clone ID: PAT_MRT3847_136666C.1
ccatttaaccactctctaaaacccccttctccgatttaagctctttccggtcccaattttgcagattcgaccgatctcgcaacagtgtttaaggttctagaaaaggtttcggaccaaagcatagaggttttaggtttttatagcgccagttcttttcacttgtggcattagggtttttgtgacgtttggttgaagactttctgtctccatggatctttcagaccttaattccgctgaaatggagaagttctactcttaggtaagcaagttcacactccaaattccatttcgaaacttcaccagcttcaacgctcgacactttttttctctctctctctctctctctctctctctcaatcattcgctgttatgtgagattgaaaaaaagacagtgagttttgagcgcaatgcaactctaaatgacatcttccagcagcgtttcaccaaaacccccactctcgtcaatggcttttccaacctctacgccatggaggtggatcctactgttgagcatgaggacatgggtggcactgatgggatggactccttgttctccgagctcgccggcgcgattcccaggattgatgaggccatgagctttgctgagatgttgaaggctattgcaatggaaggaacagaaaacagagtctcattactgactatccactcaaaatattggggcttgatatttgcaaagataccattgtgggtgatgaaatgcagagaggtgtatctggtggccaaaagaagcgtgtaaccacagtctggacactgcattttgatacctgtggaactgc

SEQ ID NO: 40606 - DNA, 546 bp, Glycine max
  Clone ID: PAT_MRT3847_136667C.1
ccgggaaataggtttttatagcgctagttcttttcgcttggggcattagggtttttgtgaggtttggttgagcccttctctctctcactctctccatggatctttcagaccttaattccgctgatttgcagaaattctactctgaagaacaacaaagagccatggttaatgaaatggtggcaaagctaacgagtgaatgctgggacaaatgcatcacgggtacacctgggaataaattcagttccagtgaatctaattgtctttcaaactgtgcacaacgttacttggagatgagcatgcttatcatgaaaaggtttcagggtatgcaatgaagatcaaggctatcaatgtgcttgtcagttgacaaatgtaatattgcgttcctcttttgcatgatcatcaatattggaatcatcttatttggtaactttttttttctttggattaaaatatatttgttgagactgttggttcaaaatatttagtttgctttttggtgttcctgaaatttagagagaaataaagctgttcgtatggttatggctg

SEQ ID NO: 40607 - DNA, 887 bp, Glycine max
  Clone ID: PAT_MRT3847_136668C.1
cgccgcggaagagccccgcctcgtgtcggtgttcctcctctccggcgtcctcctcaccgggtcccccaggccgcggcacggaacctccatctcaggacccatcaccctctcctccacatcaacttgctgagcctgctccgcgggccgcacccgcttcccgcgctcacgcctccaactacctaattgaaatcacttcccattatggcggtgacgacgccgagagtgacaggcatgtaactctagtagtccaccctcattcccttctccccatgcccgtgccaccgcagagtttcaaatccaacgaaaacgatgccgtttcgtcgaacgactcgaacttctccgtcggaagcttcctccgccagcgcagcagccacctctccgccgcgatcgtgaagcgcgtctcctctctccgccaatccatggaagaaaaaaccaacgacgacgaggaagagaatctcgaagtcacggagttcagcctttccggcgtcaaggtcacggtgacgccgaagccggaagaggaaaaggaaacctcgtttaaaggacgcatcagcttcttctcgaaatctaattgcagagactgcaccgcggtgagaagattcttcaaagagaaaggaataagatacgtcgagataaacgtcgacgttttcggcgagagagaacgcgagcttcgtgagcgaaccgggagcggttcggtgccgcaaattttcttcaacgagaagctgatcggaggtttggtggcgctgaactcgctgcggaacagcggagagttcgaccggagagtggcggagatcgtcgccgggaaggtcgccggcggcgattcgccggcgccgccggtgtttgggtttgattacgtggaggaagagcgcgctgacgagatggttggggtg

SEQ ID NO: 40608 - DNA, 153 bp, Glycine max
  Clone ID: PAT_MRT3847_136669C.1
gcattacccacctgagacctcaagaaaacacttccaagcagctccaccagcgcgagcgccagaaaaagctcaaccgtctcaaatccctcataggggaaaaaacggccatccgtttataaggaagccggttttatatgcagcgaggataatcac

SEQ ID NO: 40609 - DNA, 556 bp, Glycine max
  Clone ID: PAT_MRT3847_13666C.1
aacttggtcaatatctattctcgtataaattattgcatgtgtacataaggttttccaaaactgatgcattagaaacccaacacatttctgtcatttctacttcgttgatgagcacacgcgtggtcgaggataacttttgacaaaaaatggagtataaattggttacaactttgcatcttgaagtgttgcaagacattaattagcagataattcttttgaacatatatattttgttgctataatattttttaatgaactattgcttaattacactataaaatatagcatcctatacgaaaatattgtattgtcacactagaaaaaattcaacacgttaacaatcattgtaaaatatacaatacaattgcacatgtgaataataactatgaataggaactctcaattaataacggttaaatattcatgaacatctagtgtgttattacatacctagtgagagaataaaaaaaatataagtattacaatattatgatgtgacatgacaaaatagagaaaaattatgatatttgttagtgttgaaaagtaggaatttttg

SEQ ID NO: 40610 - DNA, 1405 bp, Glycine max
  unsure (1)..(1405): unsure at all n locations
  Clone ID: PAT_MRT3847_136670C.1
ggctcgagcccttctccgatttaagctctttccggtcccaattttgcagattcgaccgatctcgcaacaggtttttctgtattcccttacttgatctcgcaatttgcttttcattttcatttgccggattgattcctcaattgcgcgctcatttgttagttctttttttttttcctctcaattttctggaatattgtgatgatttatgaatctgcctttaaaattatgacgcagcgtaatgggcccttcttgattggtttcttttttctgccatttcggcagtgtttaaggttctagaaaaggtttcggaccaaagcatagaggttttaggtttttatagtgccagttcttttcacttgtggcattagggtttttaggtttggttgagcccttctctctctcactctctccatggatctttcagaccttaattccgctgatttgcagaaattctactctgaagaacaacaaagagccatggttaatgaaatggtggcaaagctaacgagtgaatgctgggacaaatgcatcacgggtacacctgggaataaattcagttccagtgaatctaattgtctttcaaactgtgcacaacgttacttggagatgagcatgcttatcatgaaaaggtttcagggtatgcaatgaagatcaaggctatcaatgtgcttgtcagttgacaaatgtaatattgagttcctcttttgcatgatcatcaatattggaatcatcttatttggtaactttttttttctttggattaaaatatatttgttgagactgctggttcaaaataattacttaactttgcggagttcctgagttctacagagaaaaacagcaaagagccatggttaatgaaatggtggcaaagctaacgagtgaatgctgggataaatgcatcacgggtacacctgggaataaattcagttccagtgaatctaattgtctttcaaactgtgctcaccgttacttggaaatgagcatgcttatcatgaaaaggtttcagagtatgcaatgaagatcgagggatatcaacgcgctttgtcagttaacaaatgtaatattgaatttctcttttgcatgatcattcatattggaatcttattatttggcagcttttttttctttggattaatatatatttgttgagactgttgggtcaaaatatttagtttgctttttggcgttcctgaaatttagagacaaataatgctgtgcctatggttatggcggataacgtatgcaagttcacactccaaattccatttcgaaacttcaccagcttcaacgctcgacactntntttctctctctctctctctctctctctctcaaacattcgctggtatgtgagattgaaaaaaagacagtgagttttgagcgcaatgcaactcttaatgaca

SEQ ID NO: 40611 - DNA, 246 bp, Glycine max
  Clone ID: PAT_MRT3847_136671C.1
tttaaaactctaataaaaaaattaatcatatctatatttttctataggtgtcgattaacacaaggtgtcatttaatcatttttcatttgtttttatctatatactacagaaacaaaggtaacaatttatctcccatgaattaaccttgtttgtctaacaaaaaggctaggtgaaaccaagtctctatgtgatatgatgctgctatgaagagcagattagcaaattgcaacgccaataacaatatta

SEQ ID NO: 40612 - DNA, 419 bp, Glycine max
  unsure (1)..(419): unsure at all n locations
  Clone ID: PAT_MRT3847_136672C.1
gagtttgtaacaggctctaactcctatgaaatatggacatcacatcctcggtggctatggaaacaaataacattggccaccaccaaaccatacatccactattcataatccactaacagcaaaagcttcctattcaactcatttcctcactcctaagaatgtttttacttggtcaacatgggcaatttataggcacctaatacaatgctgctgctggtagcataggtgaccactgcatgcacatcttcctactcaaacttggaaagaaagatcagggattaagcaatgaatatttgactctaaaaacaattttacctttttcaacacctagctttccaccattgactaaccaatggccaggagggggtttttatcatttggtatgtganacaaggaaacattcttaaccaacttgttgc

SEQ ID NO: 40613 - DNA, 266 bp, Glycine max
  Clone ID: PAT_MRT3847_136673C.1
gaaactcatctgctgaagcagcgtgtatgggctggccgtatccccgtcgtgttctgtctcgacccgaatgaggtcactacacttcatgccccacgtccattctacgcgatgataccccgtatgagctatttagtgtcccagactcgcgatgtggtcgagtattttcgagacgcagctccacctatgtccactatgcaaggtgcatccatctggtttgaagcaaatggggtcccgttgcattggcatcggccttttggataattcgt

SEQ ID NO: 40614 - DNA, 272 bp, Glycine max
  Clone ID: PAT_MRT3847_136674C.1
caaaagggcctaaccaagggttttttaaaaacaacatggggtatttccccaaaattggccgatgggaaacaaaaacttgatgcttttttggtacgggaaaaagttttggaccctttttttcaagcaaaggtcccggcccctcttgaaaacatttatttatgggaaggtaggggcattctgtttgagcgggggtatatgggaaaaaacccccctgggggggaggattttggaaggggttttaaaaacaaagaggtccaaacttttttttaaaa

SEQ ID NO: 40615 - DNA, 454 bp, Glycine max
  Clone ID: PAT_MRT3847_136675C.1
atatctcattgttgttatttactatcatactgccctttccctttctcttcagcctttctttatacttttccatgtctgtgtaactttagctgtaaacaataaattttattctatctttttggtatattccttatctgtccataattttgaaagttcccatttcccattcccattgtctagattgatcttaatgctctttgtcaattttaatgggatcaacttgcaataagccaatggatatttagtaaaggagaatgggtccttattagaggatttattaaaatttaaaagttttattttagtaataagtcatgcatttgattccatccctataacaatcttctgcatgcttctcattctaaataaaacttattcaaccatgtttaagatgagccattggggtattatatttctgggtaaaataagtttgtttgtttgtgtgtgtgtattgtag

SEQ ID NO: 40616 - DNA, 341 bp, Glycine max
  Clone ID: PAT_MRT3847_136676C.1
aaaatatccacagaaacatgaaggtcaacttactaggatgagacaacaaatggtcagtaacatggtattatatcagtatgcattaagtaaagggcttcaatcatatattcaagcagatcgttttgctccatccagatgggcagctcctggggtgctgcctgtctttgatgaggataccaaggatggggagtcatctttgtttgaccaggagcgatccatttccaagatcgagaggatggattgtcacacggatggatatgaggatgagatggaagatggtgagcttgagagtgattcaagttcttacagagttctatccagtaagacacttgcagatgttg

SEQ ID NO: 40617 - DNA, 203 bp, Glycine max
  Clone ID: PAT_MRT3847_136677C.1
cccctcggggaatttctatagctcattatcaagaaataaagaagcggaaaagtgcatatatcaatagggattatgtgacttcttattatgcctatcctgaaaccacaagaaatgagatcggaattccttcggggtaccgagcttcaaattccctataatgaggtctattaaaatcctaaacattttataaatgatttcttggg

SEQ ID NO: 40618 - DNA, 328 bp, Glycine max
  Clone ID: PAT_MRT3847_136678C.1
gcgacatcgcgcagcgcttcaaccacctgtacgaacgcgactatttctcgctgccggaagtggtcatcgaagaagacgtggcgacgctgccggggctggacggccgcaagatgtccaagagctacaacaacaccattccgctgttcgaaggcggcaagagcgcattgcgcgcctcggtgatgcgcatcgtgaccgattcgcgcgaacccggcgaacccaaggatgccgaatcctcccacctgtacacgctgtaccgcgcgttcgccacgtccgagcaatcggcggcgttccgccagcagctcgaagcgggcatgggctggggcgacgc

SEQ ID NO: 40619 - DNA, 344 bp, Glycine max
  unsure (1)..(344): unsure at all n locations
  Clone ID: PAT_MRT3847_136679C.1
attccccggtcgacccacgcgnncggccaattcgtccgcccacgcgtnctgaaagatcttatccaattgaaatttagaaatgactgggataaacttaagaattcaattattgaaattgaataagtaaacaatttaattggattggtcgaatggtatcaaaaaaatggagtactaactcccatttctcattcatcattgaattaaccgatcaacttgctttgttatcgaacattcctatttgatttcaaaaattttccggaaaaaattcgaatctattattatatgccaatcaatcctactacttctggtcctgaaggttctgcgcttggaaaaaaaaatctggg

SEQ ID NO: 40620 - DNA, 574 bp, Glycine max
  Clone ID: PAT_MRT3847_13667C.1
aatacacgatattcagaatgggatataataaaacagagcatgaaatacagaatatatgtcacctcaaaaatttggtttacaattggtaaggaaacaattcttgtacttattccaggtccaatcggatttgatgatgatgctggaagcaattcattcacacaaaattatgtgcgaaagagatatagcaaaatctcaagattattcttcattcttgctgtttaattgtataagcccctaagctctaacaggtttctgaaggacagcagataacacaaccttaggtttgcctgagccaacactattaaccttctttcccacaacccatttcaactttttatacccaaacctttcaatcaaccgtgtcaaagtttgctttttctctttattggcacaaaaaaagttgtccagccagaacaaaccaccagccctcaaaactttgtcaatattaaaccataaaaactccaacttctcactttttccttcaacatccaagccaatgggaagcgggaaccaaagcaaacacattgtcatagaaagggaacctatggtccaagctcaagtaaagaggaaaaag

SEQ ID NO: 40621 - DNA, 485 bp, Glycine max
  Clone ID: PAT_MRT3847_136680C.1
tttttactttgtctttgtactttttgcttttttgaaaaacgggagccacgagagggaaaataggattacatgttagggcttatctcaattattatgcctttatatggaagaggggatgatccaggaaatattaaaatgacgtttctaagtgacttttggtaagataaaaaagtatccggacacccaagccaaagtcttaaaggcgatgtaaaaaatatgaaccctctggcatgtggtatcaatggaaatagacaccccacctccagaattggaatcaaggtgccccctcaaaaatacttaaagagggggaataaccccagccggaaatgtttctatccacataccagtccataaaaaaaaaatgtcctaatgcacaatatcaagggctcaacggtggtgcagaataactagataagggccaaggaggggcttttttttaacaaacgacacctctgagaaacatctcaagatccactgtggtgaaa

SEQ ID NO: 40622 - DNA, 202 bp, Glycine max
  Clone ID: PAT_MRT3847_136681C.1
agaaagaaacctatttcattggtttatctaccttggtagaacctaaaatattttatcctaccaaaaataaaacccccctactattccaaaattttattactggtcctgcccaaattctaatttggaaggggggacccctttgggcccgccatttggggccccaaccttgggggaattcattaggttacccccccctactttt

SEQ ID NO: 40623 - DNA, 575 bp, Glycine max
  Clone ID: PAT_MRT3847_136682C.1
ttgctttttctttataatttgtgttcaaattttggcttggtttgcttttactaaaaaaaaaaaaaaaaaaaaaaaaaaaaaaaaaaaaaaaaaaaaaaaaaaaaaaaaaaaaaaaaaaaaaaaaaaaaaaaaaaaaaaaaaaaaaaaaaaaaaaaaaaaaaaaaaaaaaaaaagggggcgccccttttaaaggacccaacttaactttttttttttggcaaggaaaaattttttttatggggcccccaaaattaatttccgggcccgcggtttaacaacgggggaaggggaaaaccccgggggtaccccaattaaatcccttggaaaaaaacccccttttccccagggggggaaaaagcaaaaaggcccgccccgatcccctttccaaaaagttgcccaccctaaagggcaaagggacccccccctgaaccggcccttaaaccccggggggggggggggttccccccagggggcccgttacatttgccggccccttaggccccgcccttttggtttttttcctttcttttcccgccccgtccgcgggtttcccccgaaaagtttaaaatgggggg

SEQ ID NO: 40624 - DNA, 395 bp, Glycine max
  Clone ID: PAT_MRT3847_136683C.1
ttttctttggcgttatcttttcatggcttagttaagaaattagattactcaaagcatctacctggtctaatggggagagattaatggcatcaattacctgcttaattttgttgcattttttcatcatgaatctaggttgtagttgcacaaatgtctagtgactgaaatggtacttgtcatgaatccaggttgtagttgtatatttttattgtcttgttgccgcgttgcattttatgtcccacgtagggattggatatgcaatggctttgctatgaatttattaatcaaatttgtcatactatacaattaacaaattgaattggtcttttgcagctctgccccatatgtctgaccaattcaaaagacatggccttcagatgtggacatcagacatg

SEQ ID NO: 40625 - DNA, 325 bp, Glycine max
  Clone ID: PAT_MRT3847_136684C.1
ttctgggggccccccttttccccccccggccttgccgggttttgttccttctttggggccccctcatcctttttgcgggccccggttttcccccccttgtgctggggaccccccgggtgtccccccttttttccccttgggggtctctcccctttgcccctggtgtgttttcccggtaggggcccccccctgcccccttcccctctatgtcccccccttctggggatgtgggccccccctttgtcggggtcttttccccgcggggtttgtggggttccctctcgcgttcccctccgtctctcgcgctccctgctccctcctgcgt

SEQ ID NO: 40626 - DNA, 691 bp, Glycine max
  unsure (1)..(691): unsure at all n locations
  Clone ID: PAT_MRT3847_136685C.1
ctcgcgacgaaaccaaacacactcctaagcattgtcctaattatttccgtcgccttcgctctctctctctccaacaacatcaaatattacaaaagattttttaaaaaaaaaagaaaaagaagaaaaaaaatggcgattattcattattcagcagcttcacgttgttgcatgccatcgctgcatcgcgcttcgccttctcgctcggttctcgcgccctcaatcttcttcttccgcgacgctgctccgaccctcaggctcgacgtctcggttcggtcccagcctccaggttcggacggcttcggcgaacccatcaataacaaacacgcttctcgtgatgcctccgttgggttatccgcttcttcttcttcgtcggtcatcgattttctcactctctgccaccgcctcaagatcacaaaaaggaaaggatgggttaatcatgggataaaaggtgctgaatcgattgctgaccatatgtaccgcatggctntaatggcattgattgctggcgatgttccaggattgaatcgagaaagatgtattaaaatagcactcgtgcatgatattgcagaagctattgtaggagatataacaccatctgatggtgtgcccaaggctgaaaagagcagaatggagctggaagctttgaacaaaatgtgtgaacttcttggggggggatgagagctggggagat

SEQ ID NO: 40627 - DNA, 1009 bp, Glycine max
  unsure (1)..(1009): unsure at all n locations
  Clone ID: PAT_MRT3847_136686C.1
ctctaaaccctgcacttgtgtatcccactgcgtgttgttcttgttcaatggcacgcctatttcgttccctcagaaaaaccctaaccctaaccctaaccctaacacaccaatttcagcatcaaccatgcatttctcgaagaagttacatatccgacatgcgcaaatcagctttcgagggaaacatcttgagactcctccgcaacgagattcaatacgagcttcagtcctctcctcccaacaaccctgttaccaagtttaattcctttattgtggatggtcgagctggggagcgatggattacgttgaaaagacaatacgctgatgaagacattaaacttgaagtcaccatgtttgatggagctgttcctgctccaactccaactccaaatggtggtgtagttaattctgatgaaatgcagatgcacattactgtaattgtcaacatctccaagggagaaggtcgtgtgttggaaatcatgtgctctgcctggcctgacagtatagagataaaaaggctgttcatacgtgcaaatgagaagataatagctgagccctatgctggtcctgaattcacggaattggatgatgagttgcaagacaaactttatgatttcttggaagtaaggggtataaatgatgaactcgctggtttcttgcatcagtacatgaaaaacaaggataaagtggagctcataggatggatggaaagggttaaatcttttattgaaaggaaataagggcatttaaatttcgttgttctggattagataagccattaaatccctcgtattttttttgtcactgaagtgtgaatctaagcaggtacacatctttgtatttgtggtttttgctctggattccctctttctgagaaaaaagagagcaaatatatgatagtgaattgcagcattgttattggaaggtttttctctcttctgtatattctgcttgtttattcacttttatgatttggatttcagccttccaatttatnnncangnnnnnataa

SEQ ID NO: 40628 - DNA, 351 bp, Glycine max
  unsure (1)..(351): unsure at all n locations
  Clone ID: PAT_MRT3847_136687C.1
tgcacgcgtacgcaagttttgttatgctatagagcggacgtcctttttttttntcnntnaaactaattgagaaantcatttaatattgntaagncaaagttnaacaaggggaaatcggnnnatnnaaacatatcnatatgaactnaaacctatatggacaaaactnnattattaatgaggatgcggacgaaaaatataagttaaaggatacatnagnnnntacnagccancacnnacnnagaaacataggnnaaggatagagagaaaggaggcaagtnccaatcaagggatgnnnaggtcatgccccccagagaagaaaaacaaataaagaccaaaaatanagaaaaaata

SEQ ID NO: 40629 - DNA, 443 bp, Glycine max
  Clone ID: PAT_MRT3847_136688C.1
taacaacacttcttaatgattgtattatcaagtctctaaccttaactaacaatataacaaacaaacaaagtaattgaattacaactaacacacccccttaattcatattagctagagataacattcctattttgtctctctactcatgaaacttaaccaacttaaaagacttaattaaaatatcagtaacttgctttactgatttgcaatattctaattcaagattctccttggtcacttgatcatgcaggaagtgaaattttgtcccaatgtgcttgttgctaccatgtggaatatgttaagtcaaaagatatttatgtctaaaagacaaataaggaatcctaattattttgattagatgcaaataattacaaataataaatattgcgtctaatacgatatcagatcatgatttgtccttgtgtgtctaaagttttcagacg

SEQ ID NO: 40630 - DNA, 455 bp, Glycine max
  Clone ID: PAT_MRT3847_136689C.1
cccctctaagcacattgtaatctgtcaacaagtgtgacgtagctagtccctgcagtcaactggatcacaactcactccatcaccaacccaacaacaacaacaacattcaatgcccgtgaaaggcgtagacactgccaccgccaagctgaaaatgtgcaccctacaagaatcaaaagacaaggaccttctgcagatggcccgagaaatggaactggtcatgaagccgctgagtgcctacaacaactgggcagctttcgacaagcaagaatcatcttctgaggatgaaaagtacgttgttgtcagccaaaaggcggacggcaagcgcggactagttgccaatggaactactgctgatgataagctagttaacaatgtggcacctgctagtgcaatggcagccaccagcagcttggtcagtagatcagcaaccaaaaatccaatttctgaattgaaag

SEQ ID NO: 40631 - DNA, 379 bp, Glycine max
  Clone ID: PAT_MRT3847_13668C.1
gtgattgtgattacctctgatgatgaatcaaacgagtagcaagctgtgaagggaaacatggcaagggaaacatctgccattaacactgccatggccttcagttctgttctctctgcaacaatcattgctgattgcggacttccacgggattttgtgatgaacattgatgcaactgacatggagtatgaactggcagcagccgagtatatcgatgatatcgacatattgtacaatgagactgagaaatatggttgtgtgcatgactacatgagttcgcagccagatatgcatgccaagatgacgtgaatccttgtggactggttgacatatatgcataggaagtttgagctcaagccagaaacgctttattcgaacatga

SEQ ID NO: 40632 - DNA, 432 bp, Glycine max
  unsure (1)..(432): unsure at all n locations
  Clone ID: PAT_MRT3847_136690C.1
attcttggttattcattanccttctttcagttttcttcccctcnctctggcaccaggctctaacataaaacagaggccgggccatttaaaaatatacgagcttgttggccttggggggtaatcaccggtcaaaaggattaaaagccaagcgagcctttttgaaaatttatatttttttataagccaattttcccattttttttaaagcccaagggcccctttcaaaaattttttgggcggcctccgggggaacaaaaacccctccattttttggtttttccaggctttttggaaaggccaactcaagctttgggaaaaccaaaaaatttgccctggggggggccttaaatccccattttccacttttaaatttttcctggaaaaaacaacatttccaaaaaagtttcctcccccggggggtttttttaccat

SEQ ID NO: 40633 - DNA, 670 bp, Glycine max
  Clone ID: PAT_MRT3847_136691C.1
gccggaatacccgcctcgacccacgcgtccggcagccacctttggtatctccgggtttcattcttttcctcatgtacagagcagtagcttcacgtctcacccttcccaagggaaatgggagaaccttgggagcctccagaggtttattcaactggcttactggggaatcttcaaatcctcttcctccccttgacaccccacttagaggggtttccctgccaccttcattgccagattatgttgaaccaagcaagaccaagatcacaactctccccaatggtctaaaaattgcatcagaaacctcaccaaaccctgctgcctcaattgggttatatgttgactgtggttccctctatgagacgccattgtcaagcggggcgtcacacctgttagagaaaatgtctttcaagagcacggcaaaccgaagtcactttcgtgttgtaagggaagtggaagcagttggtggcaatgtaggagcctcggcctctcgggagcaaatgggctacacttttgatgctctaaaaacttatgttccacaaatgattgagttgctggttgactgcgtaaggaacccggccttctttagattgggaggtcaatgaagagcttccggaaggtgaaatcagaaactggagaactatcaaacaatccccaaggcttacttttggag

SEQ ID NO: 40634 - DNA, 1803 bp, Glycine max
  Clone ID: PAT_MRT3847_136692C.1
tacggctgcgaaagacgacagaaggggacacactgactcactgttctaattcatttctgaaatagaattccgttattctctctctctctctcttgtttcatcgatgggtggcacagttgttgctgaagtacccacaaagaggggaaggggcagaagggccctgaaggagaaaaccccatcaacgaacgatgctaacatcatcatagccacaccaatttcgccatcatccgaaaaggcggcacaagttgttccctcaaagaaaaaacaagattcaaagaagcagcaatctttcgaaaaagaattgctggagatgcaggaaatgctgcagcagatgcgcctcgagaaggagaagaccgaagagctcttgaaggtcaaggacgaggctctcaagctgaaggaagaagagcttgaaaaccgtggccgggagcaagagaagcttcagaccgagctcaaaaaattgcagaagttgaaggagtttaaacctaccatgaatttgcctgtgttgaaagataatgaagaaaagaaggataagaagaagaaggggtgctctgagaagaaaaggccttctccaccttacattttgtggatgaaagaccaatggaatgagatcaagaaagcgaactcagaggcagaatttaaggaaatttctaccatgctgggttctaaatggaagactgttactgcagaagagaagaagccttatgaggagatataccatgccgagaaagaagcttatttgcaaatgattgcaaaggaaaaacgtgagactgaggcaatgaggttgttggaagacgagcagaagcagaagactgccatggagttgcttgaacagtacatgcaattcaaacaagaggcagaaaaagatggcaagaagaacaagaaagagaaggatccattgaaaccaaagcaccccatgtcagcttatttcttgttcactaatgataggcgagcagctcttgctgccgagaacaagaatttcttggaggttccaaaaatcacatccgaagagtggaaaaacatgacagaagaacaaaaaagaccctatgaagagatggcaaagaaaaataaggagcaatatgccctagaaatggaggcttataaacagaagaaagatgaggaggctgcccatttcatgaaggaagaggaggagcagatgaaacttcaaaaacaagaagcattgcaactgcttaagaagaaggagaaaactgaaaatataatcaagaaaacaaaacagaaccgccagaagaagaaacagaacaaggatgacaagaattctgatccaaacaggcctaagaagcctgcatcctcattcatcttattcagcaaagaagcaaggaaaactttacaggaggagcgaccaggaatcagcacctcaacccttaatgcacttgtttcattgaagtggaaggaactgagcgaggaagatagacaattctggaatggccaagcatcaaaagcaatggatgcatacaagaaggaattggaggaatacaacaaatcccttgctgcaactgcatgccaggagcagaaaaccgaataataattaattgaaaaggaagaaaaaaaccccttgtgcgcatgttcaaaattatattgaatatgctatcttcaaaatttagtcctcattaatggctttcatgtagttgtaattttttacgcaaattctcttcatgcagtttttattaatcttgaatttggccattttttttaaaaaaaaaaaaaaaaaaaaaactaaaaaaaaaaaaaaaaaaaaaaaaaaaaaaaaaaaaaaaaaaaaaaaaaaaaaaaaaaaaaaaaaaaaaa

SEQ ID NO: 40635 - DNA, 735 bp, Glycine max
  Clone ID: PAT_MRT3847_136693C.1
tttacgcgtccgacggctgcgagaagacgagggaaggggacatcacgacatgacatcgcagagaagaacagagagagatccatccatcaattccaatggccgatcagctcaccgacgaacagatctccgagttcaaggaagccttcagcctcttcgacaaggacggggatgggtgtattaccaccaaggaacttgggaccgtgatgcggtcacttggccagaacccaactgaggcagagctgcaggacatgataaatgaggttgatgctgatgggaatggtaccattgatttcccagaattcctgaatctcatggctcgcaagatgaaagacactgattcagaggaggagctgaaggaggctttccgcgtgtttgacaaggatcagaatggcttcatctctgcagcggagctccgccatgtgatgaccaatctcggtgagaagctgaccgacgaggaagtcgatgagatgattcgcgaggctgacgttgatggtgatggtcagatcaactatgaggagtttgtcaaagtcatgatggccaagtgaggaccaatcaaccataacaaaaaaaaattgaaaaacacctgaacagaaaaaagacagggcagataagttttgatgagaattatattttcattaggacaatcttcatttggggtcattagtttttgttggtcggctttgtttgcttttatttattggtattgctcattagtattttctacttgtttgctct

SEQ ID NO: 40636 - DNA, 1088 bp, Glycine max
  Clone ID: PAT_MRT3847_136694C.1
ggggggggggacgcgtccgtacggctgcgagaagacgacagaagggggtaagagcatataaataacatagtcctcctcctttgtttttccacatcacatcacatcgcagagagagagagatccatcgatcaattaatttccaatggccgatcagctcaccgacgaacagatctctgagttcaaggaagcctttagcctcttcgacaaggacggcgatggttgtattaccaccaaggaacttgggactgtgatgcggtcgcttgggcagaacccaactgaggctgagctgcaggacatgataaatgaggttgatgctgatgggaatggtaccattgatttcccagaattcctcaatctcatggcgcgcaagatgaaagacactgattcagaggaagagctgaaggaggctttccgtgtgtttgacaaggatcagaatggtttcatctctgccgcagagctccgccacgtaatgaccaatctcggtgagaagctgaccgatgaggaagtcgatgagatgattcgtgaggctgacgttgatggtgatgggcagatcaactacgaggagtttgtcaaagtcatgatggccaagtgaggaccaatcaaccataacaaaaacatttgaaagcacatgaacagaaaagggacagggcagataagttttgatgaaaattctattttcattaggacaatcttcatttggggtcattagtttttgttggtcggatttgtgtttgcttttatttattggtattgctcattagtattttctacttgtttgctctgtcccttgttttagtagcttggattagctgtgtctcaccatgcatttgtacttcacttttcatgttttttgggttactactatgaaactggaacaattggttgcaattagtgcttttacatatgggtgacttatactgttaaaaccgtctttatgctattatatgattgtttctgtgatcattttgcataaaaaaaagaaaacttacggaccggtacctgtttctcgagttcactccaataatgatggaaggctagtgaagaaagaaatgttttttcttctttctccataagctgaagttaatgac

SEQ ID NO: 40637 - DNA, 1373 bp, Glycine max
  unsure (1)..(1373): unsure at all n locations
  Clone ID: PAT_MRT3847_136695C.1
ttaatatctcatcaatataaaccatggtatttcttattatagatgccatatctgatataaggcatatgttgaacatgacaattgtaatgtcgttgcatctcaaatacacaaataaatgtcaccaaaaaaatttcaagtacaaaactaaacattgaaacaatgacaataagttgctttttgaaactgtccaatctccagaaacaccgaaagaacagctagccttcagaagtataatcagacatactgttgtagtttactaccacaaagccaaaattcattgacaatttcgtttccactaaagaaatgagggtaccaatagcattgttcaggttacttcttatactgctttacctctttaataactccatcggcaagcgaatcaacatcattgttcttgccaaaaaactttacaaatttcatttcaggactcatcaagtatataactatggagtgatcaacaagataatctgagtcttcctctgctgtcttcatgtaataaacacgatatgcacgagcaacattcttgatctcatctgggctaccagttaatccaattaactttggatgaaattctttgacatattcacccacttgttcaacagtatccctctcaggatcaacagagataaaaaccggtacagtttcaattccagctttctcctttattttatcaacagcagctgctaacttctgtagttcctctggacagatatccgggcagtgagtaaagccaaaatataacaaagtccactttcccaagaaatccttttcagttacatgttttccgtgatggttgacaaggtgaaatggacccccaattgcagctgttcctacagaaggtccctgcttaacagcctcagtattagaacgtatcccatagtaatctattcaatatgtcgtttcttttccctgtcatagtagaacaccaatccagctccagtgagcaccagcaagagaaagctcaaccaagaaacaggccctccacgaacggatttcccagcatcacttttctgaccctcatctcctccactcccagactctttcccttggccagaaccatcttttgcagagtgatctgaatctgatgctggtttttctccactaacattagcagcaggaggagaagaagaagaagatagaaacctttgacacaacctcaacgacccatttccataactttgattccgaaccttgtaagggtgatggagtggttgaagatgagaagagaagggtggtgaaagcgtggagggtctgccttggcgaagaaggtgtgagaagagaaggcgcgtggaatagcgaaattggttggctttggtggataccgtggaggccattagaggnnttctgtagtaaagtatgacttaaaccttcnc

SEQ ID NO: 40638 - DNA, 349 bp, Glycine max
  unsure (1)..(349): unsure at all n locations
  Clone ID: PAT_MRT3847_136696C.1
cgggaaagngttattaagattatcactggttacaaatccaaaggatcttacatgggtggtggtttttgaaagttgaagggtgcccactataccaacttctgatgatattggtgcttaacaggaatcaaaagtaaatagaactgtcccagattatgatccaaaaaatccaactgagattgctgacaactttcttgataatgttatataccctacccatcagatctatgcacattattgtctgnaacattactactctcttttcaactgataccttggagaccaaagctgtcaaggaacaaaaaccatctttaaaaaaccaactcatcattttctacaattctcatcactt

SEQ ID NO: 40639 - DNA, 347 bp, Glycine max
  Clone ID: PAT_MRT3847_136697C.1
atcataataaaatcatggcccagagggatggcgcataaatcgggatcaagtacagttataaacattgaatccaaactaaattaaaaatatgaaaccctcataagtatttagatgtaccatgaaacaaatgccgactataatggtaggcataaagatgtcctaatccataaaacattaacataaagccaattcggctcaagcagataacctacttaacaaactacataatcttgccccctgcttctcataatgaccaatacacaaaaatactcccgaatagatttaagacttgttggctattttgttggagagccattccaaaccctcataaagaccctccccagagg

SEQ ID NO: 40640 - DNA, 564 bp, Glycine max
  Clone ID: PAT_MRT3847_136698C.1
ggctcgaggtaatcattcctctctctgaaacttgaaatttccatttgcttcttccctggacagtttctttttctcctctctcggtcaaacctcattcttccactaaaacagcgaaaattccacatgtgagagtggaatcaagttgccctcatcgttagcttcacactgacggtttccatttatcgaatcgactctactttagcattcatgtaactttttgtgtgaaccatcctcctttcatctttccatgacgttcttttctctaattaaggaacagaaaaagagatcttatcgaccggataattgacatcccagaagagattgaacctgagttggggtttgaatgttgtatctacaaggtacctactagtcttttgaatgtgcaagaggaggcctatactcctctattgatctcaattggccctatccaccataacaaataaggactaaatgaaatgcaagagcagaaacgtaaatattttcgtttcttttggaatcgcctagagaacaagctcgaattagagaattacataggcttcctagaacaacaccgagcaaacatac

SEQ ID NO: 40641 - DNA, 379 bp, Glycine max
  Clone ID: PAT_MRT3847_136699C.1
aaagggacaacatacgaatagttccatgatttttactaagggattggggaattttttccctcaaatcaatagaaaaaaatggtttttttggggggggggcccgactttttttccaagataaattttgaaccgggcgggtttttccttttttttatttatgaaatttgggatttcactaaggcaatttttaaaaaatatttaaccaaacctttttttctttttttaacaaaagaagcatgccctttttttatagaaaaaaattttttgtgttggtcccaatttaagactaaacaaggcctaactaattgaatacttgtttcaaaaattccccgaatggtttttccatttccagaaagaatttaattaataactttaagtt

SEQ ID NO: 40642 - DNA, 457 bp, Glycine max
  Clone ID: PAT_MRT3847_13669C.1
atttctgtgatacacacgctttgattctacccgaaagggagccttatatgcgtacagttctaacccaccgaactgaaagtttacaccattgggtgtcagaccaaacactataaccaattgtgccactgatgacgttctatggtacgagttgaaggaccattggtacactctcaacattaggtgagctctagcctgatgtttcacggtctatacgcggcgcgacgcgcatattgatggatgaacataatcaacactatgagtcttctgctctacactgatatggcagagcccaccttgtaagagcaaaccgcatttgtggctatcaacgcttgcttatcacattccagtggttgtgctagcactcgactgacagcatatactatagatttcgaaggactcatggatcgataggccatggttcactggttcgtcctcgtactaggcatcagaatcaaac

SEQ ID NO: 40643 - DNA, 1183 bp, Glycine max
  Clone ID: PAT_MRT3847_1366C.1
ccccgaccgtacaaatatgtcatttttccttcattagagaaacagctatggaaggaggaaaatggaaagaagctgaaggaactggaaaatggaaagaagctgaaaatattgtgcctccatggattcgcaactaatgggagttttcttaaaaagcaaaattcaatatgggatccttctacatgctcgcaatttgatatggttttcccaaatgggacataaccctgcacgagggtactctgacactataggcttgttccctttcccttactttgagacagtgcaatttaaataggaataatgagtctactacaacttcgatgattttatatcctacttatccgtatatgtcaccccttggggtccctttgatggctaccttggcttctcacagggtgcaactcctttcagcacttttggataggttaccgggcacagggaaagttactaaaggagcatccaccaataaaatttctcatatcaatatcaggatgcaaattcagaaatcccagcatatgcgatgttgcctacaaagacaccatcaaagctaaatctgttcatttcattggggaaaaagattggctgaaacttccttctgaggatctcacatctgcatttgacaaacccctgataataaggcatccccaaggtcacaccgtaccacgattagatgaagtggctaccagtcaattgagaaaatggattaccgaagaagtcctatgtcaaccaaaagttggcatctcagtttgtgagcatgaaacagaccatgaagaaaagaagtcagagaaggggaccaagctagaaccctgtggtaccaatcaagacaaaggtgtaaacggtgttgaaataaacaagggttctgaaacagtagaggtggctcaagcctgaagataaggacttctaagaggaagcacctgaatttttaatattaaattatgtatcatgtatgattggtgattcatatggacatgttttatgatttctcgatctttaataaattattatgtattgtggatgagtggtgattcatattgatacttgctgtctaaaatgagaggggagtccttaatgtactgcacagatatattcagcattaaaataaaattcggcgtattccccttgaatcaatcgtgaatgtttcaaaccattatattttataaaatagaacatgaatcacaagttgggt

SEQ ID NO: 40644 - DNA, 479 bp, Glycine max
  unsure (1)..(479): unsure at all n locations
  Clone ID: PAT_MRT3847_136700C.1
ccacgcgtccgnactaccgccgtttctcttttattgccgtttttttttatgtcgtcatgttctgagtttcgtgttgtcctgttttgtgttgttgtgttgtgttcagttctttccttcgttacatgcaaaaacgactatgaagacgccaaaacgccaatcgtcgccggcaaacgctgctcgaccagtggagtctgattccggcgagatcgtcacgaggttcaagaacggtggccggagaaggatcaaaatcaagcgaatgaagtacacttgccagacgaagatccgcgtcaggaatgacgccggcgctggcggcgtgtctcaaccgccggcggtggattctgaaagagagaagagagagattgacgagcacgtggagatatcgctggcgctggcttcctcgtcgtcggaagaggaagagcgattgtcgtcgaagcaaaacgacggcgtttttgtcgtacggttcggcgtcggtgataggg

SEQ ID NO: 40645 - DNA, 322 bp, Glycine max
  unsure (1)..(322): unsure at all n locations
  Clone ID: PAT_MRT3847_136701C.1
tacanttattcatagtacgcgcgtgaagaagaccataattccaaagtttgatcataaataacctccaacgccaaaataaagcaagagataagatcagctcttttccataaaactggngaaatgcctcacaagcccancaaacataaccatgtgggcagacgcttttcttcctcataagagagtggcananatgcatgaactatttttcatctttagaaacatgcgccagatggtggagcgtggctggatcttcaacatcgtccgggtcgtggtcaacttcctgctgactgtgcgcggtgggtgacagttattctantgccat

SEQ ID NO: 40646 - DNA, 288 bp, Glycine max
  Clone ID: PAT_MRT3847_136702C.1
attcactattcactaaggaaactcactggaaggagctacaaaatatacaagctgtgtgtgttcagtaccacagaaaaccaatactttttttgcctacaagacctaacgtaaaactttaaggggtgagccgccaaggtaaaaaaagtggcagaattgtcattggaaaagtaaatacctacgtcaattgcaagggggaaaaacactttggttaaaaagaataaccccatgtgacttaggttgggtgtaccattaaagggggaaaagtcaaaaaggaaaaaaaaacaaggg

SEQ ID NO: 40647 - DNA, 320 bp, Glycine max
  Clone ID: PAT_MRT3847_136703C.1
acgtacgatgcactcgtacttcggctcgaggagaaatgggaggtcaacgaaccggaacgaccttgtctactatgctatgggagcgattgacgacgacatttattcaaacacacattggggtgagcattctattacctgtacgagacaccatccttgtcgggaaaacatgcatggtgatgaggtgatcaaagaaccctcatgcggaggagtgccttaccatacaggaggaccggatgatgggaccaagccaccagttctgttggttagggcaaattcgcgaaatgcataacctgaacgctgcgatgcacgactgcatgagg

SEQ ID NO: 40648 - DNA, 110 bp, Glycine max
  Clone ID: PAT_MRT3847_136704C.1
gccactcgtccggagctacgaagtagagattgtagagacagagaacgacatgtgtctagctgtgcatctacgcttttgtcatgttaatacttcaacaccctctatatata

SEQ ID NO: 40649 - DNA, 316 bp, Glycine max
  Clone ID: PAT_MRT3847_136705C.1
gctgcgagaagacgacagaagggatatatttactagtattgctctaataaaaaagataatatactaattaatatataatattagtaaagtaaaaggggatagaaaatatttgatatattaaaaaattaaataaccctaacaatacatctatgtgtataaccaccttcaaagtgtgtcgagaatttcaacttaattggtatttaggcattgtgtcaaatatcaaatttttatacaaccccttataaacttgagggtgcacttgacaagccagatcacattttatttaaaggaatcctcttttacaaaaatattttta

SEQ ID NO: 40650 - DNA, 487 bp, Glycine max
  Clone ID: PAT_MRT3847_136706C.1
tgacaatcttttaccttttgtatcagggttaattaataataaaaaagagtttaatgtctcgaaatttacaaccatataagaattttacattgttaccattcaaaaggtaaaataaattaatttttagattttatataaaaccatgttttaaatatctagttattaaatataataatttaattagatattgtttactattaacttatttgataacctaaattccaaaattaaacaatagaaacctttaaaagttaagtattaaagtaaaataaatttgaatactaaaaatatctaaataagattgataatctttaattaaaaaatatataaaaatgaagaaaccttaaatttatattttaaattaaattatcttgatatttaattaaatctaaataaaagcaaataaaataaaatgattaaattaatatacaatctagatttaaattaacaattaggcaattaattaagtttccatctgtttatcaaa

SEQ ID NO: 40651 - DNA, 285 bp, Glycine max
  Clone ID: PAT_MRT3847_136707C.1
attttaaccaaattaaacatcaattatataatatcaacttgaaattaatttaaccatatgtttcataaaaaaatatcagtaaccattttgctttgaattaatttctgattttaagggtaaaataacactatttttcccctaattttttttagtatgagcatgtataatattgataaattagttcggccttaattataagtgcatgcatatgataagctccgaacaaaagaaatcacgtttagccaaaaaattaggtgatatgtagctgtctgatcataatagata

SEQ ID NO: 40652 - DNA, 433 bp, Glycine max
  Clone ID: PAT_MRT3847_136708C.1
acatttttgaatgaaattacactctttattctgcggatttttcggcggtggtggtagatttttattttctttgaagccgaaaaccaaaaattttttttttgttcattggggaaaagcgcgtttccccgaaactatttctccattcttacagattttgtttttctcttctgagcaaggggaatctttcacccggccccgggggcttcgtgatttcccattggctaaaggagccttggggaaataaaaaaacccttattttggttttggtggggggggggataaagggctgccataacgggaaaaaaaggaggggggaacccggaaaaccttttgggggtttccaccccggggggaaatgatcgggttctaaaagtttggcctcccccccccaagaaggtggcaagttaaaaaaaaccatcctcttttttggcca

SEQ ID NO: 40653 - DNA, 323 bp, Glycine max
  Clone ID: PAT_MRT3847_136709C.1
ataagaatccaatcctaggtttttaataaatagctgaagaagtcggtgacatatgtggaaacagagttcttgagtatgaacatttacaaagctttccaatctaatatctatcatttaccacaatctcaatctcaagaagaaaaatgatatggacaaccatattcaagcctacaaaaatttcaaattgccggtcatactagtgcctagtatttaccacatgctgctgaaatgtatatacatttgtcggtaattcaaagaaacaatcctgtgtgtatacaaaccgtatgtccaattgtacatcatgtaatgcagtgagttgatcg

SEQ ID NO: 40654 - DNA, 350 bp, Glycine max
  Clone ID: PAT_MRT3847_13670C.1
ggtgttttttttcttttgcttttttttctttcttgctatccttttggctcgcgccctgatgggcgagaacctaaaaggagggaaaagattatttttaatgagctttcttcctaaaaaggaccttttaaaactaatggcctctataaaaaacgggggtttttttacttcgaattgcctttgggatttttttattggataaaacgattttttgtttactcccaccccaggggttatactgaaaattttggggaaataaacaaaaaaaacattggacttgtcaagggacctctattttcggatcacttgaaaaggacttttgacacccaaaaggaaaaaatctgggggttttt

SEQ ID NO: 40655 - DNA, 463 bp, Glycine max
  Clone ID: PAT_MRT3847_136710C.1
ttcttcttcttctttcatggatgctttgaacttcctcaagttctggagaaacgccaccacgaccacaacctccgaaccccacctcgtggtagaaaccgacaccgaatccgacgaagaagactcattcttcgacttggagctcacgctacacgatttccacaacaaagaaaacaccaccacaaccaaaatcgacgacgacccaaaacaaacgacaacaacaacaacaaccgaactcaaaagtatttgctccaaagatgacgaactcagcaaaatagacaatgacgttccgcgaaaaacaccgcttcccatgtcttctcctcccgaacctatctccaaacgtaaggtcctcccaatcgaacctatctccaaacctcagtcccccattgcacttctcaggtccgctcctagcttcagaattttcatgttcagaaaacgaaatagagctcctccgcagaaaacggag

SEQ ID NO: 40656 - DNA, 175 bp, Glycine max
  unsure (1)..(175): unsure at all n locations
  Clone ID: PAT_MRT3847_136711C.1
tcangcacgcgtacgtnagctcggaatncggctcgagngntacttgcancgnncaaatncagcngnncntgacacgatatgtgagcncangagacaacttgagganttgaatgaanctgcngagagagtnaagcaagagcatacagantgaagcatntcatgntttcaagcnatn

SEQ ID NO: 40657 - DNA, 115 bp, Glycine max
  Clone ID: PAT_MRT3847_136712C.1
tgcaggcgcgtgtgattacggatgcgacaagccgactgacagtgggagtagcaggaaacttcagcacctgacaaagcttatatatgacccatatattgcccatgattatgactag

SEQ ID NO: 40658 - DNA, 819 bp, Glycine max
  unsure (1)..(819): unsure at all n locations
  Clone ID: PAT_MRT3847_136713C.1
cttgcatgcctgcagttttggcagagtttcaaaagtagaataatgggtagcatagtgtagtgtagtgttgttcgttttgattgaggttgcgtagtgttccaatagttgtgatcactgtacttggtctcattttgattgaggtagcatagtgtttttcattggggcagggcatgaggagattgaataatgggtacgtagtgttatcacaaaacccctaaatacttccctagatcagaagtgagcacaaaacctgataaatgactaagatgtcttgctacatgatggttcaagttatgcattgtatcttcttgagccaaaacaatgttgtgagtgcattatttgtctcccagtgacaaaactacacttgcagtgatcaaccaagtttcctatgtgcactagcaaattaaaaaggctatgtgggttggttgactgattaattataagcagcgacttgtattctgaacttaattatatatatgttttggtaacatactgtcttgtttcatactagtaagtttttttcttaatttgtcgcatttgaaacataaatacttttatgataagagaataaaagttcactgcttaattgacctcatgtaaatttgatttaacaaatccatatgatcagtccctccaactcatttgtccattagtactcattcgatcatttgagactaaatatgttgattgctgaagagtgaatgtactacttacttctgaataattgattnttcaaacttcctttctgcataactcacaaagtagaagcttgtttttacaatcggtgcagtaaccaataagtttgaccatatttttcgt

SEQ ID NO: 40659 - DNA, 1096 bp, Glycine max
  unsure (1)..(1096): unsure at all n locations
  Clone ID: PAT_MRT3847_136714C.1
gctcggaatcggctcgagaaaatataatcccagctctatgagaccttcaccattgcaaggtctaggagtagatttgttcatatttgtctgagccactttcttcaatacggacgtcaagtacatttaaaaaatcagctctattcgttgtggtattcgaaaaaggaggtttaagatcttcaaataaattgtgattagaacaaaaaatgcgaggcttaagatttagcattagaaccaaaaaaatgtgataggttttaaatctggtattgtggaacatataaaaagttatttaacatagaatgagtttaacattgttcttagtggtaatgttgaaatttatactccttgaatggtttcgtataatcagcatttgttttaataaccttttgttttggtacatatttctgcttcggaggaggacttgaaaagtgtaattgaatgtttaatcctttacaatggtgtacaagcagagtggtaaaagcaagcaaaccttgattgtcttcaaaagccccgaagttactgcgttatcggactacatactagtgttgaatgaaaaccaactttggagttaagtcttcaatttgagacctaacatacagtttgtggtagttaaaagaaatatgtttttataaagtgttagtttaactagtgctatgttaatttgagtgtaatttgttcaaatttttatctttctaattactcttcttttttattattccttaattcattgtcatgtgagcatcgtcaattgagttctttttgcatattttacttgaatgtataattttacttgaatgtgagcatcgtcaattgagtaatgttgctcggtggaggattgttcagtctattaaaaacaacttggttgaaatttctctactgcattccaaactacaaaagcccaaaatctctccatcgatatgacagaagaagccaaactaacaaagcccattatgttgtacggtcggaagacaattatttaaagcaaaaaatttagaaaaagaaattatgcaaagccatgtaattattattttattttgttttgtataattgaaatttaaaatgcagtgaagactaattttatttaatgtattnnnnntat

SEQ ID NO: 40660 - DNA, 315 bp, Glycine max
  Clone ID: PAT_MRT3847_136715C.1
tgatacgaagttgcctccgtgaatagcaattcaaagaccttagaggtgagtgagtatttgcctacgtacttaatctattgtgtgaacaaagtcgatattattaaattagataattgatcaccatgtcgaagaagctgctataagcttccctatacatttcggtgtggcatttcatggcaacattataccttgggcaaaccaactaccgctacgtttttgacacacatggtgaccctcttgagactgacaatgaatattacattaggcctgacataacatacatcggagggcagttgacattgatcaacataaaca

SEQ ID NO: 40661 - DNA, 437 bp, Glycine max
  Clone ID: PAT_MRT3847_136716C.1
catggcttctgtttgtggaggttgcttagcattgcaagatgctggggttcctattaagggttctattgctggaattgcaatgggtatggtactggacaccaaggaatttggtggagatggaactccgcttattctgtctgacataactggatctgaagatgcatctggagatatggatttcaaggttgctggaaatgaagatggcataactgcatttcaaatggacattaaggtgggtggaattactttgcccatcatgagaaaggcacttctacaagcaagagatggcaggaagcatatacttggagcaatgatgaattcctcacctcctccagcaaaaagactttcgaagtatgctcctctgattcatgttatgaaggtacgaccagatagaataaatcttataattggttctggtggaaaaaagtgaagagcat

SEQ ID NO: 40662 - DNA, 253 bp, Glycine max
  Clone ID: PAT_MRT3847_136717C.1
ttttctcttgttgttttttttcttttttcttggggggatttttttaaactgtgaggggtctaccaacaacttgttcttgtttttttaaggcggcccccgcatacttggaggctacccaaaaccgggttctaaaaaaagcgaccaaaaccccttcatggttcaccaaacccctaaatctcttgtgccaacaaaaaaagaagccggaagaacgcaccccccaacatgggtgcgaatatagagacaagacctggac

SEQ ID NO: 40663 - DNA, 409 bp, Glycine max
  Clone ID: PAT_MRT3847_136718C.1
ctcacgcgtacgatcaattacaccacgcttataaattctgagaatgaattcctaagatcgaagcaattgcctttttttgtgccgacactggtttcgatcccacacccacaaacgcaaacccttgatcctttgaatgctcttgcgtttttctttcactacctaattcctaactcacacacacacaacgggtgatatcaatgtcgactactgctatgaagaagctcatgagagatttcaagaagctgccacaagacccgactgcaggaattaacggtgcacctcaagataacaacataatgctgttgaacgctgccatatatgctccttatgatactccatcggatggaagcacgtttaagttgactgtccaatatactgacgattatccaaacgagccaccaactgttcg

SEQ ID NO: 40664 - DNA, 192 bp, Glycine max
  Clone ID: PAT_MRT3847_136719C.1
tctcaagcaaccatggcaatggcaacccaagcctctctcttaaccccacccgctctccgggctcaaagacggcgagcgcgcctgcgtgccatggaagcgaagcgtgcagcctctccttctgcagcccgaagcccctcaagttctccagaacaatcagagcagcagccgtcgacgagaccacggaggcaccag

SEQ ID NO: 40665 - DNA, 415 bp, Glycine max
  Clone ID: PAT_MRT3847_13671C.1
ttttcttgttgggagatgactactgaagggaaacttaccttgggctgtgtgttaaaattataaaggattgtacgggggaaaatgtgaccctttgagatgaataaaattctacatgcctaaaattagcattccttattactgaggctgaccagaaaatgatgagcgtatttatcacaagaaggaggcttgaatttaattgtagaaatttatataatccctttgaaaataaactgggggccagagattgtttagagtgcatcaactaaattatcgtacttcaaaaggtgaatgattactattaccgttactccctctaggtattatagccgttggcccaaattgtgctactacgaccaataaaatcaatggattatagagactagtacctctattaattaatattcggaccttacct

SEQ ID NO: 40666 - DNA, 318 bp, Glycine max
  unsure (1)..(318): unsure at all n locations
  Clone ID: PAT_MRT3847_136720C.1
gtcgcangcacgcgtacgtnagctcggaattcngctcgagcggaacctggcatcncacnggncntgtcacnnangtagtggntggctcncctcncgctgnacncnnnntcgngcnagctggnacntcnannnnccatnttacccgtgcggcttgaaanccggatnatnatcggnntcngactcngngtnctnngnnattgcnnannacctngncnagttnnatcgncnacngtcnacnaangatgttcatnaacngtancctantnnggggtatccanttgtactggaacggttggnaanctttgtcccnnanccaac

SEQ ID NO: 40667 - DNA, 517 bp, Glycine max
  Clone ID: PAT_MRT3847_136721C.1
ttggttgtatagttacagtaaactaaattagtgtatttttacatatgcaaagaggttgtttccaaattcaaatctatgaccaaccagtcagtcatcaaagcgcagctttactgctgcgccaaggctcacccttgcttatgcaaagaagttgtatagttgcactttaaggtaataattattatctccttgaagtatgtcatctttttatgtgccatggtgtgaatttgtagagtttcaagtcaaaagataagatgtatgcacattgggaattaaatttttttatgactaaggtttaggtagtttaaattaactctcagagacactttgtcttccccatgagtgacttagcgaaaatttacaattaattatactgtacaacataagaatgaaaaaggcaaacaattcaactgtgctgaattaataagaatgaagaagagaagaaatcactagttatgacaatttgattgtctcagcaatacagctagctagggatatgctatttcatatatttaccagt

SEQ ID NO: 40668 - DNA, 298 bp, Glycine max
  Clone ID: PAT_MRT3847_136722C.1
ccccgggaagcgcgggcgggacacaggcagaccgtcgaaacctcccccgaatgcaacgccaggccttgccgctccacgcaaaccgataggggttgctgcagcctcccaggctgcagaaaggcggcaaaagagctaaagaacgccctatcggaaaactccctgcacatatagaaagcgtgaacccaaatgcactataagaggaaacgatagactgaaaggagagcatgtgcatggaagaataaaacttgggaactaaacagaggatagagcataaagaacaggagagagagagaacgaa

SEQ ID NO: 40669 - DNA, 774 bp, Glycine max
  Clone ID: PAT_MRT3847_136723C.1
ggctcgagtgatggctggtttcatacaggtgatattggagaatggcaatcaaatggagccatgaaaattattgataggaagaagaatatctttaaattgtcccaaggagaatatattgctgtggagaatattgaaaacaagtatttgcaatgcccacttatagcatcgatttgggtgtatggaaacagctttgagtcattcttggtggctgttgtggtccctgaaagaaaagccattgaggattgggcaaaagagcacaatttgactgatgattttaaatctttatgtgataatcttaaagcaagaaaacacattttggatgagctcaacagcactggtcagaaacaccaacttagaggatttgagctgctaaaagccattcatctggaaccaaatcccttcgacatagaaagagatttaataactccaacattcaaattgaagagaccacaattgctcaagtactacaaggatcatattgatcaactatacaaggaagcaaagggagcaatggtgtaaaccatgcagcaagtggccatgctgtgtgcaacaattttaagatttctgctagttatgaagaaaaatccatttggcattctgtgtatttgggttcattattgtattgactgaagtgcaaaaccataaacatagatagaataggctgtatgctgaaacagcagctccatatgtcattcttgtaaaaaatcacataataaaattgtgtggcccatgcaaaatctgtattttcttttggcagatatgctttattctttc

SEQ ID NO: 40670 - DNA, 241 bp, Glycine max
  Clone ID: PAT_MRT3847_136724C.1
acaaaaagcttttttgaccatttggatgagcctagtcatttagaaccaggaatacataattttttcctaaagaatttcaaaagcctttattttttaattttcccaacttcattggggttttacttttccccagatgcaaattagatttaatttgcggggaattggaaggatacctccaatttccaaattcctaaggcaggaattttttttagcataccattttggcaattttcatctgaac

SEQ ID NO: 40671 - DNA, 365 bp, Glycine max
  Clone ID: PAT_MRT3847_136725C.1
ttcacgcttccggattgtttgagggagcatttgaaaggagaagctatagaggccgatgggcggactgcatcacctgatgtgcgctgctggggactgtaacttgacgctccgatatatcgaatgccaagggtttcttgtgctgtgcgtcttgcagaggatgctggtccatatcctactgtacatggtcagataccatggatcctagagtaccagccatgtatagaccgttacctttttcagaactccaacaccaatggacattgtgcccactgaagaaagggaaaaaagcctacttagaaagctggatgtgctccagccatttacacacatatgaacgactcgactccggtggtggctcctgggtt

SEQ ID NO: 40672 - DNA, 189 bp, Glycine max
  Clone ID: PAT_MRT3847_136726C.1
atggtgaagactgcaaatcgagtgtcgtcaccactgcaacaaggaggagcggtaacacctcatgttgacaaactacaacgcttcaaggcagcgcagttctggaaatctcccctttgtcttctccgtcatccttttatcgatgccgccgacgcacattgcttcaatgatgaagccaatccgttcacatga

SEQ ID NO: 40673 - DNA, 670 bp, Glycine max
  unsure (1)..(670): unsure at all n locations
  Clone ID: PAT_MRT3847_136727C.1
gcaccttcatcatggctgagttcttcttcccaaacaagtcggtcggcgaccagaacagtgtcgaggattggcgcatccgcggcatgactcctttgactcctcccgatctcctccagcatgaaattcgccagacagacaagtcaagagagactgtcgtcaagtcccgcaaagaggctgtcgaggtcgtacacggcgtggacgagaagaggagactcatggttgtcattggtccttgctccatccacgaccctgccatggcattggaatactgcgaccgtctgctcgagctcaagaagaagtacgaggacgacttgctcattgtgatgaggagctacctggagaagcctagaactactgttggctggaagggcctgatcaacgaccccgatatcgacaacactttcaacatcaacaagggtcttcgcactgccagacaaatgttccttgatctgactaccaagggcatgcctttggccagcgagatgctggataccatcagccctcagtacaccgccgatctgctctcagttggagctgttggcgctcgtacaaccgagtcccaggtccaccgtgaattggcatctggcctctncttccccgtcngtttcaagaacggcaccgacggcactctcggcgtggccgtcgacgcgatcggctctgtcaagcaccc

SEQ ID NO: 40674 - DNA, 1119 bp, Glycine max
  Clone ID: PAT_MRT3847_136728C.1
tcgactcgagccgaatcggcaacaaaacaactcaactaagcgcaaaccaaaccaacacaaacaaaaacatctctcagcaaatgaatattctcggacaatcactccaccaatcaaacaacggcagctactcttgttcgtcgccggagactgcaaactcctctaaccttccgaccactccgaaagccgttcactccgacgaggaagtgaacacattagcatcggctcatcctaagaaacgtgcggggcgtcgaatttttaaggagacaaggcatcccgtgtacagaggagtgcggcggaggaacaacaacaagtgggtctgcgaggttcgtgttcccaacgacaagtccacgaggatttggctcggaacgtatccaacgcctgagatggccgcacgtgcgcacgacgtcgccgcgctctcgcttcgaggtaagtcggcgtgtctcaacttcgccgactcggcgtggcggttgcccttgccggcgtcgaccaatgcgaaggagattcggcgcgtggcggcggcggctgctgtagcgattgcggcggaagacagccgcggcaagcagttgcggactaatgcgattgatgccgttgctgattgcgaagttagcagcagtgacataggcgtcgatgaaaattgcaataacaataaagcttcgcagaggttttgtgatttggatgaaattacaatgccagatgcaccggtttttgaggacatgcatgagtggcttcagactatggctgctgaaccattaagatcacctacttttgtaacatatgttaatgttagggatgtctggaactttgtggaggatgatgctgaggtttccttgtggagcttcaccgtctgaagagcatgcaatttaggctttaggtgtatttagtgtgtttagctttctttctcttcttttggtttttgtacataattaggaacggaggactacgaaaatgtacaaagaccgaaacgatataaggagatagctatctaggtaggaacataaaagtgtgaaacattgtaacttttctcattcggttgtttttgtaaaataaaaattctattttcatcaatacattatcaaagacactcactgttagcaaaaaaacaaaaaaaagagagagaaa

SEQ ID NO: 40675 - DNA, 557 bp, Glycine max
  Clone ID: PAT_MRT3847_136729C.1
tcgacccagcgtccgcacggttgcgcagacacgacagagggggggcggcaacaaggagattgtgaatagatgactaacgggaacggccgatgctctactgatgcacttgctataggaaggtacacctcaccaggtgatggagctactgagctgtgttatctatcattattaatcatacgacaggacatgatttgctatcacacacgctgcgagaaaagcataggactaatgatgcaaacatcatgcatgctacgacgcacaatattctgaacgtaccctcatgaacaaaacatcaaggatttcttattctactaaaataaagtctgaaacaaacatgcctaaacgcaactatgtcatacacgaacttgaaatgtataccgaatgagagaaacatgctcgtaccattacagagacaaagacattactatgtttgtagcacaattaaaaaataccataaaccagcatgacctaggactagcctactagtgttcaccggcagacctacaccatgatgagggggtgtgcaacggcgccattcattacgtaaaatgcactaa

SEQ ID NO: 40676 - DNA, 646 bp, Glycine max
  Clone ID: PAT_MRT3847_13672C.1
aaggaaaatgctaattgatttgcacttggagcaagatacaactactgaagtaatggtggacaaccaggcagtcatagccatctttaaaaatctagtttttcatggaaaaacaaagcattttagcatcaaattattttttcttagagatgtacagagggatggtgcagtgtgcttgaagtactgcaagactgaagactgaagaccagctgtcagatatctttaccaaagctcttccaagaagcagatttgagttattgagagagaaacttggactttccaaccactgatacaagaagtgttgaacatggtgcaatgtgcttgaagtactgcaagactgaagactagctgttagatatcttcaccaaagctcttcgaagaagcagatttgagttacttggactttccaaccactgatacaaggaggagtgttgaacatgtgtatcagcaattgcctatcatgagtgcataggattgtttattttattttcagttattgctttttatgattcctttcagttacaataacggttatgttaatagttattgtttaggaagtcagttactgcttttataatttctttcagttacaaaaaatctctatttaaacagattattattcaataaaaaattgtgtgcattcatctcc

SEQ ID NO: 40677 - DNA, 178 bp, Glycine max
  Clone ID: PAT_MRT3847_136730C.1
ctgatgacgaaacaggctggcttgacttgaagatgtgtgaaacagaggtatatttacaccattgggtgggtagatgtaagatatgcacaatgacaaatatgatgacccgtcgacaccaattccttcgtgctaaactaaagcaagaatgctcaatccaatatattccaaaatgttttat

SEQ ID NO: 40678 - DNA, 306 bp, Glycine max
  Clone ID: PAT_MRT3847_136731C.1
aatgcattgaattctaaaaaaaatactattaattatagcagggtaccaattccttaataaaattaaaagtggaaggaaagaaataccctgtaattacatattaatttaaaactccaaatagcataaagatgtggcgcttaacttaaagggagagtgtaggttcagacagtctaatatgattcatattacatctactaatgaaacaaatctgaagatatgaaacaataattaattttattcattaagccaatacgtgtataggcctactaatctagaatctagttttcactcttgaactaaaaacct

SEQ ID NO: 40679 - DNA, 680 bp, Glycine max
  unsure (1)..(680): unsure at all n locations
  Clone ID: PAT_MRT3847_136732C.1
ccacgcgtccgaaagaatatggtgtctaaatgttcagcatgaatatatagctaggcaaagaagagcaaaagaaaatacattacctgtctctgaaatcagattcactttgttcttcatcaatggaaagagaacaactatcccttcacatgaatggtggcaagggacaaaggagttatgcaaacaactcctcactacaaagaacaataatacgtaaaaccagatccatacttgaagaaactataacgaggttgtactgtgatacttttcctaataattgcttaaaagtggcagatttgggttgctctgtaggatcaaacacacttcttgtgacatcaaatattattgacattgttgataacagaagcactcaattgaaccgtgaaccccccaccttccaattttatctcaacgatttatttggaaacgatttcaataccatcttcaagtcactccctggtttctatgaaagattgctagaagataagggtcacaangtttagtccatgctttattaatgcanacccctggatccttctatgggaggctctttcccagtaattccataaatctttttcactcctcctacagtctacactggctnttncangatccattatttgaggtctaggggaggtagcatcacttaacagggccattgtcacatagttagcacaagccct

SEQ ID NO: 40680 - DNA, 379 bp, Glycine max
  Clone ID: PAT_MRT3847_136733C.1
gttttcttcacggattctatcccgaagaatccctccggcaagattcttaggaaggacctgagagcgcggcttgccgcgggcatcccaagcagtgacaacacacagtccaaaagttgatacgtactttcgtactattcttttctagctgtgccaaaaatcatgctgtgctctattcatgagatggcaatggtatacacaaaacgccaagcggtcgttatcgattcttctagatgggcaagggtaaggtatacttcgtttgtgtccgacatattatgtatttgtatcatgtatagatacgttttgttgacaacaagtgctaattataatgtataccatgtttgggaacctaaaaaaaaaaaatatggaataaaaattttta

SEQ ID NO: 40681 - DNA, 207 bp, Glycine max
  Clone ID: PAT_MRT3847_136734C.1
ggaacgagataaaagaacttattataggcacagcgaactaatgaatcaactccaatctcaatttacatggctatttatgtaccaggattttgaggctggtcatgtcgtgccttattatgtcacaacctcctatacaactgtattaacagcatggcttggatactcacaagaatcaattacatatctgccctatggactgccatatca

SEQ ID NO: 40682 - DNA, 396 bp, Glycine max
  unsure (1)..(396): unsure at all n locations
  Clone ID: PAT_MRT3847_136735C.1
ggaaggcggggcgagggcccgaggaaaaggaaacnaaacgaactttgttttattaacctgaactactaatgcgagggagcgacgagcggagagggagtaactaattgttgtggcaatcagcctacacagaacataatttcaatcgggaactctggccagatttagggaaggatgagcttggagatgcattaaggtcatatcaacaaagacaaagacgctatggggggggacatacataaacatttgggggcaatatatagcgatatacctggagaaacatagacattaaatagaaacgaagcaacagaaagagtaggagagcgcgagcaatcaatgccatgatataggcataagaaagcaacagggaaaggaaattatatagagatggatctacag

SEQ ID NO: 40683 - DNA, 427 bp, Glycine max
  Clone ID: PAT_MRT3847_136736C.1
acggctgcgagaagacgacagaaggggggacggaaacaataagaagaggctataccagtactcaaaatatcctaccagcattgctgcactgtcgtttagcagagatggacgcctcttggctgttgcatcaagttacacattcgaagaagggcctaaagcaggaactaaagccgacgaacaagatgctatctacgtacgcagtgtaaacgagattgaggtcaagccgaagcccaaagtatatcccaatcctccagcttgattcctgatggtggccttttagaaaatagggatttcttcgtttattggttctactgtttcacttcctctcgtgaacaccaaaaacatgtgtactattgttgtgaagcactagcttattttctagataaaaaatgttagttcagatttccttcaagttgtgcactgcgtg

SEQ ID NO: 40684 - DNA, 402 bp, Glycine max
  Clone ID: PAT_MRT3847_136737C.1
aaaaaccggaaggacccaccgggggctatagggccctattggggaaaaggacccggaaccgggtccgggccaaaacaaacaaggccccaagcccccgcttgaattatgggccctgaaggggttccggggaaaaaaaagaaaattggggaaaaaagaatgggaaaccaaaggccgggcaattagaccattggaccccaaccccccaaatcggggccctatttccaaggtttttcccgggtaaacccccgggttttgaacccgggaaaaaggggatggaagggtttgggcccccccgagcccgtggcccctcccttttttccctataaaccattaaagaaatcccctccctttcagaaaaaccccctttatagggggcaaacccccttgggccccttggggggg

SEQ ID NO: 40685 - DNA, 1789 bp, Glycine max
  unsure (1)..(1789): unsure at all n locations
  Clone ID: PAT_MRT3847_136738C.1
ccacgcgtccgctatgtttcttccctctgatggatttttatttattgttgtcgtaacaataaacctttttctgaaaccatgcatattattttggtagtattataatgttcaatggatctgcaattcatttctgcctctgcaactctcagaatttcatgctctcaaataaggatctggagcagaaattgtagatcctgaaattttccctgtgtagagtttgggcctaagttagagtttgtgagagaaaactttgagaatgagatacgtggaggacaaagggtgctacaacaacaatggaccaacacaagagactccaaatagcagtgccatgtactcagagtttcacaaaggaaaagatgctactcgtgtctccaaccaccatcatcgagcaaccatgggaaaaccaaccccttccaagtgggatgatgcacaaaaatggctcgtggggttgtcaaaaggtggagagaaaagccactccaaaagcaagccaagaaactcaaacgcagatgatttgagactcatagctcctgtgccacagaaggagcatgattactcaagtagtgagaaggaagaggaggaaaatgatgcttgccatgatttcatgactaatattattagtgctaatgctattgctgctcaatatgaagctgaagccaaaagggtagaatgtgatgagtcaaattggggaagcaataataataataatgacaacaggttttcaggaaacacaatccaagtgcaaccaatatgtttcagagacatggggactgagatgacaccgattactagccaagagccttcaagaactgggacaccaattagagccacaactcctgctactagaagcccaattcattcagggacttcaactccaatgaggggtcaaaatgggttgcaacaagttgctgagggtggccatggcactactaggaagtgtggagatcaaggatcaacaagcccttgcaagaagactcatgaagatcatcaagctagaaaattgagtcctctagaaagccgtgcaatggcttgggatgaggcagaacgtgccaaatttatggccaggttcaagcgtgaagaggtgaagattcaagcctgggaaaatcaccagataagaaaagctgaaatggaaatgaagaaaatggaggtgaaagctgagaggatgaaagctttggcacaagaaaggtttgcaaataaactggcttcgactaagaggatagctgaagagaaacgagctaatgcacaagtgaagctgaatgacaaagctttgaggactactgaaagggttgagtatataagaaggacaggacatgtgccttcttctttctctttcagctttaagttgccttccatttgctggtagctagtagcaattttgcaaccaatatatgtaatatcttgtcgtgtgaaatataaaaccttttcagtctagcccaacataattgtgctacttctacaaaaatataaaaaaaaatttcttgctcatgaagggaatagaattgaaaaaatatttatatttgaaactcgctcgagttgtcattaatccactgaaattgcacaagggtttttaagtaaagtaagtactctctgtaattgatagcttcaaaccagtactcttctgattcatagttcctatgtggtactgatagaacctcctctaggtagcagacatgcattgctttcacgagtaaggctatggtttgaggcaaaagttacttttcactgcatacaatcgtacaatttacagttttacaactgcacattgcgtccgtttttttattaaatnnnaatg

SEQ ID NO: 40686 - DNA, 351 bp, Glycine max
  Clone ID: PAT_MRT3847_136739C.1
ctcgagccgaatcggctcgaggtctcctccatttctgtgcctcttctctgtcgttacgaccctctctcctaaacggcgtaacggaaggagtcacgtgacgtgccgaagaaaaaggaaaaggttgatggctttagagcaggagggtcagaataggaacacaaacggcgtagtggatgctggctatgagggagggaaagcgccgaaatgggcatcggtatcttcctactgcagaaagcatggagtgaacagaggtccggttcattgccggaaaaggtggagcaatttggccggagactacaagaagatcaaggaatgggagtctcagatactggaggagacggagtcgttttg

SEQ ID NO: 40687 - DNA, 229 bp, Glycine max
  Clone ID: PAT_MRT3847_13673C.1
cttttctccagcatctcttacttcaactgatggtgcacccattaaattgggctgggggcttcaataaactagctcacctatacgctaattaatcttcttctacccacctattttctatatatcattccacattccctataaatgcctaacaataaattattataacttactcggactcgctaaaataatcttcttttttctctcaactatttgaacttttacactcttc

SEQ ID NO: 40688 - DNA, 1346 bp, Glycine max
  Clone ID: PAT_MRT3847_136740C.1
cctccccccgctccctcctccactcatctctgtctctctcgaaacggcgtaacggaacgactccagtgccgtggctcatgtctggtcacggagaaacggcgtaacggaaggagtcacgtgacgtggatggctttagagcaggagtgggtcagaataggaacacaaacggcgtggatggtggagacgagggagggaaagcgccgagactgcctcggtggacaagacaagaaattctggttctgatacagggaaagagagacgccgagaacaagttcaggagggggcgcaccgcgggtttggcatttgggtcgggtcaggtcgagccgaaatgggcatcggtatcttcctactgcagaaagcatggagtgaacagaggtccggttcagtgccggaaaaggtggagtaatttggccggagactacaagaagatcaaggaatgggagtctcagataagggatgagacggagtcgttttgggtcatgagaaacgatttaaggagagagaggaaattggccggatttttcgataaggaggtctatgatattcttgattcactcccaacgaccttggctctttctctttcctcatcgcctccaccaaccacaaccataacaacaacaacagtccctgacgaccctcctcacctctatgatagtaatcggagcgcgcccggtgacggtgaggatggcttgctctcagattttgaacaagatgaagagaagaacccgccctccaacaaggacattcctgctcccattcctatctcagagaagcaatatctccgtcgttgccaagctgaagatgtgactaacgagaaacagtctacttcaaatccagaaatgggttctacttctcaaggagagaggaaaaggaagcggttagcaactgacggagaggaggaaactttgcaatatcaattaattgatgtcttggaaagaaatggcaagatgctaagtgctcaacttgaagcgcaaaatataaatttccagttggatcgtgagcagcgtaaagaccatgcaagtaatttggttgctgtgcttgataagcttgcggatgctctagggagaatcgctgataaattatagtgcaagagcaatcagactacagtgtacataacagttgaagtcctgtagataatagtggtttctgttatttatctcagcaggtctcctagaaaatgactgccacacttgttccccgtttgtttttctttctggatatgccatatttttgtggtttattactgccattttaggattatatacacacatttggattactgctctttctctcttactgttatattaatattcacgaggtcattcgaatcaaaaactgggaagtaa

SEQ ID NO: 40689 - DNA, 555 bp, Glycine max
  Clone ID: PAT_MRT3847_136741C.1
tttttttttttttttttttttgaaatgagaattatgaatttcattgaaagatcacaagagcattataaaaggctcccacgtcacaacattctacatcaaaagaaagttggggtggagcatcctccacccagacttgatcaaccaaaacaaaggctaactaagctaaagaatcagcaacaatgtttcctatcttctttgtatgtaccaaagcaacagtgtctatatgtgttgtcatgtctctacaatcctgcaaaattgcatctagatatgtacaatcctttggctagcattcctccaagcacttgcaatctccctgcagtcagtttcaaaaaagacattctgcagcagaagttggttcgccatctggatactccatttgaaagctaggtactctgcaatctgggggctatagcactgatcttccaagcgagttgcagatgcaaggacctcacccttatgattgcggaacacaaggccgaaccccatccctttaccaatctttatcgaggcatcaaaatttgcattgatcattccctcttgaggtggctctgatca

SEQ ID NO: 40690 - DNA, 988 bp, Glycine max
  Clone ID: PAT_MRT3847_136742C.1
ctcacgcgtccgcccacaaagccaaagccctctctctctctctctctctctctctgtctcctccatttctgtgcctcttctctgtcgttacgaccctctctcctaaacggcgtaacggaaggagtcacgtgacgtgccgaagaaaaaggaaaaggttgatggctttagagcaggagggtcagaataggaacacaaacggcgtagtggatgctggagatgagggagggaaagcgccgagactgcctcggtggacaagacaagaaattctggttctgatacagggaaagagagacgctgagaacaagttcaggaggggccgaaccgcgggtctgccattcgggtcgggtcaggtggagccgaaatgggcatcggtatcttcctactgcagaaagcatggagtgaacagaggtccggttcagtgccggaaaaggtggagcaatttggccggagactacaagaagatcaaggaatgggagtctcagatacgggaggagacggagtcgttttgggtcatgaggaacgatttaagaagagagaggaaattgcccggatttttcgataaggaggtatatgatattcttgattcaccagcggccttggctctcgctctttcatcctcatctcctcctcctccaaccacaaccaaaacaataacactccctgctgaggagcctctgcctcacctctatgatagtaatcggagcgcgcccggtgacggtgaggatggcttgttctcagattttgaacaagatgaagtcgctgccagttcgaagaagaacaaggacattcctgctcccattcctatctcagagaagctataccaaccactcctccgtcgatgccaagctgaagatgtgactaacgagaaacagtccacttcaaatccagaaatgggttctacttctcaaggagagaggaaaaggaagcggttagcaactgacggagaggaggaaactttgcaatatcaattaattgatgtcttggaaag

SEQ ID NO: 40691 - DNA, 476 bp, Glycine max
  Clone ID: PAT_MRT3847_136743C.1
tactccccacaccctctcggatcgcgtggcgcggttcggcgagggcgtggggaggttcttccgtgagctgcgggagatggcgcggtcggatccgcggaaggtggtgttcgcggcgaaggcggggctgtccctggcgttggtttctttgttcatctacatcaaggtaggagcagctcagcaagtgctccatgtgggccattctcaccgtcgctgtcgttttcgaattcaggcgtaagggcgactttgaacaaggggttcactctgtctttgggaacaatttccgctggagggcttgcgctgggacttgctgtattggccggtttgcctgggaagcccaaggaacttattatccgcctatgcatatttatggcacgtgttcgtgcaacctgtgtgaagcttctgcctggaatgaagacctatgaatatggctgtcctgcgagcttggtgacatttggtattgagtagctgtctggtat

SEQ ID NO: 40692 - DNA, 421 bp, Glycine max
  Clone ID: PAT_MRT3847_136744C.1
tttatttttttttttttttttttttttctcttttttcccttttggatttctttgggttttttttttttttttttttttctatcgaaaaaaagaatttctttataacccggaaggggccaaacaaaaacaagaccccgggggatctttttttttttttcgggggttcacctattggctgtctccctttacctgaaaatcaaaaagcgattacccaccaagacaaaagggggtccaaaaaactccctaaagaagtcttctttgaaaaaaaaaaacttttcttggcggtcttgaaaaaggacaaaagggggtctttcggggggagggctctcccccccaaaggggggctaaaggaatcctggcttcctctctaaactcaaagaaatttttcccgggggaataactgcacccccgtcttttctcg

SEQ ID NO: 40693 - DNA, 489 bp, Glycine max
  unsure (1)..(489): unsure at all n locations
  Clone ID: PAT_MRT3847_136745C.1
actcggggaaacaaaccnagcggcnnaaaaangganagggcaggccnacacancaacanaaaggcaccncgcacanaannngggagcnnaagcgggggggggggcgccaaacnaaaaannaagaanagaagcagacanncnaanagggcgggcactacaaggggganagganacaagggaaccaaacannnataggggaggcggcgggagcgnagncanaaccnccggcancggcgncancggcaccctccaccaaggcaacggggacaaaacnnacaaaancnccaggccaanggcaaacannnccntcaaggcaagcaggggcagcaggagcancanacacancgacaccancancanncccaggggncnggcaccacagagcaaggaccngggaagggaaggacannannnnnagactagggtgaagaattggaactaggagggaataggagagaagaaaggaagctataagaaccggacgcgtgg

SEQ ID NO: 40694 - DNA, 474 bp, Glycine max
  Clone ID: PAT_MRT3847_136746C.1
ccattcccaaaacggcccgcctttaattttcttttgggaaaaaccaaagccaaaccttaaagggtttcccctggggaaaccggataaaaaaaagaaaaggaattggacccccaaaaaagggcccttaggcttctagggaaaaaaaaaaatcccaaaatctccccttattcgaaacaaaaatcggggcccccccccccaatatcaggaaaatatttttcatcccccagggcctggtcttgacccaatggaaaagcaattccccaaaaaattttttaacagccgggggttctttcccataaccccccccccaaaaaaccaaattggaagtttttattacccgacctccctggcccggatccctaaagacgggcttaataacaagaaacaaagcggttgaaaaaaattttttgggacactttataataagtaccatcacggaaagttccacccaccaggatgttggaagggcaaaaa

SEQ ID NO: 40695 - DNA, 287 bp, Glycine max
  unsure (1)..(287): unsure at all n locations
  Clone ID: PAT_MRT3847_136747C.1
gagatgcaatatgttgataaggaagaaattaaaaatattgaagataaagtaatcagttctgaatctgagaaagaagccttggaagggaggctccaatcagctataaatcaacttcaggaatcagaganaactattggcagcttgagattggagtacaaaccttgaaagaattgaatcgaatacttgaggagcaagtacaaaatcatgcattcataaatgtagatcttgacactcagctaacagaaactgaattanaagaagctaatcacaaagttttggcatagaag

SEQ ID NO: 40696 - DNA, 581 bp, Glycine max
  Clone ID: PAT_MRT3847_136748C.1
ctgccgggccccgatcccgaaccgtttaaagccttaagcctcctcagatttttgaccaaaaaaatttttaattccctttttgtgtgttgtagcccccccgtgctcctcatatggcggattccgctgaccaatctcattctctcgccgaggattattatgtgatatgcctgcaatctcctgtagttgaaaatgctgttgaggtcatagatgttggtatccccaaggtagccttgccttcctgaggatccccgtttgcctggagataatcctgtgggattgataccaacctccctgtttgcacccctgcctgtttgcctcctggataagcctgtggattgtcacacccccttccctccctgcctggaagataaggcccctggaagatgcctaatgtagtgggaaaatgtctgaaggataaacctctgggcaatgaaagttgtagcttgaagagacccctgaaattaagcttgaaaccggctccagcagatttttccgtttttccattctccaaatcaaaccaggcattgctttcccgattccttgatttcttcgatgtgtaagctgctaaaggaagataggtg

SEQ ID NO: 40697 - DNA, 1899 bp, Glycine max
  Clone ID: PAT_MRT3847_136749C.1
cgaggatccacatgatccagagggccccgcatgattttcacttaataataatagaagagtttgttaacaaatgcattccctactctgtatatggaaaatgtgagagaggacatttttccattatcattaaaattggagattggtgaactagcaccagttggtcattattagcatttctcttctttatttatttatttttaactttttttgtaagcacaccttgtccactaagaaaaaaagaaaataatctttatattctaattatgcatatcaatatcaagccacaatccttccccacctctgcttcaccctcacaattttcccatcaaattttttgtaaaatttccaaatctattattagtactatcatctactacaccttttaccccaatcaaaaccaacacaacgccacaaaaaaaaaacagtacaaagaaaaaaaaacactctcacatacactgtacccctgtaccacatcattattgtttagtattttctttttaccttatcactatacccgcttcccctgtttcctctgttctagttcctctggctattgggtgcccttgttttgcatttttgagaggcttttcggggtgcccatttgctgaatttgagtctgagaggttgttttggcattgcattatagagttgttgagggaagttgagggatttattggtggggtgggtttgaatggggattgagaggaccttggctgatagaaaaggaagagacttttgtgaattgccaagagaaaccattgccagcagcaactcaaggaggaaccggcggcggcagaggaagaagccgccggttcagaagcttttcgagacttgcaaggttgtctttgcctctgcagggacaggctttgtccctccccatgaggacattgacgagttgcaatctgttctagatggaataaagccagaagatgttggtttgagaccagatatgccgtatttcaggacaagtgccacacagagagtgccaagaatcacgtacctgcacatttatgagtgtgaaaagttctcgatggggatattttgtttgccaccttctggggtcatccctcttcacaatcaccctggaatgacggttttcagtaagctactttttggcactatgcacatcaagtcatatgattgggtcgttgactcgcctcctgaatctcctacaactctcaaaccatcagaaaaccaaggtcctgagatgaggttagccaaagttaaggttgatgctgatttcactgctccttgcaacccttccatcctttatccagaagatgggggcaacttgcactgtttcacagcagtgacagcatgtgcagttctagatgtgcttggtcctccatattctgatgctgaaggcagacactgcacatactaccacaatttccccttttccaacttttcagcggatggattatccataccagaagaggaaaaaaatgcttatgaatggctacaagagagggaggaacttgaagacttagaagttaatggaaaaatgtacaacggtcccaagattgttgagagctaataatcttatcctcttaagtacaccatctttcagtttttgtgctgctgcctccgccgccgccgccgccacatacccttacagaaaatttttctatcaatttctttctttcaaatagagaagcagcgcatgtattcttgtaccttttttcctttatctttagtagtgttttttgttttcttaatggaacatgagaggcacttgccatgcccttggtgctgtttttcagtctatagttcttttcttgtacataccaagaaacagaaaaaaaggacaaattaaggaggtgccgcacctgaaattgaacttgaatgaaggtgcaatgcaatgagcttaaattagccttattttgttggctagttggt

SEQ ID NO: 40698 - DNA, 304 bp, Glycine max
  Clone ID: PAT_MRT3847_13674C.1
agcgggcggtcaacaccggcaagtaagaaacccagcgagcggaggcaggcggagggcagagatagcgggaaggaccccgacacaccgaaacaacggcccagaagggacaagaacacgcccgaagaggggccacggacacaccagggacagccagccgcgagggcggggccgacagacagaaggagacacaacgcgccggaccctcaggggccacccagcaacgcggcaacggggccacggccgggaaagccgccgggccgagcacccgcaaacgcgccagggagaggcccggcgggaacccgca

SEQ ID NO: 40699 - DNA, 1616 bp, Glycine max
  Clone ID: PAT_MRT3847_136750C.1
cggacgcgtgggcggctcggccgcacaacagggggagacacaacttttctccaaaatcgagattaggacgttgttccctttgcgctgtcccacaagcaattaagcacagcgcacaaaggtgtggtgggcaaagggaagtttcaagttggtgttgttgcaggtgaaaaatgtggttcgtgtacgtgtgcgacgaggaagagaaggaacttggaagacaacaagctcctgggtcgtgtccctactgtggagccaaggttgaagccatggatgttgagatccagtccaggctctgcttcttgcccctctgcttcaagatcaagagaaagtacttttgtacccactgcgctaggcgcttagagttgtatatggattactgaaccccactccaaatcctcaaatctccaattggaacaaggactttcttgtaaatatacaagtctagctgctcttagttttgtttctcgtttttattttttttcctttttaacttgtgagtttggtcgaggatttgggtgcctactacttgagacgatgctatgtcatgaattggtcattgaatcaatcggagatgaaatgcactggattttcttttcttttactgaatggcttcaagagaaggagaaacctgagaatttaaaagtagttgtcaacatgtatagcggcccaaagattgtggagaactaatgttgtcttgtcccctaacatcttcctgttcctatgatctcttgtgcggtcaaatgatattcctgtgaatcatttgtctcattctatcccatttgatgccccccttttgtcctctagtgaaccttggtctatctttataccttttttagtatttttattttcttctgcatggaacatgaggcacttaattggtgctgttttgaacctacagttagttattatgttcatacaaaaaacagcaaaagacaaaggtgacggcttaccctggaagatagtatcaaactgaaggtgcatattgcatagaaatgaactgtttttttttgtttttaaaaaggtgctcggtttgtagaaggatttatttaatttaattagtttgatgcaaaaaaaaaaaaacggtgcatttagtaaagaaaaaaaaaaaaaaaaaaaaaaaaaaaaaaaaagatgaagacctagaagtaaatggaaaaatgtacaacggtccaaagattgttgagagctaataatcttatttatcctctcacatcacgtacaccatctttcagtttctgtgatcagttgctgctgctgctgccaccacatactcttacagaaattttttctatcaatttctttcttttaagtagagaagcaacgcttgtgttcttgtaccttttttctttatctttagtgtttttgttttcttaatggaacatgagaggcacttgccatgcacttggtgctgtttttcagtctatagttctttttatgtacataccaagaaacagaaaaaggacaagttaaggaggtgcaatgcaatcagcttaatcgagccttgttttgtaggctagttggttaattcatttatttcactttcggatgatttaaaggttctttatacacaatttgatgtatttaataaattggtatgacatagcttctatgatgatgac

SEQ ID NO: 40700 - DNA, 311 bp, Glycine max
  Clone ID: PAT_MRT3847_136751C.1
gtagacccacagtggctttaattaataaactagccgtgtactttatgagttttagcttatacaccacgaccttgaaatctataaaaacccttcctgttacaacagaaatagggaaaccaactccaaagatggttaccttatcgctgggatggagttggtcaccttataagggggctgagacctgaaacaggggcctagacatgtgatttaatcgtgccgttcccaaagtacgtcttgtttttaactagatattatactttgaaacagccggttcaaatacttcctcaccctgagggccaggattaacggaa

SEQ ID NO: 40701 - DNA, 451 bp, Glycine max
  Clone ID: PAT_MRT3847_136752C.1
cgagctcgagaattttatgaggacaatgacaatggagcccacacttcccatgttgaaaagagttcttgatgtctgtcagaaaaatgagtgcccaagattgggagaatggattgcagaaaaaattaatgaattcaaatactaagtaatttcaacaagcagcgatgggagctgatatttgtttcatgactttcattataaaggccatacatcagatggcaaatatatgcaatggaatatgactatgatcaaggtcctgtctgtaatgatgataatcggatcaatccctggatttgctactacaggactactactttctgcagttgcagtgagcaagacattctttgattttgctgaaagaaaaataatcatggtgtctatttttcaaggaactagtgccgtagtgggccttaaggtttacatggagtctatttttcaagtttataagcatact

SEQ ID NO: 40702 - DNA, 392 bp, Glycine max
  Clone ID: PAT_MRT3847_136753C.1
aaatatataaagtgggtgaaaaaatatccaccaccataaccaatggctttttggctttggatctttggtcgaaaatcagatctgattgctgacgtggatcatgtgcgccagcatgtcctagtgtctagatattttctgaaaccaggatattttcggtagccgttggatccgagggcttttaacgttggtgtctcatcccacgccgttcgatcagtccgatgttaaacttaacgaagattctgaattctgatgctctagtgcgattccatgggagaggtggtcatcatgagtggagagaagaagtcagttagagtggagggggtggagaaggaagatagtgttggaatttgactgcacggctagactctataatgtgttgacttggttgacca

SEQ ID NO: 40703 - DNA, 1346 bp, Glycine max
  Clone ID: PAT_MRT3847_136754C.1
agaatgcattaacagctgttaaaaacatgtcatctgaaactcaagaaagtggatcaattggtcatgttgctgaaatgctgaaagcaaatgctagtgaaatgtcaaacataacttctgcttcagctgttatcttgaaaggagggtcaattggaacttcaaggctttctgatgttaccactctagctattggatatgtttttatattgactctaattttctgctactttggaattgttgctttaattcgttacacaaagggtgagcctttgaccatgggaaggttatatggctttgcttctatagcagagacaattccatctctcttcaggcagtttttggctgcgatgaggcatttgatgaccatggttaaggttgctttccttttagtcattgaactgggggtatttcctttgatgtgtggatggtggctcgatgtttgtaccattcagatgtttgggaagacaatggttcacagagttcagttcttctctgcatcccctttagcaagctcattggttcattgggttgttggtattgtgtacatgctactaattagcatatttgtcagccttcttagaggggttttacgtaatggagttttatactttcttcgggaccctgctgatccaaactacaatccattccgtgatctgatagatgatcctgtgcacaaacatgctcgcagggttctgttatctgttgcagtttatgggagtctgattgtgatgctggtattcatgcctgtcaaacttgccatgcggatggcaccttcgattttcccacttgacatatcggtatctgatccattcactgaaattccagctgacatgctgctctttcagatttgtatcccatttgcaattgagcattttaaattgagaacaactattaaatccctacttcgctattggtttactgctgttggttgggcacttggtttgactgatttcttactgcctagacccgatgagagtggtaatcaagaaaatggaaatggggagccagctaggcaggaaaggctacaagtagtacaagctggagtgcaagatcagggtatggtgccatttgcaggcgatgatttgaacagggccattaacacagtgggagaaatgaatgctggagaggattatgataatgatgagcagtctgactcggacattatgccttcgtgcttcgcattgtgcttttactggtgattgcttggatgactctccttgtcttcaactctgctctgatagttgtaccaatttcacttgggcgggcacttttcaattctattcctcgccttcccataactcatgggataaatgcaatgatctgtatgcatttatcattggaagctatgt

SEQ ID NO: 40704 - DNA, 214 bp, Glycine max
  Clone ID: PAT_MRT3847_136755C.1
gagatacacttttttttatttttttttttttttttttaaaccaataaaccccgctttgtaattttgaaggaatttcatcataacccttttacgcgggaaggcaatgaaattccaaaaaaaggaccaaattcccaaacatttgtgaaatgaaacctaataaaaccctttattcaactttgaaacgcggaaacatttcttttgctaaggacctccc

SEQ ID NO: 40705 - DNA, 660 bp, Glycine max
  Clone ID: PAT_MRT3847_136756C.1
gatccaaagcttctagttctctttattactatcatgactttccctcctagttcagttattcatctctttattactaacatttcttccattcttagcttttgtttgtcccatcaaatttttgaagatggccaagagaagtgttgctgctaattcttcttttgagagtactagcttggcttctctggatcaaaagttggccatggccaagcgctgctctcatgagggtgcgatggcaggagccaaggcagctgttgctgctactattgccactgccattccaactctggctagtgtaaggatgctaccttgggcaagagcaaatctcaatcacactgctcaagctctcataatttccacagtggcgggagcagcatatttcattgtagctgacaagactgtcttggcaactgcaagaaagaactccttcaaccgaccctccaaagcatgaattccaaatagataacttggatgctggattcagcttcacattggattatcttggcataaacccgatcatcgaacttatcatatatgtaaatgtaattatgtattgataataatgaagagtttgcatttcaatagtgagatagaacatatgtactaattatcagttaattatatgaatgcaaatcattcaccttaatttcttctaaaaatttt

SEQ ID NO: 40706 - DNA, 494 bp, Glycine max
  Clone ID: PAT_MRT3847_136757C.1
gaaggtttcccgtcatcactgtatgacgtcctccttctttgggggggggggggggtagtatatgtgtagtgtagggcggagttaaagggaaataacaaaggggaggcttagtcgactgtaaggatagggacgtgttagtggctagtggcgaaggggctgagagtgcacatgtggggcgtgctggtatagggtgagactaaaatcgaaaagacaaatagtgaatcattaaggtcgatataccggatatcgataagaataatcgccaacaacaaaggccgattgagaaaaagatatgccagtccagtcacgacacgagatagattataacgcgtaagaatagaggtgggaggatatgtaggggaatataggggggagcaggacgggaaagggaggaaaaatgagaaaagtatagaaaaaaaagaattagcaaggggttacagggaaggggtaagaaaggggacgcatcaaagagggtagagcgaatggggcaaaaa

SEQ ID NO: 40707 - DNA, 357 bp, Glycine max
  Clone ID: PAT_MRT3847_136758C.1
cacgcgtccgccctttttttacggcgcttggccgatttctgagtgggggtccttgacgagcttgagacgctgtaggttctggccggcacgccggagctctaccgggacctcgtaaaccttaacgtggttgcctccatggttggcctgctcaaccacgacaacaccgacattgccatcggcgttgtgcaggtgctccaggacctcaccggcgaggacgtttttgacgacaacgacgactacgctagggttttgggcgacgcgcttgtcaacaacagcgcgctggggctcctcgtgcagaacctgtactggttgaacgattacgatcccgactagaacgtcgccgtgttcggtttcctc

SEQ ID NO: 40708 - DNA, 493 bp, Glycine max
  Clone ID: PAT_MRT3847_136759C.1
atgcacgcttacgcacgctcgcgattctgctcgtgcggattagtccatggttgcgtgcgatgttcagaattaccgccattatgagctgatgatacaggggtctaggaacaactttcgaacgggaaccctatgacaaaggattgcacattgggcctgatagatccatatagaggactttgtgggcatgcttgcttagttgaatggtcttaggcttttacctggccccagatcactggggtagtatagaatctagggatagtatctgtgaccttttcatcttgcttgctagtaggtcgttatgggagcagctgatgcatcagacgtggttggcaaaatcgaggatttttatgacctagcgcgagaaagcatgaatagccttggcacttgctattcaatgacgatcttaggcattgacaatttcctaagcgcttttcttggcacatctatttcacatgttagcaagaaacatggccaccgaggctggggtttgaac

SEQ ID NO: 40709 - DNA, 1135 bp, Glycine max
  Clone ID: PAT_MRT3847_13675C.1
cttacaagattttattgtgtaaggtggtggtgggagaggtattttggttagatatatctattagcaaagattattcaatttttttatacttctcttctttacatcattttctcacgtgcccattctcacccatggctgcctcatccacaatcaacaacttcttctctttctttcttacccacaaaaccaccaccaccctctccaccgcagttcaaccccaccaccaccaccaccactcctatgaacccttcttctcagacccacaaacccacctcgcagcccctaattgcccaatacaaccctcctccaacttcgttttcttgctgatcctcatcactctcattgttggctgccatatccaccaccaacaacttcctcactttcttcttactcacaaacccaccaccaccaccctctcctccgcagctcggaccaaccacttctcagaaccagaaaccctcctcgtaacagcccctaattgcccaatacaaccctcctcctcttcaccgctctttcgcttcttcttctgagttgtcctctgttatatgcccctccatggcgtactccaacacgctcttcttccggtcgccgtacaacgtgcaggtggtggtggccgaggacgagaccgaggagaagctcctgggaaggttccgcagagaggtgatcaaggccggcatcgttcaggagtgtaggaggagacgctatttcgagaacaaacatgaagagaaaaaacgcaagtcgcgcgaggctgccagatgtaaccgcaaaaggctgccaatgtcaaaaactgtaggacagaaaaagcaggatgtcccatcttcaaaaaggcaaccaagagagaagacgatgaggataactgggatctacctgaaggagacactctgtattaaccctttgattccctaagttctgtaggtttctttgatttcattgcatataagttttgttaagtaaactatgttccttgcttcgtgcattttcaactgtgatgaatttaatataatataatttgcttgtttgtacatccatattttgttatgcccttggttctatgaaatcttgcattaacttcttttttaaaaaaaaaaaaaaaaaaaaaaaaaaaaaaaaaaaaagtgataatatatcaattatt

SEQ ID NO: 40710 - DNA, 217 bp, Glycine max
  Clone ID: PAT_MRT3847_136760C.1
caaccccttgggtattaggcgagctgagttgagcacactgattgctattgaattattgcaagacagcaaccaagagggtggacagatttcttgctgctttgaccaactatttaattgagatcatatgctttggtcatatgacaactgtttcatgcaactctgataaacgcgtactctgcggttgatactgccatcggttgcacgtcgcttactgaag

SEQ ID NO: 40711 - DNA, 656 bp, Glycine max
  Clone ID: PAT_MRT3847_136761C.1
ccggaattccccctctatccggtttttggggctacaccagataaaatcctcgctcaaggcaaacctaagcggaatttcaaaaaatgcggcgagataggaggcagggttatttctttttgtgtggtgcttttgcttgtatggcgttgcggccgtcctggcgttgcggccgtcctggcttattttttgatgtccttccggcctgtcgcgaaacgagtttcgttgtgcggtttagggttttgtgctattggaatccttttgccagctccatgtgatggacttctctttacgtatcatgccggtcgtggtggttgtagtatgtcgcggtatctcgtagttgtaggttgtatcatgtctggctttgatgtggagtatcggggtttaccattttgttcccgatcattggggcgtagtggcgtggcggctgattcgacgagcggggtagcggttagggaggggcagatagagtttgctgcggtcggcgtgtggcgcggagcggtggcgcgcgccgcagctcgccgcagggagggtcataagcgctggctagaaggggagggcgggcaagtcggcggcggagttcatatcatattcatgggcgggcggctggtggaggttattgcgtgcattcgcattgggcgcctcctcggcgccctcgctcg

SEQ ID NO: 40712 - DNA, 409 bp, Glycine max
  Clone ID: PAT_MRT3847_136762C.1
ccatggggcacgcgaacctctagtatatgaaacttttcaagcatactaaaaccaatctttctacaaccaaggtctaaaggcgttaatgaaaacggagacaaacacagggaaactcctcatgggagctcatcattgtaatgcatgtaggaagccagcatcgaccatgcaaaaaaaaaacgaaggatggccatcctgaggagatatcataatctgcttggagaatctatcaggcatccaactttgatccacaactggaactatatgcccgaccaacgaaaccaaatacggaaaacatggcaaaactaacgactcccatatccttgaccactgaaacaacgaaagtttcagggccatcagccaaagcaataggcacacaatctccaggagggttaactgaaacacactcctt

SEQ ID NO: 40713 - DNA, 607 bp, Glycine max
  Clone ID: PAT_MRT3847_136763C.1
aatggataatgccacaattcactcataatgtaaattttttatattcttttagtaaatcaaaactaataccaactacacaggccaaactagtgctagaaaactattttcagggtgactgtgaaccaatgacaaattaatatccctagggacattgtattagtaaaagctaaatgggtgtttggtttgactgttttctgtttttattttcccagaaaacagaaaatggtgatgaaaatgtgtttggttgaatttttgaaaatattttcagtaaaaatgaaaacaggaaacaaccagaaaatgaaaacaataaaatctcgttttcagttgaattcgttttggataaaatgaaaatgcgatgacaaggaatgtaattttaaacaaatctaaaaatacaaaaaagacaagaagtcaatatatcataaattttcagtgtttttatttcttgaaaacagaaaacaagaagtcaaaccaaacatgttttcaaaattctaatcttttgaaaatgaaaacaattttcaggaaatgaaaacagaaaatgaaaataccaaccaaacacacctaaagctcacaatatttgcaatccaaaattgtcatcaagcagagcaca

SEQ ID NO: 40714 - DNA, 295 bp, Glycine max
  unsure (1)..(295): unsure at all n locations
  Clone ID: PAT_MRT3847_136764C.1
cgcatgcacgcgtacgtaagctcggaattcggctcgagngccntttcnncannaagncgtcctgnntcccttcagnattctgacaccntgtccagtcgtnntcagnggaganatgttnanngtgcttgacnaacaatatcnnggnnnngagcatacngnnnctgctccnnanantcatatgctgttaaccaggtttgtaactntgcctgaaatagcggatttttatnaagtacattttggtctctnaatngcttcntggttgtccactcattctngcantactgggntntantnn

SEQ ID NO: 40715 - DNA, 325 bp, Glycine max
  Clone ID: PAT_MRT3847_136765C.1
acgcgttcttgttgacatggcgagattacggacacagcttcgttttcgcacaagtcatattcgtggaaatgcaagaaggctatctctggcatctcgccaatgcgctacccgaattgtattagacagcccatatgatgctgggcaagtgtaaggaaagctctctctcgtaatgaatggctgcaaaaggctgatgttcctaccatagaacatatgggagagatctcattcgatgcagaggatgaagaacgctcccgatacaaatgatgacatggatctactgtagagcattgattagatgggcttacaaagagcatgtaaagctttg

SEQ ID NO: 40716 - DNA, 307 bp, Glycine max
  unsure (1)..(307): unsure at all n locations
  Clone ID: PAT_MRT3847_136766C.1
agggactggtctgacttcgtangccgagctatgacgtcgcaggcacaagcccggagtctagtcggagcccgccctcacttatttcctactcttttctctttttgttatgcgtgctcttgttgggctctggggggaattaattggcttttttcctatgaggggcatttggctaaacctttattttgggctatccattgtgcaagacaccaatttttcccttcttgcggttctaatctggaccctctacttttagttaagtgagtttgattatagtgatcctttgcccaacaggtcctttgtttgattc

SEQ ID NO: 40717 - DNA, 2291 bp, Glycine max
  Clone ID: PAT_MRT3847_136767C.1
ctctcttcatttaactctctcaactatgactttgctttccgcgcgattcaccagctaaaccaatttcaatttcttccccagacacacattctttttctttttccatgtctcaaatgatcagaaaatcaatggaatgaagaaaatgactatccatctatctatgtagtcttgctttcaataatatctacctagatattatattatcatctcttttcccagcacaagcaccggttatagaggctagcttctaacatgctgctttttggttttatatatatttgttttggcagtacctgcttcctcaaaactactattggttttggaatttgccccaggtagctagtttaggacacacgatttttttttctcttcaaaaatgatgtctgaagaaaccttttctgttcctcccaactccaccattagagccacctccttggttcatcatgttcatgttcaaccccagaacaagaagaaaacaaacaacacttgtcgcatagcggagcctcttctaataacttgtacttgagtaatagtattcagaacccacctcatcatcactacatgtcagccaccacactgttgcagaaagcggttcaaatgggttctacaaggatcagcgacaacgtatttggctccatcgtgggtaccaccaacagaaacaacaacaacaacaacaacaccaaccttgaggttcagaagctgaacgagttggtgagtatggaagctgggtgcaacaacaaccttggaggtggtggtgatgggtatttattatatgactcgtttggggttgtgaatggcaccaataagggttttggagcacatggtgatgatccgattggaaggcacacagcaagaattgtgggactagagagtacaaatgtgacagtggcacacttttctccaggaaagacgggtccactaggcatagagctttttgtgacgcattggctgaagaaagtgcgagggtaacaacagttccagcagctttaagcaacttgagaaacgatcatcatcatcatttgaccaatgctcaagcttcgaggatccctcagattaatttttcagggttccactcatcagatcaattattcggtggtggatcatcagaagcattattggcgaatgatcatcatcatcaacaacaaaagctaaggctaccactataactggatcatcaccaagtctattataaacctgaaaaacttcaccaccacaatgataagaagttataaaaaaaaccaaatggttgcactactaattcaggttcaggaccaaactctgtaactgatttagttcaaacaatgaacatgtttgggacaaagacagagtttttgaattaccgtaactctgaagcatcggatgcaagcgggaatagcacctcgaccatgctaccgacacacgaacagaatcaagtagttgaaattaagaaattgcactagcaaggaagccaagctgcttagaacatctagtacttggggagttcccaaactaggaacaacaatattcatgaagatgggtttatattgagtagcaccaagggtttggagcccatgctgatgcggcctttagaagagatggagagtggagtaccagacttaatgcagagcaaccccatacgttcaagtacttacaacaacgttgttgttgaggttcagaagctgaacgagttggtgagtgtggaagctgctgggtgcaccaacaacaaccttggaggtgggtatttattaaacgactcaaacaatagtaactcgtttgtggttgtgaatggcaccaacaagggtggtggtttggagcacatggtgatgccggtggatgaagagacacaacaagcatcaattatgggaaagcaattacactcatcactaagctcaaataacaagaatcaacaacttggtttaacaagagatttcttgggtgttggagatcataataatagtattgactctataagaagaccttttcttcaacaagaccttgttgaatttaatgcaatggggtcagcctcagcctcagcatcagtcatgaacctgcagagccagtacggtggacactactgctagtgttagctatagtttcagtttcaacttaatttcaaactttccaatttattgaaactgtatcttagagctaaagaaactagtgaagttgtgtcatagttatatatatatagctagccagctagtagtagccgctactctcttataaaccgaacagtatattataccgagttagaccgattgagaaattaattaagcaagttattgagtataaaaaaaagaacaggccgggag

SEQ ID NO: 40718 - DNA, 938 bp, Glycine max
  unsure (1)..(938): unsure at all n locations
  Clone ID: PAT_MRT3847_136768C.1
gttcagatcccagatagacacctctctctctctctctctctgcattattatggactctccgtttcttcttccgcttcttctcatcttcctcttcctctctcccactccctcctcctcctccattgataatttccaccaagcctttcccatcgttgaacctgatcctggtcacacaaaacttcgtctttcaagagaaggtttggaggctattgagaaaataaccaaccccattgcagcagtggcagtgattgggccgtatcgttctggaaaatcttttttgcttaatcaacttctctctctttcttgttacgaagggtttggtgttgggcacatgcgtgacaccaagacaaaaggaatatgggtttggggaacacctatagatttggatattaatggagtaagaacttctgtcttttaccttgatacagaaggatttgaaagtgttgggaagtccaatgtatatgatgatcggatatttgctttggcaactgtcttgagttctgtgctcatatataatttgcccgagacgatacgtgaagctgacatctctcgactctcttttgcggttgagcttgctgaagaattttatgggagagtgaagggtcaagatgttgcatttgaacctgctaagctcttatggctcatccaacgtgattttttgcaagggaatcggtgcaagaaatggtgaatgaagctcttagacatgttcccaatactgatgggaacaaaatattgtgcatcttgatgaactttttatatgtcaataatagtattatcttgaattatcaatgttgctctccttatccttttaatattgctttgtaaaacatcttttgngggataaattgtagttattaacttttgnttgtttgattcacaaattctgcacatactaaatttgcaaactacggtgtgttgaacagagtgaaggtaaaagc

SEQ ID NO: 40719 - DNA, 655 bp, Glycine max
  Clone ID: PAT_MRT3847_136769C.1
tatcagaattttacttatatctagtttcaatttacttggtaaagacttaataatcttgaacccttcaaccagcatatttcattttatttgttttataggttagactgaaatgttatctttgtgtattcagatacgtgaggctgacatctctcgactctcttttgcggttgagcttgctgaagaattttatgggaggtttgcatcttgatgaactttttatttgttaataatagtattatcttgaattatcaatgttgctctccttatccttttaatattgctttgtaaaacatcttttgggggataaattgtagttattaactttgtttgtttgattcacaaattctgcacatactaaatttgcaactacggtgtgttgaacagagtgaaggtaaaagctaagaccttagcgttgttaccattgatctaatcttcctttctttctatttctatttattttttatgcaaactgtcattgataatttgatttttgtttgaatgttcggatattttatagggtcaggatgttgcatttgaacctgctaagctcttatggctcatccaacgtgattttttgcgtaagttaatctgagacaaattagagactttgaattagggaaatatttgcttgagagttgagagtcagcccttcaat

SEQ ID NO: 40720 - DNA, 264 bp, Glycine max
  Clone ID: PAT_MRT3847_13676C.1
gcacgagctcctcgtcatcgagtgcaggcccggcaaccaccgcgagtggcgtcggaggctggaggcgcgcggtggaggtggaggtggacacaagcctggcacgtgggaggaactggagacccttctggaagggtacggagggtgcacggagtacgacgtgggtgacgtgcccaagctcgtggtggatacaaccgccaatcttcctttggaagagatgtgttccgctgcgctggacttcatcttcgctcacgctgctaagccaac

SEQ ID NO: 40721 - DNA, 1769 bp, Glycine max
  Clone ID: PAT_MRT3847_136770C.1
ccacgcgtccgaaaactcgcaactcaactcaataacacagtagcattattaccagtcccgatctgacgctgaagaatcatctgtggttgcttaaactcaaacacaactcaccaacacagttgttgcattatttctttttccaaaatccaagcagaaactcaactcaccaacacagttgcattattttctttccagatccaactcaaaattgcaatgggagtagaagatacagatatttgtatcatcaaggagccagatcatgttgtagtctattcagatggcatttcccatgattcaggtcatgaagctggaagtgatcatcacaatattacagagtcttatgaacaaatcaatgagactactgaacatcatagttcagaggagagtgcaaaggaatatgaggtgaaggaatgtacaacagaaatttctgttaaggtctctgatgtctctaatgttaaaaaatgtgaggataagttaacctcagattctgagggtgtcctcagtgagaaaagttttaaatctcacaaaacaaggggtaaacataagccacgagataccgggaagaatggatcaagacctcctgttacaggcagtgcccaaatcaggcccacagttccacaaccgttttccctagcaactgagaagcgtgcttcgatcgcaactcgtcctgcttttgaagaagacaacaagggcagtaacaagagaaaatctttgaacaaaaaaaatgtgctatctcccaatctgtttaaacagaatcagttgaaatctcctgtagtttcaagaatgccattgcaacctgataacaagaagcatcctgatgatgatgattcttgttcagttgcttcaataactgcagcttctgtgagatcaatcaagtccaggacaactgttgcttctgctcccgtgtttcggtctactcaacgtgcagaaaaacggaaggagttttatacaaaattagaggaaaagcagcaagcaatggaagctgagaagaatcaaagtgaagctaggaccaaggaagagatggaggaagctatcaagcagctaaggaagagtctaacttttaaagcaagccctatgccaagcttttaccatgaagggccccctcctaaggttgaattgaagaagcttccagccacgcgagcaaaatctccaaagctgggtcggcgaaagagcaacaatggtgcagttaatttatctgaaggggacaaggagaaaggagctggaatcaggagaaagcatcacacaccgaagaccaacaactatggtgataagagtgatgtaaatggcttatctgaccccaaaaacaagaccaagcatattgaaggaattaatgcaaccgaggtaactggacaagcaaacttggagattggcagccagtgaagttttcagtgagattagattctcatttttctaatttatatgtatccagggactgtggtcttgtttcttgcaacaagcatcttcactttgtttttccttttaacttatgagcacttgctgctgtgtgcattgtgtaattagtgaaagtgtttatttgtaatttatttcaaattatttgtaaaattcaatcatgttgctcataagagcaatttgagcatttgtttgtctgtctgaagtccaggatcagattgttttaagtcgccattaaataatgctgttcgattaacaataattatgtttcatttttgctaagctcttaaaccaaatttcaacaataactgaaaaactgctatttataatgtgaaaaactagctatttatcatattttt

SEQ ID NO: 40722 - DNA, 538 bp, Glycine max
  unsure (1)..(538): unsure at all n locations
  Clone ID: PAT_MRT3847_136771C.1
aaagcaacgacgacgatgatttttacttataaaaagtcatttgtatcacgactttcaatctagaacaatatctttacaaggtattattaagaaaatattttatctaacaaggtgttaagatatctttaaaaaggtatttagaaaaaaatggaatgaattttgctatttgtatttttttattcataagaataaaaaataatatgagaaatttataataatttacccattctattcaatcaaaattatatccttgacatgttgctatttgttttactaaagaaattactagatcaatgaaacaagcatgttaataactaattattttgtgtaacaactaatgtttttgcaacaaaaacaaaaataaccattatttggtataccgtctaaaagaaattatggtatacagtacattttgtacatacatcagttggacggcgcgcgaatagcgagctacccgccacctaaacaaattaacgacctataattaaaaacgaaaaaaaaaaatgcgatgcaattattgaaaanatgtaatgaatcg

SEQ ID NO: 40723 - DNA, 455 bp, Glycine max
  unsure (1)..(455): unsure at all n locations
  Clone ID: PAT_MRT3847_136772C.1
ggctcggggggcagcaccactacatttttttcttcttcttcttcttcttcttccatggagattgggtggccttccaatgtgagacacgtggcacatgtcacctttgatcgcttccatggctttctcggtttgcctgttgagttcgaacccgaagttcccaggagacctcccagcgctagtcttctgaagtgggtttggttcatcgtaacaaaatatgagaaaaatgagagtgcatatgtttttgggagtttcaacagaatctatgcagctttcttttgatgccagaggngaatagtgtacctacaatactgctgttaatgcaaagacatttgtatgcacaaggaggtctgcaggctgaaggaatcttcagaattaatgctgaaaatggtcaagaggaggtttgtgagggaacaattaaacagaggttgtagtaccagatggatttgatgtgcact

SEQ ID NO: 40724 - DNA, 248 bp, Glycine max
  Clone ID: PAT_MRT3847_136773C.1
gatagcacagtgtatatagttgtcaacatcgctcctctcattcttctccgcagagaagacatggctcctctctcgctagtgtaagctagattattagttttttagtgaggtgctgctgaaatccctaattcgactttccacttgattacgatccgttcacccttcttaggatggcaaatgctgcataagatttctcccaattcgggatttcacaggaggataaggataagcttgttggggaattgatc

SEQ ID NO: 40725 - DNA, 143 bp, Glycine max
  unsure (1)..(143): unsure at all n locations
  Clone ID: PAT_MRT3847_136774C.1
aatccagggtatctggtatgccagcttgagtcatagagtgtcttntttgttnnttnttttnancccttggtttcctngancccagccgtngtgatataccctgnccaatncnanaannaggaccgnaaggtgnatatgaccat

SEQ ID NO: 40726 - DNA, 181 bp, Glycine max
  Clone ID: PAT_MRT3847_136775C.1
ctactttctaccgacctaacacgagaggagaggtgagcaagagaggcaggtgtggggtctgcatctattgaatggtagcaaggcacagtgcatgagggtcgttcgcccgatcgagggctcttgccagagtttacgtgtagcatgctgccgctagctcaccaaatgctttctaatgcggcac

SEQ ID NO: 40727 - DNA, 475 bp, Glycine max
  Clone ID: PAT_MRT3847_136776C.1
actttctttttcttattaataaacaataagattacatcagaatatatataatatatgtgtacattatattaaactatgtacattatcttaaaccacatatattatctgtaaaatatgagtcatgcccaagatatcccacttgcttctttatgaataaatgaaaggcttgtttgttgtctttttcccgatgcacgctacgtacacaaattaaagaatcatatatctttaaactacaaaaagttgtaattagaataaataaaatgggtaatggggtatatatatatatatatatatatatatatatatatatatattatatatatatatataaacacacacatgtcatgttaattgggttcgtatctttggctttgcacagaacgtgcaacatgaggaaacaagagaagctctcctcctagcaacatggttcctcttcattcaatttctgttcacgacttttgcaacttttactcgt

SEQ ID NO: 40728 - DNA, 585 bp, Glycine max
  Clone ID: PAT_MRT3847_136777C.1
gtggtctatacgcgtatgcatcatcttctttggtgggcccgatgatcgtgaagccctagagctggggaagaaaatgattgaacacccagcagttaaagtacgtgttgtgaggtttgttgaaaaggatgacctgatgaatggaaatgacactgtgttaagcttctcacatgacgaaaatggtgacaagagttacagcttctccactgctaaaatgaaccaccagaaagaaaaggaattggatgagaaggccgtgggaaattttcgaagcaagtcgaatgaaatggtggaatatgttgagaaggttagtgagaacattgtggaagaagtaatagtaatagggagtagtggagattatgatcttataaggtggtgtctggttgctcaagagtggctactggttggatacttgtttgcagaagagaaagtggtatcccttatggatttccggtcacaggtttttgcaatatcattttttttgagatgctcattggatatagctatgaaaaattactgcgccaggctaaagcttgcaactctgtttctacaagcctgcataacattttgtttctcttggtgtgttttgca

SEQ ID NO: 40729 - DNA, 1254 bp, Glycine max
  Clone ID: PAT_MRT3847_136778C.1
tgacgacagaagggtacggctgcgagaagacgactgtagggtacggctgctagaagacgacagaagggtacggttgcgagaagactactgatggggatgcatataatcatattccgaactgtcctttcagtttcgctattccactgtgtgctctctgtgtggtgtggtcgctcactgcaacaacaacaacaacgaacgccaacgcaaacgcaaacgcgaataagagcgagaacattctcttcagctcaacccttttctttttcgatggctaatcggcacacgattattctaatgcagacctcgcagaacagagcaactaggacgttcatggattatgaatccataactcaggccatggatggcatatgtgcactgtatgaaaggaaactgaaggagttgaatccggctatcagaaatctctcttatgacattactgatctctacaacttcatagatggtcttgcggacatgagtgccctagtgtatgatagttcaattcacgcttacttgccgcatgatcgactgtggatcaagcaacgaacattccaacatttgaagaaattagcacactgattaacccctaaactattggcaatttaatgtaaagaaaatcgcaaaggctcgacctttctgttatgtgggctatgctccgttggctacgtaatatgaatactgcaaatgctggcacgtaattataatatcaacagctggtactgctttagtttcataaacaaatgattgtcgtcggcttggttattctaccttctatgtctagaagactgtcttttttaaagatcatcttgtagttgtaacattaaatagtaagttgcactgttgagttacctatccacacattatgattcacaaggtcttatgaatgctagttttgcgagtttgtattccacatgactaatcaaactaaaaaaaaaaaaaaaaaacggacaataacaagatagcaaacccactttaattctccacgacagtgtagtcccagtcaccgttgaaaaaatcaacgctctgttgaaggcttctaatgtctccgccgagtcttactggcccagccttttcgccaagctcgcccaaaataaaaacatcgaaaacctcattttgaacgccggcggtggtggggccgccgttgcatttgccgttcccgccggcggtggtggtggtgcctttactgcacaccgacccgccaccaaggaaataagggataaggtggaggtagaatgtgaccatgacatggggttcgtgctt

SEQ ID NO: 40730 - DNA, 731 bp, Glycine max
  unsure (1)..(731): unsure at all n locations
  Clone ID: PAT_MRT3847_136779C.1
ccggggtcgaaattagcaggagcaagcgaggttgactgacttggcatattcatataatcatattctgaactgtttttacagtttcgctattccactctgctgtgtgcgtgtggtcggtcactgcaaacgcaaaaaccagaacattctcttcagcttaacccttctttttcgatggctaatcggcacacgattattcttatgcagacctcgcagaacagagcaactaggacgttcatggattatgaatccataactcaggccatggatggcatatgtgcactgtatgaaaggaaactgaaggagttgaacccgaccataagaaatctctcgtatgacattactgatctctacaacttcatagatggtcttgcagacatgagtgccctagtgtatgatagttcaattcacgcttacatgccgcacgatcgacagtggattaagcaacgaactttccaacatctgaagaaattagcacactgattaatcccttaacttttggcaatttaatgtaaagaaaatcgagaatggccgagagcctgtctgttatgtgggctatatactccgttggctatgtaatacgaatattgcaaatgctggcaggtaattataatatcaacagctggtactgccttagtttcataaacaaatgattgtcgttggcatggttgtgtatcttctatgtctgcaagacttgtcttttcgaaatcntnnaatctgtagtgtaatattaa

SEQ ID NO: 40731 - DNA, 469 bp, Glycine max
  Clone ID: PAT_MRT3847_13677C.1
tcggaatcggctcgagtacggctgcgagaagacgacagaagggatctcaccagaagcatatacaattagctaaaaagtaagaccacattgctttactgatgtctggaaagtagaggaggtggaagagaaaattgtgccatgtatggagaggttgcagctggttctagtaatgaaagtttttatataatctacaaaaatttgcaattgcttaatgtaacagaatacaccaccaatcaattatataagtagttgcacttctttgaatctttatgtcataacataaatttaagctcttcaaaatggtaaaagagattgatggaaaaatttagtttttcaagtattagctaccctatgttctagttatgaaatacatgttttataattgccaagaatgatctcctacaatgtttcctttctttaattaatgtagattcacatctaccgatccacttatgcgatgaattcttga

SEQ ID NO: 40732 - DNA, 296 bp, Glycine max
  Clone ID: PAT_MRT3847_136780C.1
gaactatgtattgttaaaattaaagctacccttcaaagcccggggaagaaccacccaaagggggggaaaaaggaaaaagatcaaaagcaacacgggggggcgttaacggaaagaaaagaaggaaaataaaagggaaaaaagaaaggaaagaaggggaagatagggcgaagaaaaaagggccagggggggaacccgggagggcccggaagggatcgggggcccaccaatcggcaaacaaggtagccaggggaaaaatgacccaaatcctacacaaaggggaattacaaaaggcaaaa

SEQ ID NO: 40733 - DNA, 712 bp, Glycine max
  Clone ID: PAT_MRT3847_136781C.1
ctagtttgcttgatagttgattgataaccttcctgtaggtacgtaggttcgtttttatgcttttgggtcatgtcattccttacattatctctgggcttatggcagggaaaggaacccagtggatttcaacaagctggacacaattaggcaccagtttaaaggaagcagctcaaggcacatacataactcagttggaaaacaataccatccagtggaaacaggggaaaaggtgaaaggccaagaaatgtaatatgcttactattattacctttttagaattacagctatagcagaaaccttctgagcaagtaatggtggaggagactgcaatagcgccaaaagttaaaaatacaagcaactaaataattactgaaaccatatttagttttctagatttcacttaaaaattaacaaacagtagtataagattgagatgtcctatctgaaaattcaagtttaaatatctagatttacagagatgacactcaaatttatctatcttgcgtggcaaattctacatgcaaaggtgagtttggcacgcatcttgtgaaaattcaaagtgcaagttatatttatctgtggatgtaactgtaagtattgtacatcacccaactccaagcgtgtcaaaagtgtacatcatccaatattttggtcagacaaatttctgccaagggacaacattaaaaaagtttgcagatttatatactacaac

SEQ ID NO: 40734 - DNA, 1476 bp, Glycine max
  Clone ID: PAT_MRT3847_136782C.1
agcaaataatgcatgctgggcaattggagaattagcagttaaggttcatcaagaaatttctcctgttgttttaactgtaatttcatgcctggtcccaattcttcagcatgcggagggactcaacaagtcgcttatagaaaatagtgcaataacactggggaggcttgcatgggtctgtccggagcttgtatcaccacatatggagcatttcatgcaatcttggtgcactgctttgtcaatgatacgagatgatgttgagaaagaggatgcttttagaggtctatgtgctatggttaaagctaatccttctggagctctaagttcgctagtttgcatgtgcaaagccattgcaagttggcatgaaataaggagtgaagatttacacaatgaagtctgccaggtcttgcatgggtataagcagatgctgcgcaatggagcatgggaccagtgtatgtctgctttggagcctccagtaaaagaaaagctttcaaaatatcaagtataattcaattgtgagcattgtatctgtattgacctagttggtcattttgtgtgtggtcaagcaatattggagtcgcgattcatattgagcaggagctgagtctcggtccaagttttcagacagggtaccagtacttaatacaattcgtttgagcttgatgattacaggaagttccacaagccttcaagatctcatttgatgggagtttcccatgagaaatgtacaggggaatgattttcaacctttagaaatgcttgattctttgttgtcttaatagttaaagccttaattaaaggcttggagttttattcgacccttgtgttcagcatcacatttttccaatatttttagttttttaagttgataggttgtatcttggttacacagttttgttcccccagagagagagagagagagagaggggggggagggatatgatctgacttttagttttgagcatattcagttgttaaattgtttgtaagctgtaacatgaaaatcgatttcaattgtgttgcctcaggcagcgcatcagttaaattttgattgagacaataattagacttgtgtatggggagtgactttttttttttttaaactcagcccaaaggaaatattgttggcattattttcttatgaaaaaaaatctatatcaattccatttcaataatgtaatacataattataaataaaaataccaaataaaaaataaaaaaaaaaaaaaaaaaaaaaaaaaaaaaaaaaaaaaaaaaaaaaaaaggggggcccccccatataggaacccttccccccggaaattattccccccccggttcctgggggggtccccattttcctttagggggggccttaaaaaattggggataataaggggaataattttttcccggggaaaatttttttcccctcaaatttcccccaaaattttatgccccgagattaaaaggttaaacctcgggggtcccaaagggggg

SEQ ID NO: 40735 - DNA, 516 bp, Glycine max
  Clone ID: PAT_MRT3847_136783C.1
acaaaataaatttattgtaaaaatattattataactcaaaacaaacatgcactttcattatcattgcagttcactgttcgccactatgctatcctttattgtcacaagcatacaaatccaaccatttcccacctgatcacacatgggtttacaaacttctagggaaaaatttaaaatatcaaattaaaataacacgcccagtgactttgttttttacagaggggcaaaactctctctctctctctttctctgagcgcgggttccttgtatcatctaccatgttcgctaaagaaaaaaaaaacgattaagaattgaaaattggaagatacagtgtactgtaatacatacaaaaacaacacccttgagattgatttgtatttactacttacctaaacccagcaacaaaataaaatattgaaatctactcttgctgttgttgatgactccgacccatcataagattcataaccccctccaatccaacaagtttgataaatgattggaaagtcaaaggaa

SEQ ID NO: 40736 - DNA, 143 bp, Glycine max
  Clone ID: PAT_MRT3847_136784C.1
tatctctttgtctcttcggctggtcttggcatctccgcagcacgaccacgtaacatacagatgataccaggtactatctctctcgacagagagcctggagcggagaaaaaaaaccagcgactaacaaggcggttttagcagcg

SEQ ID NO: 40737 - DNA, 582 bp, Glycine max
  unsure (1)..(582): unsure at all n locations
  Clone ID: PAT_MRT3847_136785C.1
ctctctctctctctctctctctctctctctctctctctctctctctctctctctctctctcgcacgataagaatacatctcacactctaaatctcaaataatataagaagagatagacatcatggtagatacccaatggtacacttattgaaatacacactagagcgatttcaagaacgagaacagctagtggaaacggccgatgtaaaatcgacagaaaatgagatgcagatgagatctgaggggaagaattttgatggatagacagactatgcagaatatagattgaagagaagagcggaggaatagggnggcagctctcgcggagctgagaacgccntgtcggatgaggaagagtctaaggcggtggcggaaaatatcagaaagtcaaaggggagagccagcttgcaaaacgcanaaaatagacaagaaaaaggaggttcctgtacacaaaagccgcagaaaagaaccgattttgaggaggaaagtgggacgaaaagttacaagggatccatgggaaaaaaatctgctttaaacaaattaaaaaggctcagctaactagtccacctgtnaatctcaata

SEQ ID NO: 40738 - DNA, 353 bp, Glycine max
  Clone ID: PAT_MRT3847_136786C.1
gttggaaaaggaggcaaattgaatagagacagggtaaacaagttgaggtgtaattaaaaatatgtgcaatatactaatctaatattctccttctcatttgtaataataataaagtcatgtgctgatgtagtaaaactagtacaagcctagtgatagccatagtgccatggctgctaacagcagaccaagaaggactaccaggaggccaacatacctctgcgattacgcataagggacagatcaagaaaaggactaggatccaaaatatttccttaatctcgttaacaattctgttacaacaaattcacaaattctgttatttgtagttagtgcattcccaggtggccaaggat

SEQ ID NO: 40739 - DNA, 386 bp, Glycine max
  unsure (1)..(386): unsure at all n locations
  Clone ID: PAT_MRT3847_136787C.1
ttnntnnnnnnnnaaaaggagcaaaaaaatttttttcccagttgttggaaaaaataacattttttggaagttttaaaaaaaaagttaagggggttgggtcctttttttaaaggggggttaagacctcctcccttaaatttcgaaccgaaaggaacttcttaaatgtggcaaaaccccttgctttgaaatttccgggggtttttttgacattaattttggaatggccccaaaattttattgttttttaaaaaatgattctttttgtttttaagctttaccttagttcccccttttttggggaaaaaaaccgttttccttttttttaaagcccaaggaatttatttcccattctttctgggaaaggcgggggcaaaaggaattatttt

SEQ ID NO: 40740 - DNA, 254 bp, Glycine max
  Clone ID: PAT_MRT3847_136788C.1
accagattgacttcaccaaattgtagggttcagttagatttatagggtccagttagagatatagtttgtaggatattagttatttgttgttgatagttagttactaattggatgatgcctataaatggcttcatgtagacttgatgtaataacttttactcattcaatcaaatagcaatttgactttaaaaaaaaaaaaaaaaaaaaaaaaaaaaaaaaaaaaaaaaaaaaaaaaaaaaaaaaaaaaaaaaaaa

SEQ ID NO: 40741 - DNA, 497 bp, Glycine max
  unsure (1)..(497): unsure at all n locations
  Clone ID: PAT_MRT3847_136789C.1
cagttttattatttagattttgatgtgttcttctgatttccgagacccactgtattgtttccctctgtttctcttctccctttattccctgcctgccatttttatttttatttcttaaccatttatttatttaattagtgcttccccctcctccattctcattctccctgcatcacatacacacatcattctctctctccttttgacctaaatcaccttctgctgattccgcgcatttttctgtgacgaattgctcccaaattgtttcggttaacagtgctcgtgattttggtactattgcaattaggagtgattgcgaaggtgcactgcatgttcgattgttgaggagagggggtcctctgttccgaggattcccgtcgctggttgttcagattcgaagttggctctaaattttcgttgaggaaatgtttgcttctgttgcggatggngcatttgagagagtggagtttcaagaccctttttgatttcacagcgct

SEQ ID NO: 40742 - DNA, 193 bp, Glycine max
  Clone ID: PAT_MRT3847_13678C.1
aaattaccacttttctctaccaagtcccacaaaagcttatatcctctctgctcccgcgctccgcgttccgcagacatctgttcggtagatcgactgactccatgagaaacggagtataacaacttccatacagctccctccgacccgccacccaaaacacctcctgcggtaccctcctgacatgccctccata

SEQ ID NO: 40743 - DNA, 483 bp, Glycine max
  Clone ID: PAT_MRT3847_136790C.1
gaattgttgagggtcttgggacttcaagaagaagagggaagttccctagaatttcttcgaagaggctacaaggtgttctcttgttagataatcagtttctattaactatatgcatgcttgtgtcttttgttagtgttctttttgtccttggtaaaatttgcattttcccgtgatcctacactgcatcctttataatctttctgtcctacttaagaaccaaaatacagtttcaattctttacagtctgttcacaaagttgaggctgcagaagtttccatgggtcttcagattttgttctatttctcttgttctatttgtttatatgaaaatatcaatggttgtactataaggtaggtctgcattcaaaataagatctaagggcagacacactgatttttgtgaaacttcttgtgggttttatgtactgttattcttaattttattattcttacatgcacaagtaatcaccttttttacatattt

SEQ ID NO: 40744 - DNA, 428 bp, Glycine max
  unsure (1)..(428): unsure at all n locations
  Clone ID: PAT_MRT3847_136791C.1
tcgcacatgctaacgcacgtgcacacactaacctctcatatacaacacttgcatatatggaccaattacaaaatggaaactttcttggttgattggtcatgtttcaagaatcttatattaaacttcaataggttatgttaatcacgtcataccatgatgctttataacgtatgctttgttgcatattcctccttcctctattctaaaccctttatccatttgcattaatatctgtctctttgatggctgcaggtgtatctgcagcaatgaatgagctacgtccatgtgccccaataagtctaaaacatgtccttgcccaagaattgattaagggattacaggctgtttctgattcattgttgctgtacaatacaactcgagttctaaggtctaatgagtcangacttttcctctcactctgttgggca

SEQ ID NO: 40745 - DNA, 711 bp, Glycine max
  unsure (1)..(711): unsure at all n locations
  Clone ID: PAT_MRT3847_136792C.1
cgacgcgtccgtacggctgcgagaagacgacagaagggggtcgttacaaattactacacactgttccaatgggtgaagaccgatccgaaatagtgttcttcgatgtggagaccagcgttcccacccgaacggggcagggttttgcgcttctggaattcggcgccattttggtttgccccaaaacgctcacggagcttcggaattactctactctcgttcgtcccgccaacctctccgtcatctcccccttgtcggagcgctgcaatggcatcaccgccgccgccgtctccgccgcccctaccttcgccgacattgctcacctcgtttacgacctcctccacgggaggatttgggcggggcataatatcatacgattcgactgtgttcggattagagatgcgtttgctgagattaatcagccaccgcctgaacctaaggggaccattgactcgctggttttgttgactcaaaagtttggtagaagagctggtgacatgaagatggctactcttgctacttattttgggcttggacgccagacacataggagcttggatgatgttcggatgaatcttgaagtcctcaaatactgtgcaacagttctattctttggagtcaagtctcccagatatattcactgcaaatagttggngtttaccaaatgctactacaagaagccgcagtaatgggaaatctccatcacagtggggc

SEQ ID NO: 40746 - DNA, 532 bp, Glycine max
  Clone ID: PAT_MRT3847_136793C.1
tttttgttttttttttttttttttttttttttttttttttttttttttttagggccaaaggatatatttatatttttgggggttctgtcacaggggtagccaaattaaaatatgagccccggtatagggacaggctttttcctaggtgactcttaaaccaatggtttcactgggttaaacggccccaaacaggattttgggactggtcactatcgggaaagtaatttggatggggggaaaatttcaagctgggctatgttttcaacgaaaagttttttttttagcgggggggggggttctttcatcacggcctaaaaatccctggtggaggggtgcataaaaagcccttggtgaccccttaccttgaaagttatgccataaaaaaaaacaaaagctggctcattttctggaaaaaattttaaaaaaggtgctccaacccaattggggggcttgactggttcaaaaacaaacatttgaatccacctgtttgtgaagaaaacccccacaactggaaatggggattcccacacgg

SEQ ID NO: 40747 - DNA, 312 bp, Glycine max
  Clone ID: PAT_MRT3847_136794C.1
caaaggggggaaacttcgattatcctcgttttttcataaaagggaaacgggtcaccattataagcccctaaggggccatgacaatatcctataagagataacaaacccgatccttttgttgaaccttttccaaagacttttggtgcagggccacccacagcaggggattcccattttacaataaaaaggtttatcttaagacctcaataatgggaacaggaaaacttcttcaccccaatatcattttttgcatattaacatggaaacccaccagacaaaagaattgcttttaaaagtctcactgatggctaa

SEQ ID NO: 40748 - DNA, 281 bp, Glycine max
  Clone ID: PAT_MRT3847_136795C.1
tcaaccaagagaacccagaagcttagcagaaagacctttaagggggaccacactatgctgggaggcatcacagacatgatgctaagatcacatactagctcaaggaacagaatcctcactcagaggcaatcaatagtgccattggtcgtaggtggcacatgaccactcactaacctgtttgaggaaggagaaggaggaatcctaggacaaagcgtaagcactcccacggcctgcagtcaaagctcttcaggttagtgagcaccgcgcccaattctaggtcc

SEQ ID NO: 40749 - DNA, 424 bp, Glycine max
  Clone ID: PAT_MRT3847_136796C.1
aaaagatgttgagcaactacagttacggttacagctggagagatccatgcgcattctgcgtgagggggcgatgggtggagcctcaagtactttatctcctggacacaggcactttactgcccagacaaaagacttgattgctgaaattgagttgcttgaagaagaggttataaaccgtgagcagcaagtactttctctgtacaggagtatttttgaacagtgtgttagccggtcaacttctcaacaaagttctgctgttgcttcacctgctcatacaaggcaaggatccaagaagcatccgagtataatttcaagtgcattctgttcatcaaaaaaattccctctacgaaccctgcaaggtctagtttctaataatgactcgaggaataaaaattttgggtctaatcatggtcctttatcacgt

SEQ ID NO: 40750 - DNA, 324 bp, Glycine max
  Clone ID: PAT_MRT3847_136797C.1
gctgagagagcgcgctgcggcagcaagtcctatcagtgtaagacagatgctcgtaatgaagacgatcttgaacaatgagacaatgaatattcccgacagcatgagcataacggatcacgctacagttatcgaggtagcgggaactcgtgtaaaactcgtgctagacttacaccgtctgaacctggacttgcaacttattaccgacgatggccgccaaaggaagctcaagagtgacacttggcaaggatctcgtaaaagctccatcgtcattcgaaccgcactcaggcacgtttagaatctgaacaccctaataaccaatggata

SEQ ID NO: 40751 - DNA, 1235 bp, Glycine max
  Clone ID: PAT_MRT3847_136798C.1
aaaactgtctctgatgatgacaaggctggcagtagtggtcagaaaattgggagtggtggcattgtctgtgaaaactgtttctgatgatgacaaggctggcagtagtggtgctgctgctgctaattctccttctatggctagacaaaccaagaacagatatgcacctagcaacgctactgtggcaatcaacctcaaattgaagccggcatcaaatctgaaatggcatagagttttgtttaaaattagtggctctgcattggctggaaactgccagaacattgaccccaaggtggcaatgcagattgctagggaagtggcaacaacttgccgccttggggtggaggtggccattgttgttggtggtcgtaacttcttttgtggagatgcatgggtgtctgctaccgggttggatagacctatggcttaccaaataggtatgatgggaacagttatgaattctattttgcttcaatctgctttggaaaagctgggtgttcagacacgtgttcagtttgcttccttctgctccggaggtgccgggtgttcaagcacgtgttcagagtacattctcgatgccagaggttgctgaaccatatagcaggcaacgagctattacacatcttgaaaaaggaagggttgtcatatttggtggtgtcggtgctggcactcgaaatccactttttaccactgatacagctgcagctcgcggtctttctgagcttaatgctgatgcggttctgaaaggtactaatgtgaatggcgtctttgactgccatccccgtaatgataatataacactcgatcacatttcctttagggaagttgtttctaggggcgtcacctccatggacatgatggcgctggcatattgtgaagagaatggaatacctgttgtagtcttcaacgtgcttgaaccggggaatgtttcaagagcattatgtggagatcaagttggcactttgattgatcaaactggtagagtggagcattagcttccaagttaatcgtgcatgatttggttgtaatcagattatggcgtcacttaatatttacacaagggatcccttgatttgtttctgtattgtttgttttttaattgaggcgttgcctgttagctaatgtatttaccgcgcactactgattcattagatttaccacacatgtaacttaagtctgaaattttgtacttatttaactaatgttgatatgataatatatttgacatatttacactt

SEQ ID NO: 40752 - DNA, 616 bp, Glycine max
  unsure (1)..(616): unsure at all n locations
  Clone ID: PAT_MRT3847_136799C.1
ccacgcgtccgtacggctgcgagaagacgacaganagggtaattgggagtggtggcattgccactagtcactggcattggtttaagaagattgaagctattgttggcaactctctgtctgtgaaaactgtttctgatgatgataaggctggcagtagtggtggtggtgctaattctccttctatggctagacaccctaagaacagatatgcacctagcaatgctaccgtggcaaccaacctcaaaccaaagccagcgtcaaatctaaaatggcatagagttttgtttaaaattagtggctctgcattggctggaaactgccagaacattgaccccaaggtggcaatgcagattactagggaagtggcaacagcttgccgccttggggtggaggtggccattgttgttggtggtcgtaacttcttttgtggagatgcatgggtgtctgctaccgggttagatagacctacggcataccaaataggtatgatggcaacagttatgaattctattttgcttcaatctgctttggaaaagctgggtgttcaagcacgtgttcagagtacattctcgatgccagaggttgctgaaccatatagcaggcaacgagctattag

SEQ ID NO: 40753 - DNA, 580 bp, Glycine max
  Clone ID: PAT_MRT3847_13679C.1
cactttcattctctatcttatttccacccttcttattcttgtttttgattctgtggcttccattgaaggttttggtgagaattatgacacagcctctcttaaacgaagcagctttccaaaggatttcatatttggtacatcatcctctgcatatcagtatgaaggtgcaacgaataaaggtggcagaggtccaagtatttgggacactttcactcagaaatacccaaaaaaaataaaggaccaaagcaacggacaaattgctgtcgattcataccatcgtttcaaggaagatgtgcagataatgaatgacatagggtttgatgcttatagattctccatctcatggtctaggctactaccaggtgggaacttatctagtggaataaacactcgtgctatcatctattacgacaaccttatcaacgaacttatatcgaaaggtttaaagcctttcgtaacactactccattacgatcatccccaaagcatagaagatgcatatggtggctttttgagcccaaaagtagtgaaggatttcacggactatgcagaggtgtgcttcaaagcatttggtgacaga

SEQ ID NO: 40754 - DNA, 614 bp, Glycine max
  Clone ID: PAT_MRT3847_1367C.1
ggaggcaatagaggtcattagagaaacagctatggaaggagaaaatggaaagaagctgaaaatactgtgcctccacggattcagaacaagtgggagttttcttaaaaagcaaatcagcaaatgggatccttctctattcattcaatttgatatggttttcccagatggtaaataccctgctggagggaagtctgacatagaaggcatcttccctccaccttactatgagtggtttcaattcgaaaaggacttcacagtgtactttaacttggaagaatgcatctcatacttatgcgattatattacagccaatggtccctttgatggcttccttggcttctcacagggtgcaactctttcagcacttttgataggttaccaggcacagggaaaggtgctaaaggagcatccacccataaaatttttcatatcaatatcaggaagcaaattcagagatcccagcatatgcgatgttgcctacaaagaccccatcaaagctaaatctgttcacttcattggggaaaaagattggctgaaactgccttcagaggatctagcgtctgcatttgacaaacccttcataataaggcatccccaaggtcacaccgtcccac

SEQ ID NO: 40755 - DNA, 347 bp, Glycine max
  Clone ID: PAT_MRT3847_136800C.1
gggaaaaaaaattttaaagcaatttttgggttggtttcattaccttttaattctcaaaagcaagccaaataatttttacaaaggaaaaacttatttccttttcccccccttataaaatcaaaattaaagaaatttcaaaaattgcttcctttagccaaaaattacaacttggttttcccctaaattcaacaaaaaaataacccttaaaaaacatttcacccttttttttttaaacctttttggggaaccctttgggggatttcccccagggggaattgctgtacaatttgggggccttcccttcattaaaacaagtttagggaattatagggacctttttttttgaa

SEQ ID NO: 40756 - DNA, 328 bp, Glycine max
  Clone ID: PAT_MRT3847_136801C.1
gaggaaaaggatttaaaattataaggcggggttcataattcagattagccggactttattcagaagcgaccaatttcccaacatttaaaaaaaaaaaaggagccaccctgagcttaacacacccaccacaaggccaaaacacttggacttggtgaaagggaagacatgaccactttattttaagggtggttggttaacacaaaacacccgagtgcgcgaaaacccttccaggcattattccttaggttttagcttcccaataataggttatcattattcctaaataaggggtatttctggttggagcttggtttcccaacaccttaat

SEQ ID NO: 40757 - DNA, 301 bp, Glycine max
  Clone ID: PAT_MRT3847_136802C.1
tctctgatgcagagaagacgacagtagggcttcccctcgcgaaacgcgcgaatcggaaactgattcgagaccaccatcctccgttcgagcggcgccggcgcaacggcgccttcggatcccgaatactccatgccgaagatgtctaactccggcaagtgctccgggcggcgtattcaccagccgtggagcgcgactagccagcgcgtggttatcatgcactgataccaaatccaatcaccccaagcaagatcttgatggcatggtgcagggactaactgactggagctactagctttaggtc

SEQ ID NO: 40758 - DNA, 356 bp, Glycine max
  Clone ID: PAT_MRT3847_136803C.1
gtagatgttttatttccctccttcccttattttcgaataccacccttctaacactggcgggactcactgggcatggggggaacgttaaaactgacactcgtgctcaaaccccattggcctaacaatggcacgctccattggttgacgctcccttcacattcatgtccaccaaaacccgttatattccccaccctaccctaaccctaaccctaaccctaacccctccccctccaccaccctttccttccacctccacataagacccttcctcttcttgaaaaaacacggttccaaaaaactcgcccccaacacccacctcttttggaacctctacaagaccaaattccgggccaccc

SEQ ID NO: 40759 - DNA, 311 bp, Glycine max
  Clone ID: PAT_MRT3847_136804C.1
aaaaagaggcccaaaatttttattcagtggaccaaaaccggcaaaaaaggggttattctaaaaatttgaacacgcccggggggggggggttttttattttaagccccatgctaaaaaaagcttttaagggggaatctaaaaaaacccttttaaaacaaaatttggaaaaaggggaaagatccccagatttgggaattaaaaaaccggaaaatattataaaacccggggaacaaaaaaagtatttcatcacccataaggccctggttttcgggatcaatattctcaaaaaaaacccttaggggcaatttttt

SEQ ID NO: 40760 - DNA, 573 bp, Glycine max
  Clone ID: PAT_MRT3847_136805C.1
aagtccattagcattggtctggcagagaagttcgtggaactgtaaatattaagacaaaggatacaatctagatttgatatagattaaagacagccgtttgtgttgccttgtctttgttttttgattggtcttgatttagtaaagtggcaggcattgttcttgttctattgaattgacatttaaaaaaaaaaagaaaaaatattattttgaggagtcagaaatgagaaaaaaaaaaaagtgctaactggaaaagtagcacattgagtcctgacagtagtttgaaaatgttttgataactgctaattgaccgtagtgtgatctgattactgagtagttttgaatattgataaactaatagaaaaaaaaaaaaaaaaaaaaaaaaaaaaaaaaaaaaaaagaaagaaaaaaaaaaaaaaaacaaaaataaaaaacaaaaggaaggaaaaagaaataaaatattgtttagggtaataaaaattaatttatttggtggtagtttttaaaaaaagggggggggtaaaaaaatggggttactaaactaattggggtgggagaaaatcaatcctttttttt

SEQ ID NO: 40761 - DNA, 961 bp, Glycine max
  Clone ID: PAT_MRT3847_136806C.1
aattcggctcgagggcgtgagagcacagcagtgtacgaaatgcctccgcggcggtgcacggcggcgtattcggcagtggcgcagatgggcagcaacacgagcgagagcgacgcggaggagctggtgatgcggtgcctctcgtgcgaggaggagtacgacgtggacgactcgggaacctgcagggagtgctaccaggaggccaacgaggccgaggaggagctccgccacgagatcgaggagctcaaatccaaagtctccttcctcactctcccctctcccaatcttaacgcttccaccgccgatgtcgtcctcgttcccgtcgacgactccgacgacgctcccattcccgctcacaagcatcttctggttagtcgctttcttctcttcagagcaatgctcaagaatgatatgacagaaaggcggagtggcaccatcaagatttctgacgtatcatatgataccttcatgctttgttaattattatcactgctgagcgtccctgataacatttggatgaacctgttggtttagtattttccatataatctttcaattgagacgaagcatgcgtgttgctctccaattttaagtggtcactgtatttttttccggcaaatgtttagtttttcttagtagcaggcatcaaacccgcgacctttcccccttcccctctttcttaacctctcaaccaaccttatatctccggtttaagtggttactgtgatcacagtgtccgtggtctgtgatttagttttgtccaattgattttttcattgatcctcgtttgtgctgattttttttatatatacgaaaaattgaagttatgtgtgaaaggtttatgaaatcaatttgtgattctctaatgaaccatgtgtatgtaagctatggtcttgctgttttttacctgtgtggattaggtttcatgcgtatctggcatgttttcctgaaggggggaaaaatg

SEQ ID NO: 40762 - DNA, 1434 bp, Glycine max
  Clone ID: PAT_MRT3847_136807C.1
gtcactgcctgtgctgtgtgctgtgctgtgttgcgttgtgtccattcccccgaaaacgagaaggagaaaatgaaatgggatatgcagatggaggaaatcgaagcgattatggagaaaatttgggacctccacgacaagctcagcgacgccattcactccatctccagatcccactttctcacttccgtcaaaatcctcaaaaacaactctccaccgcaccttcccaacgccgccgcgccggatgaccgctcttccggtttcgttttcgtcaaggacttcaggcccgccgacaacgacagtgacggcgactccgccgtccgcgaagccaagagcctcaacgccatccggtccgccctcgagaacctcgaagaccagctcgagttcttccatactatacaaacccagcagtgtgttgagagagatgctgcaattgcacgtttagaacagagcagaattgttcttgcagtgaggctggcagaacaccgtggtaagaagtataaagtcattgaagaagctcttgcttttattggagatgtacgtgatgcaggcagccttgttgcacctgatattttctatggacaaccaaactgttctgctgagaatatagcgactgagaaagcaaagagatctaatattcttatcaatatttttatctcaagtttcaattttgtgaagagatctcttggattggatcatatgggtggaatagtgggcaatgctgcattggttgcagttagcatgatagctttgcttcatttacatcaggtaactaatcatgagcagccatttggacaagaaaatactgttcacagaaacagtaccgtgagaagaacgagattggttggttcttcatccgaagcccattccagtaatttggatgtattgttagccagaggttaggattaaacttctatctcgtgatgaaatgatgagcaggttattttcagtgttctctttttttttttccttttttgtgctcttgttcctttttatccctcggttataaagaaggcatgagacctggtgttgtgaagggaggatagtctaaagcggaggcaaagcttagtgtcacttgtgctaactgctaaggctcttgagcgcgtcttcttggtttttgttgccaccaaaatttttgaaagtggcattatagttgatctgaaaaggtgcaagatgtagtttgtgtttgctgaattctttgttgaggtgcaggtgcttgaagtattagagttagttgaaagttaatacaaatgtatcttctttctgctaggtagattcctgcgtaatttttgccaacttttgttgatggaatgtgaatgtcctatgcaaatattttggtgtattatttttgaagtattatgtgaatacttttacgttgcaatgaaggaaatattttggtgttacctttaaagaaagtgattatgcggtattgttggt

SEQ ID NO: 40763 - DNA, 568 bp, Glycine max
  unsure (1)..(568): unsure at all n locations
  Clone ID: PAT_MRT3847_136808C.1
cgtcgctgctccgtaccagtttcactgcataaatttgagagaaaactctgcaaacatgttggtttatcaggacctccttacaggtaaactaatctctctcttttttttcctatcgcagcttttccttgtcgatctattgccaaagatctgcttatgttgcgcttctgatttttccattgtagagtattaaacttttatcgacgcttggatctggctttttttcttctcgatttaattactgattgtggacaagcgtttgtttcacgcgtatctgattattttattattttatttcttgtcgttaattatagctaggttattgatttttaccgatgttgtttgatttgattaacgtaaaacgctttgattttcaatagttatcggaagcctttagtcagttattgtgagttccaggtttttattggttttattggttttaatagtattgcctatgatncgagtgataatttaaagctagactaattctctgctttacatattaagtgtgggtgggtgtataaaatattatttatgaaggaattttgntttgtgccattctttgatttta

SEQ ID NO: 40764 - DNA, 744 bp, Glycine max
  unsure (1)..(744): unsure at all n locations
  Clone ID: PAT_MRT3847_136809C.1
ccacgcgtccgcggacgcgtagacgaaaaggagaagatgaaatgggatatgcagatggaggaaatcgaagcgattatggagaaaatttgggacctccacgataagctcagcgacgccattcactccgtctccagatcccactttctcacttccgtcaaaaccctcaaactcaacaactctccaccgcaccttcccaacgccgccgtcgccgctgccgatgaccgctcctccggtttcgttttcgtcaaggactttagaccgctcgccgtcgccgataacgacaacgatgacgatgactccgccgtccgcgaagccaagagcctcaacgccatccggaccgccctcgagaacctcgaagaccagctcgagttcttccatactattcaaacccagcagcgtgttgagagagatgccgcaattgcacgcttagaacagagcagaattgttcttgcaatgaggctggcagaacaccgtggtaaaaagtataaagtcattgaagaagctcttgcttttattggagatgtacatgatgcaggcagccttgttgcgcctgatgttttctatggacaaccaaactgttgttctgctgagaatttagcgactgagaaagtgaagagatctaatattcttatcaatattttttgtctcaagtttcaattntgtgaagagatctcttggattggatcatatgggttggaatagtggggcatgctgcattnggttgcaggtagcatgatagctttg

SEQ ID NO: 40765 - DNA, 217 bp, Glycine max
  Clone ID: PAT_MRT3847_13680C.1
cccacacttccgctctagaaaatttccaatgtccaccaccacaccctattttctaggcggtattattattatcttcacacacttcactctctctaactcttctctcgaatctaccaccgcaatggccaacgctaccgagaaactctccgctctcataaaagccggcgtcagatcgaacgaaatcactcagaatgtgaagaacggattcatcagcctc

SEQ ID NO: 40766 - DNA, 287 bp, Glycine max
  Clone ID: PAT_MRT3847_136810C.1
gctcctcatatctcatcataaggatacgcacagcacgcgggatagggaagaaaaggcgcgcttctgactaaaatagagcctttgccagtatcttaaccgactgctatttgaggtgcaaaaactgaacactctgagttctaacaccactagtcctatgctgacgcgactcatagaaatctgtaagaggctcagatctctggatgacgactgtgcttttgcgtttgagaactagtatgtaatattttattcgctcagccgacgcccattactctgtgcaatgagtgagt

SEQ ID NO: 40767 - DNA, 323 bp, Glycine max
  Clone ID: PAT_MRT3847_136811C.1
ctcgagccgtcgaaatcgaatacagagatcgatgcaacaattttcagactcttggttctcatttatctatatacacaggtctatgatcatgcgctggccagacaagagcgattagggttgtggttcggtgtttttcttaagcttgagatcaggattaatttcagaggttcagcgacatgacacggatatcttctacatggtaatggacatcaccaaacaacaacggagcagcctactttgccgtctaccctgcgcttgtacatattgtttcagcccaacatgagaatcttggttactgcacgaactgcattctttgcgtctca

SEQ ID NO: 40768 - DNA, 204 bp, Glycine max
  Clone ID: PAT_MRT3847_136812C.1
cgacgggggtgtcgagttcacttaacatatacgagattctggtgtgttgtgtgtgcgtactctctgtttaatttgtgtttgttcgttgcttcgaaactttacagttgaacagagtaatgatgactgaagtcctgcctatgtgtcgcgattgagtgcttcgtgtgcacatggcttgtcggttagaagctgcggccccactggctg

SEQ ID NO: 40769 - DNA, 206 bp, Glycine max
  unsure (1)..(206): unsure at all n locations
  Clone ID: PAT_MRT3847_136813C.1
ccaaaaaaaaaaaaaaaaatcaatcatgaatgacaatagaaaaaatcaaatgcttgctagcctattgagccanccnngctcaattttgtcttcctatttgactggcccatggaaagttcnnaagatatcagatgatcttttgaaccccatctgctgaaatactangaacaaaggactatnncattggatgctcccatcacccaaga

SEQ ID NO: 40770 - DNA, 276 bp, Glycine max
  unsure (1)..(276): unsure at all n locations
  Clone ID: PAT_MRT3847_136814C.1
ctccttctcaaactagtaatatatactattantncatgcattccattcctatatatttcataatgggngttttcacattcnaggatgnnaccacntctcctgnggctcctgctaccctttacaaagctctagttacggatgctgacaagtcatcccaaaggctgttnacgccttcnggagtgttgaaaacgttgagggnaatggtggccccggaaccatcaagaagatcatttccttgaggatggagaaaccaagtttgtgttgcacaaaatagaa

SEQ ID NO: 40771 - DNA, 368 bp, Glycine max
  Clone ID: PAT_MRT3847_136815C.1
tgtttttttacgagtacaatggcaaataaaatttagttatcagtcatgacgcaaatgaaccagactttgctgaaatgatcgaaagtgaaaaggcaaacacgtctgaagaggcaacagctaacaatgctgagtctgagggcagagctggagacgatgttagtggaaccgaggagcctgtgcatgggaatgctctgcattttatgcccacaccgcacaacgtactctgcccagggactgactggcttggaacctgcattcacacattcaaggctcgctcctagtctttagagacgattgaccatatgaatcgtgaccatacatggtgggatgaactgcctctttgagaaccagatcaatcggaggcacat

SEQ ID NO: 40772 - DNA, 211 bp, Glycine max
  Clone ID: PAT_MRT3847_136816C.1
tgcttactgagaacatccctgaccccaaattcaagggggcaaaaaaactgatacacaaactttcatttcatttacacatgactgcatagacttcaaagcacagtaacttgttgaggagctgatgcttatttataaatcactagggaacatacaaacatcggagcaggaaaaggcacctaaaagcaagaggaacgcggggaatgtggtaaaa

SEQ ID NO: 40773 - DNA, 784 bp, Glycine max
  Clone ID: PAT_MRT3847_136817C.1
gtttccatcgcaacgctccatcatcctcatcgaagattttatgattcatccaacacactctcacggcataaataaacgacgtcgttatcgcaataattcttcgtcatcggcgatttattaaaatcaaacgcctactgaaacgacatcgtcaccattgcgattctcatcggtgattctgattcatctaattcacgcgtggaacgtaactttttcgaaacgacgtcgttgtcgtagcaatgccgttcgcgcgatgcaacagccagattccggcgccgctgccgtcgccgattccgaccgggagaggcacgcggtccgccgcgaacgagatcttcagccagtttctcgagaagacgctgcagatccccgagctgacgctgccgggaccgcacctcccgcccgcgccggcggagatcgacttccggtcgctgactcttgtctccaccgatctgatgctgcgctctgccagggagttcggcgcgttccgaatccggtgccacgggatctccggcagcgaactcggaaccatggcggacgaagccgaacgcgtcttccagaaatcgcgaaacgtcgtcgtcgtggagcgcaacggaactggcggagagatgattccctgtgttcgctccagcaaaggtgcactggaattcgccgctcagacgatgaccggcgaccaaacgtcatcggaacttttgggttcccttcgcgtacgttcccacgcgcttggattccgtaggtgtgcttgtgtctctggcgcttcctcacgaaacttctagcgtgcgggaggagc

SEQ ID NO: 40774 - DNA, 297 bp, Glycine max
  Clone ID: PAT_MRT3847_136818C.1
tcctcaattttccccagaaaaaggttctattttacattgggccttgggctgaaataagaacctttaattctgtgagggaattgcatgcccagattatcaaaatgccaaaaaagaggaacttggttacaattgattgaagcattattagaaactactttcaatttggagactttgaatcaacaacaaaagtattttttgtgggttttgcaaagaactaccttctattgaactcttttcttgaagagtttgcaagtttttgaagtgaattcacattaaattcttgccgtcttaaagaat

SEQ ID NO: 40775 - DNA, 549 bp, Glycine max
  Clone ID: PAT_MRT3847_136819C.1
ggggccaaaccagggggaaaaaaaaggaattttttgggcccccccaacaaagcaggaaatttttttaaaagggttcccaaaggggcccaagggcattattgccccacctatgggcttagacacctttacccaaaccccccaaaactaagggctttttgggggccccaaaaaaaacccaagggaaaagggctctcccttttgggggggggccgccccaaaaaaaacccaaaaccccccctttttttggttttggggccccgaggggtataataaaaaaaaaaccccgccccggggttgaccttttttgggttttttagagaaattttaaaaaaaccctttaacccccaaaaaggggggccccctggggctttcaaggaagggcccccttttttaaaaaaaaaaggggggaacattgggttatcctcgcaaaattaatcccccccccccccccgggaaaagccccctttttttggaacctttaaaaagcttataaaaccccaaaagcccaaactttttttcctgggccttttgggcaaaaagggcccccca

SEQ ID NO: 40776 - DNA, 226 bp, Glycine max
  Clone ID: PAT_MRT3847_13681C.1
ggagacaaaaaagagaattgcgctaacacgcaacaggtggatttacatgcaacaacacaggacccactactacggcactcgcatgcctggcgactgccagtcacacccacactgaaacacatgactgaaacaggctgcttacacggacgattcttggaagaattgtataacacagcacgccttaatgaacctatgggggccaggaggaaaaggaattgcatgtccc

SEQ ID NO: 40777 - DNA, 279 bp, Glycine max
  Clone ID: PAT_MRT3847_136820C.1
ctgtaactttttatattaagggtcacatcgagtgaagttccagggcacgctcaacgacggcaatgattatgcaaccaaactgcattgctggccacacaaagggacatggctaagctttctgcatcattcccagaatgacatcacttgcgacgtgttgaaagctacccggcaaagcatagaccgcaaccctcttatcctgtacatgttgccggggaagaacaaagctccattcctcgaaagaagggaccaagaaggccttctatctgttcagcgagccaa

SEQ ID NO: 40778 - DNA, 315 bp, Glycine max
  Clone ID: PAT_MRT3847_136821C.1
tacaaggggggggccagcacgctgcctccatcattctctaccctttccctcgctctgaagctaacttcaaccagtccctcgatggcctgattctacctctaattgagctccttacacgaaccgacttccctatgaagatagaacctgaaccactactatttcttaaggggtcacaagatggtgtctcttcacaatgatctgtggaaaccccccactcctaataaggtaatggccgacccccacaccttgcttcactacaccaacgtcctctacgccttggccgacgccggttatttctccatgaagaaccttaat

SEQ ID NO: 40779 - DNA, 305 bp, Glycine max
  unsure (1)..(305): unsure at all n locations
  Clone ID: PAT_MRT3847_136822C.1
ctgcgagaagacgacagaagggttgactggtccccaggacgacccacggagagatcaatctctacactccaaacagacaagttatcagacttccatcaatcctattgaagaagcaggatatcaaagcacaagagacaactccaaatcccagcataagctcgagtatacaccagtgtcaacaaccctaaaacgaatcattaaaaaagtgaccctattctatatctatgttaaattacaatcaaacccccaaatttgacnattcaaatgtaaaggttactgaatttgaaatacgcatatcaatgggg

SEQ ID NO: 40780 - DNA, 312 bp, Glycine max
  Clone ID: PAT_MRT3847_136823C.1
cccacgcgtccgaaagataaggcatatacagtgaaagaacatactgtttgttatgcttaatatgcgtaatctggcctgtctttgtattcactccgaccgttattcaagtagattcttctcggcggaactgcccgatgcctaccctatcttgggtccacatgcgggtagcatgccagtcataccctgactctttcttatgctcactgtacggtgccaagctgctgtcagttgtagagagatatgtgtcatttgtgtgatgagtgagaaaaggatgaagacttgatcagacagcgccacctcgctcatttttac

SEQ ID NO: 40781 - DNA, 741 bp, Glycine max
  unsure (1)..(741): unsure at all n locations
  Clone ID: PAT_MRT3847_136824C.1
ctatagtcagaaggtgaatattaaaataaaattcttgtacatagtgaaattaaggaaatacatataaatatacctaaatatatacgtgaatagtgaaaacatagatgagttttgagtttgaatttattttcacataccttgtctctttacatgaaatttcaaccaaatcttttcatacaaatatacatgaatttattctcagttatcttgccttgttgatttaaaaggataggtcttttttttcactttttccccctataaatacatgtcctgaacatacaatattgactttcagtttacatgcttgtgaagtttgagagaaaaaaaaaggagggaaatataattaatatccaacaatctgaaaaatctaagacatttaaatggcttcaaattgatcaggaagcaatcgcatcaagagatagtatcattgaccatttcgaatcatgttgatgtcctaattcattcaattttgatatccaaaaaatccaacacaaacaaattatctcagttctcatacatgtagtaagattcatgtgaacttttaaaacataccttttaggtgagtattaacaaaattcattttaaaataaatttcgaagtaaattgatttatgtttgaatatagtcattctaaaaataagtttacaataaaactcaatgtaattattatttatttaactcanagttaattcaacttagttaaatttatcataattcgtatttactcataattatgttactg

SEQ ID NO: 40782 - DNA, 1136 bp, Glycine max
  Clone ID: PAT_MRT3847_136825C.1
gatttccgaaagcgtgatcggtgttgtgcgtggctcgaggtgtaactaaacacaaaccccaaaaaccaaaatcacaactcccaaagcaaaaacccaaatcccaaatgatagtagtaacatgagatgacagacgaccgcgtgcatccaatcccaaacctagctatgtctccggccaccgcccactggacctctgacgccatccacggcggacccctccgtcgtgtcgacctcgactccggcaccaacggctgggcctcccctcccggtgacctcttcctcctccgctcccccaattatttcaccaaacgccagaaatcacccgccggcgactacctcctctccccctccggtatggactggctcaaatcccaatccaaactcgacaacgtcctctcccggcccgacaaccgcatggcccaggccctccgccaggcccaggcccaaggcaaatccctcaaaagcttcatcttcgcagtcaaccttcaagtccctggaaaagaacatcacagcgcggtcttctacttctcaaccgacgaaccgataacctccggttcgctcctctcccggttcatcgagggcgacgacgcgttccgaaaccagcggttcaagctcgtgaaccggatcgtgaagggtccatggatcgtgaaaaaggctgtggggaattacagcgcttgcttattgggaaaggcgctgacgtgcaactatcacagaggaccaaactacttcgagattgacgtggacattgggagcagcgccatcgccaacgctatcctgcgcctcgcgctggggtatgttaccagcgtcaccatcgatatggggtttgttgtggaggcgcagagcgaggaggagctgccggagaggctcatcggagcggttagggtttgccagatggagatgtccgccgccaccgtcgtcgatgcccccaacgcgccgcgcggtaacaaggtcaatcacctaagcggtaacgacgagtaactaattgaaaaataataacaatgagttttttttttgttttacataaaaattactatttagattacttaatttgatttcaccaactgcttggtcctcgttcttggtgtaattttaggcttttttttttcggggagtaataaatattcactcaattcggtccg

SEQ ID NO: 40783 - DNA, 670 bp, Glycine max
  unsure (1)..(670): unsure at all n locations
  Clone ID: PAT_MRT3847_136826C.1
ggctattggattcaatagagaaacttaatttggtaccctctgaaataacttatgctacagttatttatgctctatgtagggagggatttttgctagatgcagagcatgtttataggaaaatggtcctcaagggctttcagccaaaagcacaagtttacaattcattacttgatggaatttctaagtttggtcaactagaaaaggcatttgagcttctaaatgatatggagacaaaatatattgagcctgacagtctgactattagtgctgtaattaattgttattgccaaaagggcaacatgcatggagctcttgaattctattataagttcaagaggaaggatatgtcacctgatttttttgggttcttgtatttgataagaggtctatgtaccaagggaaggatggaagaagccaggagtgtcttgagagaaatgctccagtccaagaatgtggtagagttaattaacacagtcaacaaggaggttgatactgaatcaataagtgatttccttgccactttgtgtgagcaaggaagggttcaagaggctgttacagttctcaatcaaattgcatgcctactttntcctgttcaaaggttgtccacttattatcaaggattccatanacaacagaagatttatgaatggaaggattttggttcaatatc

SEQ ID NO: 40784 - DNA, 548 bp, Glycine max
  Clone ID: PAT_MRT3847_136827C.1
attcggctcgagctcgagccgaaaaaatctcaacaaaatttgagcatgccacatatggagcttaggtctaccttcaccacctgcttctttctcttgattctcatcctggctctccctcgtttctcaagaggggaatctgaagcattgcatacagagatatatgagattgattatagaggtccagagacacactcttcaggtgttcctcctcctcatcacttccatattggtaagcagcattcaacttctcatcctcaaaaaggctcagtcagaggaaccaaagctttgggcttaagggatagcacttacgatgaaaataaggtcaagaaagtacatgaatgatcatcaggaagctttacaaattaaatggagtatgactttgattagtgctctcatacataaatatttttgttagagagtgtaatgatagtaaagttgagacttgagatattgtatcattatggtttgctcatgtgtataattgataatagacaaaaaataacatttgaatatatatatatatctatttttgtatatatatatatata

SEQ ID NO: 40785 - DNA, 1125 bp, Glycine max
  Clone ID: PAT_MRT3847_136828C.1
accacagcaattgtttctgatttttcccaggttgttgttggatgttacatgggaaaaatacattttcttgattttttgaatggacgcatctgttggattttccaaacttctggcgaggtaaaagcacagccagttgtagacacatgcagacaattgatctggtgtggctcacatgatcataacttgtatgctcttgactacaaaaaacattgctgtgtgtacaagctatcatgtggaggcagtatatatgggtcacctgcaattgatgaggttcgtggcttgctttatgtggcctctaccggtggtcgtataacagctatatcaatatcggcttctccatttactatattgtggctacatgaattagaagtccctgtgtttggttctcttgctgtcgcccacaatggaactgtaatatgttgcttggtagatggccatgttcttgcattggacccaaatggatccattgtttggaagaaaacaactgatggtccaatatttgctgggccatgcataccttctgttcttcctcatgaggtgcttgtatgctccagaagcggaggtgtgtactcattcaaactggagaaaggggacctactgtgggaatacaatgttggagatccaattactgcatctgcttacgttgacgaacacttgcagctggagtctgatgcttcccattcttcagacaggttagtttgcatttgttccagttctggaggcatacaccttcttcgagtgaacatgaatcactccgaagatgcaaatcaacaaagacgggatgtgcaagaatttgcaaagctaaacttgccaggggatgtattctcttcacctttaatgattggtggccggatttttgttggatgtcgggatgactacttgcattgtattgcccttgaaattccaaagcaacatgaaagttaaaaagcttgtatagtttcaattttgttgcactctattgagtggattgattctgtatttaaagtctgaaatctatgaaaatccaggcatatataggcaggctgtaacctaagctagatatgcttaaacaatagtagctaaattaaataaatataaatgtatgaatgaataaaaaggtatagaatgcagatcttggtgggataa

SEQ ID NO: 40786 - DNA, 390 bp, Glycine max
  Clone ID: PAT_MRT3847_136829C.1
gaaatacgtgcgaactaactatgagaggtatatggcttgatcattgatctcgttaccaggggacaccactgtgaatcctgccggtgcagacatgatagttccatttacagacctcaagttcatggctggcttactcaccagggagaccaataatgacattacctgcattgctagcaaaggtgatatgagtgcaatgcatgccaagtgtgaccacacatcatatactaaacaagcacgatactacttacctacctgcacaaaccttggtgatgcacgattggcatatgatgatcgagtaccttatcaagatcggaatgatgcctgacttggaattcgattcgtaccactgtttcatgtaccgtgagcacatcatgtcaccagcatactacg

SEQ ID NO: 40787 - DNA, 1121 bp, Glycine max
  Clone ID: PAT_MRT3847_13682C.1
tatgctgacaaagtgaatgactataaggacaaagttgttgtacagtctagaaagagaaaggaaaataaaaccagaagagagaatttgttgccacggcagtttcatcccagtcattgactttaaaagctaatcaggaagatctgttaggtttctcagctttcacttgtgaaaagagcgccgaatactaaaaataaaaggatactggttgctaaaagggaggcagagatgtcaaaaggcgtaaaggtgctagcagagttagagaaaattaggacagctatagaagaggataccaagcgagtagcaagcttgagtaccggggcagaagcatctggagttgatgagaaggtgctacagcagctattgcatcgtggctattattgtcgggatgaactcatacaaagtactcattccttagttctataccttgccagaaaatacatgggtatgggaatagctttggatgatttacttcaggcaggatatgtaggtgttcttcaaggagctgggagatttgacagttcaaggggctacaaattctcaacctatgtgcagtactggataaggaaatcaattttaagagtggtggcacgatatgctcgaggaattgtaattcctggcaataaatcagatccagaaagctcgaaaagccatgaaaagtacacacaagaaatgcccagatgattacgaaattgcaaagatgacaggtctttcactggataaaatcaaatcagctagcaattgtctaagaatagttgcttcaattgatcagaaggtgggggactaccttggtgtagaatatatgagaaaggtgcaaagccttgtaaatgtctgggagtatgagaaagacctctgcctttaagaaaaggagataaattacttgccaagttcattacatcaataaattcctaaaatgagatccacaatcaaatagaaaaagcatgctatcttgtgagcatccgatgtacatggaactacattttctttcctgttatttggtttttcgtcaagggattttgttgatcatgtatgttcatgttggtacattcacgttctcagaatcctttgccttgcctacatcaaggttgaactgctgttactgccatttgagatatgtaatttct

SEQ ID NO: 40788 - DNA, 404 bp, Glycine max
  Clone ID: PAT_MRT3847_136830C.1
ggctcgagcaaattctctgcgttgtgttgtttacttgtgttaatcgtgttgcggctgtcggaaagggaactgaagagagactgatgatgaagtctgctatgtgtgcctcgcagcctgcggcactgcttgtcgctgaagtaccgcccatggctgcggctgccgcgacctgcagcccaacacagtggacttcctgtcttacgacccttaattcaaggactgcaccttcgagtgcttgctgccacaagctgctggagcacaagccgtgcttctgaggctacctcacctgaccctagcttgacgcaggacggtaactctgctcatgccataataaccgctcggccttgtggcattgaccctccaacttgtgaactcacctcttacatctgtatataaagacctgttga

SEQ ID NO: 40789 - DNA, 816 bp, Glycine max
  Clone ID: PAT_MRT3847_136831C.1
ggaagttgagaggcttaagattgctaccggagaggcattgaaccaatccgagtcttttaatctgggaatgcaccagatgccatatgcagggccaaatttcttttcaattccaccacattcaggtccttctgggcaccagaacatgcaattgccaccatttggtcactcccaatccaccgtgccgactcatcagctgcaacaaacaaattctcaccaaatgtcagatatattgcaaaacgaccagcttggtcgtttgcagggactcgatattagtagcaaaggaacacccatggtgaagtctgaaggcccctcaatatctgcaaatgagagtagcaccacattttgaattttttgaccaaaatttgcttgacctgctgacttctccgtggcattattcccttctcttcaaattgtctatagtgttgacatctagttatcttatgaaggtgctctgtttcattaaattattcctttcagattaaggattaattatcattaattgtttattcttagggatgctccccaaaaaggggaagcagcacccttgggggttttgtcgcaaaagttcacgcacgcacgcagtcatcttgtaaagcgtggcattttggtgtttgtgggttttactttagatcaccaagaatgaaaggtcattctcatggtatctttctatgtgggggaatcttcatcattccctctccagtcattttaggcgatagcttgtaaaccgtgatttgttgtgttccatttcaaggatttgtaagattatcaaaaacaaggaaaagatgtgtaagatgaactcagttcagttccttctat

SEQ ID NO: 40790 - DNA, 610 bp, Glycine max
  Clone ID: PAT_MRT3847_136832C.1
cgatctatcgctaggaatgtaccaggtgccgtgcaccggggtttagtgttgtcactggtaggcacaaactgagtaggcccggtgcgaaagtaagataggagcggaagcttggtgcttggagagcgagttagccagtaagagtggtaaccgggcgggaggtgtctgaagcatttgcggctgcaacgatccaacggccgggcgctactagggcggtactgaaggcaacgttctttagtgggtggccacttatagggatccaagcgcagacaagatagcggataacgtaataaccagatacagcagcaacgactttggcaacttgcgcaaggggccgtgctggaggcgcagctgtaatgcttattgcaaaatggaacacaaggtggcttttcgtggaggttacgaggcagcataaatagcctggagctacagcagcagcaagtactgaggcaactgcaccaacagccggtgtaattgcagtcacagtaccagtggaaattgtcagggtatcgagtaacccgggtagccagtccagcaaccgacacatcagcagcatcagcggcgtaatatagcctagggatgcaaagctacgctactgctgtggcagaggtgg

SEQ ID NO: 40791 - DNA, 382 bp, Glycine max
  Clone ID: PAT_MRT3847_136833C.1
cccgcctgcagtccggccggattcttcgtcacgggagccccgattccttgaccgaacggagctggcggtggtgacgtcggtggtgaactggagtcgcaccctggcgcaatcggattcagtcagaactactgggacgaagaacgtgagattaaaatctcctttccctctttggagggggtttaccgtcaagattcggctctaaataattgactgagcgggggaagcagggtgaagatattgtgctcagttgagctgggtgaatctactcgccgatgacatttccctctttccgtgcgttgctccttcctctagttgtttttcgttcatttcgttactattatttttggggccagataacgggattaaatactatgaatgaatg

SEQ ID NO: 40792 - DNA, 442 bp, Glycine max
  Clone ID: PAT_MRT3847_136834C.1
ccacgcgtccgataaatttccagattttattttttacttctctcaatgctccgcaacacctggagcgtgtatactgagaggcgaaggatgaaagtgaggagcggtatggggattggagatgtctctatcatttaaaattgtttggcagcttgacacaagcacaattctggattttaaaggagataaagatatgggtggggattgattggtgcagcgaaggattttattgctgcattgggtatcattttgctgatcaatgggttatacatcatttagttgcatgttgcctctaaatgattgtttaacctattgataggagatgtatggtttggttagatatgtccaccactccaccatattaacatttgtggtacatctagtaactcagattttagcatgtgagtgggggtgtggattagttgatgagagaagttatagggat

SEQ ID NO: 40793 - DNA, 398 bp, Glycine max
  Clone ID: PAT_MRT3847_136835C.1
aagagatgacgcttgatgacccatgtccacttgccacttctagcgaaatctgctttccggaattcctgaataaattgccagcaaatgccatgtctatgaattgctcttgcaactatgatccttcccataataatctgcaatgcacttgaactggtgcgcgaaagacttgataccatcttgcctctagagtgcacttcagctctgataatgctacaatcttaaaaaatgagagccctaatgacccggaccgttctagaagtattgcttcccccgaaatgaatgaatgcttattatccttatctataccgacgacctcaaggggcccctacggcacccaatctctccaatactagagcatatcacgcgctgtcactgttcgatcattttacttatccata

SEQ ID NO: 40794 - DNA, 608 bp, Glycine max
  unsure (1)..(608): unsure at all n locations
  Clone ID: PAT_MRT3847_136836C.1
gaaaactgaatctcttgcttgtgaagcaaaatctcttggccaatgcataggttttaaagtgtagccttattttgtttgggggtcctggcctgctttttgggatttgaagcttgcaagctcctttggtagccttcatatattccagcaatcatgcctagccagtagccacttgttgtgacttgtgttgtgagtgattcaaaatctgcgcctcctcacaaacactaccatcaacaacaaacataatcatctaaattaccatcaacaacaaacatctcatcacatccatcatttgcacttttgaagaaggaaaaatgataggaagattattctgttttctgctagctctgcaaatagtgagtttggtttctgcagtaaggaagccgtttcttccagccaaagaagaggctctacagtctccaccaccacatactatagaaccaaaaaagggtttaatgggtatagaaggtacatcagagacaatgaaggaagcatatgaaggaggagtgagcaaaataggatcaagtccaccaagttgtgagcacaagtgctatggctgtgttccatgtgaagccatccaagttcccagcacgagcaccangcgcagccat

SEQ ID NO: 40795 - DNA, 1771 bp, Glycine max
  Clone ID: PAT_MRT3847_136837C.1
cccacgccatgtccttactccttacgatccgttctgcagtcactcactgtagttaatgcctcattgtgtttctcattattatttcctaactaacactcttgaccctgacttcttcacttgtgctttttagatcaacaaattaaagtattaaactttgagcttcagttttttgttcttgacttcttgtaatttattatggagttgatggggggtggaaaatttagtaggtgttttgttgttgttgttgttggtgtgttgttcttagtggggtcagtgagtgggattggtgttaattgggggacacaggcatcacaccctttgtcaccgtcgaaggtggtgaagatgctgaaggacaatggcattcagaaggtgaagctttttgatgctgatgctggtatcttggatgctctcaagaagtctgggatacaggtcatggtggggattccgaatgacatgctttatactctggctaacagtgtggaagcggctgaaaaatgggtttccaagaatatctccaaacatgtctcttctggaggagtggacatcaggtacgttgcagtggggaatgaaccattcttgtcaacatacaacggttccttcgaagccacaactcttccagctctccaaaacatccaggcagctctcacaagatctggtttgagcaaccgtgtcaaagtcaccgtccccttaaatgccgacgtataccaaagctcatccgaaaagccatccgacggcggtttcagacccgacatcaacaatgtcatgctgcagattgtcaagttcttgaatgacaacggcgctccgttcacagtgaacatctatcctttcatcagcctctacgcagaccccaatttccccgttgactatgccttctttaacggctaccagcccaccataaacgacaacggaagagcctacgacaatgtgtttgatgccaaccatgacactctagtatgggcactgcagaagaatggctttggaaacttacctataattgtgggggaaattgggtggccaacagatggggacagaaatgcaaaccttcaatatgcacaacgttttaaccaaggtttcatgtcacgttacatgtctggaaaaggtaccccaatgaggcctggtcctatagatgcttatttgtttagtctcatagatgaagatgccaaaagcattcagccaggtaactttgagcgtcattggggcatgttttactttgatggccaacccaaataccaacttaaccttgggtcagcacgaggtaatgggttagtaggtgctagtggcgttgatcatttggctaaaaagtggtgcgttttgaaaccctcagcaaaccttaatgatgaccaacttgcacctagtgtggcctatgcttgtcaaaatgctgattgcactagtcttgggtatggaacttcgtgtggcaatttagatgttcatggtaacatttcttatgcgtttaatagctactatcagataaatgaccagatggatagtgcatgcaaattccccggcctttccatgatcactgacaaggatccttctgttggagattgcaagttcagaatcatgatccagacagattctgcggagccacatggaaaagttggatatctaacaacagtgctatgtttttttgttcttttgctattctgtaatctttggttttgatttgcttgctttttgacttttctcggatcaggtaaactttgtagcaactagcaagtgtaagaaagaaaacgcgttagattgtttatcactgcactaatgttgtctgtcg

SEQ ID NO: 40796 - DNA, 610 bp, Glycine max
  Clone ID: PAT_MRT3847_136838C.1
tacggctgagaagacgacagaagggggtacttattaatgcacaaagcagcttaactcaaaagcagaagcagcaacaacaaacatgtccttaggatccgttctgcactcacagtagttaatgcctcattgtgtgtttcattattattccctaaccaactctcttgaccctgacttcttcacttgtgctttttttttttagatcaacaaattaaagtattaaactttgagcatcagattttggttcttgtaattataatgatggggggtgggaagtttagtagtttttttgttgtttttgtgttgttggtggggtcagggagtgggattggtgtgaattgggggacacagtcaacacaccctttgtcaccgtcgaaggtggtgaagatgctgaaggacaatggcattcagaaggtgaagctttttgatgctgatgctggtatcttggatgctctcaagaagtctggaatacaggtcatggttgggattccaaatgacatgctttatacgctggctaacagtgtggaagctgctgaaaaatgggtttccaagaatgtctcaaaacgtgtctcttctggaggagtggacatcaggtacgttgcggtggggaatg

SEQ ID NO: 40797 - DNA, 921 bp, Glycine max
  Clone ID: PAT_MRT3847_136839C.1
ttgtacggctgcgagaagacgacagaagggggactagagaagaagagtgatatggcttgtaattctatctcccaagcagcttcaatgggcacacaaatatgcacccaaatagcttccatattctcaaagcccacccatccatacccggccccactagaccttttagtcaccgaactcacctccgttgcctctcaaaaaggcaacgtttttctatacggcgtgggccgcgagggcctcatgctcaaggccctctgcatgcgcctcttccacctgggcctctcagcccacttcgtcttcgacatgaccacaccccccatcgacgctgccgacctcctcatcgcctccgccggccccggcggcttctccaccgtcgatgccctctgcgcggtggcgcgctccaacggcggaagggtgctgctcctcacggcccagcccgagacaggctcgtgcgtgaaacacgccaacgctgtggcttacgtggcagcgcagaccatggccgatgatgatgcggacgcagaaagggacgcgaaatctcggccgttacttccgatgggaagtgtttacgaagcagctctgtttgttctgtttgagatggttgtttacaagttgggtgaggccttgggtgagagccctgaatccgttcgatcgcgccacactaatcttgaatgaaattatatcagccattcgatcttactatgtgttatgtaatgagtgagagtgatcgttattatcttcttctaggaaaattattctacttaaaacaaattttgtatgaaaaaaaaattattcaatttacacaaattttgtatgaaaaattgtacggggatttaactgtttgaatttttgtaaaattcctttgaaatatcagcgatccagtatgttaaaatatttttcaaggagaaaaaaaaaaaaaaaaaaaaa

SEQ ID NO: 40798 - DNA, 280 bp, Glycine max
  unsure (1)..(280): unsure at all n locations
  Clone ID: PAT_MRT3847_13683C.1
agaatacnttcttaggaagggatggattccttggttggaattcgggttggagcacggtttcgtgttccgtgagctcttctggtcaccaggattctacgatgggcgcttctggttcttgtggaagctgcctttgtttggttggcctgatgctcctccggtgttggagggggttcnagaggtttttttttttttcccccacgggttcctccgggtggtggggtttttcccccctcgccgcgggggggggggggggtttttcgcctttgggccccagggcttc

SEQ ID NO: 40799 - DNA, 157 bp, Glycine max
  Clone ID: PAT_MRT3847_136840C.1
actggccgtgtttttaaaacggtgggattgggaaaaccttggggttacccaatttaatggcttggcagaaaatccccttttcgccagttggggtaatagagaagaggcccgaacggatcgcccttcccaaaagttgtccatcctgaatggcaaatgg

SEQ ID NO: 40800 - DNA, 384 bp, Glycine max
  unsure (1)..(384): unsure at all n locations
  Clone ID: PAT_MRT3847_136841C.1
ttcttctttttttttaaaanaanttttttttttttttttttttttttttttttttcgacccaccccctaaccgggatgggaaaaagctttaggggctttgaaagatcgtccaaactttgaaaagaaacaagcgatggggaacttgcatttaaaaaccggccttgggaaaaaataaaaaaatttaaggcccctgtctagaaaaaaccggggctttggaatccaaaaaaaagggttttatcaaccctccaaataaggaaacaaaaacgggcccctgtggtcgcaccattttttccgttggattatttgggggcccctaactatgtctggattaggtttgacgctgggaacttcggaagctatacattttattaaaaaaaacccccc

SEQ ID NO: 40801 - DNA, 431 bp, Glycine max
  Clone ID: PAT_MRT3847_136842C.1
ggacaaaaaaattttattttcccatggaaaaacccagggaaaattccatcagaagggcaaaaaaaaaaaaaaatacccgaaaaattctagggtagctataaaaaggacaaacatgggcggggtacctaaaagactaaacccaacggaagggggcgggacaaaaattactggggcccggaaacggaaaagccccacaaaaaaaaagagcccccaccccccaaatcttggacaacacccccacttttgggatttcttaagggcttgacctggcgggaaagctgttgcaggggaaaaaattggggcgggggagggcccctttccgggacctggggccaagcgcccccccctccgagaatttttcctcccccggcaacccttgttttgggcccccttcccccaaaacgggaaaaacaagggtttttttctggcct

SEQ ID NO: 40802 - DNA, 414 bp, Glycine max
  Clone ID: PAT_MRT3847_136843C.1
gttggtcaatgagactagtcttcttcacttattgggagcaacaattgctcaagatgaagatattgataaaatgagcgtcttagtaaccgactgggccaatgggatctgcatagctgaaaatgaacgattcttctctcttctcactcatcgtgatatgcctgttcaaattgcatttcgtcttctcgttcaatctggcctccctcgtctctcctatttatgcagaattatgccaccatcatcaatcaacgctgccatccataatttcgattctcttattctcaaaacattatggaaattatttaaagtaagcaccaactcattatctgctgattctctctctactatgtctgcacaggttcatttaaaaatgaaaaatggaggattaggaataacgcaatattcaacaatagcacc

SEQ ID NO: 40803 - DNA, 451 bp, Glycine max
  Clone ID: PAT_MRT3847_136844C.1
gggagaagaatcagactcctagagagagcatgagaaatcggtgagttgactcagtagagcgaatcgatggaggaagaagagattgagtgcttcgagtgcctccaacttcgaataaagtccgatttctcggagcaagtgtttttcaattatgccatctccacttctgcttttcctttcggatcctcggctatcgttaatatttctggtacagctgatggcgaatcttcgggtgctcaatttatattgcagtacatgccgagtcgtgataagaattgttttatcaattatgtaaatgaatatattttggatagtggtgaaatcactactaggagtagtgatcctggtattggaagcagtgaagataataatgctgttaatgttagaattacatcatcagatgattctgacagtggcaaagctttttctggaagcacgagttgtagtcattctg

SEQ ID NO: 40804 - DNA, 221 bp, Glycine max
  Clone ID: PAT_MRT3847_136845C.1
ggctcgaggcgaaaaaagagcaagacttatgatagaccgtattatataatcattctctcaattactttttatcttataactgagtcccattaatcacggaactgcgtgtatacatactggtggtttcaacccataaattcaacccacttcgaccactgtgtgaccatttctcactctcaccaaatcatatatctaaatcaaccgagtggcttaaaattcac

SEQ ID NO: 40805 - DNA, 758 bp, Glycine max
  unsure (1)..(758): unsure at all n locations
  Clone ID: PAT_MRT3847_136846C.1
caaagatggtaaggcaaagcgtggtgatgatgcttattacaataagcataatgtgtgcaatggcagtgactgaaagcttaaaagtgaaagcagggaattggggtgcgagttttgaaggggagaataaggaaacggtgacgaacctggaattctatttccacgacacgctgagtgggcaaaacccgagtgcggttcgagtggctgaaccgcttgacaagaaaaagacatccatgaccctgttcggggcgatcatgatggcggatgacccgttaacggagacatcggaccccaagtcgaagatagtgggccgggcccaggggctttatgggtcgtcgtgtcagcaggagattgggcttttgatggccatgagttactccttcaccgacggcccatataatggaagctccttcgctcttctcgggaaaaactcggccatgaaccccgttcgtgagatgcctgtcgtgggtggcacgggtctgttccgtatggcacgtggctatgcccttgccaagactcattggtttgatcccaccaccggtgatgccattgttgcctacaatgtcaccctccttcattaaactaaacaacttacatttgtccactctttctatattccttaatgcttaattagttatttgtctccatggaacactctcttgtcatgtcttccttctttttcaactactgccaccacatcccaacatatacttcgctttgataacttccagccgttaatnnnnannnnnnntcnnggtctc

SEQ ID NO: 40806 - DNA, 199 bp, Glycine max
  Clone ID: PAT_MRT3847_136847C.1
gtgggttaaatagcaccttagaaaaaataatggcccccatattattattttcgtaaaaaacaaaattcccatccttaggaaaccccacatgttacttgcccatgaaacttttacctaaaacatttaccttgcaaacacaattgtggtcacattccaaaaacactctcaacttaccaactattttacccattttacaacc

SEQ ID NO: 40807 - DNA, 789 bp, Glycine max
  Clone ID: PAT_MRT3847_136848C.1
atcagttgagacaatggtagcagttgctgcgcagttcatcagtcactatgttttcaagtggtctgtaactgaagctgatttcaagtgttctgacactgaagcacttccccaaatccaaaccccccatttatctcccatgctgcccaaccacctcttctccatgctccattcgtttcaattcgcatttcccatgtaatctactctctctctcattttgcacttccacccatcttaacttactttctatgtgtgttctgttttcatagaccggagcaccaaagttcccctaaaatgtgcaccactcccctcttcagattctctgccacctgatctttccgatgccccgacccagacggagcaaaattccatgtcaattctggagattctgaagcaatcaaattcatacctgcctcatgtactcattgctagtatactgctagctctaatctacccaccttctttaacgtggttcaccagcagatactatgcacctgcactaggttttttgatgtttgctgttggggttaattcaaatgaaaatgacttccttgaggcattcaagaggccagcagaaattgtcactggttattttggccagtttgctgtgaagcctcttcttggatatctgttttgcatgattgcagtaactgttttaagcctaccaacaacagtaggcgcaggaattgtattggtggcttgtgttagtggtgctcagctttcaagttatgctactttcctgactgatccacaaatggcacctttaagcatagttatgacatcactgtccac

SEQ ID NO: 40808 - DNA, 314 bp, Glycine max
  Clone ID: PAT_MRT3847_136849C.1
acccggacaaaaaatgcttgaaattgtttgggttgttgacaaatgtgtacaaaacaaccaaattgggaattatttatgggtggagcttccggggggctttgattattaaacaaaatctcttataaaatatatttgcatcaacttccggttcttttatgaccctgctccccattcgacctttggttaatgagcttttatttgattttgtaaaaggcatgttcaaaggttttccaacttttgtctggaaaatttgttttacacgaataatccactggacaaatgaaagctttttttcataatacactccttcaatt

SEQ ID NO: 40809 - DNA, 1316 bp, Glycine max
  Clone ID: PAT_MRT3847_13684C.1
taagaaaagtagaaaactacacttttgaggtccattctcaatcttgttaatatatttttgcgcagatgaagatcaagagaaggaggcgtcatgctaccttccttcaaccacaaaccctctctccctctaccacccattctcttttctctctctttctttccccctccctctctcacctactcaatctcatcaccaccaccatcatcatcatgatcttctccaatctctataaccttcaatcactcaaaacctcaccattaaaccaaatgagttgacccatttgtgagaacaattctccctaagaaaaggtcaaaggctgcaactttttcttaaccaatctcacaacattttgcaacgttttttctggttcggtttggttttctgggtcgtcttggaattcaaaaaagattccaactttgaagatgggtaggggcggaaccgccgcggcggcggtggagatcgccgaacccggttcaaggccggtttttttcaaagaaccgcgttataggggcgtcagaaaaagaccgtggggccggttcgccgccgaaatcagagaccctttgaagaaagccagggtttggctcggaaccttcgacaccgccgaggaggcggcgcgtgcctatgacacggcggcgagaaccctccgggggccgaaagcaaagaccaatttcccactttctccgccgttctaccaccccgatccgttttccgatcaccggtactttgacggcgctggcgccggcgaagatttccaggatcaccggcgacccacctccagtggtatgagcagcaccgtagaatccttcagcggcccacgcgccgccgtgccggcgaaggcgccggtgattgtcaaccggagatatccccggacgccgcccgtcgttcccgaggactgccgcagcgactgcgactcgtcgtcatccgttgtggacgacggagacggcgacaacgtggcgtcgtcgttccggcgagaaccgttgccgtttgatctaaacgtgttaccgttggacgatgctgacgtggcaaccgatgatctgttctgcaccgttctttgcctctgaagagaagaaattgaaaacggcacgaaatgatgtatttggttcgttgaaggaaaggaattattaatttttttctatttttactctttattatctacttgaatatttttttatctttctctttttccccacttattttaactatgcggagaaaaatgaaaaagaaaaatatgattgatgatcagttatgaagattatggtaatatgatcttaatttctgtgaaaagtaaaacttcagggtattgtttcaaaaaaaaa

SEQ ID NO: 40810 - DNA, 130 bp, Glycine max
  Clone ID: PAT_MRT3847_136850C.1
ctccttagtgctgctccctgcagttttaattctatcccttgaaggacatgcacactatcataattccctaccggacaaacattctactgagaaaccaccagcttatactcccatagctgataagcctcct

SEQ ID NO: 40811 - DNA, 353 bp, Glycine max
  Clone ID: PAT_MRT3847_136851C.1
ggggggccccactggcaaaaaactggttttgttttccatgatctatattgggatacatttaccactgatatggtctaaatagacattggggaccgcaagataatgggcctcatgagtttgtcaaacaaaacaatgacccttttctattaaaaaaggggaatcaagagggaaagaattccggggttcccaatttgatacctggaaaaatatttttgaataaaataatagcgtgaaagcaacctatactaaaatggttttgcaatccccccatttccttgacaagccatggatcaatcaattttcactgaccgcgggatttgctttgtgaaccaaaaacctgattagaaaccaat

SEQ ID NO: 40812 - DNA, 519 bp, Glycine max
  Clone ID: PAT_MRT3847_136852C.1
cccattctcattaatttacttagcataaacttttattggtttaaacaatacaaagagagtagcgtacgttatgagacaatagatgtgtgtaacaacatcattaagaattggcaggaacaaagccagtgaggtttctgaaatggagcgattcgattactcgcacagttgctccgtaattttgaaattcaccgtactcatcattggctctgaagatgaggaagtagtccatccctgctactatccgagtcttatactttaacccttctactgttcgagtctcaccctctatcatcttctctaacttcttctttgtaccgaatcgcttatcaaaagttgcaatggcgtaatttgcgatctctatcactttagggtcgttgatgttcttgatagggctccaacgtccgagcaaaggttcttttctagcaaccacagaagtcatgagaacaagcaccagaagaagacactctagttttatcatgtttctcgtgaccagaaattgtatctttccggtcgcgtggg

SEQ ID NO: 40813 - DNA, 354 bp, Glycine max
  Clone ID: PAT_MRT3847_136853C.1
cccacgcgtccgtgtgtgtgttttgaagagcgaaacagaagcagaagctctttgtgggtgtgctatttttggaattttctgctctttatctcatttgaaaaccccagctttctgaggctcgtgatcttaattgtgaagatggattcaaattcaacaaatgagaatctgcataacattttttttgtttcagattgagcttaactttaagtcttgttattttcaaaaatttcatgctctatttaacctttttctaaaattttacatgatttgtaagagtctaatacctaacatttttttagggttttataatattgactatatttttatcccttcttaaattggattatcttttaa

SEQ ID NO: 40814 - DNA, 126 bp, Glycine max
  Clone ID: PAT_MRT3847_136854C.1
ctgatagatgccttagatttaaggctgccaggaactccgactactttcttcaagccgtgtactataattgatggatccaccagaaagctaacaatgtggctgcagctctcacactagaatgattct

SEQ ID NO: 40815 - DNA, 1525 bp, Glycine max
  Clone ID: PAT_MRT3847_136855C.1
cggctgcgagaagacgacagaaggggaattgaaaagagcaaagtttggaaatttgggaaacttgaaagcatagcagagagatcacatcgcggctctctcatgtctcaacccaaccacccgctgaatctaaatgatgataacagagagagatgtaagaatacaatcaaacagcatgaagataatcttaagtttcttaattctcaatcaaatcaattagctgaatcaatatttgacttgcaagtgagtcttgcaaggtaccattcaactaatgtaattacgttagagaatggaaatggtgcctttcatactgaagaggaaacaatggaacaggtaatgaagaaagagaactctgctgctagtatatttagttggctaaaagttaatgcacagacatcaaatttgacattaacaaaggatgttgtgggagttgttgcaacccttgccaaagttgagagcgatgatcttagcaggattctttctgaatttttgggcttggagacaatgcttgcaattgtgtgcagttcttatgaaggcattaatgcactggagaagtatgatcctgaaggcttgataaactgtaatggtggattgcatggtatagggtcttcaattggaaagagaataaatggccgatttgttgtcatatctcttgaagatataagaccctttgttggaggttttgtagccaatgatccacaaaagaaattggctctcccaaagccaagattacctaatggggagtgcccacctgggtttcttgattatgcggtgaacatgatccatttggattcaaaatatttatcttttcttactgacagtgggtacggtcttagagagacgctgttttatggacttttttctcgcctacaaatatataaaacccggaatgaaatgctgcttgctctcccatgcattcacgacggagctttgtccttggatggtgggatgattaggggacgtggcatgtttgctcttggtagtaggaaagatgtagaagtgaagtttcctctaatttcgggaggatctgatgtacctccaaactatattgaaactgaagaggcagtgaggaagctgaattgggaaacctctaaacttgctgcagataaacacagagagcagcaattattggattataggaaagggaaacttcactaggcaagcctgaaaagttatttatggaaagttaccttgcaagacatggtaacaactaaccacatccaatttgtgtgcattagctgttaattttgcagaacatagttcatgagggatatgtcccaaagaaattagacaggtgtgcataaatagacatcacatagtgaacttcttgatgtaacttaagcaaggagctatgcttgcttactgtccgtgtctgttgttatgtctgattcttaatttcaatcaggagaaaccttggatagttagcttctccatttgaatgatgcaacttgctggggaggggactgccactttcttgaaaatgaacgtttgtcacatgagtacatccaaattcctgcggacgcgtggg

SEQ ID NO: 40816 - DNA, 513 bp, Glycine max
  Clone ID: PAT_MRT3847_136856C.1
gggggaagggaaatgggtaaaagccaaaaagggtgggggcaagacccctttttggcccggcatttttcccccatctacaaaaaaaggggccgggggtggaacccctccccggcccaaaaaaaaaaaaaacctcaccaaaaaaaccccttcccctgccccagggtttgattttaacccccccaaaagggcccgggggaccccccccaaaaaaaccccccccccccccccccaaaggcaacattttttacaaaaaccggtttccccccctcagggccaacccccggggggacctttggcttcaaaacggggttcggccccgggtcccgagaaatctttccccccgcaaggtaaaatgcttctgcggttttgccccccccatcgggggctatgggaaacggggcaaaacccccccctttatcaaaattggggcccccacagtgggaagccaattcccggacaggttttttttccctgggacccaaacccaggattcctatgggccccttaaaaccg

SEQ ID NO: 40817 - DNA, 113 bp, Glycine max
  Clone ID: PAT_MRT3847_136857C.1
ctcacacgtccggaaagaatctatacctcgtactcatgcaccatgacttggttcaacaccactctaagctgttttcaccgcgcataaggctccgacaaacacacctgctacac

SEQ ID NO: 40818 - DNA, 471 bp, Glycine max
  Clone ID: PAT_MRT3847_136858C.1
gagcagataatgggatgatctgtataacaaaaattatgtacattcaaaataagtaatttgtagggcacatttgctgtttatttaaggcataattaacaagtcaatggctgtaggacaacaaagtgcaaaacagtggtgttctttcttaaggcagaacagaggagtgcatggagctgtgaaaacagaagattgtgaaatgggaattgcacaacacatcacgcacacaagaacaaggcagggcagctggcaggcagtgatggacagtctggagtaacagccgcaaagcactattgcagctgcaatttgctgccatgtcaacacaccacacatctgcttatgcatcatggggaggccatgtgacagaaatccagtgtgattaactaccctgatttaacacatactgaaacatcctagcatcacttattttttcaattggccggataacatatttatgaattaaaccattatctg

SEQ ID NO: 40819 - DNA, 183 bp, Glycine max
  Clone ID: PAT_MRT3847_136859C.1
cctcagcattttatgtgaccgagtcatgctttctaactaggccaaggaagatgatgttctgcatccagctatggttatgcctggcaatagagctcaggactaatgagaatgctaaaccgctatatgggagattggctcacagtcgttatgggaaaaagagaacggtcagtcacatatggactt

SEQ ID NO: 40820 - DNA, 662 bp, Glycine max
  Clone ID: PAT_MRT3847_13685C.1
cttctttcatcttcttccactgtctgtctacactacggacagagcttttttcacaccacagctaaaattgctgcaatagagcccttcttctcccttcttcttctctacccacacccaaacccaaaccaagttctttctttctaattcccttgataatgtaaaatcacagaaaaacaaaaaaagctactcaaaacttggctccaattagcctttctttttttgttttgaggaaaaacagaaaagttccacacaatgtcttcttttagagctctcttcttcttctttctcatcaacgtctccttgctcctcacactctcttctgcggcggatccattcgtttcatacgaatttgaagtctcttacatcactgcatcccctcttggagttcctcagcaggttcctctctttctctctctccatcttggtgtatgttcatgtaaaatctcaagctttacttgcagatctgcatcatgggacactattagataccagtgtgataccttttttcaacacttgaaacttgtgaaagggttgttatgtgattgtggatgccattatgaggtgttttgtttttttgactaagtaagagtttggtaggtgggcaggaagaaaagagctacactactgctactactaagttccaaagtcgttttctagattct

SEQ ID NO: 40821 - DNA, 440 bp, Glycine max
  Clone ID: PAT_MRT3847_136860C.1
ccctaaaaaaaagagttaacctttttttttttagtaaaacaggcggacccgattattttacaaatttttaagctatttggccccccaggtggctttttttgggggggggtttcccacccccaggcctttaaaaaaaaaaaggaaggagcttcgaaaggcttggggtcaaaataccaaatcctttgatttaaaaaggcttttggtttatccatatctaaaagcaggggaagttcgacgggcataaaatgggggggggttttggggggcttcctcaaattccaaaacttggatcgaacgggactccataaaattttaaacttttacgggcaaacagaaaatcctttcaaccgggggtttacacccctgcctttggacaaccttgggggtagggaacaacaaatttgttgtgggctaccgggctgcaggcaagggcaaaaccc

SEQ ID NO: 40822 - DNA, 313 bp, Glycine max
  Clone ID: PAT_MRT3847_136861C.1
gctcggctcggaattcgggtcgtgctgtacttgcccttttctcggaagcaaacacgatggcgcccgtgggagccacatttgaatcttcaagcccttaactctcagtcttgaacggaaagcccgtgacatattctccccgtgtcgcgcccagcaccaaattatcctgatccaagcaaggcgcaaaatgcatgtgcctaaccccaccccaatacgacctgcagaccttcaaattgcagcccatcaatgaatccatcgtgtcacgggaaatgacacgccgctacatgaccgacatgataacctacgccgacaccga

SEQ ID NO: 40823 - DNA, 336 bp, Glycine max
  Clone ID: PAT_MRT3847_136862C.1
ggctcgagctcaagtaaacggccgtttcgtacatacgcggccagcgtccaatagaatggagcttacaccgatgaccgagctcctagggccaggactaaaagtagactcgaaggatcaccgagatacaacggcattgcacatggccacggccgaacttcacgtagacagggttaattcgctggtcaggaatggagctaatgactgcgttgagcatggccatgaattacggtcatgcacctaaaaagaaatgctacagaagcgtgaaattgggcatctaatgaatgcaactgaagacatgctcaaggaagacgctataaaagggcgacagaaagagcg

SEQ ID NO: 40824 - DNA, 531 bp, Glycine max
  Clone ID: PAT_MRT3847_136863C.1
atcagcaaaggtaagctatatattaattggagtaccataggtactgaatagtacataaaaggaccatacaaatggttccacaatcagacattcatattctgaaagggaaccagtgtatggatatagatttgctatgaaatttacatgaattaggttcgtaacttagtctactactgatacaaaaagctttgtgtaaaactgcttgcccattgattgaaatggactgtgaaacctttctcaaaaccccttagccaagaccacagtaggaatgtcgcctcttcaaacagtgcattagcattgaaagtggcattagagaacactatactgtttttaagcttccaaatggaccacgttaaggctaaccaccagtattgccatcttttcatccttactccatcaagttgaacacccaaatgttgaaggaaatgctgctttgggcttaatgggaaagcacctttaatgtgcaaccatgtaagagtgttccaccaaatgggttgtatcttgctgcaattagttgatccctagtagtgc

SEQ ID NO: 40825 - DNA, 576 bp, Glycine max
  Clone ID: PAT_MRT3847_136864C.1
gggatgatgagaggaaagaaatggaagttacatggactagtcaagactcagattgtgatgtttatggtatatgtggatcgttcgcaatctgtaatgcacagagttctcccatatgtagttgcttgaaagggtttgaggctaggaacaaagaggaatggaatagacaaaactggactggtggatgtgttaggagaacacaattgcagtgtgaaagggtcaaagatcacaacacaagtacagatacaaaagaagatggatttttgaaactgcagatggttaaagttccatattttgcagaagggtcacctgttgagccagacatatgcagaagccaatgcttggagaattgctcttgtgttgcgtattctcacgatgatgggattggttgcatgtcttggactgggaatctacttgacatacaacaattctcagatgcaggacttgatctatatgttcgcatagcccacactgaacttgataaagggaaaaacacaaaaatcatcattataattacagtgataataggagctgtcgtcattattacttgttcttgtgcatatgtcatgcggaggactt

SEQ ID NO: 40826 - DNA, 361 bp, Glycine max
  Clone ID: PAT_MRT3847_136865C.1
agcgaagagcctagatcacgatgggatgtgctgacgcagagtgggcagctattgtcgagtccgttggagtctctgggaaggtatgagtttttgctggtgacagaccggttcttagtaagcacatgatcgggaagctccattgtgtcgcttacttggttatcgacacatggaggcctgcttgtcaagtgttaaagggtgggatagacgaaaatgcactagtcatcaattatgtacagtgccaaactggtgcaattccttttcctataccagtgatctacgttctttgtgagtcattaaagaagctgaaatcataactgcattgtatgagagatatcttcataatacacctatggatctcata

SEQ ID NO: 40827 - DNA, 660 bp, Glycine max
  unsure (1)..(660): unsure at all n locations
  Clone ID: PAT_MRT3847_136866C.1
aagtcactcttcttagttatacttatcctttcctgaaccttcttgtgatctcaaagcttaacgaatcaatcaaccgctgacatggcagaagaagaagaagaacgcaggatcctggtggccgtggatgaaggcgaggagagcatgtatgctctctcatggtgcctcaagaacctttcttttcaaaattccaaagacacccttattctcctatacgtcaagccccctcgagtcacttattcagccttcgatggcacaggatatttttttgcctctgacataacggctaccatggagaggtatagccaacaagttgccgattgcgtcttggagaaagccaagaaattgtgtaaaaatattgaaaatgtggagacgagggtagagaatggcgatacaagggatgtgatttgtcagatggttcaaaagttgggtgctgatgtcttagtcatgggaagccatggttatggtctcatcaagagggctttccttggaagcgtcagcaatcactgtgcacagaacgtgaagtgcccggttttgattgtgaagaagccaaaaccaaccgccggagaaacataataataataatacgaatctagtatttaccagctttgtttttatgtaaataaataaatagacaaaaaaacagtttggcttttgtccnna

SEQ ID NO: 40828 - DNA, 970 bp, Glycine max
  Clone ID: PAT_MRT3847_136867C.1
atgcgtacggctccgagaagacgacagaaggggacgagtcactcttcttagtgatacttatcctttgctgaaccttgttgtgatctgacatggcagaagaacaacaacgacggatcctggtggccgtggatgaaggcgaggagagcatgtatgctctctcatggtgccttaagaaccttgcttttcaaaattccaaagacacccttcttcttctctacgtcaaaccccctcgagtcacttattcagccttcgatggcacaggatatttgttttcctctgacataacggctaccatggagaggtatagccaacaagtggccgattgcgtcttggagaaagccaagaaattgtgtaacaatattgaaaatgtagagacgagggtagagaatggcgatccaagggacgtgatttgtcagatggttcaaaagttgggtgctgatgtcttagtcatgggaagccatggttatggtctcatcaagagggctttccttggaagcgtcagcaatcactgtgcacagaacgtgaagtgcccggttttgattgttaagaagccaaaaccaaccaccggagaaacataataatgataataataataaattaatcgttactagctttgtttttatgtaaaaaatagacaaccagtttgcttctgtcgcttatgtgttatttgggctctgtgtgttttgtttgtttctcctctaaaggaatatctcgccaaatattaaatgttaaaggctaagtgaagatgaggatgcacgccttttggttttgactttattattttctattcaaaagtttcctattcgtttgttacttttacataatttgtactccatgttgaactattgaatattgataatgctcctaaatcatgataaagtgaaagtaagtgaagtaaagaataaagagaagaaaatgtttagtatccaaaaaaaaaaaaaaaaaaaaaaaaaaaaaaactcgagactag

SEQ ID NO: 40829 - DNA, 142 bp, Glycine max
  Clone ID: PAT_MRT3847_136868C.1
tcctttttccaacatcacaactggggggtattaatgctgcacgccaaaggattatcacttgcctggtctgcgccagcccctaggctatgcagcacatccatggaatttcacatccccaatgggcaattctattttgtacctt

SEQ ID NO: 40830 - DNA, 711 bp, Glycine max
  unsure (1)..(711): unsure at all n locations
  Clone ID: PAT_MRT3847_136869C.1
gtcagaggacacaacgggatgctcatttatacagacggatagtaatatttacacataattagaggagattaagtttgccctaaatcaaatcatagtcaaatcaatttgtannnngagtgagctttccaaaaaaaatatataataaatgacatatttattcctgatcctcgacacacccctcaagctaaagcttcctaagttgagagagcttgttccaaataaggtaaccctagagaaacgaaagacggttctcgccatgtggttgtgccggatcaatgatggcttgacagcagccaacaaaggcccacaatgataatggagaccagtgtgactcttgtcagagatgcgtcacgctttgtgtgcgtgaactatacacgctgaaaaagggccctgcatggggtcacatgcagcggtgttttgagttgactgtgcatatgaatggcatggcgatctttggcgatgagcgacagtggttgaacgtgagctccgacggaaagacaacgggaagtttgtcacacaagggcagagcagccgcatggttcactgcaaaaannnaaatcaaaggggaacacagaatgacccaaaatttannngccagtgtcaaaatnnnnnggcaatagcaccaatggaagtgcggccgcaatggcagnnngatgcgctggaacaatnnnncacgaaaatggtgtttggcacacaatnnntnggtgcgtg

SEQ ID NO: 40831 - DNA, 465 bp, Glycine max
  Clone ID: PAT_MRT3847_13686C.1
ctcctgttttgacagttacttttacttttttctttgttatcttactctcttggggcccgtgcgttcttttttactcttaagtaccttttccaaagaagcttatatgtacgatacctgccacctggttcgctccttttccataatcggcaaccttaacctcgaggaacaacctatacaccgttatttcaaccgcatgtcccaaaaatatggtatcatcatatccctttggtttgggtcacgtcttgttgtggttgttttattacccacagtgtaccaagaatgtttgactaatcatgatgttaccttggccaacagggcacgctcccgttcgggaaaatacatatcttacgacatctccaccgatgggttttgcttccacggcgagtcctggctcaactctttgccgtttaaccttttttgacgttctatcgacgctgtgcgtccacctcttctccggaatccggg

SEQ ID NO: 40832 - DNA, 770 bp, Glycine max
  Clone ID: PAT_MRT3847_136870C.1
cggctgcgagaagacgacagaagggggaggtgggtcaactgcaaccttaaaattcctttagcatgtttctccctctgtaactgctacactttctggtcttcaaagagcaacataaatttgtgtaaggttgttcttaatttttattttatctgtttcctctttcacttcccctaggtgccactcttttttttttttttgtcctttatggagttcaaggttgatgtgtatgttgattgctttccacacaatgtgtgagttgggttcaatcccaaaagaggcaaagacactaactttgttctagcaaaataggcatacttatcagtgtctcttctgtgcttaacctcacactgagacacattattctgaaatgaattgggttcactctcaaatctgccatagtactgatgctatcaacaatcccactagtatttgttcttcttcttctgaatcattgccttatagttctgcctacaagaaacaactagcccctcctcctcctctagattcttcatctggcactagaataagccctgcagttgttttcatctttgtaattctagcaattgtgttcttcatctctggcctccttcacttgctagttagattcctcataaggcacagaccctcttcatcatcatcaatttcccagtccaataggtaccctaatgacatgtctgaatctaacgatccttaccagaggcaattacaacagctcttcaatctccatgactccgccctagatcaggccttcatggatgcccttccagttt

SEQ ID NO: 40833 - DNA, 441 bp, Glycine max
  Clone ID: PAT_MRT3847_136871C.1
ttttttatttaaataaatacatacatacatgcatatatatatatatattaaaccactatacatcattcaaatgtcagaacataattcagtttttacatatatctaaacttgggatatacatgcccaataaaaaagagtcaaggaaccaactaaggaagagttgataacaaaacacaattttcccccaaaataaattccaacgttatcacattggcttggcgactctaaaaaagacttccctccaagtcacctattgctgctcatctcgaagaaaccatgaagggaggattggaggtttcgttctctaccgaatcctcgaaatgagttttgaagattccactctgattaaaattttcttctccatgtggtggtccaacgacaagcaaaggcagctcgtggcgatcactggtggtaagtggtggtggaggtagaggatggggt

SEQ ID NO: 40834 - DNA, 226 bp, Glycine max
  Clone ID: PAT_MRT3847_136872C.1
ctcgagcagcggctgtagtactttcacaattcatagggtcgaatcagcgttatcgacggacagtgttccgcacgtaaaggggctgcagagcaccgtgccgtcgatgtcagttgaatgcgtcagcagacttccaactcgatatcggatcgccgagagtcagtagtacggcgtaatgcgaagtactcgattctgcttccatgcagatgttgcactgtgtgcggcggca

SEQ ID NO: 40835 - DNA, 170 bp, Glycine max
  Clone ID: PAT_MRT3847_136873C.1
atagctaaaagatagataactcgtgactctgagcggaccaggaaatgatctctaattaaaaagaagttgggatttatagcgtacttacacatgcgggggcagagagaggatatacaatgctaaattcaaagatatttattattacgggagatggggaaggagctaaacat

SEQ ID NO: 40836 - DNA, 232 bp, Glycine max
  Clone ID: PAT_MRT3847_136874C.1
tatcaacctatagactatatatagcaaatgttcatacaatagtcttcaagactatgggtcgacttcttaaaacacattgtgtgccacataaacttacccaaaattactcctaatcttaatattacttacctaaccccctttaacttgtatcaccctatatattatctcaccctaaaaacaatttatacttaaaaataaaaaacaacttattcaaactttttaaccacccctc

SEQ ID NO: 40837 - DNA, 489 bp, Glycine max
  Clone ID: PAT_MRT3847_136875C.1
ctcgagccgcatcagctcgagtagaaaaaacttaatcgattcttcactttgctttcctaatgcgtcagggccaacaagaccgataacaagctttagagctctgaggctgaggtccaggatcggggtgactatgactttcttgggttgaacaaggatgaagaagacgtgccttatcctctggaggagggcatcgccaccgattttcaaaaagtgactgtgtggaaccaaagtgagatcaagcacaggctattagagatgctccaccggtctgaccggcgttgtagctcctcgagggaggaggaaggataacatggatagaaaaggaagaaaatgacgcatgactagatgaggctgaaagagaatatcgaggataacatagacggtgatcatgatcatcacaaggatgaggacacaaatgtccctgttgagaaagttgaggttgttgaaacagcacatgctgaggaaaagatagggttcctcggctcgatt

SEQ ID NO: 40838 - DNA, 351 bp, Glycine max
  Clone ID: PAT_MRT3847_136876C.1
aggcgtcaggacacgagtcaacggaggggagtctacggtgtggagtagactagagttgggggactcaaaattcaccacaattggcggcacttggtgagcccaaagcacatcatgggttcactatcaggggatactagagatttcagatatgccaataccttcaaatggattcagaagctcctcattcagaatgacagtcacacgcacatttagactctctcgaacacactaatcgcacttagcaactgaacccgtttagcaaatgatagcgacctcagcgtatcctctatgagcaataactacggcacacttcattcctcgagaaaaaatagtgcacactgtggctcaaca

SEQ ID NO: 40839 - DNA, 400 bp, Glycine max
  Clone ID: PAT_MRT3847_136877C.1
accacgcgtacggacgctcacacagaatcatgatccctaagagcagcagcctctagggtcagctcaaatgggctcttcagtgacagcatctgtggccctaaaacctgtccctaacactgttgagaagtccttagtgacaggccttacctatctctcaaggaactcttcttcattcacagctgaggccagtgtcaagaagatcaagactgactaaccttaaggaactaaacgtggcatggctttgaacgatggaactgatgcatctggcacgaactgaaaaggaaagggtgtttaccacattgtagactaatactgggctaatgtctatggttacagtcctatctacgacaccaaggactgggctgcaaccgatgatgcctacgctggtactactactggc

SEQ ID NO: 40840 - DNA, 1574 bp, Glycine max
  Clone ID: PAT_MRT3847_136878C.1
gattctcatggtagtgatgatgttagttcaaatcctgctgatgagacgaatgatgaatgcagcgatgcttctcaggaactaaataaccaagttttggttgatgggattatctgttccaaatctcattctgaggaaatgatgtctgatccaatttcagataaatgtgattctccttctagaactagtaacagtgaactagaaatgaagaataaagtagcggctgctcctcctgttgatagattagattcttctaccaaatgtcaatccatttctccaattgacacttctggtagtagtcacccagtagatattttgaaagttcaagctttggttcaggaaacgtgggcggacgcgtgggttattctgatccatgttcagaagaagaaaaccttgacaagaagtgtcactcatccactgctatgaattgtgattcgtcagagcttgacatcaatccagtgttgaattctcaaatggcagacaatactctgcctactaaagaggtttgtatgaatgacactcttgaagttgttccttcaggaaatatatctgaagataatattacaaagagaaataatcgaaatgtagatgaatccagttctgctctcaatcatgctgatgagagtttgttgcaagtatgatctgattccaatggtgaaattggatgtgaaaatgagaaggatttacgtttgaacccaggagttgcttcaaataaaatgtatttttgatgaaagtggcataaatgcttccggtgattgttccgagactgttctggtctaacagaatgactgagtcctgtacttctcgtgatactctccttaagtttttttttcagagcttcattgccttgtaagcaagtcaattttcaaggcatttgaagcttctgcaatgtgctttgatctgggtattatgaataagttctattgattttgagggaaatattgttttgtcccttgtcattgaagtgaattttattttatgtgaatgtttcttctgccaaaaagattcaactgcatctggcaccagacctgttgccgtatgatcatgtgtagccgaataggtgaagttactggggagtaatatacaacggctcttcgacagaagcaaatactgattgtgctgttcctattgtatatatctgaatctggtagagtggatgcaggtttctgctcaatccctttgtgccactcaatgtccgcagtaattcatcaatcaccacatgacataatcaattttactttgagcaatttttttacatagatttttttccttttttttttctagactagattggtagcatgtataatgtgtttaatctggctcgactatatttaatgagtaatcgagggaagcaagaaattatgattcttcccttccaatccgggtcattgtattcggcttgtggcccatttctgccaaagtttcatagaattttgtcataatgtgggtttttttgggtggccctatgttgggtctcttggtgtacactgttcagcaactgacaattgtatttctggtaaagctttttattttgtgctttaagaacaacaatcacaacaaaagaaaaaataattaat

SEQ ID NO: 40841 - DNA, 657 bp, Glycine max
  Clone ID: PAT_MRT3847_136879C.1
gaaatgtattttgatgaaagtggcataaatgcttctggtgatagttccgagaatgttctggtctaacagaatgactgagtcctgtactgctcgtgatactctcaagtttttttttcagagcttcattgccttgtaagcaagtcaattttcaaggcatttgaatcttctgtgatgttctattgatctgggtattatgaataagttctattgattttgagggaaatattgttttgtcccttgcattgaagtgaattttattttatgtgatgtttcttttgccaaaaagattcaactgcatctgcaccagacctgttgccatatgatcatgtagccgaataggtgaagttactggggattaatatacaacggcccttcaacagaagctaatactgattgtgctgttcctattgtatatatctgaatctggtagagtggatgcgggtttctgctcaatcccttgtgccactcaatgtccgctgtaattcatcaatcatcctatgacataagcgatggtactttgagcaatttttttacatagatgtttctgttttcttctttcttttttacatagatttgtaccatgtgtttaatctggcatgactatatttaatttaatgagtaattgagggaagcaagaaattatgtttctttcattcc

SEQ ID NO: 40842 - DNA, 430 bp, Glycine max
  Clone ID: PAT_MRT3847_13687C.1
tcgcttttttttaaccaaaaccaacatcaactgtggtacgttatcagttgcactacgatgatcagggtcgcaaggtctactagtatggttacttttagaggcaaactgactaatgtggcaacccggttcatgccactagtgtaacttatgtatccactaaaagacttgaaggctacattgaagacactgattagctgctatgagaccaccggcgtctatcctgagaaagataccggttggcatcatgttaggactgtggtactgaaggtgacactatatagcaactccattatgctattggtggatatgcctgaatacacatcggtagagagcatgaaactaccgaggataatggcctaaacacctgtagtacctatagaacgactggtgtctatcctggtacagacacccgtaaccaacttcatgcgac

SEQ ID NO: 40843 - DNA, 246 bp, Glycine max
  unsure (1)..(246): unsure at all n locations
  Clone ID: PAT_MRT3847_136880C.1
agcaactgggttnggaaccactttcatgatggacatcgnntngaccgagggtccagagnttagctcgaancacgttgggaggncncaagggctgtttggcgtggcctctntggagnaccgtggttngtgatgcncatgagcttagctnncantnannggtgagtaatgctggcagcactctcagnaatgcttgggnggaaccctgttcaggacactgttngggaaatncccattttngnaggcacg

SEQ ID NO: 40844 - DNA, 496 bp, Glycine max
  Clone ID: PAT_MRT3847_136881C.1
gcatctctagctatctcgatcgaactgtccaaggtcctgtcactactaggtcactacggtgtgagtcgtcgcactgtaagtcaatgcttattagtataaggtattaatattcgcggtgttagtctggtttacgagtcaacagttgttcgtcatctacacaagtcaccagttgttggtgctacactaaacgattttgaagggaagtctatcgtcgtcggttgcgtgactacaccatacaccttattcgtcgcgcggtggtacgtcgcataacccgccgccgatactaggggccactattttagagacatcagagatggacggatgtggcaacgtgttatgtgggaatgccaaaacgttggcacaggtgtaggtcaagcttaagttcagtgccctggccaatgctgggaaaacaggtggtctcgatggagagcggatgatgatgtagctggatattattgtcgcgaagagaggtggtggcgtggtactgttgacaatg

SEQ ID NO: 40845 - DNA, 224 bp, Glycine max
  unsure (1)..(224): unsure at all n locations
  Clone ID: PAT_MRT3847_136882C.1
aaaatcacaactgggggctnactctggatcctcacaggaatcatcatcatcatcatcatcttctgcggcaacaacaacaaccacctcatcatcctcatacaaaaaaaacgagtctaaattcaataagacctgtgacagaccaagaaggagaaacccagaagaccaagagtctcattctcatcctcaccaattccatatgcaattccaacctccttctcctcaac

SEQ ID NO: 40846 - DNA, 244 bp, Glycine max
  Clone ID: PAT_MRT3847_136883C.1
aaattaatgtaaatttaattttgcagtcttttgtttaattttataaatattatatacggatatgttaacatactttaacttattcttttatagatccaaattaggattggatctagcgggatgggtagtccttcacaacttggggaacagagtttcgaatttgagacaatgttgtaattcaagaatatcaacgttatttgctaacttacatctttaggagtatattagcaagttatacattgat

SEQ ID NO: 40847 - DNA, 509 bp, Glycine max
  Clone ID: PAT_MRT3847_136884C.1
accacgcgggctctctcgcatacaaacactcatgacaccacgcgtacgtccgctcgttccgaagcttactctccggtggatgctagttgctgcttaaaggcatgactcagggcttgtctgtcttgcgacggtcgacactccgtacgagcgtctggggggacgaggacctatactggagtccggctcactgactgcagacgcacacgcagcttcttaccctgattgagactgaacagagatcaatggtgagccatcgcacaggagctcgtccctatggacttgcgagcatgcgccagaccaggcgtgcgaagaaaccgctcatgatttggctggatgaattactatggtaactctgttagaagctggtaaacacacacgtggcatgctgccggctgctgacatcttacgctccctattgtggggtgaaccacacggcccttggtgaattctcctgcactatgatacggggagccctcctttactgacttacaagcattgcagatctgaac

SEQ ID NO: 40848 - DNA, 366 bp, Glycine max
  Clone ID: PAT_MRT3847_136885C.1
cttgttgttagtttatagaaattgttttttgcaccgagcacaccaacaggagacctgggaatctttctttggttaaaagcacacagacaatgggcactgtggtttacaatgactctccacctaagggatctaggggtcagaacacgggagatgaccacaaaaagccaaggggcttttaaatacgctataaccttccatagcggcattgaatccgctcgttaagatagatgtgataaagtctgatatatcggacatactagaccagaaatggaaaccactattcgtgacacaaatcgtggagaacatacaacacgcaccctacccagatgcctatatttccagagagccctgagactgatggtgcgc

SEQ ID NO: 40849 - DNA, 1246 bp, Glycine max
  Clone ID: PAT_MRT3847_136886C.1
cattatcatcgcccatcagcttctctttcctttatcagctttttactctctctttctgacctgggttttactgggcgagacttgttaaatgagggatggaggaaaaagctaattgtaatgcctattacttatctaatggggtcttacactcacccttttgatgtgccccatggttatatatggagccctcactttgtcaccaaaatagctgactggggaccttgaattgatgtaaaaacatttttattccttgtttgtgattcaaattatgtaccaccaaaatagctagtaacgagtcttgatgcgggcgaaaaacctatttatgttggattggttagccttcctttacaagaaccagataaaatgacgcgaattataattcacgctctggaagaaacagggcagagaggtgtcatcaacaaaggctggggtggtcttgggtctttggcagaacaaaataaatctgtgtatttattggacaactgtccgcatgattggctgtttccccgatgcactgcagtggtacatcacgggggtgctggaacaactgccgctggtcttagagctgaatgccctacaactattgtacctttctttggggaccagccattttggggagatcgggtacgtgctagaggagtaggtcctgcacccatcccggtggatgagttttcatttgataggctggttgatgccatacactttatgctgaaaccagaggtgaaaaagcgtgcagttgaacttgctaatgccatgaaaaatgaaaatggggtgctaggagcggttaaagccttctataaacattatccggccgagttcaagcgattagcctccacagccgaacccaaatcagttcataaatatttctctatacgaggatgctttggttgctctaaatcttctggatataaatagcttttttcatgcatcgaccataacaaaatgcatacaaaaaacctgtcttcatacagcatactcgtccatgtaaccatgtccgttcttcaatctaattctgatgtatcagcaattgtgaaaagtaaattgccccggtgattttgttgagtttgagcttcaccagaagcatttatgaaggttccggtatagtccaatttactgtcaagatcttgctactttacttttttcttttagtgtaaggtttgcatgatatacccctcaacattaacgagtgttttttagaatataactaatcattttctctgcaatatttcatggacaagaagtttgc

SEQ ID NO: 40850 - DNA, 272 bp, Glycine max
  Clone ID: PAT_MRT3847_136887C.1
gcctccaaccaaacctccggccaagcctccgtaacggtgccaaaagaccacagaaagggaaccaattaagaattccgaagggtaaaatgggaactacaatgttaccaatagacaacctaatagaagaaatgctgcctaagagatatgataatttggaaactcaagggaacaattgatctaaggaaactgggtaaaaggttaagaagtaatgtgaaatcatacatctccaacaactaagagatacaactcaaaaaggaaatccacatatataa

SEQ ID NO: 40851 - DNA, 279 bp, Glycine max
  Clone ID: PAT_MRT3847_136888C.1
cgtaacctcgccactcggctcgacccacaacaaaacccccaactccccacccaccacctacgcgcacacccaccacaccaccccccaccaccaacaaccaccacacccccaccccaacgcccaaaccaccaagcacaactctgatctctccttcaagccaagctcacaggtaaagggcatcacatcttggagcgcacttcatagtgaactccttcacaatcagaagagcaagaccctcggagctcctcaacgttctttctttcccaccacacaacaaca

SEQ ID NO: 40852 - DNA, 626 bp, Glycine max
  Clone ID: PAT_MRT3847_136889C.1
gctcgacgatggaaagcgtggacgcgaacagcgaagtcgaaaacgacgcggaaatgaagctcttgagagataaattcaggctctccgcaatctccatcatcgaatctcaagcaaaacaaaacggcatggaagtatcaaaagtcgtagtcacttgcgttgcggatttggccttcaagtatacggagcgcctggctagggatcttcatctatttgcgcagccatgcgaatcgtacatctgtaaatatggaagatgtgatacgtttgtggacatagagaatgaacatgtatctggcatgttgaggagcttctccaatgatttaaaagccatggatcctcaatctgaaaggaagcgaaagaaagaacccaaaaagaacgacaaaggaaccgcttagcgcatatgcctgatgcatatatatggtcctaggaacatattttggtacggttagttaattttatgtatatttttctctcctttatatgtttttggatttggtagttagtgctggaatctattagtccatcttaatcatttatgcatgcctttaaacttaattccagtaaggcagtaactatgagtgcgtgattgaagtaattaatttagaagcatttttttaaaaaaaaaaaaa

SEQ ID NO: 40853 - DNA, 265 bp, Glycine max
  Clone ID: PAT_MRT3847_13688C.1
cggctcggggaataaaagagaagaaaagaattactaaaatagttggtactgtgcggggtttgacattaaggtggagcaatgaatgaaagaaactttagtagtcctagtcctccattgacattgtaatctgagtttgaaggaaatcaagaatcatcatccatcgaaatggcagcagcgtcgtcttcttctcctccaaaggacgaggatcgggaacaagaggaacaaagccaacagcctcagcctcagcctcagccagtcgaagagt

SEQ ID NO: 40854 - DNA, 181 bp, Glycine max
  Clone ID: PAT_MRT3847_136890C.1
atgaacggctgcgagaagacgacagaagggggggctgttggggaagttttctttttttttcccaacaacaggtgattagagagatgttcggtcaggtcatacggtggcatcaaggacaaaacgaggcggttcagcccggacaatcggggtgtcacgacctgccagcttacaagggtccagg

SEQ ID NO: 40855 - DNA, 186 bp, Glycine max
  Clone ID: PAT_MRT3847_136891C.1
ggagcgggtgcgttcattaacatagacagattgtctgtgcagtgttgtgtgcttgcgtcaattgtgtagccgtatcatgaactttaaatgacgcacgaaggatgatgcattgtgctatggactcatatgggcttgtggcacaacactgaacctgcaaggggccaccatgtgttatgcgtgggggac

SEQ ID NO: 40856 - DNA, 389 bp, Glycine max
  Clone ID: PAT_MRT3847_136892C.1
gtctcgagaaacaactcattttctggctcacttttttctacttataatagtactttccggtccacggcgtccattaattccacaagccgacaatgtttgcaactgaatgaatgcacactttgtccttgtgtcatgatgaattgcaatcctatctatctatcaaagtttcatcaaatttattaatgctgcaacttatgctgcagaataaaaatgaacttataattcaactagaatataattttattaaaccacacgttcataatattatgcaaatttactattagcaattgatgaatgagataataagagatgcctgctatgctgcaagggtccagacaaagttatatcatctttttacacattcccgaatatcataacttcgatattca

SEQ ID NO: 40857 - DNA, 277 bp, Glycine max
  Clone ID: PAT_MRT3847_136893C.1
cgatggtggtttccacaccaacagtggtgcaaacaaacgagaacgagacccaaaaactcacacaaacccattgctggcattcatctcaacaaaacccaccgttttctgcgaaaatcaaacccacactcaccactctccaatctcccattctcccctcttttctccaactcaacgcaaccgttacaattgcgccgaatttctcgaccttcacttcgaggcgtgttttgtgagcacgaaatacgaatatggatcaccacgaggatgaaagtaacagcaa

SEQ ID NO: 40858 - DNA, 359 bp, Glycine max
  Clone ID: PAT_MRT3847_136894C.1
tttttttttttttttttttttttttttttttttttttttttttttttttttgggtttttttttttttttttttttttttttttttttttttaaaggaaaaggccccaaatttaatttaaggggcccttggacctcaaaatttttggggaaaacggtccactttaaaaaattttgggagaccttttaaaacttaaaattttttttttgcccctaaaacattggaaatgctaaaaatgttccccccaagtttcataaaaatttttaacccttgggttagcccaacaccttttacaaacagaaatttttccttgccaaatttgttttgcccccaatttaaaactggaaaaaaatcccccttt

SEQ ID NO: 40859 - DNA, 255 bp, Glycine max
  Clone ID: PAT_MRT3847_136895C.1
cggccgccacgtttttttttttcttttgccatggtaatggccacaacaacaatggcctttccatgatgatgagggcggcgataaaaagtcaccataaaacacagaagggggatgagcaactgcacaagaacaccaccactgatgcaagggtaaatgcttaatgctgaaaagccctggtggtaccccattttataggcacacgcacatcggctgcatttttgtggaacccaaggccttgggtgtccctcaggaccc

SEQ ID NO: 40860 - DNA, 391 bp, Glycine max
  Clone ID: PAT_MRT3847_136896C.1
cggtcgtccttttattatttattacttttatataaaatgagaagggaatgcaagctagcatcaccataacattattttaacaatcacaaacaaaaacacggtaaggacaaaaaaaaaggttataatttaaaagagatacataacatatatcatcaatcacttgggatgtttgagagcactgaatcctgctatcaagtgcatctttcagtaactttgaccttcaagccatgttccatggcaagtatcatagaaagccttggggttataggatggccttccaccacctgcatgtgaaacctccacaagaaagcaactgcgaccatcttcatttcaataagggtgacatctttacccaaacaacttcttgggcctgcattgaaagctatgaact

SEQ ID NO: 40861 - DNA, 335 bp, Glycine max
  Clone ID: PAT_MRT3847_136897C.1
cactaaattactacataataatgaattgatgagtagtgtttattaagaacgaatattctaacttgaaggttcttaccaacttgggtacatgaagaaattcttgagggacatagacatattagtcccaccaaggaagctacttacccgccgatccgccggcgtacatgacgttttcggggacatgttttacgatgacaccctcagtgacaagtaccttaagcacaatggcttcaccgactcctgcgacgatgacttcggggacccttacgcctccgatcaattccgcatgtttgagttcaaggtccggggctgtactcgcagacggagccatgact

SEQ ID NO: 40862 - DNA, 716 bp, Glycine max
  Clone ID: PAT_MRT3847_136898C.1
cggctgcgagaagcgacagaaggggaatgaaggaaaaacgcataactgaatcgacgaaactgaggcaaaacctacatagggaaggttgccccaatatcagcatgcttcccattgcactgcactcatcccatgcgaattaagctttccgattcgttattactacccttctcttgtgaattggtcgaatatatgctccaactatggataatatgaagaaagatgaaccccaaaatcggaagcaagatgaacttgctgaatcgcttgatggtctattcagtagtgtttccaccatgatcaaatcagagcttcaggggacaaataatcatctagagctcttggagaagatgaatgtaagagtagcagaagagtacaaagggtttggtgacttggcttcagggttgagggtttttgtggagcagttgaaatgcaagagtggtagctttaacgagtatgtcgagcagattgatagcattgagaagcaggtaactgagtttgaagctgtggtctctatgcttgataagtacatcgtgttgttggaatcaagagtgcaatctgtgtaccaaaccaaaatccatcttcccagtcaacaatgatgtaaaatttttacttttcatgatacatttaccttgtttccttgtctcaattcaaagaattgatagatttatcatttaccttgcttcctagtttcaattgaaagaattgatagatttaccatt

SEQ ID NO: 40863 - DNA, 713 bp, Glycine max
  Clone ID: PAT_MRT3847_136899C.1
ctacggctgcgaaagacgacagaagggggaatcgacgaaaccgaggcaaaacctacatagggaaggttgctccaatatcagtatgcttcccattgcactgcactcgtcccatgaaaattaagctttccgatgaattcgtttggacctgaaaaacaacacctggtttgattgtcaccttgggtcgcacagttattactacccttctcttgtgaattggtgaaatatatgctccaactatggataatatgaagaaagatgaaacccaagatcggaagcaagatgaacttgctgaatcgcttgatggtctattcagtagcgtttccaccatgatcaaatcagagcttcaggggacaaataatcacctagagctgttggagaagatgaatgtaagagtggcagaagagtacaaagggttcggtgacttggcttcagggttgagggtttttgtggagcagttgaaatgcaagagtggtagctttaacgagtatgttgagcagattgataacattgagaagcaagtaactgagtttgaagctgtggtctctatgcttgataagtacgttgtattgttggaatcaagagtgcaatctgtgtaccaaaacaaaatccatcttcccattccacaatgatgtaaaaattttacttttcatgatcaacatttttcttgttttctagtttcaattgaaagaacacttgatagatttacctgtggc

SEQ ID NO: 40864 - DNA, 399 bp, Glycine max
  Clone ID: PAT_MRT3847_13689C.1
ccgggaccggaccggaaggcccggcccgacccacgcgcccttttgttgcacccagcacacggcgccgaacgaaggggggggggcaacgccgaggacccgacgaccaacacacacagaaggcggccgcaaggcaggaaccaagggaagagaaacgcgccggaaccgagacgcaacagcccaggacaaacgacgcacaggccagaggggggaaggaaggagggaaaacacacgcaccggaacaagagcggcaacacacagttccaaaacccaaggacagggggggggcccacaaaacaacacagggaaagggccaagggcgcccacctgcgaccggcccggcaaccacaaacaaaggggggcccgtcccacaagacccggacgcacacacccggcacaagc

SEQ ID NO: 40865 - DNA, 513 bp, Glycine max
  Clone ID: PAT_MRT3847_1368C.1
cactgctcagtactcttcaggcaggcattaaccctttgccctaatagaaggggtgtgcccttctgccacatatgaagagctccatcataagggtacacctttggatgaggggggtcaccttccatcatttcatacagaatcattgcacatgcaagcacatcagcctgatgatcatatattcggggagcgagaactccatgagccatgtcacggtagcttacatgttaaccccacatcgtgtatacttgatgagccctatggaccttaatgagctgactaagatcagaaccaccaactcttaagtggtctgaactggagttgactcatagaacattccttggctataggtctagatgaatgatatcattagaatgatcgagaagataagacatacctctacctatatccaagccatgatcgatggctgatgtaggactgagagcaccttagagcttgaggtactgatcaaaatcagctcctctcagatcctcaggcttttacataagacgctat

SEQ ID NO: 40866 - DNA, 370 bp, Glycine max
  Clone ID: PAT_MRT3847_136900C.1
gggaaaaaataaatttttaaaaaaaccctttgggcttgaattcataaacaaaagcccgttttgccccatgaacccaaaacccaattaatgggcctatttttggaggaaagggtcttccaaggggggcaacttcactaaaaaaaattgggccatttccttttgattaaccaaaaattttttttgccacaaaaaacccgttacccaattttcccttgaacaaaaagccatttcctctttaacccaatttggttttaaaaccccccgccattttttaaacttccttggaggaaaatcaaaaaggcatcaagtttttttgttctaaaaaattttaaaaactttaaaacattggcaaaggtttttttttcctttt

SEQ ID NO: 40867 - DNA, 670 bp, Glycine max
  unsure (1)..(670): unsure at all n locations
  Clone ID: PAT_MRT3847_136901C.1
ccacgcgtccgcggacgcgtgggaacggatctacattagaagttttggggtagctctccccacaatatttttttcttccgcttaaaatatagttaaaaaaaaagaagttataatatgaggacaaccccacttgttaaaaacaatatgagcacaatcccaaatgctttcgacgtgcagatggaaagaatttaccgccacctcccaaactttaatcccaatggaaaaaagtatgggcatcaaccatttaaaaatgctatgctataaaacaaaaaagtgtacgtccatcactctattcaatggtcaatgtcgcgtctttcctttgaattgttttgtataattaattaaagtattaaagttggaagcaacacgatgcagagggagtgttagtgaaacattatttaacacaatatgtttttattagttaatatttattaaaaattataaagagagtttattaagtaggaccgttggagtgagaattatataattttatagtttttaatatattttaattaataattttttgaaaggctaaattttagttaataataaaaaggtgggttaaagattatttttattanaatagttaaatatagttgtgaattagttaaatatttagatatatattataagttgagcatattagtaaaataattaatatttttttaaa

SEQ ID NO: 40868 - DNA, 152 bp, Glycine max
  Clone ID: PAT_MRT3847_136902C.1
tccacattgtatcataattcaccattaccgataaactcaatatgatccatatggatttatctggtggggtagcctcatttccttatacgtgttatcaaggttgtgtcgtcgattaaaatgaccctccatatatatgcaacttgtgtagtccc

SEQ ID NO: 40869 - DNA, 180 bp, Glycine max
  Clone ID: PAT_MRT3847_136903C.1
catatcaaattttactccaaataaactaaggaagggtatatccagaccataggatttatttcaaattccggtggggcataaacttcacagaagaaaagaaaataggggcgaaaattaatcaatttaataggtcccttactagatataaatgtgcccgagcattaatcctcgagccgaatt

SEQ ID NO: 40870 - DNA, 377 bp, Glycine max
  unsure (1)..(377): unsure at all n locations
  Clone ID: PAT_MRT3847_136904C.1
ccacgcgtccgggtggtcactaatagctgggagattgcctggacgtacagataatgaagtgaagaactattggaattctcatataagaagaaagcttattagcaaaggcattgacccaaataatcatagattgaaacatgcgatcccttcttcccttcagaattcactcatgtctgatgatagtgcagaagcctttaggatgaaagacactaataagaacgagacaagtaaattacctcgtgtctacaaccatgttgaagtttcagatgctgcaagtggtgaggctgagtcaccgtgtgcatggcccgatttaaaccttgatctctctattaccaatcctgcagcttcacagagtatgnnnggaaacaatgtaaaac

SEQ ID NO: 40871 - DNA, 367 bp, Glycine max
  Clone ID: PAT_MRT3847_136905C.1
ttctgtggtaagaagacaacagaaggggtccaggactcaattttaagagagagctccgaatgctctaatgaggaggagtgtcttctgcgatggaggcatgcctgaagcttgaaagggtggaagaggggacattataggaaggtgtccagagcaagagagaaggccacggggaacaccttggctctgattaatactcctgctcacgaggactaataaagaagtacctgccaccactatgaccaaggtttccattctctgaatgctctctcgcgatccccatgtcgtttggttaatggatgtcaaacaaggtctgaacaatgcagggcacactgtgctttacttggtttctgagttcattggaccccta

SEQ ID NO: 40872 - DNA, 858 bp, Glycine max
  Clone ID: PAT_MRT3847_136908C.1
gatctaatggaattcaatgattactgaatattgtctcgttggccgagactgagaatacctgaatggcgcatcctgtgatgcagattgagtctatacaaagaaatagacatgttaaataactgtctgactaggagtaaacacagggaaacttggaaaagggttcattccaaaacagttgaaggaatgaaacattatttatgttcgtaacataaaacaagtacccttggtgtatgtttttcataacatgatcaaagtgggcattacagtgcatgaataccaaaaatagcttccttgttgaagtctctagaagctgtcctgaaacccgtatttttaagcttggcataagtctcatgaaaagcacattcatagaaatcctgcccttgcaacttgagggtcttggaagagatgccagatgaattaggtgacacgaacatatcataatttgacccgccattgttgtggtgattaatccgccattcaagttgtacttttggcatgctagttagcttctgttgctcagaagtcatgtgagactcatcattgaataaaagaggcttctcttgatctgatgtaagattaacaatggtgatatcatggatactaggcctccttttattgtctttccctccagaaagcttttgccttatataatacttttgagcatgacttgccacttgggtgggagtttttgtcacaacaaaattgcgagagatatttctccaatcccccttaccatactttaaaagtcccataagaaaacgtctatgttcctcttctgtccaaggaacccctttctttctctcctgatcagaactcctgagagttgcagggcttttttctgcatgcatcataacattt

SEQ ID NO: 40873 - DNA, 325 bp, Glycine max
  Clone ID: PAT_MRT3847_136909C.1
gttttcgcgtggggccgcgtagattgacgacgaatggacattaacgccggaaattatgtggcaaagcccgacgtgctggtgcaatatgatgcgtgtccagtaacagatgattggggatcatcgcatgaggacaaggttgcagatcacacacaaaaggtgcgttctgaagcagctgggagcaatggaagactggcatatgcgtcagcgatgccacatgatgagccagtggcgccagcacaaagtgatgaagtcaactgtgactacttgcctgccatagacgataggcaagaggaaggtgttcacactggtgaatcgagatctggtg

SEQ ID NO: 40874 - DNA, 592 bp, Glycine max
  Clone ID: PAT_MRT3847_13690C.1
ccacgcgtccgggagccgctgctcaactcagcaatggaaaccctagactcagcacggtcaacttccttcaaaaaccaccgactctaatcctcaaacctcatctccattgccgtcatcggtgctcaggttatgatttttgttcatgaagaggaaagcaggaggccagtagcgtagaaaccagtggtcacatgccagcttcgtgtgaaaatcgatggttctctgcttcttccgcaggaagatatcacgcactcggcaagtatcatctttaccaacggaactgcgaaggagcgaattagtgttgtcttatagggacatgccacacctgtgtgcacagacaatgacatacaaaattctagtgcctcttaattccttttaatgggaagtagtaaattgcaatccaaaaagaagtgttgctagaaaatatagctgtcacatattcatagccaatggagtcaactgttcaatcaatgaagtgtttcttcaaaggatcaacaatagttcgctgttacactttcttatattctgcaaaccagagtgattctggagatggtggtggaattcaggatttacgtttattcaatcacttccatgg

SEQ ID NO: 40875 - DNA, 770 bp, Glycine max
  Clone ID: PAT_MRT3847_136910C.1
gctaaaataaaattattaaaagaggcttgccagacctcaaaaattagctaaatatttcaaacttgaataatctgacaatggaaattatgattggggacagatataaataccaaaatggaaaagtgtcagaaccacaaaattgactatgtttacagaatacaataaatatgctagtactactcgaattaaaataacggacaaagtgaaccttcaatcttaaatgtgcttgatgtaatgtcaatggttcccacataaaccagaaggtgtagtcctgcaatgcaatgaaccttattgaaggaccatattatctactggcctacaaatggattgccaacctgtacataacaggaggacctctctgagagaatgtccagctgcttccatagtccatgttgggtaatattcgctaggatgaaacatggactcttctctgttttctgtaagcaagcttggctcagcaccattcagaaacatgtctccttctgatattatgaagccagacttctgctcctctttatctgccgccttctcagtataaaattcaaaagtctttttcttagttcctgcttcatatacattacactgagagtatatctgggattccacactggcacaaacagcatatatcccccagtttctggtgtaattgttgtacagatgaacttttccaaatctcacacgaggctgtctttgccgtgttccatcaaagaaacaatgggaagggtctttccggatgcatctacccaaagtatgagtccgcacgctgggtc

SEQ ID NO: 40876 - DNA, 408 bp, Glycine max
  Clone ID: PAT_MRT3847_136911C.1
aggccaaaaaaaaaaggggcaacttcctaattcttccaaaacccggacccaaataaaagccttccaaactttttggtaccccccccaaattatgaaggaaggggttaaaccccaaccccaaacaaaaaacgggtatggggattcgggttaaaacaaaaaaaccgcccctgttctaaaaatccttccccaaaaaacctcccaatggaacccaacccccccattaaggaggggggccccggggggcccccacaaaggcccccggggggggcttgaaaaccctgacggccctgctttttgacccccccgcccggggaaaccccaaaaaaaggggagggggccccccccccgtttcaacaaccccccccccttttttagggtgccccggtgcaactgcaacatttttttggt

SEQ ID NO: 40877 - DNA, 544 bp, Glycine max
  Clone ID: PAT_MRT3847_136912C.1
cttttggaagcattgttcatggtctactgcgcaagggtcgattactaagaggcattagcgaaggtggatgtcatgaagcagaatggcataacacctaccatccatgtttttacgtcactaatagttcatttctttaaagagaaacaagtagagaaagctattgagacttttgaggagatgctacactcaggttatgaaccaaccattgtcacatattctgcacttatacgtgggtacatgaacgttgggaggcctattgatgcgtgggatatcttctaccgtatgaaactcaaaggaccctttcctgattttaaaacgtattctatgttcctcacttgcctttgcaaggttgggaaatctgaagaaggaatgagacttatttctgaaatgttggacagtggaattgttccaagtactattaattttcgaactgttgtttacgggctaaacagagaaggtaaacatgatttagcccgtgttgtattgcaacaaaaatcagaactaagaagaaagcgcaagctcataacttgatttctccataaca

SEQ ID NO: 40878 - DNA, 471 bp, Glycine max
  unsure (1)..(471): unsure at all n locations
  Clone ID: PAT_MRT3847_136913C.1
cccaaactttggaggggcgtcaaactatgggagcaatgtgngagatgggccaatatttantgcctttctacagtggggactccgggcgagataccactcctataggctataggggggggaatgggagaagcgattctcttatgagttcaccttctcngaatgtgtggggagatgggggcctcaataatgccaataaccccatcagccccagtcctttcttaggagtctggagtggggcttttngggtgtcaattgggaatagtgggacagggtgnggggcatcacttccancccaggggagaggggcgtgcttctnggtatggggctgggagtaatgtgtatgagaggggggatagcgnctttnggttaggtgggggagggacggagnagacaacaggactagtgtgacaccatcctcttcatttaatgtgtgaactgggggggatgaangagcctatggggacttatacc

SEQ ID NO: 40879 - DNA, 654 bp, Glycine max
  unsure (1)..(654): unsure at all n locations
  Clone ID: PAT_MRT3847_136914C.1
cagcagaagggaaaacctggnaaatctccatttctgcatcttcacttgcattgcttctagcagccttatctctgctgttccagccaagctgcaactatcattttcattctggaacaaggggagatcaaaaccggagtcagttcctccgccatgcactgatcgtttgagtaatatgaaaacagttgattcagtcaatttccgtcctgtgaccagccagaacggtagcttgaaggctgtgggcaaaacacatgggaaagtcaagacgagaagctctttaggtgggaaatttcttggggtgcactctcagactcgatcacatatgttggcttctgcaaattccagaagcaacttgaaggagccaagagtgagcagtgacatgtggttgcatgcagcaccagagagggatttagacagcatactgtctttgcattcatcattgtattattttgaataacatagagagactatttcgtgatcatatcctgtccattttttcccaaataagagaggttcccttgaaatacaagttttgagagccgttttgttgttgttgccctttctgtagcaaaaaggagcacacgtaggattttggtgagggcagagacataacaaaatttgttattttattttattatgtatgtcattctgaatctg

SEQ ID NO: 40880 - DNA, 1864 bp, Glycine max
  unsure (1)..(1864): unsure at all n locations
  Clone ID: PAT_MRT3847_136915C.1
ggaggatgcatggatgtggtgtatatgaagttaatgagcgtatcttatatattttattttggagaatatgtggatgaggtttcaattcggctcgaggacatttcagcgatgcatgctggtatagcagaagttgctgctgcaaaggctcgcatgtttgttaacaagccagatggaatggttagagaaaagagaggcccatatagtgatccacagcatccttacttttatgaagaagaggatgtgtggatggcacctggcttcattaaccagttttatgaagttcctgattactggaaagtatatgtgcatgaagtagatcaagaaagagaaatgtggttaaactctttttataaagctcctcttaggttacccatgccagctgagctagagcactggtggtcaaaagaggagaatcataagattcctgaatttgtccttattaacaaggaaccggagcctgatcctgaagatccttcaaagcttatatatactgaggatcctctcatcctccatacaccaactggaaatattatcaattatgttgaggatgagaaatatggaatacgtttattctggcagccacctttgggaaagggtgaggatgtggatcctgaaaaggctgtattcctgccccttggttatgatgatttttttggaatagaagatgagaaaaaaaaggagagcatatggatgcgtattatacttgcaattgaaaatgcatgcaagccgtggtttgataagctagataaatggactgaagagcagaaaaaaattaatgaagaggaaaaaaaagcaattgaggaagatcttgaactgatagaagctgaaattggtctagaagaggccattgaggatatggaggagttattgcgcataagagagaaagaagaggaaaagaaggcaaagatgggtttgctggatgaagaagatgatgacaatgaaggtgatggtgatgatatgacttctgtaaccaaacaagatgaaaaagctcctgcaaaggttgtagaagttcccgcagaggtggaagaggaagatgatgacgattgggatgatgaagaggatgataatagtgcacaatcaagttttgggtccgttgagcagggacagacaacagatcagctgaagggaaaacctgggaaatctccattttctgcatcttcacttgcatttgcttctagcagccttatctctgctattccatccaagctgcaactatcattttcattctggaacaaggggagatcaaaaccgaagccagttcctcccccatgcattgatagcttgagtaatatgaaaactgttgattcagtcaatttccgtcctgtgaccagccagaatggtagcttgaaagcggtgggcaaaacacatgggaaagtcaagacaagaagctcttttggtgggaaatttcttggggtgcactctcagactcgatcacatttattggcttctgcaaattccagtatcaacttgaaggagccaagagtgagtagtgacatgtggttgcatgcagcaccagagagggatttagacagcatactgtctttgcattcatcattgtattattttgaacagcatagagagattatttggtgatcatgtactgtccattttttcccaaataagagaggttcactttaaataacatagagagactatttcgtgatcatatcctgtccattttttcccaaataagagaggttcccttgaaatacaagttttgagagccgttttgttgttgttgccctttctgtagcaaaaaggagcacacgtaggattttggtgagggcagagacataacaaaatttgttattttattttattatgtatgtcattctgaatgtgaaaagcnncnnctgatagtatt

SEQ ID NO: 40881 - DNA, 277 bp, Glycine max
  Clone ID: PAT_MRT3847_136916C.1
ctgtccttttttttttacagaaatttttttcgcactaaagccatatataggaaacattagatgatgctcaacgctaaaagtatctgtaagccgttaattagagacccggctcgcttaaccatatggaaacggcaaaccaaactgatgtatatcataaaaactgagcggaaagtgctttttgatttgatgctgagcctgattaccagcccatcagggttctgctaactttgtcaacaatgtgaggaatggctgggcttctggtcaatggatagccacg

SEQ ID NO: 40882 - DNA, 441 bp, Glycine max
  Clone ID: PAT_MRT3847_136917C.1
aaaaaaaataaattttttttttttttaaaaaggggcatttaaaacagtttgatcccggtttttccaaaacacagggccaacctttgatcatccttaaacatttatttttaaaaccattacccatgatccctcgatttacctatgcgggtttttttctacgggggtctggatttactttcattccctcacgttagatttatcccctttttttttaccaaattccccaaaatttagggccccagtttaaaatttcccgtcaattcgggggtgactttttccattgaaatgtaaaggaaagcccttttttttacttctgggggctgctgctttgcattgaaaatgctgtcgttttaccctggacataccattttcattgacatttctttcacccattgtttcgggaacgtaaaaaaattctgacttttgctttcgcaggggaac

SEQ ID NO: 40883 - DNA, 545 bp, Glycine max
  Clone ID: PAT_MRT3847_136918C.1
ggctcgaggcttgggggagcaagctgagctgcaccaaatgcgatcatgccgaccatgaatgtaatgggcttgactatggttgatttgacgagtcatcttgctaaatacaggcttggtaagcaatcatggaaggatgcagtggaaggatgcaaagatgggatgatggcaaatcctatgtgtggatcaaatatgttctcatccctgacacctgaatacacgctgcgtccgatgcgatctgcggtggctttcactacccccttgaccacagagcgaggggtccacttggaattgtaatatgtatgaaggatgaaccaagtaccatggtcatattataccaactatggtgagtacgttgagacatactgatgaggaactgcctgtgcagaattacaattagatgaatggttaatggacatatgtgcaactagggagcagattgtcctcattgtggaactttggattaccaagtgaattgatgattaacatattaactactctttgaatgtgaacactgataaccgtttcttttttcttggcggaatact

SEQ ID NO: 40884 - DNA, 621 bp, Glycine max
  Clone ID: PAT_MRT3847_136919C.1
cgatctatcttgtagccaatcgtaccaggtacctgtgcacggtgacgtgtgacacggggcacctggcaccaggttacaatcactcattggtggtcgggtgtctaaacgggaacgtagtagcccgaaccaaaacatgtatagtaataggcgtcgtaggccatagcgtcatgtgccaacgtaatgattatgccgtagggcagtgataactggccaccgaggcataactcgcgcaggcacaccggtcacaaccacctgctgcacagcaataacaccgtaggtaacgagcttgcccgctggcataactgtaacctgcactctcaaacaccaaggattaggcagaggctgggcgccaacgggcaaattattaacgatgatgctatacgtagtcagctttttccatagtcgcatgggagtaacaatagcaggatgccgattgtttacctgcaggcgctgcgttggagtaggcatgttattatgccgccggggcaactgccgagggtgaaccagccatacatgtcgcactagctgtggtggctgggtatttggccgcgcaactacagcagtgctgctgcgaatagcagccagcttatgattttcacgatgtgaactgaccgagcagca

SEQ ID NO: 40885 - DNA, 291 bp, Glycine max
  Clone ID: PAT_MRT3847_13691C.1
aacacttatcaaggacccatcacatttatatttatacaagaaccttatagcttctttacattataatgaatgaaaaaatagcttatacatttagggaccccagaaaataaaattttaaaaaaaaaaaaccccttccaaattaaatggcggacaaaacttaaatgcggttttagtattattctccaatcaaaattaaaatttcacctcaataatctatatttacatttaatgcgaatactttattaaacaatttattgaggggaaacccttactggatttaaaaacacttaa

SEQ ID NO: 40886 - DNA, 300 bp, Glycine max
  Clone ID: PAT_MRT3847_136920C.1
cggacgcctgggttcgtggtggtcctcagcgtgaacgtatgatgaagtaattaacggattatcggaagagttatattcacacgaagccatataaatctcttgttgagtgatcggacaatccttggcacctactgtcatcggatccggtgctgtgcgccatagctagaaccggtttcaggtacggatatagcatgcttatgctgcagatgaatctgaattctgtggttggcttgttcacgattgtgggttatagatggtgtgttcatgtacgttactcaattgtgtttatcgttaacgtct

SEQ ID NO: 40887 - DNA, 1723 bp, Glycine max
  Clone ID: PAT_MRT3847_136921C.1
acccggggatcctctagagtcgacctgcagtgacattataattaagggctgaccattcttgctccagttgactctccaaacactgatggaatagatccaggtaaattattattattattatttccactggctttcagaggaaaacattagataaaaagaaaaaagggaaaaagctatgtgggattaacaatatactggtacttagttgtttattagatgctatatgtgagctaaatctctgttcaaatattaggcgactcatgtttaagaaagaatttgacacaagctatgtgggattcaattctggatcagagcttctctctcgtcagaatttatgtaatgcgtaccttgacttctaaatacatgtcatcttgctaccttctatatggctgctctgtgccactatatggaattgactcctatgcttttgacattagtttgtaaatattgcaattcaacttgtttatttatggaagaattcattcagccttattttggttgctaaagaaacgaggtatgaaccaccgcctaatccgtctggttgtgctcgaagtgagccatatgattactttggcaggagaggtcgaaaagaacctgaagcacttgcagctgcatcgttgaaacgtttgtttgtggagaatcaaccttacttagtaggtggatactcccggcatggttcattaaacaacctagagccttctggcagaggagtctgctctaaattcttttgtagccaacaaaggctgagaacctctcggattgacacatcaaacagcatactttctatctctgaaaaatatacgtacatgagggaaacctttcggaaacggctggcatttgggaaatcaagaattcatggatttggcatctttgcaaagcatccatataaaggtggagacatggtgattgaatacactggggaacttgttagaccacctatagctgaccggagagagcacttcatatacaattcgttggtgggtgctggaacatatatgtttcgtatcgatgatgaacgagtcattgatgctactagagcaggaagcattgctcatttgattaatcattcttgtgcaccaaattgctattccagagttataagtgttaatggcgatgaacatattataatatttgcgaagagggacattaaacagtgggaagagcttacatatgattacagatttttctcaattgatgaacgacttgcttgttactgtggcttcccaaagtgccgaggtattgtaaatgatactgaggcagaagaacgagcagctaccctatatgcaccacgaagcgaattaatagattggagaggagaatgagattttttactgtaatattatgcgtttaagttccttctgaagatgaattgtttgtccaacaacttctctcatggattgtaccatttccttgaaaggacagtgttgtacatagtacatctgattcttcccattgttttcgtcataaccccagctgagcggtatatgttggcggctcaaggcgatttccattggtgttctggttataatgaagggaaagatgtcaccaaactttttacaaatgtttcatttgaaattcatggccacaattacggcccgtttaacttcaagaaacttgctgagatattgtaacttgtcattggataggtacagttgtaattacatcgaaccttcataaaaatgaaaagattacgagaattcgaatggaaaaaaaaaaaaaaaaa

SEQ ID NO: 40888 - DNA, 284 bp, Glycine max
  Clone ID: PAT_MRT3847_136922C.1
cttttacagatcagcatctgctttcatgaacctattgctaccagcactgaaaattgtggccgagtactacccaggaaggctatgcaaagcgtttgtcatagaccctccctcgcttttcgcttacttgtggaagggtgtgaggccgttcgtggagttatcatcatggacgacggtggtatcatcgttggatttcgaagagtcgttggacttcaacgacttcgctgcatacccgcgagcctcgtccctccgattcgaaggcgcgagcgtgaaatcgacggcgaaga

SEQ ID NO: 40889 - DNA, 205 bp, Glycine max
  Clone ID: PAT_MRT3847_136923C.1
ttcccaatttatcatacttttcatatactactctttcttcatctactacaccaattctttccataaactctttcttcaaaccttcattaacctctccaccaatttctacaacattttttactataactattaataatttattcattcaatattctctaattctaatatatataattccattcaaaaccaatactaatttcttctt

SEQ ID NO: 40890 - DNA, 183 bp, Glycine max
  unsure (1)..(183): unsure at all n locations
  Clone ID: PAT_MRT3847_136924C.1
gacccacgcgnncgcccacgcgtccgcgcacgcgnccanccattcgcnnncacnacaaactttcatactcgagggccctccggaacacagggggagccactcacaatacacgcacccaacacaccttcacaccgcctaaaaaccctagccaagccacaaaacggcatcccgcctgggaagaag

SEQ ID NO: 40891 - DNA, 1286 bp, Glycine max
  Clone ID: PAT_MRT3847_136925C.1
ccacgcgtccgctttattttttggtgtgtgatagcagattcttcaatggctctttagaagggcacatgaacaagaaagaaagagtagcaacaacttcaataatctccctcccaaaagggaagatatcagtgggaaagaggtaaatctggtaaagcgtgatagatcatacaaaagaacaagaaacaaatggagcaatcctggttgcaagaactttaagatattcacttttctatatagaaaagacattccaaaagctttcttttacagcaccctcaacttgaagagattagggagctttaatagaaaacaatttttgcacttcatgaagatgaagagagaagaaccatcatcccgagatgtaggaagtgttaacaaggctgattcaggtggccaacatgttggaaacaaggttttgcctataactgaggcaccattgtcatcctcagctgaaagaaatgaccaatgtgattccacagaaactaaagatcaaaccaaaggggacaagaaaaagccaatgtcgagaatgaaagagctacttagatgggctgcttctgccaagacagagaaaggagggaaattcaatggaagaaaggttttaatgttcagaaggcgtggaaccctgaaagcagttccagatgatgaccaaggttgcactgactcacccaagatcagtttcagatgggatgtggaaagttgctccaccacttcctctgtctactctgctatctcaatagcttcctcatcaaaaaatggacaaaaccaaattgcaacttccactatatctatccctcctgaacacaccactggtcatcacaacaacactagtagaaaaaaaggaaactggatcacaacagactctgaatttgtggtgctggaactatgaaaacaatgaggctagagtggatattccatgtgtggtgaagtgtaagctggcaatctacatcaaaagttaatgcactaaaaatgtgtcatgttcatggatagtttgtgccagatatttctagagattttatgtaacttaactaaagatatagagatcaagagtcaagagaaagagatgtaacatcagtaataaattatctaaatgtgctagatggtggtgatcaaacagatcaaatgtcatgtgagcatggcataagaatgtttggcattattagggtataaatttattactttgttgactgacctatttaatgtagatggttttcccagtcagtgggaccacttttcctgtaaatctcataataatctgcattggttataatcggaaatgaaagtttaatgtc

SEQ ID NO: 40892 - DNA, 339 bp, Glycine max
  Clone ID: PAT_MRT3847_136926C.1
ggaggagaaagaaaaaaatttatttaaaattaataattaataacaattttgaatttatataaaaataaattcaagactaaaataattcaaacaaattattttataattgaatgaaatttaattactttcagcatttcaaattttttgatattttgatagagaataaaattctttatccatacacatgctaagcatattcagaaaacaaatgtacaatatgggggcaacgtctctggatcaaaaagcgcgttgaggaaggaacgcttgggggaggcattgtcatcgccgttgaagccaacaaaagttttcggagtccttattgagagggaaccttttttt

SEQ ID NO: 40893 - DNA, 387 bp, Glycine max
  Clone ID: PAT_MRT3847_136927C.1
ggtttggttttttttttgtttttttttttggagggagagggtcgatactaatatataggtattcaaccaaaaagggtaaaaaccagggcataattagagaccacaaaacactaaacatcacaacttaacccacactcaataggcttgggccaggaccaggaccagggaagcaaactaaggcaagagggaggcgcccctagggagtaaacctcaagatcataagagccataacaggctaaaatgtgatgagggggggagcagatggaaaggtcatctcaactcctggtcaagcacctacttaaatctttgggtcatctttggggggggggtcttcaacctcctcatggggttcttcttccacttagctgtcatcttgagcgaggaagg

SEQ ID NO: 40894 - DNA, 594 bp, Glycine max
  Clone ID: PAT_MRT3847_136928C.1
gtttcgaccatcccctgttccttttctgttgcttgttcctctcttgtacgcaaacccatcaccacgtttgggtttgtgtaccacattccataacataaccttgttgtcctcaaattccagttgttggatttgtactagaaggtgaaaatgtttgggtttagaaaaacaccagcaccaactgaatcagataagaagacaacccttactgcagaaaaaagaactgcttcagaacctgtcctgccagttccaaaatctaaaggaaactatttcgactacgatgacgacgattgggggaggaagccttcctcatccacagcatcaaaggacaaagacaggtacaagaatggtttcagcaactctggggggctagagaaccaaagtgttcaggagctggaaaactatgcagtgtacaagtctgaggagacaacaaagagtgtcaacaattgtttgaggattgctgaggacatcagaggggatgccacatggacccttgacatgttgcaccagcatggtgagcagataaccaggactcacatatggtgtgtgatactgagaaagacttgagccgggtgtgaaaactactaaacaatcttg

SEQ ID NO: 40895 - DNA, 278 bp, Glycine max
  unsure (1)..(278): unsure at all n locations
  Clone ID: PAT_MRT3847_136929C.1
accccanaccgnnacgncgtnagcgannaagcaacccnnganaantncgccgtnnagngtgnnngttntgcnggtgttgnnggccgngtactgngggctgnatcgttccagcagagccnaatannnnacttcccggacttcgantaagagggtcgaatgcccgatgtccgagtccangacagacagacattgtgagagtaagatagtcngatagtgaggacagaagatgctganctctggtgtgcctatatgttgcgtgactgttntgatgtatctgc

SEQ ID NO: 40896 - DNA, 1629 bp, Glycine max
  Clone ID: PAT_MRT3847_13692C.1
tttcctcaagcaaattagaatgatctcatcatgctattttaagagggatacaatggtatttatttacagatgattcagattaaatttatcctgactaaccactagatctgaacaataatcatgaataatgccagtctggcaatcagttaattatcaattgactgttacatctgtaactactgcaactacctagcagaacaaataagttaagctaatagctaacactgtgtttctactctagcagtgtccactcaaactcaagtaggctcaacaattaaaaaattgttcaaccactttgagtttgcttcttacatcacaaaatctggcgttgcctaagtttggtaagtataacaacaatctgatcatgagctggtatatgacaaacactgagacttttaaccctttctcttacgaagcagaggtccaattccatgagttcatacaacagttaattaatggattataagccagtgacagtacttaggtagttatcacagtagacaacaggggttacaataggaatttgtaattcttgtagaagagactgaatcataggacctcagttgtagtgattgccaagctgtgatattcggcttctgcaatagagcaagcaatcaaggtctgcttcttttactaccatgagatcagattctggtcaaggtaaatgcatgccccagatgttgatcttccaccatctgggtctgaggacaatcagcatcacagaatgggtgtatggctagctatttgagatcagaagcgggttgaaaaggtaacccatagttgatcatgctttggaagtatccaagaatccgcctgactatattccaatgattgtaaaggggctgagataataactggcatgcctaaactgtggcttatttcttgcctaacatttgttgcatattgaagagctccaacaattaatatgtagatgctggggtcctgaacatagtctgatccaaacatgggagagtttggaacctccaatcatggggtgtagaaattcccttttctgttgacttgttggattcagcaagcagatcataaatatatttcctttgacataagaggatggagccactacagaaatatttaaattcaattcccaagaagtaatctatgttgatgttacccaattgtttaaggggaaaaattgagttaagattagttatcagctgctgaatgaggatgagtatttcccttgtgattaaaatgtcatcaagatagactaagatgtaaataaagcggctgaaagtggttaatatgaatagagatgagtcacattagagaacatctcaagtagggcatgttttattccatataatgctttgtggactttgcatagaagagctttgtcaacagcttcaagttgtgaaggctggaccacataaagcatttttaatatctagttgttgtattggtcatttatttgttaaagcaaaattatgtctcggatagtgacaggcttaactaccggagaaaaggtatttttatagtcaaaaccatgttgatgaaatccctttgcaacaagctgagccttatttttattgattgagccatctgagttttctttgacctgaaaaacctcttcacatcctcttgcttgcatgtgagaaggaagggggtact

SEQ ID NO: 40897 - DNA, 255 bp, Glycine max
  Clone ID: PAT_MRT3847_136930C.1
gagacagagatctctgtgctgaacattcagatggtgaaacccaaggcatgaggcccaaactggctgtacctgacaccacaataatataactgggcctgggactctgtctcacaactgatgctaacaaagctcaactgccagcgtacggaggtccaaatggcatgtattatacatcctcatgggcaaggaggacagcaagggatggagtgacctttccagacaggaaggaacgccgctagttcaccaaggaaagct

SEQ ID NO: 40898 - DNA, 420 bp, Glycine max
  Clone ID: PAT_MRT3847_136931C.1
tattaagctgtaattaactgagattaaccacaacaaagttgattgagtgacaaaaaaaaaaaaaaaaaaaaaaaaaaaaaaaaaaaaaaaaaaaaaaaaaaaaaaaaaaaaaaaaaaaaaaaaaaaaaaaaaaaaaaaaaaaataaaaaaaaaaaaaaaaaaaaaaaaaaaaaaggggccgcccaaaaggatcaaacctaactaacccttgaaggcaacttaaaacccctccaaaagggccaccaaaatcaaatcaaggggccgccgtttaaaaactccgaaacgggaaaaacccgggcttaaccaaattaaacccccttgaaaaaaaccccccttccccaagcgggctaaaaaccaaaaaggccccaaccaatccccttcccaaaaatttgccaacccaaaaggccaaagggaaccccc

SEQ ID NO: 40899 - DNA, 321 bp, Glycine max
  unsure (1)..(321): unsure at all n locations
  Clone ID: PAT_MRT3847_136932C.1
ctcgaatacattccttaccanttatattgttatattgggagaaaaaactcttcacgcgtcgtagtttattacacatgctcacattnatcacctttganttggactccaccaataccaataaaaatgcaaatggaatgcattatgacaaatatcccaattgaatctataaaggagcatacccagttcacattggtgccaactatcctgctcatggcggagacgattatcctgtccatgacgcagctggtaactatcctgacaatgttgatacacacactcttcatgatcaaccctacccttatcataaacatttatacacct

SEQ ID NO: 40900 - DNA, 110 bp, Glycine max
  Clone ID: PAT_MRT3847_136933C.1
agcattgctcttgtatcatattctaacccctacaaccagcaacctccacttcttaactttagaaccagagtgtcttgacactgtgttcacactctttaactcaaaaacac

SEQ ID NO: 40901 - DNA, 783 bp, Glycine max
  Clone ID: PAT_MRT3847_136934C.1
gtcagaatttgtgaattaatggacacgtgcccaacttcgttaatggtgtcactgcgaatgggataaaaaggcaacattgattcaatcttaaaaattaagagacaaaattaaatttttaataataaaatgagtaaattaaacaaatcaaataaaaattaactaaaagaataatttagccgataaataaatactaaatatgaagcgtctacttaaatttaaaataataacatgaaagagatatgctgatttaacggccaaacgaatcaagggtaatttttttttttacaaatttattatttaggggtaaaatttaaattaatattcttaaattaaaagtcataacatgtgttacaatttttttttttacattaaagtcgtaaaaaagatttacaatttcaattttttatttttttaaacacaattttagagtcatgagagttttttatttcataactttagagtaattatggaaatttttatttttatttttttattgaagttgtaaattattttacgatttcaactttttttgcatgtattcttttttttaaatcgtaaatatttgttttaattatttaatgaattaatgtatgttttatttttttagtttcatttaatgttttaaaaaaattattaattttaaggattattattttttaaaattaaaaaataatacaaaagacttaaatttaaataaaaatattaaaatgtactacatattttaacaaaaatattaatagtggaatgatgtcctcactcgcatgtaattaccatatatgcttc

SEQ ID NO: 40902 - DNA, 225 bp, Glycine max
  Clone ID: PAT_MRT3847_136935C.1
tttttggtctaaggtctggtaattcaaataaaagcggactagcaaccatttatgctacacctaggatcacaacgcttaaagcttgacacttgaaagaaatttgggaaactttctggcgcctattattaaaggaagaacagttaagaggctttgatgggggtaactccaccggctatgacattgaacacgaggctcatcaacgtctgtggacgggagggacaaccc

SEQ ID NO: 40903 - DNA, 366 bp, Glycine max
  Clone ID: PAT_MRT3847_136936C.1
gagacagaagctattgaaataacagtgacaaagttgcttttgagatcatactacggcattgtcagaaaaaatggggaggatcttatccccaaagcaattatgcatttcttggtactttactacttcatatccttgtagaattttcaaggtaaacaacaccaagagagagctgcacaacgtcttcattaaaaagctatatagagacaacctgtttgaagaaatgttgcaagaacctgatgagatagctgtgaaaagaaagcgctgtcgagaacttctccgagcttatcagcaggcttttaaggacttggaggaactgcctctggaagctgaaacagttgaaagaggatacagtttgcctgaaacatc

SEQ ID NO: 40904 - DNA, 3147 bp, Glycine max
  Clone ID: PAT_MRT3847_136937C.1
ttgaaattagaatagacggtgagaaagccaggcacacacaacacaggaacgggtgagtgagcgagtccccactccacactccaatcaatcaaccatttatttcaaaacaaaaccctagctagggttcgatccatcgatcatggcggacgaggtcccttctccttcagcagcatctactgctactacctctcttggttcgagtgtgatctccctggtgaaccgccttcaggacatcttcgcccgcgtcggaagccaatccaccatcgacctcccccaagtcgccgtcgtcggcagccagagcagcggcaagtccagcgtcctcgaagccctcgtcggccgagacttcctcccacgcggcaacgacatctgcacacgccgccccctcgttctccagctcgtccagaccaagcgcaagcccgacaacgacgagtacggcgagttcctccacctccctggccggaaattccacgatttctccgagattcgcagggaaattcaggctgaaactgatagggaagcaggtgggaacaaaggtgtctcagacaagcagattcgactgaagattttttcaccaaatgttcttgatatcaccttggtagatctcccaggcattacgaaggttcctgttggtgaccagccttctgatattgaagctcggatcagaacaatgatcatgtcatatatcaaaactcccacctgtctcattctagctgtcacaccagcaaattcagatttggctaattcggatgctcttcagatggcagggattgctgatcctgatggtaatagaacaatcggttttggaatgtagttggatataatggacagaggtactgatgctcggaatctgttactaggaaaagttattcctcttcgacttggttatgtaggtgttgtaaatcgcagtcaggaggatattcaaattaaccggagtataaaggatgctcttgttgctgaagagaattttttccgcaatcgtcctgtatacaatggtctagcagatagttgtggtgttcctcaactagcaaagaagttgaaccagattctagcacaacatataaaggctgtgctacctgggctgagagcacgcataagcacttcactggttgctgttgcgaaggagcatgcaagctatggagaaatcactgagtccaaggctggtcagggtgcacttctcctgaatattctttcaaaatattgtgaagcattctcctccatgcttgagggaaagaatgagatgtctacatccgagctatctggtggagcacgaatccattacatttttcaatccatctttgtcaaaagtttagaggaggtggatccgtgtgaagacctgactgatgatgacatccgtactgccatacagaatgctactgggcccaaatcagcgtggcttgagccagaagtgccatttgaagtccttgtgcgaaggcaaatatcgcgtctattggatccaagtcttcagtgtgccaggtttatatacgatgaattaataaagatcagccatcgctgtatggtgactgaactgcagcgattccctttcttgcggaagcgcatggatgaagttatagggaactttctacgagaaggccttgaaccctcagagaacatgattgcacacctcatagaaatggagatggactacataaacacttcccacccaaattttattggtggaagcaaggcattagaaatagctgcacagcagaccaagtcgtctagggttgctataccagtttctaggcaaaaggatgctctggaatctgataagggatctgcctctgaaagaagtgtgaagtctagggctattcttgcaagacaagctaatggagtagttcctgatccgggtgtccgtgctgcatcagatgttgaaaaaattgtaccatctggaaacactggtggatcaagttggggcatctcatcgatttttggtggaggtgatagccgtatgtctgtgaaggagaatatatctagtaaaccgcatgctgaaccagttcacagcattgagcaatcagtctctatgatccatttgagagagccacctcctatcttgaggccatcagagagcaattcagagacagaagctattgaaataacagtgacaaagttgcttttgagatcatactacggcattgtcagaaaaaatgttgaggatcttatccccaaagcaattatgcatttcttggtaaacaacaccaagagagagctgcacaacgtcttcattaaaaagctatatagagacaacctgtttgaagaaatgttgcaagaacctgatgagatagctgtgaaaagaaagcgctgtcgagaacttctccgagcttatcagcaggcttttaaggacttggaggaactgcctctggaagctgcaacagttgaaagaggatacagtttgcctgaaacatctggtttgcctaaaattcatggattaccaacatcatccatgtactctacaagcagttctggagattattatgcagcttctccgaagcactctaggtcgaaaaggtcttctcattctggggagctgcaatcaccattgcatgccaatgcagattccaatggaagcggaaggccattcatgtcaggtttttatcccatggtagatgcatgagctatgggcgaatgagctcattggtggaagtagtttaactcaaggcattttattcatttgattacactgcaacttccgggatttagaattctgcctctcggagctggactgcatgaaattactctatctagctaaaatggtgttgaatgttggccactgctttctttccttgcgttcaccttttcttctcatatagcattggcattttttacaaggctccagagaaagaataatgggagctggtgattgttcacatttttgagaatcggttttctatataatcgtgtatatgaccttattatcttttttagttagtcagatatctttgtcatcaatagacaattatgtagttcgagagtttttttttcttttttattggggtgaattgctttttggaagtaatagctggtcaggtcatattagctatgtgaatttgcaagcaatttctgtacaaacaaaaattggtgatgactaattagttgtatctgcatggtatttttatctgtataatatacatgacaaatgtttatcaatat

SEQ ID NO: 40905 - DNA, 606 bp, Glycine max
  unsure (1)..(606): unsure at all n locations
  Clone ID: PAT_MRT3847_136938C.1
tacggctgcgagaagacgacagaagggggaaggcaaattcgcggcctcgagtcttttctttttctgtatcgtttttactttccatcacttccattttccgtcatcatggaggatgctgctgcttctgctaatgtgttggaagccaaagatggaactatttctgttgcttcatctggcaaggtatgattgatactttctgcttcatctgcaactgtccagcatagagaccacaagatccacacaaggccagtgttggggagacttgaggggagtaaacaccggatagatttatccctgtggagggaccacgtaaagaaacctgatattacactttaatcaaaaaccttatgactcaaatttataagttttcttcttacttatatggtgttcaatcttttcacttctattcgatgcgggaaaaattgacttacattatgtatgaaatatcaagtttaatttattgttttatgtattgtgatgacggaattttcgtaggctagtttttggtgttttgtctacaaagtcgtacaaggagccacggactctataaaaatttccacatttattgttttanattaaaannnnnnnnnnnnnnnnnnnnnnnna

SEQ ID NO: 40906 - DNA, 446 bp, Glycine max
  Clone ID: PAT_MRT3847_136939C.1
cgcggcctcgagtcttttctttttctgtatcgtttttactttccatcacttccattttccgtcatcatggaggatgctgctgcttctgctaatggtaaaattcttcataaattattgccttttgcttctacttttgtttcccttatgcttaataatcgaccctcttcaattcttgtcgttagtgtgttcaactatgtagtgtaatatggaggcaaaaacagatcgtgctttgattacggatgaaaaccagattcaatgtttacattaaccaaggatctgattgtttgatactttcttttacccggcttttgttatagtgttggaagccaaagatggaactatttctgttgcttcatctggcaaggtatgattgatactttctgcttcatctgcaactgtccagcatagagaccacaagatccacacaaggccagtgttggggagac

SEQ ID NO: 40907 - DNA, 329 bp, Glycine max
  Clone ID: PAT_MRT3847_13693C.1
agaacctgggggcgtctttcatccaagatcagggagttgcacgtagttcgtacttacaatggggctaaacacatagcctatccgctgcgtccttgaagaggaagatataataaggataggtggagatttctcttctctaggatcttatgactattgcacgtgatgctattaggtttatcctcactactatctgtccttttgttactgccgcttttgaggagtgggtgagccttctgagtctcattgggaggaacagctacaaccccctattcaaaccttatatttgtgagtctgaacaggcctttgagcacttctgcatgcaggctgtc

SEQ ID NO: 40908 - DNA, 896 bp, Glycine max
  Clone ID: PAT_MRT3847_136940C.1
cgcagtttgaggccacacacaaaaactcaatcgtaaagccatttcacttcaactttgcattgcacgtaaatctcaatccaaatcaaatggcctcccttcgtattcgtaaccttctccgtttctccatacacgggacgctgctttcatcttctccacttcgaccagggttttcgggaagctctcgaagctacagcgtcgttgaatcttcgaaacattttctattgaagtccgacgatgaggagatattcgctctccgtcgcaaattcgaagctgccaaacagagttttctcagtattcccgatgcgctccgggaaatgcccaaaatgaatcctaaaggcatatatgtgaataagaacgtgagattggaccaattgcaagtttatgggttcgactatgattacacattggcgcattactcgtctgatttacagactttgatatatgaccttgccaaggagtacttggttaatgagcttaggtatccggaggtttgcacgagttttaaatatgatccaactttccccattagaggcctatactatgataagtcaaaagggtgcctcatgaagctggatttctttggttcaattgagccggatggatgcttctttggaagacgcaggctaagccatacagaaatacgtgacatatatggcacgcggcatattggtcgtgatcatgctcgatcacttgttggtttgatggatttcttctgcttcagtgaggcatgccttcttgcagatatagttcagtactttgttgatgctaagctagaatttgatgcttcctacatttatgaagatgttattcgtgcaattgaccatgtccatcgaagtggcctggttcattagagaattctatctgacccacacagatacttagtgaaaaatggaaag

SEQ ID NO: 40909 - DNA, 427 bp, Glycine max
  Clone ID: PAT_MRT3847_136941C.1
ctaattttgatgctttgaagtttgacccactttgtacaaccatgaattttagggaagcacggagggaagattgtaagaggtgttccaaatccaatgtgtcccacgttccaatcatgtgatttattaacttttaattattatgtccattttagcattattaacaccaacacaatacgaagaagttgaaaatagtgttcctacaaagacagacaattttttacaacgggaaaactcaagattccctcaagttctttcttttacagcccgtgaaatggtggatgcatgagtggatttgaggcatcaaattgattttttaagcttccttcttctctttctcttgtttcctttttttctaaaatgtgtacctcaatttttgttaacttgatataatgtgaatacttgtctataattcaagttcatttctttt

SEQ ID NO: 40910 - DNA, 864 bp, Glycine max
  Clone ID: PAT_MRT3847_136942C.1
aaagactgagactttatttataaaaaaaataaaagggtgataaaataacaggaaaagaaaaagtgattttttcttgggcaaaatttcaaatttcattcactcaggaaaaaaaaaaaaaaaaacacatcttaattttcattatactaaaccaactaataaaaaaattgtataaacatgatgatgaaaggaaccctctcaagatttgacatgtaattaagggccagaaaaagaatatacatgagtagaagaaaatcaggagtctagcttaattagcttaacagatgtgtaagtgattataaactctgtcttcgaattttactgataaaaaaagaaaaaaaaaacacatctttaacctgaatcatccattataagcagaaaacgaaactggattcaacgaatacaagaagtccagccaaaacccagaaaaaaaaaaacaagggcatcaattttccttacaacagcaactcgtgtgggtttgcatcaatcagcgcttgatgcacccaaaaggaaagaaaacacagggtctataaaaattgcggaatttcatagaagaaaagaaagctagaaagtaattaatcaagcgatgctcttcaacattcaacggaggtagccatagaaaggaagaggtgtacttgcgcgattcaacattccgagaggctccacggttctctgctgaactatgaccactgtttccgcgacgctcacgacgaactctatggcgagttgaaccatgtttatgcacaattcgagtctgtgaatcaccatggttttgttactatatgttttttttttcttttcacctgagtgaatggcttatcacaattggcttatctcatgttatgcgtgtacttgtgggctgcttca

SEQ ID NO: 40911 - DNA, 274 bp, Glycine max
  unsure (1)..(274): unsure at all n locations
  Clone ID: PAT_MRT3847_136943C.1
ggcggttcaacaggaaaatctcgcgggcctaaaaagatgtgtcattgagacagaagaagaagaagaaattggagggggtgtgtgatcgggtcctcatgtgaatatctcaggctgttggtgtttcttttctttggtacgagtctctagatcatggcttttacggttttctactgctatagctgttggggatggtgatggaanaagacattggatggggttttgcttcncgcacctcagtgttcattctctattttgtgctgtctgttttttatnt

SEQ ID NO: 40912 - DNA, 899 bp, Glycine max
  Clone ID: PAT_MRT3847_136944C.1
tggaagacaagatttgtgatctctatgacctttttgttgatgggttagatgaaaatgctggtccgcaaatcagaaagttgtatgctgagcttgcggaattatggccaaatggttacatggacaaccatgggatcaagcgtgcaatttgcaggtcaaaagaaaggcgcagagcactgtacaacagacataaggatcaggagaaaattaagaggaaaaagttattggcacctcgacaagaggaggatgttcaatttgatcctagtccaattacttcgcaacagcccatgcgagaaaggttagctacagactctagcagtcatactcatacttcagtaaacaagacagtttctaatacaatcaccgctgcacgggttcacaatccttctgagaatggtccaaaacaagaaagagcaaagggaagttcaagtggttctctggatgatgtcaagggtgcagacggtgttttaataaagaaaaaggtaaagagaaagccagatcagggtttggaaggaactcattttcgccccgagaagtcagcagcttctctgcaaggagaagaaaaaccaagatccctaaagcagtctgcaggtgttccccccaaatcaaaccttcagccaacttctctacctgggcttgagcagtcaagctaacatgatatcaactaggatgtttactcgacagaaagtattttacagtttttcccccctaattttttttttggctcaattctcccaaaatcaattaatattctacttactgttaccatttttgtaattagcgtccttgcaaggttccatgaaatataggtagatttgttggttgttaagtcatattggcaactcgagtctggcctcaccgtgcttctcgcagtaaatggtgcttctgcagcgagatcgcaa

SEQ ID NO: 40913 - DNA, 500 bp, Glycine max
  Clone ID: PAT_MRT3847_136945C.1
aattcggctcgaggcgtgccattgttcctgtctttcctccttctgagtcaaaccgtgttagagagggttttctaagaggggagcaggttcctggcgagttgcagtgcgaaccttcacaattttttatgctttttgacactaacaatgatggactcatttcctttgcagagtacatcttttttgttactctcctcagtataccagagtccagtgtttcagtggcttttaaaatgtttgatattgacaacaatggggaaatagacatacaagaattcaagaaagtgatggccttgatgagatcacaaaacagacaaggagctaatcacagaaatggacgacgccttggcgttacagcttcaatagaaaatgggggtctcgtggagtatttttttggcaaagatggaaatacatgcttacaacatgaaagatttgttcaattcttaagacagctgcatgatgagatcttgaggttagaaatttcccattatgactacaataaa

SEQ ID NO: 40914 - DNA, 271 bp, Glycine max
  Clone ID: PAT_MRT3847_136946C.1
ggtgggtggaactggaagaacctttgataatcctttggttggttcatcgaccactctgtctgtatagatctgtgcaaatctccgaacatttccgctccaattatcatttcactgaacagaaccaaaccctaaccctgtctttctgtatgacgcctgattcccccccagaggcgttgctgttgagtcgatttgtaaatgctttcggaagcttaggttagaattttttgagacgatctcatggttttgaatcggtgagatgaatcaccacgac

SEQ ID NO: 40915 - DNA, 413 bp, Glycine max
  unsure (1)..(413): unsure at all n locations
  Clone ID: PAT_MRT3847_136947C.1
aaacactccttcaaaatcatatcaccggagaagagtttctaatggttctttattataccttgtatttgtcttatgacccatatgattagtttttccagcgtggcgccgngacattgcattgagatgaggtgaagactctgggagttagacacatatgagtgataaatatctcgcaaagagggtgtaaaggaaagtacggtaagtatcacataaagcaaacgagcaacaaaataaataattaaagataaaaagttttaaccggaattgaataaaagacattaaacacatagaagaaacaagacaagacgtgcctaaaactgacgtcaaacgaaaaagatgaacatggaaacgtcaataaagaaaataaaaggaagaagtaaaaatttaaaaaagaattttctaaaaaattaaga

SEQ ID NO: 40916 - DNA, 372 bp, Glycine max
  Clone ID: PAT_MRT3847_136949C.1
ggctcgagcgaaatcgcacaagccgattacatgaaattcatccttcactccctcaaacacccagcctccgacgtcaacggcgtctggatcggtcgcatctgcgcttccaacgacgtcgtcaagatcggcgatgccgtccctctcttccactctaacatacctcttcttccccagatggagatatctactatcatgatagaggaatatcggtctgctcaagggatgaacatacagggctatcttcacgcgaacgagagatacgatgacagtgagcttggtggagtggcgaagaacatcggagaccacatatgccgatactttaccgaagccggcgttctattgtgagactgcaagaaggttgatgctgcgaaa

SEQ ID NO: 40917 - DNA, 403 bp, Glycine max
  Clone ID: PAT_MRT3847_13694C.1
ctcccaagcaatgcagctccgtgattatctacacagttaaggaatactgcaaagctctctttaacagcccacggctcagggtgacaatatggtcctcatctgttgacccagctaaaaaacattcggaagtctttaaatgaacctgaaagcaacctatagaaggtttttttcaccagccaactgaaaaaatcaatccgagagccacgcttaatgagctcgattaccactcggtctagccaatgaaaaagtcacacgaaatgctccttggaacccttcccaaaccgtttatttatggatcccataaacccaatttttcattgtttgttgcaacactgaacatgttgcaaaaagcgcgaggttaggagcacgtaattactttgcaaaaaaccctggattttgatgc

SEQ ID NO: 40918 - DNA, 157 bp, Glycine max
  Clone ID: PAT_MRT3847_136950C.1
tgtttcgagattacacaacacactttgtgaaaaagggggagttccttattcctggtagacgcttccattgagtggggatctctgatacatggctggatcattacgaacactaggaagtcaagggcgagttcttgttggtgaagatctctgggtaaga

SEQ ID NO: 40919 - DNA, 309 bp, Glycine max
  Clone ID: PAT_MRT3847_136951C.1
cgagtctatagccttggccgacaggtccgggtaatctttgaaatttcatcgtgaaggggaaagatggctttctgctgatggaacttgtcccacaactgctttacagaatgattgtatgatgctatttcccctctcatcatctttggagtggctatactttggtttttttgtcctccgttttactttatttaaactcttactaggcataaattatccgtggggttatttaaaccaaaattattatttgccgctgtatgtggtcgggatcttgtcaatttggacctttaaatgactttgtcttaattattt

SEQ ID NO: 40920 - DNA, 349 bp, Glycine max
  Clone ID: PAT_MRT3847_136952C.1
aaaaaaaaccatggcatctttggaaacaataaatacttaccaaccttacattaccctcccaaataaccgggtaccattttgggtttcccaaactccaaactataatataatcccaaaggtttttttcctttggacccggggttggcaccatttttcaattaaaacagttaatacaaaccaaccccccccaaccccacaggagattcgtcatcacgctgatatgtcacttcacgagtaatgtccatcattagctatcgcttcgtactaaatagagagatcggaacatttgtttttgacatttgttttgcccaatgtatcttgaccctgcttaagaaacccaacttaaaga

SEQ ID NO: 40921 - DNA, 327 bp, Glycine max
  Clone ID: PAT_MRT3847_136953C.1
ggcattggttgtcagaaaatttttttttgaaaggggaaaaggttaatgcaaaaattggaaaactttaaggggttttgataaaattggtttggttaaaaagaaggggaaaaataaaatggggtaaaaatatgggaaaaaattattttttggtaaagttaattttggaaaaatttttttgaaaaattaaacccggggatttatcaaccacttttaggaatccaggttaatttcaaaacccgtagaaaaaaacgggttttggaagttcaaaaaaaaaaaagggactttaaaaaatttattattaaaattgttttttttaaaaaggttttt

SEQ ID NO: 40922 - DNA, 276 bp, Glycine max
  Clone ID: PAT_MRT3847_136954C.1
acggaagcagaaaccaatcacatactgaatcactaaaatgtcaaatttgccccaatcactggtcagggggcacagactgtcgggccgtgtagcagctccaacgccttcttacactggcttcccacgagcaaactgctctatagcgtcacctaatctcaattaactggccgtcgatcaacaacgtgctcgacctgaaaaaccctgaacttacccaaatcaatctccttgaactatataccaatatggacatatttcaaaatatcgataaggccctat

SEQ ID NO: 40923 - DNA, 718 bp, Glycine max
  Clone ID: PAT_MRT3847_136955C.1
gtttcttccgataatttacatatggtgccctaaattgcctgttcggctgctggtgatgtgggtggtgctttcaacttaagggatgagatggtggaaagaggtcttatcccaaatattactacgtataatgcgttaataaatgggttgtgcaaagtaggaaatatggatagagcacagagacttttccataaacttcctcaaaaaggcttagttcccaatgttgttacctataatatactaatcactggttactgtagaataggtgatcttaatgaagcctctaaattgagagagaagatgatagaaggagggatttcttgaacccgtactctgctttgatcagtgttcttcttggaagactctttaaagttttgcgatcaaattattcagggcatatgctaattaaattcttgcctgatacttctcataaattttgctaaatgcaaagctgagctgatggctcaagactcaatttctacaaacctgcagccatgttctgatgcattaatttccaaacaaatttggcacaggaaaaatcatttcttgcaaaagatttatagctatttagaggatggggaggacttggatatggaagatttgaatgacttggatgcttgtatggattggtccatgaagactatattgtttgatgtcacttaaaacacggggagttttgagcacgtttgaaggtcagatgttgaagacatagatggcatct

SEQ ID NO: 40924 - DNA, 650 bp, Glycine max
  unsure (1)..(650): unsure at all n locations
  Clone ID: PAT_MRT3847_136956C.1
gccatcacggcctggtttcttctactttagcttcaatgatgggtctctcaaagcatgtcaagcttctcagaagctagcaattaaggtcatcacttcagtagcagcggcagccacaccacatgcttcagcaatgcctccagctccattttctggtgaagtgtcaccatctcctttatatccatggcattacaataatcctctgcatgcagcttcacctggtccttcaccttcagcaagtgtgacagctccaatggtgccatataaaagtagcagcatgccctttattagcagtaaccctgcagttcctcttcccactgatgaagttgactctgcttcttctatacaccctcttcccacctctagtggtcatgaactacaggtcttgctcgctccctctcgccttctgttagttctgccctcccttactctcccccccctttatgttgtgcgagtcagggtgcgaatagggtgtgggaccagagattctgattaagtctaaagtagcttttaagacattattataccttgtattaagaaactttaagacatgattataccttgatgctcttacattttctttcagattgtagctgccactttntgttctttggatttggagcataattgattaccacatttgttttaatacc

SEQ ID NO: 40925 - DNA, 1189 bp, Glycine max
  unsure (1)..(1189): unsure at all n locations
  Clone ID: PAT_MRT3847_136957C.1
gtacgctctgcaggttctatagtccgatcggttcccgtccacgacccacgcgtccgcagttccctaattccgaaaaacgacgcttcgctttcttttttctgctctcgcggtttctctttttctatcagcaattgtccagtggtgagaagcaaataacaattctgagtgcatttggttgaaacgggagtttgtggatttgttaaaagattgtgtggtagagtgaagcttggagatttaaaaaagagaagaaatactatcagggcttgattctcaatctgtctgttatgtggagttcacgagcaatttgagaatatttgaagtaccagttgggtcagactctggacagctacatagattccagtctccaagggggctgcctcctatgacaccatcacgagtggcaggtggattaacccaatcatcatcaaattctggaattttctatcaaggagacgggcagtcacagaatgtagttgactctcacttaagctcatcttttgttaactcgtctagtacggttccaggagctggtcgttcaaacctcggtccggtttctggggatattaataatgcagttntgaacactgtggcaaactcagcaccaagtgttggagccagttctttagtcacggatgcaaattcttctctctctggtggcccccatttgcagagccgtaccagtgttaacacagactcttacttacgattacctgcctcacctatgtcatttacatcgaataatattagtatttctggctcatcagtgatggatggttcatctgtagtacagcagagctctcatcaagatcagaatgttcaacaattgcagcagaataagcagcagccgcagggtgcttcaagtgctacgtctttgcctgcatctcaaaccggcccttctacgctccaaatgggtgctcaagtcccgggatctttcattcaagatccaaataatatgtctcatttgtcgaagaaaaatagactggataccaaacaggaggatatgacgcaacaacaggttatacaacagcttcttcagagacaagattccatgcaattccagggtcgtaatcccccagttacaggctttccttcagcagcagcagcagcagcagcagagactgagacaacaacagatgtttcagcaaatgccacaattacaccgagcgcacttgcagcagcaacaacaaca

SEQ ID NO: 40926 - DNA, 367 bp, Glycine max
  Clone ID: PAT_MRT3847_136958C.1
gccagttgccatccctggccccatcccctttcatttttaaattttttttgtctcccaaaacgcggtcgttctattggtcttcctctacaacggtgtttatagtttaacccaaattaccgaattctgatcggatcatctctaaaccctagatggaccttctgaagcaagagcttctcaagaagcgccaatccctggcgcaagacaccggcggcaagaaattcttcaagcgctccgagatccagcagaaggaaatccaaaaactccgccagcaagagaagcgcgaattggaagccaagtcactaaagcgcctcgcaacatcctccgacaccgccgccaccgccccgtcctcttcatccaccgcctcctc

SEQ ID NO: 40927 - DNA, 1283 bp, Glycine max
  Clone ID: PAT_MRT3847_136959C.1
gcagtgccttcgccaccctcaccaccaacgactttgatgaaattgcagagagtgggaattgaagagcaatggcttcagtagcttcatcatcatcattttctacaaggcttcttctgcattcacacacacctctagtatgcagaagaagatgcagacccaattttctgaggatggtgactcgctcctgtctcgatgacagctctgctctcctccgagcagcgcaacacactgtggatacatacgtgaaaagtggcatggttgtaggattggggtctggtcatgcttctggtatggccattcagcatttgggtagccagcttcgcactggtaatttgaaggatctagtagggctccccaggtcggttcctggtgctagcgtggcgccccgggctgggcttcctggggattccttcctccggagttctcaaattgattttgcatttgatgatgctgatgttatagaagaaggaacacttgttgctatcattgggcgccggaaattgcaaggtggggaatccataatccaggaaaagtctataataaattctgccaataaatgtgtgttcattatcgaagaaaaccagtacaaaggaggtctggaaggttctattccagttttaattcagtctctcaactggatgacaattgctgaagagattgatgatatgtttctgggtgatgctgaggtctggagaagaccatctatagggcaagcaggtccactaggaggtgacttcccagtagtcaccaaagaaggacataatattcttgatgttatctttacatctccaatagaaaacctcgctgaagtagcaaaaagccttgataaagttgatggtgttgtggaccatggtgttgtttctaaaatcccatgcacagttgtaattgcttctcagactgggctgaacattttggacaaattaactgcagatatagtgggttaggcttcagagcttatagctctgctttgcacatgaatgtgtatttagttttttttttttccctcttatttttctctccattatgctttttgcctgcctgtgcgttttcatcctccctttccaaagaaatgagtaattgtgactgtatcaacgctagcaaaggaagcttagggctatgtgtttttataatgtttgtatacatgaaacttcatttgtctttttttctcttctttcaattcccatatggttctatcatcaccatgaatactggatgggactgggggctggtttgtttaccttaatcacattgcattttatcaaatcatgtagatttacatttac

SEQ ID NO: 40928 - DNA, 370 bp, Glycine max
  Clone ID: PAT_MRT3847_13695C.1
atcgcgagcggccgcccttttttttttttttttttttttttttttttttttttaagggcaagtggttgcattaattgctacaaactacccgtgactgcttcctgcattctttcttacttatttatactatatacaaagtcgggtccgtcgaagagtgagttataaacccgtttacttggatccgcccttctggccctcaacgtgagggtctggtccatcagatccaccgaagccatgctcagacgacttcctcttgtcgggggtaccgtcctgcttgaggccgtcgtgctcggaaggcttgtacttctcgccaccagcctgaccacccttcttgccctcgacgtgggggtcaaggccgtcagagccaccg

SEQ ID NO: 40929 - DNA, 485 bp, Glycine max
  Clone ID: PAT_MRT3847_136960C.1
cgacctttattttggcttgagccgaaccgttttttctttttcgtggggggttgccgaactacctcacccaatggagcctcgtaccaaagcaggacctggcgtggccagaaatacgtgcggaatgaaattgtgatcagacaccattaccacagaatattcccgccgcagacgtgaggagccacaagtgccgtgcgaggtaactgatccagactgcttcgagtgcgtagcgaccggtccccgctgtctagtgggtgaagaaccccaccccgtttacctgaatgaaccacgctccccaaaaggcggggcgggacgaggacggctcgcccgggggcctggtatgatcctgaacgagccacccattagatgggtgccctgcgcagcccgggcctgacagagttctagaggccaggccacgctgacctgacacacaaagggaccatgctgcgtggtgccgcttggcgaccggacattacctgagtgggata

SEQ ID NO: 40930 - DNA, 953 bp, Glycine max
  Clone ID: PAT_MRT3847_136961C.1
aattcggctcgagcggtcttggtgtttgtgttgggagtggtgctgactttcataagaaggcctagggtgatgcatgagattaaatttggaccctcttctatagaggtggtgaaaatgtctagacatgcatggaagcaaggtttcataaagggcacaatccctcaactcccgttgtcaatcttgaactccgtgatagccgtttgcaagctctcatcagacttgtttccaggtaaagatttttcagtgacatcactctcagtaactgtagggttgatgaaccttgttggagggtggtttggggccatgccatgttgccatggagctggtgggcttgcggggcagtataagtttggagggaggagtggaggctgtgtggcacttcttggtgcggctaagttgattttggggtttgtgttgggaagttctttggctcatttcttcaaccagtttcctgtggggatcttaggggtgttgctgttgtttgctggggttgaactagccatggcttctagggacataaatactaaggaagattcgtttgttatgcttctttgtactgcggtttcgttggtggggtccagtgctgctcttggattcttgtgtgggatgattgtttttgtgcttcttaagctcagggattggaccaatggtaagccgattaatgctatttggaagcatgaaggccctgaagagcaagtttgaagcaaaaatttggacttaattaaataggagaatacatatatcattatctagctaccatgttgttgcttgcttgtcttctagtgtgaataattgtacggcttagaataattgcgtcgcatatgcaagtttctttttctgtcaattaatcttatctgggatttgatagtgaaatggagtttcactcctgtcttgtatctgtaaggtatatatatataagaatatatatatttaccatgaacgtacttcttcta

SEQ ID NO: 40931 - DNA, 498 bp, Glycine max
  Clone ID: PAT_MRT3847_136962C.1
ccaaaggaagggctgaaattaaaaaccactttactgcatttgttcatgaaactttataaaaaaaggtggctttatatattcctcaggcgggggtttaaacttaaagaaccccttgtcaaaacctggggaaaataaaatgggcaacagaacctggggctggaacatatcactgccaacaaacaaaggggatgtctaaaaattggaagcttgtaaactaaaagcacccccaattttttagcagccagattttaatagttttgggtttttgaagaacataatttatttttaataaatggaccctaccccaaaccaaacttttatgttacattattttcccccccaaaaacaggggtgatttaaaattttaagctgggagagaaggacccattgatcctgaaaatggctgcggtgaagacccacaaatttggcaattcactttatcaataaaccttggaatttgaccggcaccctgggcgaacccttgggttaccccgggaa

SEQ ID NO: 40932 - DNA, 351 bp, Glycine max
  Clone ID: PAT_MRT3847_136963C.1
ggctcggatcaggccggtggaaattcaaataatctcattgcttcctttgtccctacatagatgcaacacatattcctagctacactattgtcatacaaaacaaaagcaaataaaaatacccaaaaatgctacaacttggacatgaaaagctttaaacttttatccagcaagtgtataacttgtaccaacatgcaaaatcagaaaaagaattccaaactgatcaacgtgaaactttaattcacgcatgacatttgatattttttttccaccataagctgttgagaaatcaagcaagcaaatgtagatgctttgctgcctcatttaacttttggttttatatgattattaaaa

SEQ ID NO: 40933 - DNA, 234 bp, Glycine max
  Clone ID: PAT_MRT3847_136964C.1
caacaggcatctcggttggggattgctttatctagaacaattcctctttgagacttagttaacgtgttggtcgtgaggtaactacgatgtttcattttgaccgccacatgtagttgttggcatatcttgcaaacgaaagtcgtgtttatcttggtgacaaagagtttaatgttatgggatacacactgcttttaagcttaattgggtacaagacactggtcgtgcgtggtgatt

SEQ ID NO: 40934 - DNA, 353 bp, Glycine max
  Clone ID: PAT_MRT3847_136965C.1
gatcaccactcggacgcaaaaatggcacctgcgacactgtctctgtctctccttctactgctctcactcaacattgacgtaaccgtcagatagagcgactacgactactattgactgtacactgcatacgttggaaccgattcagtgctggaaggccaaacgtactctaagatcgggctgaagctgtacgacaagtacggtcactacatctacattaaaaacctctacgcatggcgcagcttgatgagcatgggctacgactacttccagcgcggcaacctcgacatcttcagcaggaagagaccctgtattgacggacccatatgtgccgttaaagttacttctagctgatc

SEQ ID NO: 40935 - DNA, 643 bp, Glycine max
  unsure (1)..(643): unsure at all n locations
  Clone ID: PAT_MRT3847_136966C.1
tcgatccagcgtccgatttgtttgctttgtgccaaaagcctcacccgttgaaaccgtccgctgcacttgtgccttttttcccaggctttggtctctgctttgttttttctcagagatcaacagcaacaacaacaacatatgagatgagattcttcttcacatattaacaacgtgaacccttttcttctcttcttctttctaatggggtggggagggaaaggaaagttttttttttgtttggtggggatataatataacttgttgtgaattgatgaagaagacgtagaaacacaggttcctctagtggtttttaagttgaaggcgtagagagtggtgcagacataggaataggatatgatatgatggcttccgttgaagaaaagattaaaactggaggagttggaggaggaatggttgttgggggtcaaactcttgttgctgagatgaaactgttgaaagaaatgcaagaacattctggggtcagaaagactttgaattcagagttatggcatgcttgtgcaggccctcttgtgtcactaccccaggttggaagccttgtggtgtacttcccttaggggcgtantgagcaggtggggggttgtactggagggacgggggggtcggggtttgccccccactcccg

SEQ ID NO: 40936 - DNA, 1704 bp, Glycine max
  Clone ID: PAT_MRT3847_136967C.1
cttgaaactcagaccaactgacacacagagaaagagagagagagagagagagagagaagcatagcagacatgggaagagctccttgctgtgacaaagccaacgtgaagaaaggtccatggtcacctgaagaagatgccaaactcaagtcttatattgagcagcatggcactggtggaaactggattgccttgccccagaaaataggccttaagaggtgtgggaaaagctgtcgtcttagatggctgaattatcttcgcccaaacatcaaacatgggggtttctcagaagaagaagacaacatcatctgcagcctctatgttagtattggaagcaggtggtcaattatagcagcacagttacccgggcgcacagacaatgatataaagaactattggaacactaggctgaagaagaagctccttggcaaacaaaggaaggagcaacaggctcaagctcgccgagtcagcaacaaccagcagaagcaagatgtcaaaagagaaaccgagaatttgatagtggcttctgaagtcatgatcaatcaagttccctattggtcttcttcagagttttcttctgtgcctatgccagtgaccaatgcttcttcatttcaacactatggtctgaacaatcaaacatctctcaggagcatgatggttaacaaactagagggaattacattttccaacgatcatcatcagcagcagcagcaaccatacaccaatgcatgtgaaattccctccctacaagaccaggtttttccaaccatggtaaatcaagtaaccgtggtgagcaatgaaaacaatagtggcacttatcagccatcaaatatatttcaagggtttgaaaacttcccaagtgatttttgtgaactggtctgtgtcaacccccaacaaatggaggcttttaattatggaatggaatccatggacatgactatgagcaatggtggcagcacgaacacgacttcaacagaaagcactagttggggtgacatgagctccttggtttactctcctttggtatctgactatgaacgttgcagacaaggaataattcctcaagatcatgttgttgctttcgaagagtgtaagtactttggaatgcagatgcaataacggctctgaatacgaggtgtgtacatgtcaatttgtgccgctaaaaaaaattggtactggccaaaaccctaatgagttcactttgcctcacataattatttgttggttttgtagtttcttgtttcattcaaactgtgcaagtttctgccatatgtgttgatacatattgagcacaactcttttgttttgggtttcttaacgattatgtttatagtcttatatgtatggatgctacagaaggaagaatcttaattagtaatagtgcgaggcccttgaattcctaaatgtgtcagttttctgctgctcctagatgatcaagagtgcataggataatagtttggatacgttacatatgtttataccactcgatatagtttaattatgatgacatttatgatcatatttgtacttgaaaaatctcaggttctcacggaaatacatgattgagttgtatctttcgcatagttctagcaaaaagctgtgggaagtttgaaaggtgcataacattttggctgagagttttttagctttagcacccgaggcatcaatatctggctgcattcttttaaaaaaaaaaaaaaaaaactc

SEQ ID NO: 40937 - DNA, 697 bp, Glycine max
  Clone ID: PAT_MRT3847_136968C.1
ctttacttgaaactcagaccaactgacacagagagagagagaagcatagcagacatgggaagagctccttgctgtgacaaagccaacgtgtaagaaaggtccatggtcacctgaagaagatgccaaactcaagtcttatattgagcagcatggcactggtggcaactggattgccttgccccagaaaataggccttaagagatgtgggaaaagctgtcgtcttagatggctgaattatcttcgcccaaacatcaaacatgggggtttctcagaagaagaagacaacatcatctgcagcctctatgtcagtattggaagcaggtaattaaataggttccttatattgatcagcaaaactcaatttgaattggttattgatattaagcagcctctatgatatttaacggtggactttaattacttaatcgatcgcttagaattccttagaacacatatatacatgcaggtggtcaattatagcagcacagttaccagggcgcacagacaatgatataaagaactattggaacactaagctgaagaagaagctccttggaaaacaaagaaaggaacaacaagctcaagctcaagcgcgccgagtcagcaataatcagcagaagcaagatttgaaaagagaaacggagaatttggtagtggcttctgaagtcatcaatcaagttccctattggtcttcatc

SEQ ID NO: 40938 - DNA, 248 bp, Glycine max
  Clone ID: PAT_MRT3847_136969C.1
ctactgcttttttgaaggagagcaggttattctgtatcagcaaggataaagtcaggtggagaggctgtagttgcagctgaaccagctgctgacattccaggcgagcctatggatatcatgactgccttgcaacttgtgctcagaaaatctatggcttatggtggtcttgcacgaggccttcacgaatgggcaaaagtgattgagaagcatgctgcacaactctgtgttctaacataagactgtgacca

SEQ ID NO: 40939 - DNA, 503 bp, Glycine max
  Clone ID: PAT_MRT3847_13696C.1
accgttttgagttcggttgtgtagagtcgacactcttccttgggcggctgcgggggtttctctccgcttcacgccttcgttccttctctgggtcggcgcatttcgttctgatccgctctgggccgtggtccagcgccgttgtctgagattgtgccgtggggcgatgatcttttgtgcgtggattacctctttggtcaccagctcagcctggcatttcccaactccactggatcggggcttatagcatccgggtggtctaaggatccaatttttgtcggtgacctatgtgctctctccgtgagtggtactactaccgtggctgcgcaaggtgatacatcttcgaatattctctacctgtgtgactgtgactgatttctcgcttggggcaaaagccgctttgagcttcaacattcctgctccctggctacgaatgctgggtgtgcattgccctaatcctcatgccgccgccgattctagtcttgggttgagctcctcccctctat

SEQ ID NO: 40940 - DNA, 454 bp, Glycine max
  Clone ID: PAT_MRT3847_136970C.1
aaaaagggggaagggacaaattttttaaaacccggaaatgtttttaatgggggggggggaatttgaaaaaaaaagggtcccatttgtaaaaggcccccaaatttgaaaggacccccttgcaacttttaaaaaaaaaaaaaaataaaggggccccattttttttgggcatttgaaaaaattttccaatttttttttgagggtttttttgaacaaaaacccgttgtttgtaaatttttttaacccccattttatttcctttttgggcccttcaaaaaacttgggggtaaaaataaattggggaaaggcttaaaaaaaaaaatttgcaattttgggggaaaaagcataaaagcttgcaaccaaaaatttgccattaattgagggatttcccccccaaaaaaagggacctttaaaaacttttttaacggaaactttggggatttttccaaccaatttt

SEQ ID NO: 40941 - DNA, 261 bp, Glycine max
  Clone ID: PAT_MRT3847_136971C.1
aaataacgagaccacttcactctcgtaatgagcacagagatatgctatacccacaacacaaacatcttttgcccaaacttgaacctcttacctcacaacatatcgcctctgatatgccatagctttggatgttcattgcaactggacatacaaactattggacttatttctgtagaacagcagacacactgacgaagccattcaggagaacaatgtgcatcataacattgtctgatgtgggtgcttcagatttcccaaatt

SEQ ID NO: 40942 - DNA, 376 bp, Glycine max
  unsure (1)..(376): unsure at all n locations
  Clone ID: PAT_MRT3847_136972C.1
ttncnagntagantcggaatnngncgagcctgtcctnagtgtcaatcataaggaccattcactgtgaatatngaacagacaatttatagggaattttgcaggaagnttnccctccatannaggttnccangganntncttccctggngggttcgggctttncantgattacngtgnaatttncctattgatgtgggantgatcttgntttgattngttngctnggtgccttgggnggnanttaatttgganggggcctnnaggggtngtntnatgagctnanatggnttntttgnngctgttantcnccnttanancaactgattganatgtggggttttncccagattgtgttttggcnccaacnggntnntttn

SEQ ID NO: 40943 - DNA, 484 bp, Glycine max
  Clone ID: PAT_MRT3847_136973C.1
aaaaaacgggggcccataaaaccgttttaataaaagttttaaaagaaaaaaacacacaagggttggaaacccataaccccccatcacaggggaaaacataaaaaccctttaaaaatcccccaatcccctccccccgaataaaatttttttttttgcccaacacaaaggcgggggggaaaaatttgacccttaaaaccccacccgctaaaaaaccaagaattttgaaaagaccctttttaaaaaaacccgccgggactaggaaggaaaaaacatttttcctttgaacaccttgaagggaaaaaacccgccctaatttggggccctgaacaactgttccattgaaaaaaaacttttttttgacgtttttaaaaattttggtaaaggggaattcctttttaaaccccggaagggggggaaggcttttccaaccatttggggggggaacaaaaaaatgcaaaaacttttttttcacccacccttccgg

SEQ ID NO: 40944 - DNA, 408 bp, Glycine max
  Clone ID: PAT_MRT3847_136974C.1
gggggggccacaaaaacaaaaaagggaacctttttaatccaaaacgccctatttggaatgggtactaaaaggggtttgggaagggggggaaaaaccacaagttattataacaaaccaaaagggcaaaaggaacttttttaggctggcatgggttggaaaaggcccccttgaaacccccgggaggcccgggggtttttttccaaaaaaaactttaatttcacccggggagggggggcaaaacatcttaaactttattccaaacccacccccaggttcaaaaaagggggaaggcccacggggaggacaagaaaaattcatgggaccatgggtttccccgcggggaaaaccccaaaaaacaaaggaggcccggaattcaaagggaagggagctttgactacaacctttagg

SEQ ID NO: 40945 - DNA, 481 bp, Glycine max
  Clone ID: PAT_MRT3847_136975C.1
gccacgcttacggttttcttgatataattcttgtctctgcccgtgtgtctcgggcatggccaccgtcaccactcaagccttcgtcgcatttttccggccatgtacctttaaatcgaggtttttgacctgctcttttctgattacttaaccttctatgtactattctgttctctttttctctcttttaagtttttattcaatgttgattgtttttatttcttttattttttttatttaattttttcttcttatttttttctcttttttaactttttctttttttcattttttttgtttatttatttatttattttgtcttatttcttttattcttttgacttttatttttgtttttatttcatttttttattttatcttatttttattatttcttttttttagtatttatatttacttatttatttctttcttttttttattatttattttttttattttattttattatttattttttttt

SEQ ID NO: 40946 - DNA, 294 bp, Glycine max
  unsure (1)..(294): unsure at all n locations
  Clone ID: PAT_MRT3847_136976C.1
gtacgcctgcagtacggtccgnatgtccggtcgaccacgcgtccgtttttgtattgtttctatttttatctttatttgggtgggacaaaagttggtaaaacttagtttacattgcacactgtattgtgaaaagagctcataccgctagatcgtaaagtggcccagtcggctaggagtggacatctgcaggctttgcaggttccgcaccggcagctgacagggttctccgtgtggcgctacagaccgagtcttttaggctcactcaaaccagcccacaggatgatgagggtagcc

SEQ ID NO: 40947 - DNA, 148 bp, Glycine max
  Clone ID: PAT_MRT3847_136977C.1
gttttgcactttaaagtaaggaagaccgttcacaaactaaacggggattattaagatttgtggatgaccttacaacaatcccctacagggtagaaagactttacatttttctctccacaagtgattattgtatgtaaaatgaactaat

SEQ ID NO: 40948 - DNA, 495 bp, Glycine max
  Clone ID: PAT_MRT3847_136978C.1
gcacgagtggatcatgagttttttcttcagatattgtttaccgtgtcatgtctgagggatgcctcagtatctatcttaacgtattgttcagtacaattcagattgattctactcatccactacctgttgttttgaggctgggtcgggaaaatgaagcctcttttacacacttttttttgttgttgctcctaattggttttggcatttaaagatagtcatgtttgcaatgtttggaataatatcgatgcaaatcctacacattgcagacaactcgggatcatcatattttgttgatgtgttatcctcgtgcatggacagctttaggttctcagagctgctcaacaggagttgagagactattgatgcggatggttttcaatttcttacccatatatttcagttatctgtttcctttatggttgattgtggtgcagttgcttttgatcgtgtaattgcggtttatttgtcactgaactagatacccgttacatatta

SEQ ID NO: 40949 - DNA, 371 bp, Glycine max
  Clone ID: PAT_MRT3847_136979C.1
caaaaccaaagcggactctaccaaccgagcactcattctatcactgcaacaatacattcggaaggctcaatgggggcgggggggggccatatataccaaccgaaaaaggggatttgcgggcaaactgcgtcatggagggattcaaacgggccataatacatcctgggccaccggaaaggccagcttcgaggacggaacaagacggaattaaaccccagaaacaaacacaacaggcccaagatgagaaccagttcctagaaaagatgctactgatggtgcatcaagaggtggcgagaaacagcgaggcagagaaggggagaaaagcatgcaagcaggacaagcaaacgatcctagggaaacgacccagggcc

SEQ ID NO: 40950 - DNA, 271 bp, Glycine max
  Clone ID: PAT_MRT3847_13697C.1
tccacaccccaatataatctttctttttcatatcatcaaaacacaaaaaaccatatcaaaacctatcacttataaacttatatttcaccaacacacaaattctttcttactctcacacacacacaaataaactatttatccttcacaatcaaattttattcccactcacatcaattcaacataccaaaactacccttatttaaccctccaacaatacaatctccaaataaaccatccatcaaaactctcaccacttttcacaacaaccccc

SEQ ID NO: 40951 - DNA, 245 bp, Glycine max
  Clone ID: PAT_MRT3847_136980C.1
tacggtcttaattccggggccaccacgcgtccaacagccgagtacctcaccctcgtcgcttccaagcccgacgagtacgagaagctcggctcctaagccctcatcgggctccccggcaactaagccacacgtttcaactaacccggcgagatctaaacccagtatgccatcgtcatccgcggtggggaatttggttttggggctcctcgcgcgagcacgcccgtgtcgcgctgggcgcctcgggc

SEQ ID NO: 40952 - DNA, 320 bp, Glycine max
  Clone ID: PAT_MRT3847_136981C.1
ggggcaaaaatagtctaacattatttttcatgcatgtttatagtattaataaaaggaaagtggaactatggtcttggcggaaatgaattcattaagtgtaaaaaaggcttgttcacacgcatacaccttttttacacatctcctattgtaaaccatattctgcattgagatgatactccttaatcaccatgggacagatatgatggggccaaattaatgcaatcagtgggatcagatagctgacttttagttgtaatagcaagccagatatacagggaaaagttgtgttggccaatcaatctcaaaatcgagaggcccaa

SEQ ID NO: 40953 - DNA, 404 bp, Glycine max
  Clone ID: PAT_MRT3847_136982C.1
ggcacttcaattgcaatcaaattagttcattctctttgcgcagttccctacctctcctttcaagatgcagatcttcggcaagacactcacagggaagaccatcacacctgtggggggaaactctgagaccatagagaaagtttaagggcaaatttcaggacaagggagggattcccccggttatcaaagtctcaacttcgccgggaaacagctccacgacgggcgtagtctcgccgactacaacatccacaaggagtgaacccttcatcatgtcgttcgtccccgtggtggcatgcagatcttcgtcaagactctcactggcaaaaccataaacctacaagtcgaaagctctgacaccaatgacaacgtcaatggcaagattcatgacaaagaaggaatccccc

SEQ ID NO: 40954 - DNA, 588 bp, Glycine max
  Clone ID: PAT_MRT3847_136983C.1
gttgtgctcttttgggatagaggtgcacaagacttgtatagaaaggaacatcctgacgctacttcaattccggttgaacttaacgacgtcatcttctccattcacgcggttacgcttaccatcataacaattatacaatgtttcgtttacgaacgtgcgaaacaaacggtgagctggcttgctagaatccttattggacttgcgctgttggccattgcggtggtgaatattcttgcgctctgcaaagttgtttcatggctctttgtcctgaacttcttgggattcgtaaagatgggatgctctttcgtcaagtactgcccacaagtctacatgaactacaaacgtaagatgacagtcggctggtctattggaaacattctgctggatttttctggtggcgtgctttccatcttgcaaatggtgttgaacgccattaacaaaggaaactggagcgagttctacaacttcaccaaggtcggtctcggattgctgagcatcgtcttcgacttgatcttcgttctgcaacactacgttatttaccgaaagtcaaaccaagaatactggagaaagttcagagaagagaagcag

SEQ ID NO: 40955 - DNA, 386 bp, Glycine max
  Clone ID: PAT_MRT3847_136984C.1
ctcccccttttattagaggaggtggagggagcgcatggctgcgacctatatcatagcgggacagtgcatagcgtcagcgccaccgctgctcacaccgtgagaggtacaacatttccatatgagataagagagacctgctcccgttccttaggaggaaatcgtgtctatgttgcgcaaggaattccgaaagcgattggaacgtgattgtgactacatagacccaccacccattgcgttggcgactatcgcacaggttcatggagcaaggctaagaggctcgagggaggatgtcttctaaaggtccaagacccggaatagaggacatattagtggcaggtcctaaccatgttcacggtggtgctaagctatcggagttctggagtact

SEQ ID NO: 40956 - DNA, 433 bp, Glycine max
  Clone ID: PAT_MRT3847_136985C.1
gatgacgtggcatgacacgtggacgtgcctcttaaaagatgtcacgtcatttgatgataacaaaatgagtaaataggcaatttagttcctgactttgtacccctgttgcatattagtctctaacttaatgaaaaatttaaaatagtccctatcttttgcataagtattgcaaaatagtccttccgttaaattttaaagtaacgctgttagtgaggtcaattttagtgccacgtcatttgatgatgatagaatgagtggcttcttcaaatttgatggttctgaaccaattgaggcatatataagaaaaagaacccacacacacttgcacaaataaaaagaaccaaaaattcacagcaacaaccttacctctgtagctgtcaacaccaatgggcgaggaagagaaaaaaccagagcaaaacaaagtggaggagaa

SEQ ID NO: 40957 - DNA, 260 bp, Glycine max
  Clone ID: PAT_MRT3847_136986C.1
ggaaatggaatttgctggtttattactaatacttatggcaaacacaacaacagggtacaacacaaaaaggccgcaataattggaaaagcctccttcccccatcatattgaatcgctgaacaactaaatgaaggagatcactaaaactggactggacttttaaatttcacttgggatttacatttaaaatctttattccctgtcctgattagtctgtcacttgaccacactgagatcagaactggcaagagggcctttaaa

SEQ ID NO: 40958 - DNA, 862 bp, Glycine max
  Clone ID: PAT_MRT3847_136987C.1
caaatatccttcagtagagtccttgattgagaaggatttgagtgtggacaaattagagatctcgagaagattgacacatccacatccacatcctcatgaagatggcaacaggagaaagattttagaaagacttgattctgattctcagaagttgacaaaccttgaaattaccgtgcaagatttgatgagcaagatagaaattacagagagcacaaagggaaaagatagtgagtatgataccgtgaaaggacagctagaagctactcaggaagccatcacaaagttgtttgatgccaaccagaagttgaagaagaatgtagaagagggtacctcgtcctttgctgggaagtctacagcagaaccggatgaaactggaagtgccagcagaaggagagtttcagaacaggctcggagagggtctgaaaaaataggacggctgcagttggaagtgcaaagactgcaattcttacttctgaagttgaatgatgaaaaagaaggcaaaggaaaagcaatgatggatgaacgaaattcaaaagttcttttgagagattatctctatgctggtggcacgagaagaaactaccagaagaggaagaagaaaacacacttttgtgcatgcatgcaacctcccactaagggagattaagtcgacaggattttagaatagtttaaatgacttgagacacttactttcatgcttgtaaatctttctttataaccgggtctagagatggttcaagactctacaagtttttctacggagaggatctattgttcttgtagcgtagagatcctgctgtacatgttatgtaatgttcactcagaagaagctaggatggaattttcgccatttcattttcag

SEQ ID NO: 40959 - DNA, 451 bp, Glycine max
  Clone ID: PAT_MRT3847_136988C.1
aggttaaaaatgaatttgggtttttaaatggaataaacactgaaacaatgttttgttaaggaacacgcccacaacaaagggctggattgaaaaaaaaaccatcacctgaaacgaacttttattcataaaatacaccccacaaaggaagagggcgaaatcaaaaaaaaaaaatgtcttcctttaacgaaaaatgttcctaagatatataaaatttggtaagggctgatttcttcataaaaagaaaatctgtcacccaaaaaagctggagtgtgggcaagaatttttttgaaaccgctgttccattagaaaaaaaattaatccattcatccttcaatctgggacttacgaggcaccatatccagtgcataacataggaaacacactcgtactttcctgttcgaacatgactctttactacaatccactgcggcccaagaaaaggtggcccccc

SEQ ID NO: 40960 - DNA, 617 bp, Glycine max
  Clone ID: PAT_MRT3847_136989C.1
taacaccagaactgcagaaacgctgaacatttgtatgcaatattataatacaataatttattgtagctgcggacattgcgtctggttcactaaaaagaatggaatactatgcgatcaaaatctgggatagttaccacaatctatattaaagggtcactggactcacgtgccaatacttcccaggtgaacacggaaggggcgctcccactcgatataaaccgtaccaaacgtcggtgtcttatcagattttccttttggtaccctttgaaatttctgtcggcactagacggtaacatctgaccgtgcgcggggtagcgccctatacgacgccgatatggcggacatcatcgccaaaaccaaggccctgggagaatactgaactggacggctgaccggaaactgggcttttgaagattctagcatgaagaagttccctagaggggagggagaaaactgcgctatgaagatgagggatcggtgtctgatcaaacttgcaccaattactacaggcattgagaggtgagaagactgtgatagcttgccactaatgaaatgaagctcaaatctatagatgctagcatttaagaatgcttcggatggtatctttaccaccttct

SEQ ID NO: 40961 - DNA, 241 bp, Glycine max
  Clone ID: PAT_MRT3847_13698C.1
gtacgtacactccgcattcagatcctccatatttcgtaatcattcatccaaccaaacttataactcttctgttctgcagattatttctcaataatctctttccgagattagcataaacttcaacgtgctccaaagcctccaccatcccgccaacttcctcgtctttggactgggccgcaattctctcatgtcggccagccttaacccccacggtcctaagctgttcctcgaggaggaccct

SEQ ID NO: 40962 - DNA, 385 bp, Glycine max
  Clone ID: PAT_MRT3847_136990C.1
gacgtagttgagaactaagaagaaggaaatggcttgctcaatgatcttctccggagctgttaccaccgtcatccgggccggcgccggcatggttgctacattcaccggcctcaaattcatggctggcttccccaccaggaagaccaacaatgacattacctgcattgctagcaacggtggaagagtacactgcatgcaggtgtggccaccaattggcaacaagaagctcgagactctttcctacttgccagacctcgatgatgcccaattggcaaatgaaagtctataccttctaatgaaaggatggattacctgcttggaattcgagttggagcacggtttcttgttccgtgagcacaacaagtcaactggatactatgatgga

SEQ ID NO: 40963 - DNA, 131 bp, Glycine max
  Clone ID: PAT_MRT3847_136991C.1
aagcccggaacccggcccgagcgatagcaccggttggctcacaagcacagacggggagcacgaggggggtgaacatgagaaggaggacgcggcacaagccaacaaaggggagaccggggaagacaacacag

SEQ ID NO: 40964 - DNA, 532 bp, Glycine max
  Clone ID: PAT_MRT3847_136992C.1
ggcttactcaatgatctcttccccaactgttaccaatgtcaaccctgcctgtgccggaatggttgctccattcactggcctcaagtccatagctggctttcccaccaggaagaccaacaatgacattacctccattgctaccaacggtggaagagtgtaatgcatgcacgtgtggccaccagttggcaagaagaagtttgagactctttcctacctgccagaccttgatgatgcacaattggcaaaggaagtagaataccttcttaagaatggatggattccttgcttgaaattcgagttggagcacggtttcgtgtaccgtgagcacaacaggtcaccaggatactacgattgacgctactggaccatgtggaatctgcctatgacttgttgcactgatgcatatgatgtgtttaaggagcttcaataggctaatactgctatcgccaacagcttcatacagatcatcagattcgacaacctgctgtcagtgcagtgcatgagcttcgatcgctactagcacccatgcttc

SEQ ID NO: 40965 - DNA, 481 bp, Glycine max
  Clone ID: PAT_MRT3847_136993C.1
ggcaggcgcaagtacttgagaactaagaaggagaagcaaatggcttgctcaatgatctcttacgcagctgttaccactgtcaaccgtgcctgtgccggcatggttgctccattcactggcctcaagaccatggctggctggcttcctaggatgagggcgtttgacattacctccattgctagcaacggaggaagagcgcaatgcgtgcaggtgtggccaccatgatggattaagaagtttgagactcttatctacctgccagacgcttgaggatgcacaattgagaaaggaagtagaataccttcttaggaagggatggatgcctagcttgcaattcgagttggaccacggtttcgtgtaccgagagcacaacaggtcaccaggatactacaatggacgctactggaccatggtgaagctgcctatgttcggttgcactgaagctactcaggtggtgaacgagcttcaagaggctaagact

SEQ ID NO: 40966 - DNA, 228 bp, Glycine max
  Clone ID: PAT_MRT3847_136994C.1
ttagaacacacatactggcacttcactcattaccactctcaggccggcttagagatcttttcaaaagacgtttacagaacatcatccaaagatccagaacgaggaaggacatatcactgatctttacattcccaggaagtgctacgccacaaacacattgattaaccttaaagaccatgcttcatgtcagatcaacattattcataaccatgataatatcttttacaa

SEQ ID NO: 40967 - DNA, 220 bp, Glycine max
  Clone ID: PAT_MRT3847_136995C.1
caaccatcacgcctcaggagatcaatggcaaatgggaccacgtgcggcagctggtgcctcggagggaccaagctctgacggaggagcatgcccgacagcagcacaatgagaggctacgcaagcagtttggagcccaggccaatgtcatcgggccctggatccagaccaagatggaggagatcgggaggatctccattgagatgcatgggaccctggagga

SEQ ID NO: 40968 - DNA, 566 bp, Glycine max
  Clone ID: PAT_MRT3847_136996C.1
acaaatagttcaaaactaagaacgagaatcaaatggcttactcaatgatctcttccccatctgttaccactgtcaaccgtgcctgtgccggcatggctgctccatacactggcctaaaattcatggctggatttcccaccaggatgaccaacaatgacattacctgcattgctagcctctgtggaatactgcaatgcatgcaggtgtggtcaccaatttgcaagacgaattctgagactctttcctacctgccagaccttgatgattcacattcgccagaggaactataataccttcttaggaagggatggattccttgcttgcaattcgaattagaacacggtttcgtgtaccgtgagcacaacaggtcaccaggatactacgatggacgctactggaccatgtggaagctgcctatgtttggttgcactgatgcttctcaggtgttgaaggagcttcaagaggctaagactgcataccccaacggcttcatccgtatcatcggattcgacaacgttcgccaagtgcagtgcatcagcttcatcgcctaccagctcccaggcttc

SEQ ID NO: 40969 - DNA, 407 bp, Glycine max
  Clone ID: PAT_MRT3847_136997C.1
aaaaaaaaaaaaaaaaaaaaaaagaattaaaaaagaaaaaaaaaaaaaaatattaaaaaaatgaaaccaatgaaaaaacaagccggtgccggaatggatgctccattcactggcctcaagtccatggctggcttccccaccagaaagaccatcaatgacttttccttcattgcttggcttcggtggaagagtgctatgcatgcaggtgtggccaccagttgacaagaagaagtttgtgactctttcctacctgccagaccttgatgatgcacaattggctaaggaagccgaataccttcttaggaagggatggattccttgcttggaattccagttggagcacggcttcttgtaccgtgagcacatcgggtcaccatgatactactatggacgctactggtccttgt

SEQ ID NO: 40970 - DNA, 428 bp, Glycine max
  Clone ID: PAT_MRT3847_136998C.1
gcttgaactatcaatggcggaaggctgaaattccgccatataaacacaccattgcgactcatggcgggtcttccttcacaaattgcctgtggcagttggcagaaaacccgccacgccattccgccatggctgctgtttaacaacactggacttgattcaacattattaatatattatcaaatgttagagaaaaaattgtctttaaggaattattgtaactatccactaatccacatcattcgcagtataatttcttgaatttatgccaacagtgccccattaccaaatgtaccttgcacactattttaagtttggtttatcgtttcaaagctcattcacaaaggcatagtatattgccaattagtttgaaggaatgaactcaagacactgagagtagatcatattcaagtgtgtaaaattcaaagcat

SEQ ID NO: 40971 - DNA, 378 bp, Glycine max
  Clone ID: PAT_MRT3847_136999C.1
gctaatcgagagatggttatggatttctgaaagatcaccttcccagccgtatccagggtggacctgaccagtgccggcgtggttgctccatgcaccggcctcaaatccatggctggcttccccactaggaagaccaacagtgtcattaccttcattgctagcaacggtggaagagtacaatgcatgcaggtgtggccaccaattggcaagaagaagttcgagactcttttctacttgccagacctcgatgatgcccaattggcaaaggaaggcgtataccttctaaggaaaggatggattccttgcttggaattcgaattggaacacgggtttcgtgttccgtgagcacaacaggtcacctggatactttgatggacg

SEQ ID NO: 40972 - DNA, 188 bp, Glycine max
  Clone ID: PAT_MRT3847_13699C.1
gatgctcaatgctgctaacagtcacatgtttctcagcatgagctttaaggccatcaatccaaccatagccaactccatcactgaattgttggattgatggccttgccgctcatgctgagaaacatgtgactgatagaatgtatgctcaatgctgctaacattttccccttcaacacacgaacaacaaa

SEQ ID NO: 40973 - DNA, 324 bp, Glycine max
  Clone ID: PAT_MRT3847_1369C.1
ggaccatgtctcccaaaagcataagttggtaggggatttgatcatatgattgcttttaatatctatcacctcattatgcaagaatcctttgagcttgaagcatgacaatttcttcacccactatcttgtgctgaaattcaatttttatttgaaagaatggggccaacaaggattgaactcttgaccacttggtaatagaagttttgataccatctcatggaccaaatcaccagtttaagttgttgaatattggcttgtgattggtttttatgtctaacaattgatttatattttcagcattaaaccctgttgctgcgaccaaca

SEQ ID NO: 40974 - DNA, 307 bp, Glycine max
  unsure (1)..(307): unsure at all n locations
  Clone ID: PAT_MRT3847_136C.1
caacatannnncngcggnnanncggtaangtngcgcntngtgnnagtcggtatcatagggancatanntcggcatcanantngggttcgaagatcgagacatngnnncanagctcntggtcnngcgacanttccnnatgatcgggttcngctcccnaccagnngnangaacaagaggtcgnnntcatcatgccnacctggnntagtnacnangtcnnggnnacccnttttnggagnnnaggantnttancaanatggggtgacacagncncnnnnnaatantngaaccggtatggctcntcganncc

SEQ ID NO: 40975 - DNA, 464 bp, Glycine max
  unsure (1)..(464): unsure at all n locations
  Clone ID: PAT_MRT3847_137000C.1
agaacaagtagttgagaactaagaaggagaagcaaatggcttcctcaatgatctcttccccagctgttaccactgtcaaccgtgccggtgccggcatggttgctccattcactggcctcaagtccatggctggcttccccaccagaaagaccaacaatgacattacctccattgctagcaacagtggaagagtgcaatgcatgcatgtgtggccaccagttgacaagaagaagtttgagactctttcctacctaccataccttgataatacacaattggcaaaagaantagaataccttcttaagaaagaataaattccttacttagaattcgagtgtaagcacgatttcatataccataagcacaacagatcaccaggatactacaataaacactactagaccatagtaaagctagctatatataattacactaatacttctcagatattaagagatcttcaa

SEQ ID NO: 40976 - DNA, 1030 bp, Glycine max
  Clone ID: PAT_MRT3847_137001C.1
gaaaattttgaaaagtgttttgtgcagcagtactcaatgattcaccgacttgaaacaaataaactgcgaaatgtggcaaagttttttgctcatttacttggcacagatgctctaccttggcatgttttatcttatatacgcttgactgaagaggacacaacttcttcttcacgtatatttattaagattctcttccaggaattatcagaacatcttggaatccgactgctaaatgagcgattaaatgatctaacaatgcaagaatcttttgaatccatatttccaaaagataatccaaaaaacacacggttctgcattaacttctttacatctattggtcttggtggtcttaccgagaacctacgtgagtatttgaagaatatgccacgtcttatcatgcaacaacagaaacaagtttcagaatctgaatcagatgatgagtcagggagttctgattcatcagattctggaactgctagttcagagtcagagtcagactcagcgggctacccgcaaagtttaagcatacgaagaaagcggaggagaaagtgaagcaattttatgctattgtcgaatcgaatgcccatgcatctacaaaactgattgaatatccatggtttctccatctttaaatcactgaattaacttgcctttttatgtactgtgaaagggatatgtgggctgtgctggttgagatgttgagcttgctttatcgatctgtttaattttgttcttaagatcatattctttggaagggtagagtattgatgttcataaagatgttttttttttttatttttgatttttcagtataagtgaactccgggagtggttttgcagagcatgattggaagaattatcgtatgattgtaaaatgataatgtcacatgttttctgtaaagaggcaaggattttagagttagattgtaggtggtgattatccatatgaatgctgcatcctatgtctattatctttcttctctacaccaattttaaaatattgaatgtcaggacccttcttggagcctcc

SEQ ID NO: 40977 - DNA, 413 bp, Glycine max
  Clone ID: PAT_MRT3847_137002C.1
agaagaacaagttgctgagaactaataacgagaagcttacggctggctcaatgatctcttgcgcagctgttaccactgtcaaccgtgccggtggcgacatggttgctacattcactggcctcatgtccatggctggcttgcccaccactaagaccaacgatgacatttcctccattgctagcaacggtggaagagtgcaatgcatgcaggcgtagccaccagttggcaagaagaagtttgagactctttgctacctgccagaccttgatgatgcacaattggcaaaggaagtagaataccttcttaggaagggatggattgcttgctggtaattcgagttggatcacagattctggtaccgtgagcacaacacgtcagcagaatactactactgacgctactggaccatgtgg

SEQ ID NO: 40978 - DNA, 571 bp, Glycine max
  Clone ID: PAT_MRT3847_137003C.1
ataggaacatcaataatatacccttccaaagaatatgatcttaagaacaaaattaaacaaatccataaagcaggctccacatctcaaccagcagagcccccatatcccttttacattacataaaaaggcaagttaattcagggatttaaagatggagaaaccatggatactcaatcagttttggggatgcatgggcattcgacaatagcataaaatagcttcactttctcctccgctttcttcgtcttctggcactttcatcaaaactagctgagtctgagtctgaactagctgttccaaaatctgatgaatcaaaacttcctgactcatcatctgattcaaattctgaaacttgtttctgttgttgcatgataagacgtggcatattcttcaaatactcacgtaggttctcagtaagaccaccaagaccaatggatgtaaagaagttaatgcagaatcgtgtgttttttggattatcttttggaaatatggattcaaaagattcttgcatcgtcggatcatttaaccgctcatttagcagccgaattccaagatgttctgataattcctg

SEQ ID NO: 40979 - DNA, 554 bp, Glycine max
  unsure (1)..(554): unsure at all n locations
  Clone ID: PAT_MRT3847_137004C.1
gaactaataaggagaagcaaatggcttcctcaatgatctcttccccagctgttaccactgtcaaccgtgccggtcccggcatggttgctccattcactggcctcaagtccatggctggcttccccaccaggaagaccaacaatgacattacctccattgctagcgacggtggaagagtgcaatgcatgcaggtgtggccaccagttggcaagaagaagtttgagactctttcctacctgccagaccttgatgatgcacaattggcaaaggaagtagaataccttcttaagaanggatggattccttacttagaattctagttgaaacacaatttcgtataccataagcacaacaaatcaccaatatactacaataaacgctactagaccatatgtaagcgtgctatatttatttgcactaatacttctcacatattgaataagcgtgcaagaactaatactacatgaggcaacaactgcatccgtatgatcacatgtggacgacatcgccaactgcagtacatcagctgcatcagctacgaacggccgagctac

SEQ ID NO: 40980 - DNA, 2481 bp, Glycine max
  Clone ID: PAT_MRT3847_137005C.1
gaaagaagttcaggataagagtagtcaagaatatcaaaggtttacgtgggatgctttgagaaagagcagtcatgggcttgtacataaggttaatgctactaatataaaaaatataattccagaattgtttgcggaaaacctgattaggggaaggggactcttttgtcgttcatgcatgaagtcacagatggcatctccaggatttacagatgtttttgctgctttggttgctgtcgttaatactaagtttcctgaagtgggggatcttttgctaagaaggattgttttgcagcttaagagagcttataagcggaatgacaagcctcaattactagcagctgttaaatttatagcgcatctggtgaatcagcaagtggctcatgagatcattgctcttgagttactcacagttttactcgagaaacctactgatgacagtgttgaagtagctgttggttttgtcaccgaatgtggttcaatactgcaggacctctcacctaaaggccttcatggtatttttgagcgttttcgtggaattcttcatgaaggagaaattgacaaacgtgttcagtttctgattgaaggcttatttgcaataagaaaagcgaagtttcagggctatccggctgttcgtcctgaactagatcttgtggagcaggaagatcagataactcatgaagtctccttggatgaggagatagatcctgagatttcccttgatatattcaagccagaccccaatttcctggagaatgagaagcgttatgaagagttgaagaaatcaatgttgggtgaggaatctgaggatgatgaggaaggcttggattctgagtcagacgatgatgatgatgaagatgatgagtctgacgaagaggaagaagaacagatgcaaataaaagatgaaacagagacaaaccttgtcaatcttcgaaggacaatatatttaacaattatgtctagtgttgattttgaggaagctggtcataagcttttgaaaattaagctagagccaggtcaagagatggaattgtgcattatgcttttggaatgttgtagccaagagagaacctatctccgatattatggtcttttggggcagcgtttctgcatgattaacaaagtacaccaagaaaattttgaaaagtgctttgtgcaacagtactccatgattcaccgacttgaaacaaataaactgcgaaatgtggcaaagttttttgctcatttacttggcacagatgctctaccttggcatgttttatcatatatacgcttgactgaagaggacacaacttcttcttcacgtatatttattaagattctcttccaggaattatcagaacatcttggaatacagctgctaaatgagcggttaaatgatacaacgatgcgagaatcttttgaatccatatttccaaaagataatccaaaaaacacgccacgtcttattatgttacaacagaaacaagtttctgaatctgaatcagatgatgagtcagagtatttgaagaatatgccacgtcttatcatgcaacaacagaaacaagtttcagaatctgaatcagatgatgagtcagggagttctgattcatcagattctggaactgctagttcagagtcagagtcagactcagctagttctgatgaaagtgacagaagacgaagaaagcggaggagaaagtgaagcaattttatgctattgtcgaatcgaaggcccatgcatctacaaaactgattgaatatcctatggtttctcgatctttaaatcactgaattaacttgcctttttatgtactgtgaaagggatatgtgggctatagatacttttttgttcagtgtaagtgaactccttcctgagtggttttgttgagcatgattggaagaattatcatataatgtgtaaaacaataatgttcctcggtaagtgaaaactgtggcatgtgctgtgctgtttaagcaaatttgacatggttcacattgttccatgatcaccccttcatcatcgttagatctggaaagatccaatggccacatttatgcttagaaccacactgaacatggcagtgggaacaacaactgaagagagataggagtgtgaagttggtgaaggtttttgataagatgaaacgaagtggtggaatggtaactgggttgcgtgaaaggaacaaacttgttaagagttagacatggttctgaaagtggggtcagtgtttctggctttgtttcaacacttacttcataggactttcgatgaagacttttttttctttttcttttttgggtctgggacttttgttctttcaccgtgtgtgattgaattcatcaaagtttgagtttgtatgcttgcaatggaaatgagtcattattgtcaagagtttatgtttccttcacgacagagaattatttttaccgctatcattaggattgcaatgattatgtttttatatgaaactgattttgaatgtaatatgcctgttaacaccg

SEQ ID NO: 40981 - DNA, 571 bp, Glycine max
  unsure (1)..(571): unsure at all n locations
  Clone ID: PAT_MRT3847_137006C.1
gcacgagaacaagtagttgagaactaagaagaaggaaatggcttcctcaatgatctcctccccagctgttaccaccgtcaaccgtgccggtgccggcatggttgctccattcaccggcctcaaatccatggctggcttccccacgaagaagaccaacaatgacattacctccattgctagcaacggtggaagagtacaatgcatgcaagtgtggccaccaattggcaaaaagaagttcaatactctttcctacttgccagacctcaataatacccaattggcaaaagaagtcgaataccttctaaagaaaagatagattccttacttacaattcgacttaaaccacaatttcatataccataatcacaacgaatcacctagatactataataaactctactagaccatatagaatctacctatatttaactacactaatacttctcatgtatgtaaagaccttcaatgaactaaaactacataccccagtaactgcatccctatcattagattttacaacagtcaccaantacaatacatcaacttcatctcctaccancccgcangcttc

SEQ ID NO: 40982 - DNA, 275 bp, Glycine max
  unsure (1)..(275): unsure at all n locations
  Clone ID: PAT_MRT3847_137007C.1
gtcaagttctngctatcaacgngatttttgagnagnacnnaaccnagattaagaactacggganatggtngcggtatcagagtaggactggatacnanaanatgtacaaggantancgcggtannactctaaacggttcattgangcaatgtagcatgagatggattctcaccacagggtcaggagcccatgcatcnaaattatnaagantgcgancatcccagctaagcttgnaagagggagagcaccangcattccacactacgaananccag

SEQ ID NO: 40983 - DNA, 1033 bp, Glycine max
  Clone ID: PAT_MRT3847_137008C.1
ttttattgagaaaatcattgttatttgtcatatataagtaataagtgatgcatgcacaatttactgaggtatttgttattagagtacccagaataagaggaatattctgtacagttaactctacacaagtgatctaaaacaagcataaaagcaaaactgggaggaaagcagaaagagaaaaataccaacaaaaatactaccgatcctcacatggtattggcaccgaatactcaacatgaacaacttgaaaccaccgttgctgctcccccttcggcatcgtagaaagaatcaaaacatctgcaggcatatatggcaggcaacattggcattatctttctcaataagtagttcaagcccaggcatctttaaataagttctggcaaaatctctgatggatttcacttaaactgagaaacaaaccacaacaccagaaccatcaacaggattcatgtacctcctgcatatagtactcgcatccgaactcagtgcccacgacttcaagaggaaccctggttaaactactctgtacatctgaaattacttatataaacctgcgattgaataactaccctcccaattttaaaaccaggaagcacagagaatcccaccttggccctccccttgttcggccaggtcaacctctttgtcacatcttccatgtatatcatagaaaactccacacctctttccacttgaaagatctcaaccgtgggatcgaacgtgtaggacaacttatgcagtgtccaaacagcactcgccattccaacaaaggcctcgtagaacatactcaatgagcgccacgagttcaacaccgcctccttctcctccaaattgacgaaaatggacgactccattgagggatggatgagcctctcatacttgtgctcgcaaaaccgcgaaaactcgcagcccgggtgaatgcccagcaattccatgggattgctagacacatgctcaagcagttgcttcaagcaaccatccctatcctccaaatccaaactaccgtgcccattcgacaccaccagttcctcgg

SEQ ID NO: 40984 - DNA, 339 bp, Glycine max
  Clone ID: PAT_MRT3847_137009C.1
ggaacacaggggatgtttattaattcattcagcacaaattacatgctactatatatccataacactcaaaactcttgtattccaaaaacaagccctcctaaatgattgacagcctttcccgccccataaaataacaattaatgccacaattcatgaaaaccaacagtgaaaaggggcagacaaaatgagtcatcgacggcaggctagtactgaacataatcataatatagcattgccgaaaagtgcatatattttgccacatagcactctaaataaaatactttgttaaaaggacactcaatcaaaccttcagctttaatacatctcaccaagtcttac

SEQ ID NO: 40985 - DNA, 259 bp, Glycine max
  Clone ID: PAT_MRT3847_13700C.1
aagaagttctgggcaggcctgcagggtctcaccatttatttctacaatagcaatcgggacttccagcacgtggagaagctcaacttgggagcatttgagaaactcacagatgagattccctggggaagctcacgtgaccctggcacccacttcagcctgattctccgggatcaggagatcaagttcaaggtagagaccttggagtgtcgggaaatgtggcttcctctagttggccagtcatcctgaagccaaagaagtt

SEQ ID NO: 40986 - DNA, 140 bp, Glycine max
  Clone ID: PAT_MRT3847_137010C.1
ctttgaataatctatatttgtttcgcaccatttattcaaagtacatgaaaggagttatagaaacacgccaccgtatatatactatacgtctatagatgatacttgaataaatggtgcgaaacaaatatagattattcaaa

SEQ ID NO: 40987 - DNA, 418 bp, Glycine max
  Clone ID: PAT_MRT3847_137011C.1
cttctctcttctctgcattgtatgcagttgtcagattttcacatcttgcagtgagttgcaatctggtacaagacagtatgtaagtaggtacttccgtactgctgttgaggttttgtctggtgatcaagtatcttgttcctaccttggaggctgcaccatcccagcggaatgcatcaagttaagccattataggggttggaacagggattcttgatcaaccaacctgagtacagaattcttctggtgaatctgcagaaaataattactctgataaaaagaagcgcttgagttcatccgcaagttttgtcagtgcggtttgtttgatgtactcggcgcaagggaattaaattgttgcaggtcaattgagatttgaggggcagtcacaagatatttttttaaaccatttaagcttgggttg

SEQ ID NO: 40988 - DNA, 467 bp, Glycine max
  Clone ID: PAT_MRT3847_137012C.1
cgtgttaattgttaaatatatagtttgatgtggtaaatatgtgattgctttgtacccttgtattattttgcaaaacaatttttttctcaaaaagaaaggttgattattctttgcgagttgggaatgaaacatactactatttcagaagcgcttgagttcatccgcaagttttgtcagtgcggtttgtttgatgtactcggcgcaagggaattaaattgttgcaggtcaattgagatttgaggggcagtcacaaggtctttttttttctctctttccatttgagtagtcgttacctgatgctagtgtaatcttgggaattaaaccgtcactttctctcacggctttgtggtttgcagatatcttctcaaaccattaaagcttggtttggatcgtggcatcatcttggggattaaaccttttatctcacttgctaatgtaagaaggtcgcgtattttgtgatcggtatt

SEQ ID NO: 40989 - DNA, 298 bp, Glycine max
  Clone ID: PAT_MRT3847_137013C.1
atggtattgacaaaactagtgcaactttgcaatttagaaagttagcagattgtgattttctcaagagaaactttaagcagatgtctaatgttttgggggtggcttctggggacaaggcgaggttatgggcacaacttcattatgtttcgtgtaataatctggaaatgcaagaagcttatcttggcaatctcgtaaatgggttaccaggattggatttgcaccatccaaaagaagcttgcccattgggaaaggaagctctcttttggattggatggcttgaaaaaggtgatgggccttc

SEQ ID NO: 40990 - DNA, 2500 bp, Glycine max
  Clone ID: PAT_MRT3847_137014C.1
gcgcagattagtggcataattgcagccaaggaatgtgtgaatccttttgattattgtgacattgttacttcaacaactcacaagagtcttcgaggtccaaggggaggcataattttttatcggaaaggtacaaagccaaggaacagagggattcttctaagtcagggacatgaaagtgatcaatatgactttgaagaaaagataaattttgctgtttttccatcaatgcaaggggggccacacaataaccacattgctgcacttgctatagctttaaaacaagtcgctactcctgagtataaggcatacatgcagcaggtgaagaagaatgctcaagctttagcatgtgctttactgagaagaaaatgccgtctagtaactgggggtacagacaaccatctaatactttgggatttaaggcccctgggattgacaggtaaattttatgagaaggtctgtgaaacatgtcatattactttgaataaaattgctatttttggcgacaatggaactataattcctggaggtgtaagagtaggtacccctgccatgacgtcaagaggatgtctggaagctcattttgagacaatggctgaatttctcattagagctgcacaaattgcaagcatactgcagagggagcatgggaaatggcagaagacaacattgaagggacttgagagcaatagagacgtcgttgagctccgggcacgggttgaagcttttgcaactcagtttgccatgccgggttttgacatttgaacatgaagtggccggtgaattgccattattgattatttacatatgcgacaatggtgtgtcgttgtgcccgctttttacaaaagcacatcttgttcttatattttgtggagcttctctcttctctgcattgtatgcagttgtcagattttcacatcttgcagtgagttgcaatctggtacaagacagtatgtaagtaggtacttccgtactgctgttgaggttttgtctggtgatcaagtatcttgttcctaccttggaggctgcaccatcccagcggaatgcatcaagttaagccattataggggttggaacagggattcttgatcaaccaacctgagtacagaattcttctggtgaatctgcagaaaataattactctgataaaaaggttaggcactttgaattcttttagctgatgtttgatgctgaaagctatgttattaatcctattttttgctatattttccccctttttgggatcatattcgataccttaccgtgttaattgttaaatatatagtttgatgtggtaaatatgtgattgctttgtacccttgtattattttgcaaaacaatttttttctcaaaaagaaagagttgattagcagagggagcatgggaaattgcagaagacaacattgaagggacttgagagccatagggacattgttgagctccgggcacgggttgaagcttttgcaactcagtttgccatgccgggttttgacatttgaacatgaagtggctggtgaattgccattattgattatttacatattcaacaatggtgggttgttgtccctgctttttacaaaagcacatattgtgcatatattttgtggagcttctctcctctctgcattgtatgcagctgtcaggttttcacatgttgcagagttgcaatctggtacaagacagtacgaaagtaggtacttccgtactgctgttgaggtttcttatggtgatcaagtatcttgttcctaccttggaggctgcaccatcccagctgaatgcatcaagtcaagccattataggtgttggaacagggattcttgatcaaccaacccgagtacagaattcttctggtgaatctgcagaaaataattactctgataaaggttagacactttgaattcttttagctgatgtttgatgctgaaagctatgctattaatcctattttttgctatatatttccccctttttgggatcatatctgtactcattttcgtcagtaccttgccgtgttaattattaaatatatatagttttgatgtggttacccttgtattattttgcaaaacaatttttttctcaaaaagaaaggttgattattctttgcgagttgggaatgaaacatactactatttcagaagcgcttgagttcatccgcaagttttgtcagtgcggtttgtttgatgtactcggcgcaagggaattaaattgttgcaggtcaattgagatttgaggggcagtcacaaggtcttttttttttctctctttccatttgagtagtcgttacctgatgctagtgtaatcttgggaattaaaccgtcactttctctcacggctttgtggtttgcagatatcttctcaaaccattaaagcttggtttggatcgtggcatcatcttggggattaaaccttttatctcacttgctaatgtaagaaggtcgcgtattttgtgatcggtattatatgcatatgttatgcaacagatttttttattactctttcc

SEQ ID NO: 40991 - DNA, 112 bp, Glycine max
  Clone ID: PAT_MRT3847_137015C.1
gactttccttctcttaaaagctaccttccaattctggttgatacgccgtctagacacttgaagacgaacattaaacaaccgggaagaaactagcaaagcatactgcgaaacg

SEQ ID NO: 40992 - DNA, 392 bp, Glycine max
  Clone ID: PAT_MRT3847_137016C.1
agatggccaaaaagttccatgacaacttgatagctaagaaggacttcgtggttggacagaaagttttattgtataactctaggctcggactcatgagtggtaagttgaggtcaaagtggattggtccttttgtggtgactaatgtttttccttatggtacagttgagatcgaaagtgaatccatataagagcttcatggtcaatggacaccggctgaaaccattcctcataaatccttccttggtggatgtagtggtggaggagacctccttacttcaccctacttctcttctgccatgacttaaggagttttctttttctgtctccctctttacttttattgcacttgtccaaatttattgattgttctgattgctcttgatcttatgatt

SEQ ID NO: 40993 - DNA, 418 bp, Glycine max
  unsure (1)..(418): unsure at all n locations
  Clone ID: PAT_MRT3847_137017C.1
ccatgacagcttgatagctaagagggactagttggacagaaagttttattgtataactctaggctcggactcatgagtggtaagttgaggtcaaagtggattgatccttttgtggtgactaatgtttttccttatggtacaattgagatcaaaagtgaatccacagataagagcttcaaggtcaatggacaatggctgaaaccattcctcataaatccctccttagtggatgtagtgatggaggagacctccttacttcatcctacttctcttccgccatgacttagggagttttctttttctgtctccttctttacttttattgcacttgtccaaatttattgattgttctgattgctcttgatcttatgattatgctacattgaggacaatgtgttgtttaagtgtggnggggggg

SEQ ID NO: 40994 - DNA, 278 bp, Glycine max
  Clone ID: PAT_MRT3847_137018C.1
ggcagaggaagggttagaaatatagaaagatgaagatactacagcgtcgcatatttcctcttctctgcttcggaagaatgacacatgaaacacgtcactggcgttcgcatcattcctgggtagagtcgtcttcgcttctgtcatcatactcgcagcctaccagttatttaatgaatttggaattgatgtgggacctgctacaagggcactcagatcgaaatttgatgccattacacatctggtgcattctctgatgggctttcagattccatagatta

SEQ ID NO: 40995 - DNA, 438 bp, Glycine max
  unsure (1)..(438): unsure at all n locations
  Clone ID: PAT_MRT3847_137019C.1
gaagttccatgacagcttgatagctatgaaggactttgtggttggacagaaagttttattgtataactctaggctcggactcatgagtggtaagttgaggtcaaagtggattggtccttttgtggtaactaatgtttttccttatggtacagttgagatcaaaagtgaatccacagataagggcttcaaggtcaatggacactggctgaaaccatttctcacaaatccctccttagtggatgtagtggtggaggaggagacctccttacttcaccctacttctcttccgccatgacttaaggagttttctttttatgactccttctgtacttttatttcacttgtccaattttattgattgctttgattgttcttgatcttatgattttgctacattgaggacaatgtgttgtttaanttttangggggggggggggg

SEQ ID NO: 40996 - DNA, 291 bp, Glycine max
  Clone ID: PAT_MRT3847_13701C.1
ggaggccaatcaaaataaaaatttttggtggggggcacccttgataaaaggtttgaaaccctttggggggggggtgaaaagattttttcgggccttgggaaacaaaaaacctatctataagggggctctttttgctgggaaaaatttgaacctaataaaatttctaggttaaaaggctttttttttctttgaaaaggtgcctccccaccccggggagaggggggtccgaaagggattctccccaataaaaaaggtggggggaaaaaaaaaaaaaattttggtccccccccc

SEQ ID NO: 40997 - DNA, 121 bp, Glycine max
  Clone ID: PAT_MRT3847_137020C.1
aactcttataacatgagttcaaagagccgactgttaagcggtcgctcaataggatctctccttgcttacgcgtcaatgtcatgtcctcactcgtctacacagtcacctccattcaattcag

SEQ ID NO: 40998 - DNA, 1648 bp, Glycine max
  Clone ID: PAT_MRT3847_137021C.1
acgacgcgtcagcccacgcgtccgcccacgcgtccgcccacgtccgccctgcagtgccgccaaagcaagcctgccctaaaaattgaacagggcagagagcaagggcaagcgagtgaacatgggaacctctgcgaacgctgtcgcaggtggtcgtggcggcgcccctgtccccaaagacgtcgactacgctaattacttctgcacctatgctttcctctaccaccagaaggagatgctctccgaccgcgttcgcatggacgcttacttcgacgccatttttcaaaacaaacgccacttcgctggcaagactgttttggatgtggggactggaagtggcattcttgctatatggtcggcacaagcgggtgcgaggaaggtgtatgcagtggaagcaaccaagatgtcagaacatgcgcgtgcacttgtcaaagcgaataatctccaggatgtagttgaggtcattgagggatcgatggaggaaattaccttgccagagaaagttgatgtgatcatctctgaatggatgggttattttcttctgcgtgaatctatgtttgattcagttataaatgctcgtgaccgctggctcaaaccaacaggagtgatgtatcctagtcatgctcgcatgtggatggcacctatccggactgggatagtagatcacaaattgggcgattacgagtcgactatggatgattggcaccactttgttgatgaaacaaaaacctactatggtgttgatatgagcactttaacgaggcctttttcggaggagcagagaaaatactatctacagacatcattgtggaacaaccttcatccacatcaagtcgtaggaactgctggtataataaaggaaattgattgtttaactgccacggtggctgacatagagaaagtcagatcagatttttcaatgtcaataaccgtggataacacaaagttatgtggatttggagggtggtttgatgtacattttcggggaagaagtgaggatccagctgaacaagagattgagttaaccacagctcccagtgtaaattatggtacacactggggccaacaggttttcctcttgcatcctcccatgcatctgagtgaaggtgatgatttaagggtttcttttctaatgagtcgctcaaaggaaaaccatcgtttgatggaggttgaacttggatgtgagattcatcagcattctggcaagctacttgcacctttcaaaaataagtactacattgaataacaatctggatttcaaattctgggggctgcaagatacaaggaacggctcacatggtttgtgatcatatggaattgtatggttcttaattacgtagtaataggaaaaaagtagttgccgccacttgcaacattcaggttcttccaatcattttggttgtttatgatttgcaactcaagtacgtttagcatgtctcagttatgatggttgggtaaccgtcgtgctggttatctatacctgagttttaggggaagcttgtggccctttttgttttagaatatgttatgctgaagtttgtaatagttggttgattataagattcctgatatttttattttattttattttggcgttccataaaacaaaaaaaaaaaaaaaaaaaaaaaaaagataattatacgacgagac

SEQ ID NO: 40999 - DNA, 205 bp, Glycine max
  unsure (1)..(205): unsure at all n locations
  Clone ID: PAT_MRT3847_137022C.1
ttnnngnnnnnctggtgcttatataatgacgtactagctagcctcatttttcttcatccttattattnctctctcttctctctctncctatattcattntccgcgctttgaacgagcgactcggggttnnctnacgaagnaccccggncctctcgatcagctcaagcagatactggatgagtttgcaaaggagagggattgggag

SEQ ID NO: 41000 - DNA, 286 bp, Glycine max
  unsure (1)..(286): unsure at all n locations
  Clone ID: PAT_MRT3847_137023C.1
gaatcataaaagcttgatatatttnaacncatcaactttaagggtgggagttcatattttgtatggaatgttaattataaattctaaaaagtattattcataaaacatgttatctattacattacatgctgttaatttgnnnaagttattgcgatttagcattaagctaatccnnattatttattattatatatttgtaaccaccttataagggtgttaaaaattaaaaaatgcttacacaagacaatcatattatttgtttcttttcataatgtgtaatttttaa

SEQ ID NO: 41001 - DNA, 212 bp, Glycine max
  Clone ID: PAT_MRT3847_137024C.1
aactgtattagtgtattcattcatatgattgtcactgagttgcttctgtaatctatgccccttataatatatataggatttgacttgggtgattagcttatcaattactaaatggtgggaatctcaaacttgggtgcgatccttgggggtgtccccaattaacacaagacaacactttttgcagcatgtacatgggatgccaggatcgacaa

SEQ ID NO: 41002 - DNA, 661 bp, Glycine max
  unsure (1)..(661): unsure at all n locations
  Clone ID: PAT_MRT3847_137025C.1
aacaagacatatttttttacataagtattaattattttgtcaaagtattattaattattatcttatgaaatatataatttagtcatctatattgatctataattttttataattctatattagtttattacctaaaatattaaaaaatataaaattgatttaatcacaattcaaattcaactatgattgaaccattgattcttacaccagtgtttttattgatccaattttaaaaacatgattaaatcatacttgacatttgcatacactcaattaggcttttttttatatataccaaaaatggtctattttttcatttaattaccaaaatgggtagatttttaaaaaaaattatgaaaatgnggtaagttgtttttttaaaaaactgttttcaggtataaagtaaaagataattttgtgtcatctattttttaatgggggttgaaaaaactatcggnaagtgttaaaactaaaacccttacaaacaaaaaataaacaaaaattataaaaaaaaaaacatatttacaatgactacaaatataatttttttgtgaatagatggggcaacatgtcccatcagcgatcaattaaaccccgagaaaaacagtgactatataggcanatttactaaagagggttacttttaaaactatttaccgat

SEQ ID NO: 41003 - DNA, 472 bp, Glycine max
  Clone ID: PAT_MRT3847_137026C.1
ggcttcctcgatgatctcctacccagctgataccaccgtcaaccgtgccggtgccggcatggttgctccattcaccggcctcaaatccatggctggcttccccacgaggaagaccaacaatgacattacctccattgctagcgacggtggaagagtacaatgcatgcatgtgtggcctccaattgacaagaagaagttcgagactctttcctacttgccagacctcgatgatgcccaatgggcaaaggaagtcgaataccttctaaggaaaggatggattccttgcttgtaattcgagttggagcacgggttcgtgtaccgtgagcacatcaggtcacctggatactatgatggacgctactagaccatgtagatgctgactatgtttggctgcactgatgcttcttaggtgttggaggagctgcagtatgctaagactgcgtacgccaatcgcttcatccgtatcattgga

SEQ ID NO: 41004 - DNA, 469 bp, Glycine max
  Clone ID: PAT_MRT3847_137027C.1
ggcttcctcaatgatctattccccaactgttaccactgtaaaccgtgccggtgccggcatggttgctacattcactggcctcaagtccatggctggcttccccaccaagaataccaacaatgacattacctccattgctagcaacggtggaagagtgcaatgcatgcatgtgtggccaccagttggcaagaataaggatgagactcattgctacctgccagacctggatgatgcacaattggcaaaggaagtagaatacctttttaggaagggatggattcctcgcttggaattctagtagtagcacggattcatgtacggtgagcacaccaggtcaccaggatactacgatggacactactggaccatgtggaagctgcctatggtttgttgcactgatgcttctaaggtgttgaatgatctttaagacgctaagactgcataccctaacgggtttattcgtattata

SEQ ID NO: 41005 - DNA, 502 bp, Glycine max
  Clone ID: PAT_MRT3847_137028C.1
cgcgaagacgacaaaagcgggatctggcggcagaaaaacaagtaagatgagaactaagaagaaggaagtggcttactcaatgatctcctgcccagttgttaccacacgtcaacgcgcgcacggtgaccggtactggactgttccattcaccgggctcaaatccatggctggcttccccacgaggaagaccaacaatgacattaccgtacattgctagcaacggtggacgagtacaatgcatgcaggtgtggccaccaattggcaagaagaagttcgagactctttcctacttgccacacctcgctgatgcccaattggcaaaggaagtcgaataccttataaggaaaggatggattccttgcttggaattcgagttggagcaccgattcgagtaccgagagcacaacgggtcacctggatactatcaaggactctactggaccactgtggaagctgcctatgtctggctgcactgatgcttctcaggtgttgaaggaacttc

SEQ ID NO: 41006 - DNA, 412 bp, Glycine max
  Clone ID: PAT_MRT3847_137029C.1
cccacgcgtccgaccacgcgtacggttgtgaactaagaaggagaagcaaatggcttccgtcaatgatctcttccccagctgttaccactgtcaaccgtgccggtgccggcatggttgctccattcactggcctcaagtccatggctggcttccccaccacgaagaccaacaatgacattacctccattgctagcaacagtggaagagtgccatgcatgcaagtgtggccaccagcttgcacgaagaattttgagactctttcctacctgccataccttgatgatgcacagttggcaaaggcagtagtataccttcctaagaaggcatggatttcttgctgggcattcgagttggagcacgtgtacctgtaccgtgagcacatcatgtcaccaggatactactatggacgcta

SEQ ID NO: 41007 - DNA, 387 bp, Glycine max
  unsure (1)..(387): unsure at all n locations
  Clone ID: PAT_MRT3847_13702C.1
gaagacaaaaaacatgcannnactttcaaggagaagcaatacatcatactggtacttttcatcaaaactctaatctcaaaaaacgtaaccatagccaatctagcttaaactacacactgctgattacacttatccattatgcatccagattattttgttaacataattccctggttcccctcccaggccctacgtccatcccctaatatctcatgccctatagcttttttctccacaacaggcttcttgattttgttaatggtggatgcctcctcagtgtccacattcccaaccaccacaatgttgatctgagccttttccttatccatcttccaaattaacttctaattcggaatacctaagatatacagtgtggaaactcaatac

SEQ ID NO: 41008 - DNA, 494 bp, Glycine max
  Clone ID: PAT_MRT3847_137030C.1
gaacaacatcatgggaacaacttttatcaaagaagagggtctgtcaatgatcttgtgctcatctgttaccgccgcctaccgtgcctgtgcctgtatgggagctccattcaccgggctcaaatgcatggctgagctgcccactaggactaccaactttgacattacctgcatagctagcaccggcggaagagcacaatgcatgcaggtgtggccaccaattggcaagaagaagttcgagactctttcctacttgccagacctcgatgatgcccaattggcacaggaagtcgaataccttgtaaggaaaggatggattccttgcttggaattcgcgttggagcacgggttcgtgtaccgtgagcacaacaggtcacctgtatactatgatggacgctactggaccatgtggaagctgcctatgtttggctgcactgatgcttatcaagtgttgaaggagcttcagaggctaagactgcataccccaatggcttcat

SEQ ID NO: 41009 - DNA, 381 bp, Glycine max
  Clone ID: PAT_MRT3847_137031C.1
gatctggcagcagaagaacaagtagttgagaactaagaaagagaagcaaatggcttcctcaatgatctcttccccaactgttaccactgcaaaccgtcccggtgccggcttggttgttcaattaattggcttaaattcattggttgctttcccaccctaaagacccaccatgacattaccttcattgctagcaacggtggaagagtgcaatgcatgccagtgtggccaccagttggcaagaagaagtttgagactctttcttacctgccagaccttgatgatgcacaattggcaaaggaagtagaataccttcttatgaagggatggattccttgcttggaattcgagttggagcacagtttcctgtaccgtgagcacaac

SEQ ID NO: 41010 - DNA, 840 bp, Glycine max
  Clone ID: PAT_MRT3847_137032C.1
aatttcgtaagaggcggacgacggttcgcttttgtgagcggtagcaagaagcggatccctatggagaggtagtgctcgtcggctgagacgcgcttagccatggagacggagcctgatcgattacgacgtcgatagacaatagcactgatcacgtgagaagcagcttggcgtcgtaggactagtgctcatgtggagaacgcctaatagcagacccgagatggaaccggatgtttgccggcttgcatagatatgttagatatggttggcgaacaccaactatacccttgtagagactgatgaagatctatggacacttcgcgcccatggggcaaggcgaccggcatatcgtaaaatgacccgactttctcgaccgccaagggaaccccgtgtagacacgcgggtccttagcatggggaagaccagcggccctcttgaaagaattgccttccaagagtcacctgagcgacattaagtgacatctattatgagtcagtcgactagtgccactcgggagtagctcctggcattgataccatttccaagacgactgcgctccgaatatgataaccgtcaaagcgatgctggaactgttggagacctagatatacttccaccgtttccacccagacctccagaagatcctgacataatgccatttgcaagagctccaaacatagttccattctcacctcgggggcgtcggtcaaaatagataaccatcaaaaagatgctgggactcttggaagagtaattcacttcccccgaatcgaccaggaccgccattaaaataattccatttccaggaactaacatagtccctttccaaaacctaccttcctc

SEQ ID NO: 41011 - DNA, 544 bp, Glycine max
  unsure (1)..(544): unsure at all n locations
  Clone ID: PAT_MRT3847_137033C.1
acgagagcaaatggcttcctcaatgatctcttccccagctgttaccactgtcaaccgtgccggtgccgacatggttgctccattcactgacctcaagtccatggctggcttccccgaccaaaagaccaacaatgacattacctccattgctagcaacggtggaagagtgcaatgcatgcaggtgtggccaccanttggcaagaaaaagtttgagactctttcctacctaccanaccttaataatacacaattggcaaaggaagtagaataccttcttaggaagggatggattccttgcttgaaattcaagttgaagcacggtttcatataccaagagcacaacaagtcaccaaaatactacaatggacactactgaaccatgtgaaagctacctatgtttgattgcactgatgcttctcaagtgttgaaagaacttcaagaggctaagactgcataccccaacaacttcatccatatcatcaaattccacaacattcaccaaatgcaatacatcagcttcatcacctacgaacccccaagcttc

SEQ ID NO: 41012 - DNA, 493 bp, Glycine max
  Clone ID: PAT_MRT3847_137034C.1
ggcttcctcaatgatctcctccccagctgttaccaccgtcaaccgtgccggtgccggcatggttgctccattcaccggcctcaaatccatggctggcttccccacgaggaagaccaacgatggcattacctccattgctagcaacggtggaacagtacattgcgtgcaggtgtggccaccatttggcaagaagaagttctagactctttcctacttgccagacctcaatgatgctcaattggctaatgacgtctaataccttctaaggaaaggatggattccttgcttggaatccgacttggatcacggtttcatgtaccgtgagcacaacaggtcaccttcatactatgatggacgctactggaccatgtggaatctgcctatgtttggctgcgctgatgcctctcatgtgtcgaatgagctccaagatgtctacactgcataccctcttggctccattcccttcacgctagttgacgacgctcgtcagatc

SEQ ID NO: 41013 - DNA, 742 bp, Glycine max
  unsure (1)..(742): unsure at all n locations
  Clone ID: PAT_MRT3847_137035C.1
ttgattataaattctaaggctattcatattctcttcatatctcacaaaaatagaaatcttgtatgattattgccctgtcttttaatcatttttgaagggtgctaacatgctggcactcctattgtcctatcttgtattattagtgctaataatgtattttgatattttttaatgagaagagatcaacttattttatgagtgacattaaaatagttatttttcttcttaactattaatttttttgaaatctaatggttaaaattaattatttattaaaattttaagaaaataaacgatgatcatcataaataactttgctttgaaagaattacaattagagtaagttaattctgttttttaataaattttcttttataaatccaaattgagtcttattagtttgagaatgagaaataaataccacatgttaaataaaattcacatgaattttatccaataaaaaaagtgtgttgaaaaaaatgttattaacatttctcatagttttgttaagaagactgaggcatgacatgagttggaaaagaattttggtagaanggattgcttgagaactgaccttacttaataangaaggtttaccaaataaaaaatttatctaaaaaaaaattatcncaatacaaatctgtgttatttttttcangactaagggcttgatttgtatttgtaccgcccancatattagtgggaccttgatcgtgaaaaattggaaaattttgaagctgga

SEQ ID NO: 41014 - DNA, 520 bp, Glycine max
  Clone ID: PAT_MRT3847_137036C.1
aatgatcttttccccatctgttaccactgtcaaccgtgccggcgccggtgtggttgctctattcactggcctcatgtccatggctggcttccccaccgagaacaccaacagtgacattacctatattgctagcaactgtggaagagtgcagtgcgtgcgtgtgtggccaccatttggcaagaagaagtttgagactcttttctacctgccagaccttgatgatgcacaattggcaagggaagtaatataccttcttaggaagggatggattccttgcttggaattcgagttggagcacggtttcgtgtaccgagagcacaacaggtcaccagtactctactatggactctactggaccatgtggaagctgtctatgtgtgggtgctctgatgcttctcatgtgttgagagatctactagacgctaagagtgcatacccctgcggcttcatgcgtatcattatatgccacaacgttacccaagtgcatcgcatcagcttcatcgtctaaacgcctccaagc

SEQ ID NO: 41015 - DNA, 559 bp, Glycine max
  unsure (1)..(559): unsure at all n locations
  Clone ID: PAT_MRT3847_137037C.1
acgagagtagttgagaactaagaaggagaagcaaatggcttcctcaatgatctcttccccagctgttaccactgtcaaccgtgccggtgccggcatggttgctccattcactggcctcaagtccatggctggcttccccaccagaaagaccaacaatgacattacctccattgctagcaacggtggaagagtgcaatgcatgcaagtgtggccaccagttggcaagaagaagtttgagactctttcctacctgccagaccttgatgatgcacaattggcaaaggaagtagaataccttcttaagaagggatggattccttgcttgaaattcgagttaaagcacagtttcgtataccaggaacacaacangtcaccgaaatactacgatagacactactgnaccatataaaanctagctatgtttaggtacactaatacttctcaagtatggaaagagcttcaagaaactaaaactacatacgccaacaacttcatgcatatcatcaaattctacaacattcgccaaatacattacatcaacttcatcggctacgaaccc

SEQ ID NO: 41016 - DNA, 282 bp, Glycine max
  Clone ID: PAT_MRT3847_137038C.1
cccacgcgttcgcccacgcgttcgtttcagtaggctttgatagagaaatatagaaactatggaatttggctattcttttttggttttaatgtaagggctttttccttgttaattatcaacttgggggcacacgtgccacgtttgctgtaaatgcagtaaggattgaaatagctgtcaatctacattaatattagccacatttttgtttaaaaaaaaaaaaaaaaaaaaaaaaaaaaaaaaaaaaaaaaaaaaaaaaaaaaaaaggaggacaaatctaaaaag

SEQ ID NO: 41017 - DNA, 288 bp, Glycine max
  Clone ID: PAT_MRT3847_137039C.1
cgtttgcttaggtgaaagtggaggccacagtgggtttccgtgcacagacatgtgtagcatcagcctgagcgatgagctgatcctatatggggcgggccagttacggtgtcagcaccatgtgctatgaagactgtgacttatgtaatcctgcttggacactatcagtgactatggcgttgaatccaaacccggggtctgtgacttggagaaggcatactctgaagcgtcccgaatgacatggtgacttcatgggcgtaactggacgaactgtgactgcattgccagatg

SEQ ID NO: 41018 - DNA, 161 bp, Glycine max
  Clone ID: PAT_MRT3847_13703C.1
cattatttacccaccaaatgttatggtagttaaataatgttgaacgcctagttgactgtaactaccataacatttggtgggtaagtacagtcaactaggcgttcacattatttacccaccaaatgttatggtagttgactgtacttaaaaaaacataaaaa

SEQ ID NO: 41019 - DNA, 412 bp, Glycine max
  Clone ID: PAT_MRT3847_137040C.1
gggtcaaaatcagtttttttaaaaattccaatgggccctgggatatcttttattttgagcctgttaaaaataattgataaggccccaaacaggtatcaattacccctttatgagatagaactgcaagtttttatgaacaagggaaactgggaacagactttatggaaagcaacacagattaacaccattaagcattacacacccccaagttttgctcggggtcctaaactttgaatgtcaaatgcccttaaagaaaaaatgtttaatctttttttcccaacaaagagggaaggaactttttggaagcccctgggatttgcttgggaaaagcccgcttaaaaaaaaccctgtttttattggatgaaacctttgagaatatttttcgggccctatagggccgggttaaaaaccc

SEQ ID NO: 41020 - DNA, 477 bp, Glycine max
  Clone ID: PAT_MRT3847_137041C.1
acttacagaagcctcttttaatttccaccccctctagattttctctctaactggttttccttagatctctcacaatgacctttaatcttatgcttttgttctgtttggttgcagtgatcaacaatgttgttgttccaactagtgcaagacaactcatgagtaccaccactacttcaccagacgagaaagaagtgatgatgaatattggcactgcaaatagagggcatgatgaaaaacatgatcatcaagtacaagtagatgatccaacaagcaagaactataacgtggaaaagaaagaagaaagatttgacaaaaaccaaatcatccctcccattcttccattcccatttggttttccatttccacgtccttcttttccatttccacgtgctgcttttccatttccacgttttccacttccaacaccattcgttccagggcttccatggccaataagccctgatgcggtttcttcat

SEQ ID NO: 41021 - DNA, 481 bp, Glycine max
  Clone ID: PAT_MRT3847_137042C.1
gccgcacccaaaacaccttgttttgtgttgtgtctttctttcgttcttctctcaacaatggatttccacaccctctcaaggaagcagctccaggccctctgcaagaagaacaagattcccgctaacatcaccaacgttgccatggctgacgctctcgctgctctcaaccaagttgaaggattggatgatttttttaatccaagtgagggtgatgttggaaccccaagtgttaatcaccgtacggttgtcagaacctcaactcaaaggaaagcagcgatagaagaagcagaaggtttgaaggtgaagacctcgacccggcgggttagagttgcagaagaagtagttgagcaggagaacaaggatgccaatgccccaccaatcactcctgctgccagtaggagaagggctactgcggtttctactcgcagaaagaaagaagttgagatggtagaagaagatgctggtgttcaaggaaacccta

SEQ ID NO: 41022 - DNA, 414 bp, Glycine max
  Clone ID: PAT_MRT3847_137043C.1
cccatttgtacgcccacgcgaccggggacgcgcgggtgggcgaatgcctttgggcagattgaaccagacatgaattcaaggcagcagctgttgagtaccactaccaatggtgatgtggttcaaggaaaagatctcgcatcggctaaagttaatgtagcatgtgctgctgatggcttgacattaagtgacactccaactccattgttggaatctggtttgcaaaaagacagagggttaattgtggaataccttggaaggatgtgtaacgatgttcataacgcaaatcagccccaagagaaagatttgtgggggggaaatttttccttagagaataaacctcgctctagattggaaaaagtctcctttactaaagcacaaattgttagaggaaaaacccttaaatatgatacaatt

SEQ ID NO: 41023 - DNA, 308 bp, Glycine max
  Clone ID: PAT_MRT3847_137044C.1
cccacacttccactcactcttccactgacatattctctatcatacttctatatcatataagcattgtcattaacgcatgacaggatacacacactaccctatcttttattctttttgaaatatccttatccaatatatcatctaataactatagtatttatatacaaatttttgcaatctttcaagctataaactcatccttatcatacactctctaaaatcttattcctaaaatcaaaatcactacctcacacttttcttcgattactttatctttaaaatcactttattaaatctacatttacata

SEQ ID NO: 41024 - DNA, 441 bp, Glycine max
  Clone ID: PAT_MRT3847_137045C.1
accagatcagttcctgggaaacatatgaagggtcaaagtgtccatgaggtaatgaataacaaaaacaacaataatgggtatgttgggtactatcattcaaatttcatatcatttgaacaaggagggcaacatagacctagtaatgctcaagtgatttcccatatccccttccatgaaggtgcccctttcattccttgaataatgaagtggtggagagttataagatgaaaggtaagtggccatgaagggttgtggagaaaatatattaaatatatacatagaaaattcataatattgaggcattgcaattatatattatgcaaaaataaaataagttaataacctactgtagttaggaggggaaaaggcgggcaagaataaggagagaaattgcttcatttgaaaactaatgcatagatactcatattcagggagaaagag

SEQ ID NO: 41025 - DNA, 294 bp, Glycine max
  unsure (1)..(294): unsure at all n locations
  Clone ID: PAT_MRT3847_137046C.1
acgcgtacgtaagctcggaattcggctcgagtnctctctctctctctctctctaanacggantgatggctntgnagctnngggaaaccctgaagnaanccatcntnncctacactggcttctctccttccancttnttcacggtgctggcgcttcttnntgccgtgtactagtcgncacgggnctctttggctcctnngacgatcaccatcacngccancgtnacgtcnangnggaggatgagatgccgnntctgcgccncccggnncagctcggcgagatcacagcggnggat

SEQ ID NO: 41026 - DNA, 930 bp, Glycine max
  Clone ID: PAT_MRT3847_137047C.1
attaatcagaataaatcttgatatcaaaaaaatgaaatttacagaagatatcaaaaaattgtaagttatatgtttttttgatgatttgataatctccgtataagtacttacgttttctatgtttatatagtaaaagaagaaaagagaaaacttcaaggcaattgccaaatgcgatcctcaaaatgctttgctttgtcaaaatatcttcagcagttatcagtttcctcatcagtagcagttgaactgatccccacctgcaaccatggcgaagaactgccaccagctttcatgtcctttagctcactcagtttcgccaacttgatcttactatcagcttcattatccatgttttgcattgagttgttgttgttgttgtttttgtcctcatcattgtcaacatcaacattgtattagggttatggagactttgacaatggctattattggtatcatctttagcatcctttgatgcaacccaaggctgcaagtaaaattctgtgttcacattccttcttgcaaggtcattagagggtgcaggaaggttaaggtctaatttgagatcaagaggctcggaagaggtatcaaatttgggtatttgatccaagtgctcttggaattgttgaaatcttgttaatgtggaggtgtcaggagcatttgaagtgatccaatggcaccttttgtgtccccccaatgcttgtcccgaagagaagctcctatggcaaatggagcattcatgcactttggattttctcttggaggaagaggccaatgagggattggagcttccatggtcaaattggagggtggagtttgattttgtagggaaaaactcttcatgtgtgatgacatcatcctccatgagatcgtcatcaaggttgtctagccttgcagcaaagcaacccttgacctttttgtggcttgcctcgagcc

SEQ ID NO: 41027 - DNA, 548 bp, Glycine max
  Clone ID: PAT_MRT3847_137048C.1
aaggaatcaaaccttaataaaaagtcccccaaaatggctccaacaagaaaccaccttcttcacattgccatgttcccatggtttgcaacaggtcacatgactccattcctccacctttcaaacgagttagccaaaaggggtcacaaaatcacgttcttgctacctaaaaaagccaaactacaactccaacacctcaacaaccatcctcacctcatcacattccataccctcacaattcctcatgtaaaaggccttcctcatggcaccgaaacagcctcagagatccccatttccttgaaccatttactagtcatagccatggacaaaacccgtgaccaagtggagcacacacttagtgcaacaaaccctgattttgtgctctatgataacgcttattgggtgccccagatagcaaaaaagctgggcatcaaaaccatttgttacaatgtggtttgtgcagcaagtttggctatagttcttgtgcctgcaaggaatgttcccaaggacaggccaattactgttgaggaactaagccaaccaccagaagg

SEQ ID NO: 41028 - DNA, 1290 bp, Glycine max
  unsure (1)..(1290): unsure at all n locations
  Clone ID: PAT_MRT3847_137049C.1
ggatgttttggagattgaaactgggctgcgagaagacgacagaagggggaaaagctacaaaatgaacagttcttgtgcggacattcttctctttgctgcccatagatggccaatgtcaaagcctagtcttgtaggtgaatctaaggatgtttttgatcagaaggcaagcaataagtactggattgatgttcagctgcgatggggtgattatgactctcatgatattgagcgttacactcgggccaaatttatggactacacaacagataacatgtctatatacccatctcctactggggtgatgattggtcttgatttggcatataacttgcattctgcgtttgggaactggttcccagggtcaaaaccactacttcagcaggccatgaataagatcatgaagtcaaatcctgcactgtatgtgttgagggaacggataaggaaaggtttgcagttgtactcttctgagcccactgaaccatatttgtcttcccaaaactatggagagatattcagcaaccaaataatatggtttgttgatgacactaatgtgtatcgtgttacaattcataagactttcgaaggaaatcttacaacgaagcccatcaatggtgctatatttattttcaatccagtgactgggcagttgtttctcaaggttattcataccagtgtgtgggctggtcagaagcgtcttgggcagttggcgaagtggaaaacagcagaagaagttgctgctcttgtaaggtctttgcctgttgaagaacagccaaagcaaattattgtcactcgtaaaggaatgttggatccattggaggttcacctgctggatttccccaacattgttattaaaggaagtgaactgcaacttcctttccaggcatgtttgaaaattgagaaatttggggatcttatattgaaggccacagaaccccaaatggttttgttcaatatctatgatgactggctgaagagtatttcttcatacactgcattctccaggctgattctgattctgcgtgcactccatgtgaataatgaaaaggcaaaaatgttgctgaagcctgataaaactatcatcactgaacctcatcacatctggccttctctaagtgatgatcaatggatgaaggtggaggttgcattaagagatcttatactatcagattatgcaaagaaaaacaatgtgaatacttcagctttgactcagtctgagatccgtgatattatacttggagctgagattactncaccttctcaaacagcggcacagattgcagagattgagaa

SEQ ID NO: 41029 - DNA, 148 bp, Glycine max
  Clone ID: PAT_MRT3847_13704C.1
cgaaaggatgtaagaaaattcccattgggtatacgcttcaatcctcaaaaaaaccgaaacttttaacaccatcactttatcgcaacgtggaatggttatttacaatcggaaaaattaccaaattttacccctatcaaacattacaaaa

SEQ ID NO: 41030 - DNA, 229 bp, Glycine max
  Clone ID: PAT_MRT3847_137050C.1
gggccacttataaattggacaatccgaaaaccttggatggtttgaccaaaccagatgaagcttatggatagggtaacccgactaaattttacaaaagggccaaaaaaaaataaacttgttgtgctaagggttcctatctttgtaaaacatatttttgaaaaaaaaaattaaaaacttttggaccacttttaaattagggaattctcaagccttgcgttgaaacttatgg

SEQ ID NO: 41031 - DNA, 1641 bp, Glycine max
  Clone ID: PAT_MRT3847_137051C.1
aaaacaaggaatgaagagaaggatggagaataagccgttgcaattccctccacacgttccagttaccttatctaccacctcagccttttctcttcactcttcctttccctccaaacaaacaaaagcaaccattaccaccaccaccttgaactttcccagttacactaccaccactttgattccaaataaccaccatcaccatgttcacggctagtaaactagccttcacattaacaccacctcgtccatgcactgcacccttgacaccaatctcttcagcttctggtgttcacctcattcagttcaatggcaggcacttatgcctccgccaaaggctgtttctactttctcctatggccactgcagatcaacaagggaaagttgaagaatttgaagatgattcaaatactgttgatagtaaaattctcccatattgtagcatagacaaaaaagagaagaaatcaattggtgaacttgagcaggaattcctccaagcactgcaagcattctattatgagggaaaggctatcatgtcaaatgaagagtttgataatctcaaggaagaactcatgtgggaaggaagcagcgttgtcatgctaagttctgatgagcaaaaattcctggaagcttcgatggcttatgtgtctggaaaaccaattatgagtgacaaagagtttgatgagttgaaactgaggctaaagatagaagggagtgaaattgtagctgagggtccaaggtgcagtcttcgtagtagaaaggtttacagtgacctatctgttgattatttaaagatgttgctgctgaacgtcccggctactgtgattgcattaggattgttcttcttccttgatgatctgactggatttgagatcacatatctactagagctgccggagccttttagtttcattttcacttggtttgctgctgttcccctcattgtgtggatagctctgtcactaacaaatgccattgtaaaagactttgtgattttaaagggtccttgtccgaactgcggtactgaaaatacctctttctttgggactatactctcaatttcaaatggtggttccaccaacactgtcaaatgctccaactgtggaactgcaatggaatatgattcaactacaagattgattacgttaccggaaggaagtaacgcctgagttgaggtatgcctgaaaatcatatttattgttccagcaatgggagatcattaatagcagttcttgtgagagtgacaaatttatcatttagcaaattgtgatgttcttccacaaatgatcttgaagtcatatgtaatcactatcacacacaattggtgtcatctcaatttatgtgtcaccatcctacttgtaagtatatgggctttgtatacttgtaagtaatatggactttgtatagcatacactggattgcctctacttgaagagttgagttatgagggtgcttaacaccatccatgagtctaacctagaataacgtgtgtaaggatttttgttacacactcctaagaccagaacctttacatcccccaggagcatcaagaacaataaggaaaattgactatttaaataattaatgctaattgacattataatttcatgtattcaaaaaaaaaaaaaagggcggccgccgact

SEQ ID NO: 41032 - DNA, 810 bp, Glycine max
  Clone ID: PAT_MRT3847_137052C.1
cacgttccagttaccttatcttccacctcagatacctctcttcactcttccatcatcttcctctccctccagacaaaacatcaccaccaccttcaacttaatttcccagttacactgccaccactttgattccaaataaccaccatcaccatgttcacggctagtaagctagccttcacattaacaccacctcgtccatgcactgcacctttgacaccaatctcttccttgtcctcttcttcttcttcttcttctgcttcagcttctggtatcaacttcattcagttcaatggacgccacttatgcctccgacgcaggctgtttctactctctcctaaggccactgcagatcaacaagggaaggttgaagaatttgaagatgattcaaatgttgttgatagtaaaatcctcccatattgtagcatagataaaaaagagaagaaatcaattggtgaacttgaacaggaatttcttcaagcactgcaagcattctattatgagggaaaggctatcatgtcaaatgaagaatttgataatctcaaggaagaactcatgtgggaaggaagcagcgttgtcatgctaagttctgatgagcaaaaattcctggaagcttctatggcttatgtgtctggaaatccaattatgagtgacaaagagtttgatgagttgaaactgaggctaaagaaagaagggagtgaaattgtggctgagggtccaaggtgcagtcttcgtagtaaaaaggtttacagtgacctatctgttgattatttgaagatgttcctgctgaacgtcccggctactgggattgca

SEQ ID NO: 41033 - DNA, 1013 bp, Glycine max
  Clone ID: PAT_MRT3847_137053C.1
cgttggggtatgcagtcttagcctcttgaagctccttcaacacctgagaagcatcagtgcaaccaaacataggcagcttccacatggtccagtagcgtccatcgtagtatcctggtgacctgttgtgctcacggtacacgaaaccgtgctccaactcgaattccaagcaaggaatccatcccttcctaagaaggtattctacttcctttgccaaatggcttcctcaatgatctcttccccagctgttaccactgtcaaccgtgccggtgccggcatggttgctccattcactggcctcaagtccatggcgtggcttccccaccagaaagaccaacaatgacattacgctccattgctagcaacggtggaacgagtgcaatgcatgcaggtgtggccaccagttggcaagaagaagtttgagactctttcctacctgccagaccttgatgatgcacaattggcaaaggaagtagaataccttcttaggaagggatggattccttgcttggaattcgagttggagcacggtttcgtgtaccgtgagcacaacaggtcaccaggatactacgatggacgctactggaccatgtggaagctgcctatgtttggttgcactgatgcttctcaggtgttgaaggagcttcaagaggctaagactgcataccccaacggcttcatccgtatcatcggattcgacaacgttcgccaagtgcagtgcatcagcttcatcgcctacaagcccccaggcttctaagtgtgaaaaatttgcaaagcatttgtagccgccaccccactttgtttgtttgtacttaaactacattcccatttgtttttgctttttgagatttcatcatcctgtatttttggtttctgttttcggacttcaatggaaattaatggatgagaactaatgaataaaaaaaaaaaaaaaaaaaaaaaaaaaaaaaaaaaaaaaaaaaaaaaaaaaaaaaaaaaaaaaaaaaaaaaaaaaaaaaaaaaaaaaaaaaaaaaaa

SEQ ID NO: 41034 - DNA, 509 bp, Glycine max
  Clone ID: PAT_MRT3847_137054C.1
aaatattctcaattttccttattgttgttggtgttcataggatctggcctaggcaatagaaagaaaattttgcaaaagtgtgcaataaaaacacgttattctaggttagactcatcgatggtgttaagcaccctcataactcaactcttcaagtagaggcaatccagtgtatgctatacaaagtccatattacttacaagtatacaaagcccatatacttacaagtaggatggtgacacataaattgagatgacaccaattgtgtgtgatagtgattacatatgacttcaagatcatttgtggaagaacatcacaatttgctaaatgataaatttgtcactctcacaagaactgctattaatgatctcccattgctggaacaataaatatgattttcaggcatacctcaactcaggcgttacttccttccggtaacgtaatcaatcttgtagttgaatcatattccattgcagttccacagttggagcatttgacagtgttggtggaac

SEQ ID NO: 41035 - DNA, 548 bp, Glycine max
  unsure (1)..(548): unsure at all n locations
  Clone ID: PAT_MRT3847_137055C.1
agaaggagaagcaaattgcttcctcaatgatctcttccccagctgttaccactgtcaaccgtgccggtgccggcatggttgctccattcactggcctcaagtccatggctggcttccccaccagaaagaccaacaatgacattacctccattgctagcaacggtggaagagtgcaatgcatgcaggtgtggccaccagttggcaagaagaagtttgagactctttcctacctgccagaccttgatgatgcacaattggcaaaagaagtacaataccttcttaagaaaggatggattccttgcttggaattcaagttggagcacagtttcatgtaccatgagcacaacaagtcaccataatactactatggacactactgaaccatgtggaaactgcctatgtttggttgcactgatgcttctcaagtgttgaaagagcttcaataagctaatactacataccccaacagcttcatccatatcatcagattcgacaacattcaccaaatacantacatcagcttcatcacctacaagctcccaagcttc

SEQ ID NO: 41036 - DNA, 773 bp, Glycine max
  Clone ID: PAT_MRT3847_137056C.1
gtagtttttggccttgcgttggactattttggaatgcatataaataaggttctctactcgctttagttacacatgtgtcactgcggctcctgcaggcatcctctttgttggaatatacttgatggttgatgtatgtgggtgtcgtcgcatgaccttggttctggagtggatgggcatgcatgcattaatgatttatatccttgcggcttgcaatgtttttccaattttccttcaaggattttattggggaagtcctcacaataacattctcaagttaattggagttggtacttgaagagaggcacatacacatgctcgtggataaagattatatgcagtaagacagtgagacatgttttactgtaaaagaaattggctaccacgcggtgtttattgattattacccgagttttggagctaatcttttgatcaagaacaagaacgggtgtatcatattcctctaatctcttgatgacgtcacctgcatggatgatggatatagtttagagttcgctatatctcttgatggcataacctttctatatatggaaagcagcttttgtttataatagcaccactgcaatataatgtgtacttttacttcatatccttgaaatgatttcaagagagtaaccattggacacgatattgatgtaaaatttagttttagattttttaatttattgttactattagcctagaaatgtcaatttcttctgtatgagcaggctctctctattattggatctagcaaaactttctttaatcatgcc

SEQ ID NO: 41037 - DNA, 1323 bp, Glycine max
  Clone ID: PAT_MRT3847_137057C.1
gaacaagtagttgagaactaagaaggagaagcaaatggcttcctcaatgatctcttccccagctgttaccactgtcaaccgtgccggtgccggcatggttgctccattcactggcctcaagtccatggctggcttccccaccagaaagaccaacaatgacattacctccattgctagcaacggtggaagagtgcaatgcatgcaggtatgacaactccacacatataaatacacaagaggcaccaaaatgattataattcatgttacatatttaggcatgtaccaaaatgttacttaaataaacatgttagtcataggttgcttaaattttagtcataggaaaatttgcacatgtgctagttaatctgttaacccctttactcaattttcatgcaaattaattactaggtgtggccaccagttggcaagaagaagtttgagactctttcctacctgccagaccttgatgatgcacaattggcaaaggaagtagaataccttcttaggaagggatggattccttgcttggaattcgagttggaggtcaatttcttgcaaacacttttggtttaatcatagattttcttattcttagtttgtttcaacttattttcaagaaataatggcttctcttgctagtgtgctaaaagtacttttggaaacaaaacaaaaaatggttgtgttccaaaatttaaatttatctaacagatttttctatttgagagttatcaatatgtatcaaatctgttcctatctctgaccaaattttattcttccaaaacaagcacttggttttgagttttgatggttgatctgcttgtttgcagcacggtttcgtgtaccgtgagcacaacaggtcaccaggatactacgatggacgctactggaccatgtggaagctgcctatgtttggttgcactgatgcttctcaggtgttgaaggagcttcaagaggctaagactgcataccccaacggcttcatccgtatcatcggattcgacaacgttcgccaagtgcagtgcatcagcttcatcgcctacaagcccccaggcttctaagtgtgaaaaatttgcaaagcatttgtagccgccaccccactttgtttgtttgtacttaaactacattcccatttgtttttgctttttgagatttcatcatcctgtatttttggtttctgttttcggacttcaatggaaattaatggatgagaactaatgaataagctattgtgttgtgttgctttgtttcaaaataacttcaataacccatcgtccttgcatttctctctagtgggctgaaattaatcttttctaaatttaagtt

SEQ ID NO: 41038 - DNA, 3680 bp, Glycine max
  Clone ID: PAT_MRT3847_137058C.1
acaagtttttcaagacagatcactcataatcaatgaatatgggatcattggaatgcatggcttgttgatagatttgggcaggtgcattgttcgagaaaaatcacctaaagagccaagcaattggagcagattgtggaagtaccaagatctctataaaatcatgtcaaataatatggtaaaataattttttaagtataaaatcttactatgcagtgctctagaatatataaaaacttcaaaagttctgaaattttcttttccctttacaatgttgtaggcagcagagaaacttgaagccatcgctgttgattatgaatcagatgatgaggggtttcatgaaataagggtcgatgctttatcgaaaatgagtcaccttaagttgctcaaactttggggtgtgacttcttctggaagcctcaatcatctttctgatgaattaggatatattacttgggataaatatcctttcgtatgtttgcctaaaagttttcagccaaacaaactagttgagttgtgcctggaatactaatttccaggtcacaaaatgcagagattgaaaaaattgttcaaaccataataaaaaaattgggttccaaattttcaagtcttccgaaagataatctagttgggatggaatctcgtgttgaagaattagtaaagtgtttgcgtttggggtctgttaatgatgttcgagttgttggaattagtggcatgagtggaataggaaagactgagcttgctcgtgctttgtatgaaagaatctctgatcaatttgatgttcattgtcttgttgatgatgtaagcaaaatttatcaagattctggtagattaggtgtacaaaaacagttactttctcagtgtctaaatgaaaaaaatctagagatttatgatgcttcccaaggaacatgtttggcattgaagaggatacaaaatgttaaggcgcttgtagtttttgatgaagtcgttaatgaaagagaactacagatctttatagggaacagtgactctctattacgcgaatgcctaggttgagggagcaccatcatcataatatctagggatgaacatatattgaggaaacactgggtagaggatgataacctccacccattgttggatagagaagaagctgttcagttgttttgcaaaaatgctttcaaagataattttattatgagtggttatgcagagtttgcagatgttatactgtcacaagctcaaggcaatcccttagcaattaaggcggtgcgcactaccaaagcaattttgcgtggtggcctataggaatgcctggattttccaatccatacatttgtagtgttattccaggaagtgaaatagaggggtggttcaccactcagcatgtgagcaaggacaacttaataaccatagacccacctccccttatgcagcatgacaaatgcattggcgttgcttattgtgtagtattcgcagctcattcaacagatttggagatggttcctccagaaacagaacgaggttatcctgttatgggcatcgtttggattccggtggatgttcatgaagatgtagtcacagacaaatcagatcacctgtgcttattctattcgcctacgtatataggaattggagactggaaattaaaagtgaaaataatggacaggaaaggttttcctgtggaggtgaagaaatacgggtatcgtagggtacatgaagaggatctagatctagaaccatcactcaacacagcaggaatccggaagaggaaaaggggaactgatgaataaaatgattgttttggttgttagagaataatacaatttttttatcctttttatgtaactttaacgaagccagtgaattagtatgcttttactataaaataaacgaagacagattagacctcagtaccaggtttgattggttagatttgtagatagaaagcctctacacaatttgagacgtttggttctctctcattccaaaaatctaatcgagttgccagatttaggggaggctctaaatcttgagtggctagatctgaaaggatgcataaaactcaagaagattaatccatccatcggtcttctaagaaagctggcttatttgaatttgaaagactgcacaagtcttgttgagttaccacatttcaaagaggacctaaatcttcaacatctaactcttgaaggatgtacacatctcaagcatatcaatccatccgtcggtcttctaagaaagcttgaatatttgattttggaagactgtaaaagtctagtaagcttacccaacagcatattgtgcctcaattcacttaaatatttgagtctatatggctgttcaggactgtataatagcgggttattaaaagaacctagggatgcagagcttttgaagcagctgtgtataggtgaagcttctactgattccaaatcaatatcctccatagtgaaaaggtggtttatgtggtctccacgtttgtggtattccagagcacataacgactcagttggttgtctgttgccttccgcgccaactatcccaccatctatgattcaacttgatctaagttactgcaatttagttcaaatccccgatgctattggaaatttacattgcttagaaatcctaaatttagaaggaaacagttttgcagcactgcctgacctcaaggggctttccaaactgcgttatttaaaattagaccattgcaagcacttgaaagattttcctaagctccctgcacgaactgatttttcatacactttcctcttaccaatactgggaagagcagtagaacttccagtttggggatttagtgtgcctaaagcaccaaatgtagaacttccaagagcattgggattaagtatgttcaattgcccagaattagttgagagggaaggctgcagtagcatggttttatcatggatgatacaaattgttcaggcgcactaccaaagcaattttgcgtggtggcctataggaatgcctggattttccaatccatacatttgtagtgttattccaggaagtgaaatagaagggtggttcaccactcagcatgtgagcaaggacaacttaataaccatagacccacctccccttatgcagcatgacaaatgcattggcgttgcttattgtgtagtattcgcagctcattcaacagatttggagatggttcctccagaaacagaacgaggttatcctgttatgggcatcgtttggattccggtggatgttcatgaagatgtagtcacagacaaatcagatcacctgtgcttattctattcgcctacgtatataggaattggagactggaaattaaaagtgaaaataatggacaggaaaggttttcctgtggaggtgaagaaatacgggtatcgtagggtacatgaagaggatctagatctagaaccatcactcaacacagcaggaatccggaagaggaaaaggggaactgatgaataaaatgattgttttggttgttagagaataatacaatttttttatcctttttatgtaactttaacgaagccagtgaattagtatgcttttactataacattgtcgaagacggattagacctctgaatcaggtttgattggttagatttgttaaagttttgtctaaactgtaattagactttggcctatcaccttgtctaggcaaattgtttttgcttaaaattatatatgaattta

SEQ ID NO: 41039 - DNA, 564 bp, Glycine max
  Clone ID: PAT_MRT3847_137059C.1
aagaacaagtagttgagaactaagaaggagaagcaaatggcttcctcaatgatctcttccccagctgttaccactgtcaaccgtgccggtgccggcatggttgctccattcactggcctcaagtccatggctggcttccccaccagaaagaccaacaatgacattacctccattgctagcaacggtggaagagtgcaatgcatgcaggtgtggccaccagttggcaagaagaagtttgagactctttcctacctgccagaccttgatgatgcacaattggcaaaggaagtagaataccttcttaggaagggatggattccttgcttggaattcgagttggagcacggtttcctgtaccatgagcacaacaggtcaccatgatactacgatggacgctactggaccatgtggaagctgcctatgtttggttgcgctgatgcttctcatgtgttgaaggacctataagacgctaagactggctacccggacgggttgtccgtatcatgggctgcgacacgttcggaagtgcagatcgtgagctgatctgctacaacctccccaggt

SEQ ID NO: 41040 - DNA, 169 bp, Glycine max
  Clone ID: PAT_MRT3847_13705C.1
ggctcgagacaaaaggaacctctccgcttccctccgttccattcactccctccctcttaaaacctgcgtgcggggtcaaatgctcccaatcagatgggaatgggagtgctgcaaagaggacagtgcttcaggctcttttaagagaaaggactgtgcaaagtcccatggt

SEQ ID NO: 41041 - DNA, 378 bp, Glycine max
  Clone ID: PAT_MRT3847_137060C.1
cgtccgacagcaggacatgacgacagaaggagaacaaaccgagtcacacattgctctgctactctctctcttaggcttcagtgaaccgagtctgaaagaggagaagattaactaactccaaaggctagcacttttggctgcagggtgcggatccagaaggctattcaacaagaggtctgggaaaatacttagcgaggaggaaaaagctgcagataatgcttactctaggaaagccgagcgcgagaggatggacaaacttgatagaaaagaacctaaatcagaagcaggctaagggggttcagttcctggagccacaccaagtatctcaggacatagctggaacatgagtagagcaaatatacaacagacaagccccgg

SEQ ID NO: 41042 - DNA, 559 bp, Glycine max
  Clone ID: PAT_MRT3847_137061C.1
gtgcgagctaagaaggagaagcaaatggcttcctcaatgatctcttccccagctgttaccactgtcaaccgtgccggtgccggcatggttgctccattcactggcctcaagtccatggctggcttccccaccagaaagaccaacaatgacattacctccattgctagcaacggtggaagagtgcaatgcatgcaggtgtggccaccagttggcaagaagaagtttgagactctttcctacctgccagaccttgatgatgcacaattggcaaaggaagtagaataccttcttaagaaaggatggattccttgcttggaattcgagttaaatcacagtttcatataccataagcacaacaagtcaccaaaatactacgatagacgctactaaaccatataaaagctacctatatttaattacactaatacttctcaagtattaaaagaacttcaacaagctaagactacataccccaacaacttcatccatatcatcatattcaacaacagttcgccaagtacattacatcatcttcatcacctacaagcccccaagcttc

SEQ ID NO: 41043 - DNA, 106 bp, Glycine max
  Clone ID: PAT_MRT3847_137062C.1
gcaaaacaacaggattgtcgacttaatttatatgtagtatagggatacaaagggccacactatatagctatgtatggaaccgatctcgtgggactacccaaaagat

SEQ ID NO: 41044 - DNA, 609 bp, Glycine max
  Clone ID: PAT_MRT3847_137063C.1
atccgtatcatcggatgaagccggtggcgtcttcattcttagcctctcgaagctccttcaacgcctgagaagcaaatggcttcgtcaatgatctctgccccagctggtaccactgtcaaccgtgccggtgccggcatggttgctacattcactggcctcaagttcatggctggttttcgcaccaggaagaccaacagtgtcattacctgcattgctagcaacggcggaagagtgcaatgcatgcaggcgtggccaccagttggcacgaagaagactgagactctttcctacctgccagaccttgatgatgcacaattggcataggaagtataataccttcttaggaagggatggattccttgcttgtaattcgagctggagcacgggttggtgttccgtgatcacaacaggtgaccaagatactacgatggactctactggaccatgtcgaatctgtctatatatagtttcgctgatgctttttaagtattgaatgagcttcatgacgctaagactgcgtaccccaacagcttcatccatatcatcggattctacaacattcaccaactacactacatcagcttcatctcctacatacccgcagtcttc

SEQ ID NO: 41045 - DNA, 607 bp, Glycine max
  Clone ID: PAT_MRT3847_137064C.1
cgggttgaaccacgcggtcctacggcttgagaaaactacacattgggatatctggcagcagaaaaacaactaggtgagagctaagaataatgaaatggcttcctcaatgatctcctacccagctgataccaccgtcaaccgtgccgttgccggcatggttgctccattcaccggactcaaatccatggctggcttccccactatgaagaccaacaatgacattacctccattgctagcaacagttgaagagtacaatgcatgcaggtgtggccaccaattgtcaagaagaagttcgagactctttcctacttgccagaccttgatgatgcccaattggcaaatgaagtcgaataccttctaaagaaatgatggattccttgcttggaattcgagttggaggtcaatttcttgcaaccccttttggtttaattatagtttcttagtcttagtttgtttcaacttattttgaagaaataatcgcttctcttgctggcgtgctaaaagtacctttggaaacaaataaaataaataaaaaaagagaagtggttgttttccaataattaagttatctaatggattttccatcctagacttatcaatattgat

SEQ ID NO: 41046 - DNA, 543 bp, Glycine max
  unsure (1)..(543): unsure at all n locations
  Clone ID: PAT_MRT3847_137065C.1
taatgaatgaactggcttactcactgatctcctccccagctgataccaccgtcaaccgtgccggggccggtatggctgctgcattcaccggcctcacatccgtggctggcttcccctcaaggaagaccaacaatgaccttgcctccattgctagcatcggtggaagactacaatgcatgccggtgtggccaccaattggtaagatgatgatgaagactcttttctacttgccaaaccttgatatatgcccaattggcaaacgaagtcgaataccttctaaggaaaggatggattccttgcttggaattcgagctggagcacggtttcgtgtaccgtgagcacaacacgtcacctggatactatgatggacgctactggaccatgtggaagctgcctatgtttggctgcactgatgcttctcaagtgttgaaggagcttcaagaggcttagactgcataccccaatggcttcattcgtatcattggatttgacaacgttcgccaagtgcagtgcatcagcttcatcgcctaccagcntccaggt

SEQ ID NO: 41047 - DNA, 689 bp, Glycine max
  Clone ID: PAT_MRT3847_137066C.1
aagtagttgagaactaagaaggagaagcaaatggcttcctcaatgatctcttccccagctgttaccatctgtcaaccgtgcacggtgcacggcatgagttgctccattcactggcctcaagcttcatggctggcttccccaccagaaagaccaacaatgacattacctccattgctagcaacggtggaagagtgcaatgcatgcaggtgtggccaccagttggcaagaagaagtttgagactctttcctacctgccagaccttgatgatgcacaattggcaaaggaagtagaataccttcttaggaagggatggattccttgcttggaattcgagttggagccacggtttcgtgtaccgtgagcacaacaggtcaccaggatactacgatggacgctactggaccatgtggaagctgcctatgtttggttgcactgatgcttctcatgtgttgaaggagcttcaggaggctaagaactgataccccaacggctcatcccgttacatcggattctacaacgttcgtcaagtgcgggcattaccttccttgcctccaaccccctgcctgtaagtgtgtacatttgcaaagatcggtagccgcaccccctttgcttgttctacttgactacatacccatgggtttgctgttggagactcatctcctgcgttccggttctgtctcagactata

SEQ ID NO: 41048 - DNA, 807 bp, Glycine max
  Clone ID: PAT_MRT3847_137067C.1
cagaaaaacaagtagttgagaactaagaagaaggaaatggcttcctcaatgatctcctccccagctgttaccaccgtcaaccgtgccggtgccggcatggttgctccattcaccggcctcaaatccatggctggcttccccacgaggaagaccaacaatgacattacctccattgctagcaacggtggaagagtacaatgcatgcaggtgtggccaccaattggcaagaagaagttcgagactctttcctacttgccagacctcgatgatgcccaattggcaaaggaagtcgaataccttctaaggaaaggatggattccttgcttggaattcgagttggagcacggtttcgtgtaccgtgagcacaacaggtcacctggatactatgatggacgctactggaccatgtggaagctgcctatgtttggctgcactgatgcttctcaggtgttgaaggagcttcaagaggctaagactgcataccccaatggcttcatccgtatcattggatttgacaacgttcgccaagtgcagtgcatcagcttcatcgcctacaagcccccaggcttctaagtcattgaaaaatttgcaaagcatctgtagccaccccactttgtttgttgtacttaaactacattcccatttgtttttgctttatgagatttcatcatcctgtatttttggtttctgttttcggacttcaatggaaattaatggatgagaactaatgaataagctattgtgttgtgttgctttgtttccaaataacttcaagaacccattgtccttgcatttccatcttgtggg

SEQ ID NO: 41049 - DNA, 298 bp, Glycine max
  Clone ID: PAT_MRT3847_137068C.1
ggggcaaaaacttatttcattgttcaagtaaaaacggggaaaagtccctttaaaaaaaaagagaaaaattaaatcgcaataaaaacctaatgaccccctggtatttaaacttcaaaaggggctttgacaaaatcaaaaacaacccctgaaaattttttgcttaatcgacttccccaattttggggccaacaccccttccactgccagctgcgggaccatccttattcatggttccccccggattaccaccaacaccctggaacatttttgctatgatgggattacaaatgctctccaa

SEQ ID NO: 41050 - DNA, 228 bp, Glycine max
  Clone ID: PAT_MRT3847_137069C.1
cgtacactaatcaatcatcccagatggtttatgggtttaaattgtcctattccggcagacttgttatgtttcattggatacaactcaaaccattatttgcaatgtaccaatgtgtgtttttgattttgataagtttgccacattaacagatgctatatccaataaactttcatagctgaatgtgaagtgagtgacaaccatcatctaatgagtcgactccattgcctc

SEQ ID NO: 41051 - DNA, 1097 bp, Glycine max
  Clone ID: PAT_MRT3847_13706C.1
gcctagatccagtagccgccctcaagtcgacgggcccaccttcccatcagagccctcgacattcctagttccactcctccaccagtcatccgcccccgcaagaagattctgtatcattatggttcgccagctgaagagtaccttgttcccttcactccgagctacagggatgccatgatgtcggtgcgagccaggttccctggtggtaagggaattggcggcatgaccattcttgttcaggaagaagactacatcagggagtattcttgctcttaaggaggccaaggtgatctcagcacccaagacatggctggacatgaggatctgcgcgtctcagctgtgccagaacttcaggaggaggtgtaagatccgctcacagggcttgttttcctatccggttgttggcacaggaaccatgttctcgtatccggtcgctcctaggtgcaactggcctgttcttctcggtgcctctgccgtgctagtgggcatggaccgcctgctgcttctgccgcgccaccgcccggattttgtgatatgtaatcttgaaaacactcattccaatccttcaagagtcacttgcctcttagtgagaaagaaatcctttgaggtctcagctacttcatctcaggcagttgaatgagtgagaaagaaatccttatgattttagagcaattagcaaatgtacaaaatttccatgcagatccttaggtgttttttctcctatcagaattggaatttcacctaggtaacttgtgtcaatctttaatgtaaacttttattatgtgaactactgaggcgaaccggcggttcgcctcagtagttcacataataagtacttaataaactgcatctgagttttgtccttaacaaatttgatatcatggactctaagaagccatgaattttcctggcgtactttgtagattgaataaattaagacatgcatatgtaaggccacttattactggttggaacacattatgcattgctaatcatctggtgtgtttgtaatttttaagttatataattaattatcttagtttggtaagttatttttgccaaacccattttttccatattaatcaaattggttttga

SEQ ID NO: 41052 - DNA, 243 bp, Glycine max
  Clone ID: PAT_MRT3847_137070C.1
gatccacatcctccacaacacaactccactcttagctgccattggtttttcttcttccagttcgcttcctttctaagcttttttcgattacccatttggagattctgtcctaatggctctggcggcggcgggagtttcctccgtgtccgggtgtgtctggcggggggagtgttggggatgggcggaggaaggcaagttgctcggtgtctctcagctttgggaatgtgaaacttggaagcagaa

SEQ ID NO: 41053 - DNA, 323 bp, Glycine max
  Clone ID: PAT_MRT3847_137071C.1
ataatctgaaagggcgttttttccccctcaacatttttccaaacacgttaattacatagtacaactttcgaaaaaaagatataatatatctatatatatatatatatatatatatatatatatatataatatggcaattacttgtgcgggctcttcttcttaggtagagcgggtcgacattgttagcactatagccatctacctcttttcttgtgaagccaactccacatcttgggcagtgtgtgggagggcaccccttccctgggggcggtatctttgggccacaatcagacaaccaaccaagctggggaccccagatcctg

SEQ ID NO: 41054 - DNA, 305 bp, Glycine max
  Clone ID: PAT_MRT3847_137072C.1
tacactaacatgcaaaaacatgcaaaatatccattttgcccacccccggtttccatttaggatatcctaccttgtcttgcttcagaacctctttagggttaatttttccgtttggcaaaccagcacctaaaatgcagaaactctatttttctagaaccgcatccgcaaactcaggcatttttaactaaaaccaagatttatgtgccagtttgctctccttttgccaaccaagttgctgatgggcctgtacccctattcataaatttggttgtggttcattaactttggtaaatcaagagggtgtc

SEQ ID NO: 41055 - DNA, 233 bp, Glycine max
  Clone ID: PAT_MRT3847_137073C.1
ccttgttgtgatctgctctctgcaaccatgcttctcagaacaggttcatttttctctctcctcaaagccaccgccgaccatatactgcctctctctaactcttcttcttctggtattattcgctactctccatctctggaggcaaactcggttccatacgctaccacagatcccaacaaacggcccttaaccgacgacgattatgaaccctttgacagacgtcaagaggtgct

SEQ ID NO: 41056 - DNA, 459 bp, Glycine max
  Clone ID: PAT_MRT3847_137074C.1
cgtcgtagctttctgcactttgcttttcgtttgcttcctccattccgtgagagggattttagaccccaacgatttcctcgctctgcaatccattcggaaatcccttcacgacgttcccggttccaatgttcttctcctcgtgggacttcaccgacgacccctgcaacttcgccggcgtggtctgcgccgacgacaaagtcatcggactcaacctcggcgatccgagagccgggttgcccggtgtgaccgggaaactagacccttccatttgcaaactgtacgctctcgccgacttcaccggtgcttcatgatgaatctaccgacctatccctcagtctctctgtcagatgaaaaaccttcggtttctcggcgttagcaggaactgcatcttcagcgagattcctgcatgggtagcgtaactacggaacctagacaatcgatctgagctacaaccaacta

SEQ ID NO: 41057 - DNA, 386 bp, Glycine max
  Clone ID: PAT_MRT3847_137075C.1
ggctgatgagagcgttgttgagtccccagtgaagaggcagagagatgatggtgaagaaaatggtgtctctgtttccatggacgcggagggtggcaaagaccctcttagtaacggtttatcatctgtgattcctgggtggttctctgaaatcagtgcaatgtggcctgctcaccatggtgctgaaccaactctgctagatgttctggcgctattttaagactacaagttgatcatcagagagtgttctaatatgaaatttacgggaatataagaaatttaactttctaatatgttggaatgaattccccttagaagttgagttgctatttatcttctttctctttatcaatgttgttgcctttgggacgtgctctacttaatgtcta

SEQ ID NO: 41058 - DNA, 912 bp, Glycine max
  unsure (1)..(912): unsure at all n locations
  Clone ID: PAT_MRT3847_137076C.1
gaatgtcatcacttattcaatccaacggttgtaacttctcagcaaccaatcccctccatttcacaccatcggattagtactacacaaatcacactattatatatagtaagtttgagcagaagcttggatatctggcagcagaagaacaagtagttgagaactaagaaggagaagcaaatggcttcctcaatgatctcttccccagctgttaccactgtcaaccgtgccggtgccggcatggttgctccattcactggcctcaagtccatggctggcttccccaccaggaagaccaacaatgacattacctccattgctagcaacggtggaagagtgcaatgcatgcaggtgtggccaccagttggcaagaagaagtttgagactctttcctacctgccagacctggatgatgcacaattggcaaaggaagtagaataccttcttaggaagggatggattccttgcttggaattcgagttggagcacggtttcgtgtaccgtgagcacaacaggtcaccaggatactacgatggacgctactggaccatgtggaagctgcctatgtttggttgcactgatgcttctcaggtgttgaaggagcttcaagaggctaagactgcataccccaacggcttcatccgtatcatcggattcgacaacgttcgccaagtgcagtgcatcagcttcatcgcctacaagcccccaggcttctaagtgtgaaaaatttgcaaagcatttgtagccgccaccccactttgtttgtttgtacttaaactacattcccatttgtttttgctttttgagatttcatcatcctgtatttttggtttctgttttcggacttcaatggaaattaatggatgagaactaatgaataagctattgtgttgtgttgctttgtttcaaanaaaa

SEQ ID NO: 41059 - DNA, 414 bp, Glycine max
  Clone ID: PAT_MRT3847_137077C.1
gatacgaaattcagaatcacaaaattcatttccgagacttaatcccctttacggacaatagctcatccgcgtacgggaatcaaacctcgttcgggcaatagggctccttttggtattatggaaaaaatggatgtaaaagtaacaacgggtgtgacattttgctgactttttaatttttaaggccaatccctgcattctaaaccaaggctgtcaaacacagtcagggtaaaaatctcagggccggcctagttttgagggcgaatccatcatctagtatggagacaaaatccattctggtgctaaaccctgtgctacttcctacccgtgaacattgttcggcccccacacatggccagaggctttctctaagaaatttgttgtctctagcaacatacttgtggtagtgctctggtc

SEQ ID NO: 41060 - DNA, 319 bp, Glycine max
  Clone ID: PAT_MRT3847_137078C.1
aatgacaacatgcggatgccatatattactgcgataacctgctcggggcacgtatgagtatgacgtgtgataaacatagacagctccagaaaccacgcctgctgggtgcgtatggaactttggctaagacattaaccatgtctacacatgttgatgacacatatcatgaaaacacacttaactatctcattcctagacccaacatacagcgcatacaagggccaccacactagtgttcttaatcgttctttctgacgagttacagagacccattgaacccgttatactatatcatcttataggacgaggcttggacctc

SEQ ID NO: 41061 - DNA, 349 bp, Glycine max
  unsure (1)..(349): unsure at all n locations
  Clone ID: PAT_MRT3847_137079C.1
agccaacaacaacctagggcacttccgaaactttcaatggttttatagcacaacacattctnccatatatctgtgtaccaatggtgctctttctttgcaaggaataatatggtgtgctcttctgcaattactgcgcttcaactcatgaatttggccacaacttttgtatctcaaatgaaggttacgatgacgattatgataatgtcgtcattgatgtgaccccggccgcatagaagaatttctcataacatgcataaatcatgaggatgaggagggatataatattagtcagtgtaagcttcattctgtggtcttgcttaattactacattacattcgtatttactctt

SEQ ID NO: 41062 - DNA, 328 bp, Glycine max
  Clone ID: PAT_MRT3847_13707C.1
aacaaaacaaggttccccagaccattcaaaaaaaatgggggtccaaaacaacctacaacaaaaaccccccccaggccccacaattaataccccaattatggcaactattatgagaaccttaaagaggaaaagaaaaactcctccaaaaaaaaataaagaatcaaactggctgcctcaacacctgactgaaattgcattgcacctgaccaaagacccattttacgcccccacaggcctgttttttgacccatgggccccggggcctaccaattgggggaaccttgaagccaatctcacccaacttatcagcctccccaatggttctgcc

SEQ ID NO: 41063 - DNA, 415 bp, Glycine max
  Clone ID: PAT_MRT3847_137080C.1
cacgcgtccgcccacgcgtccgcggacgcgtgggaagaatgttcagtttgcacccacagttctgtgcggcatttctgttggtggaataaatatgttgccacaccaattcaatcttatggaaatggggatgctgggaaaagagccatgatattgctcaaacacaaagttttgaagaacatagtattaaggcgcactaaaataggcagggctgctgatcttgcacttccacctagaattgtttcattgagaagggattgcttggatattaaagagcaagattattatgaatcattatacaatgaaagtcaggcacaatttaatacatatattgaagcaaatactctgatgaataattatgcctcatatatttgaccttcttacacgactgcgtcaggcagttgatcatccatacctt

SEQ ID NO: 41064 - DNA, 467 bp, Glycine max
  Clone ID: PAT_MRT3847_137081C.1
tcgtattgagcagtgcctttatttattgaatccgacaaattgtcatccagctcgaaagctttcattggtaagccggcgccaaatttcatggcggacgccgttgtgaacggcgacttcaaaacaatttcgctggaacagttcaaagggcaatatgtggtgctgttcttctacccactcgatttcactttcgtttgcccaaccgaaataattgccttttcggacaaggcgggagagttcaaaaagatcggtgtccaactcatcgcgtgttctaccgactctaaattttgccatcttgaatggatcaacaagccgcgaaagcagggaggacttggcgagatgaacatcccggtgctggcggacaccagccacaaaatcagccgtgactcccgcgtgctgatggaggaggcgggcattgcttatcgcggattgttcatcatcgatgaccagggcgttcttcgtcagatcac

SEQ ID NO: 41065 - DNA, 140 bp, Glycine max
  Clone ID: PAT_MRT3847_137082C.1
ctccatagcggctaaacatattgattcttattcttttcataggctgatgaagtagaagggatgattgacccaaacgatattgatctgacaacagcacgttcatgggggtgctgcagggcatagagctataaaggttgtaa

SEQ ID NO: 41066 - DNA, 439 bp, Glycine max
  Clone ID: PAT_MRT3847_137083C.1
gctgtaatagctggcggaagctattcggacggtcgtatcctggactttgatgtacggatcggaattgtgagtcatattatgagagcctatcctgaagctgaacgagccgagagcgatgtgcttctggggatatttcaaggatcggaattgtcaagagatattgatgcaaacgtggtcatatatgaattggaactgacatgtggtgaagagtgcactatacagactacaacgtggacagatcttcctatcatgtgccctggacactatgccaatggagcagatatgcctgcaacagctgacgcgcctgatctggccgtcgttgtgaatgatgaattgactagccgggagcctgctgacatggcagctaaataacacgacgaggagcgactagagtggcctaccattgagagacttcctgagcgagcaacgtcgatgaatg

SEQ ID NO: 41067 - DNA, 371 bp, Glycine max
  Clone ID: PAT_MRT3847_137084C.1
gtgtaatggctagaagttttttgttcttgatgctacctcttgttcgttctagcggtacaaccataagggcataacccatgtatgattgcgataatatgatttatgaatataaaacttattatggctctcatgctaaatgatcaaggggtatcaagtggctgctcaagtcatgagcatatcataatgatggttgttggacgatctacagagagtgatatttgccagcattatgaaccattcgtggctagtctggtagctatacattgaaatcagtagactaaaatgcttacttatatgccaactaccaaaaagttgtagatgcgacacacttgtgctcaacttagatggtacaactcttctataatatgtca

SEQ ID NO: 41068 - DNA, 201 bp, Glycine max
  Clone ID: PAT_MRT3847_137085C.1
ctttcgcatggtcgattgctttttattttatgattcacgttgcaggtgatgctgcccaatctaatctcttcgataagtatgttaggagaacaaacattatagggtgaggcaacccaattcaccctctgccggttaccatctcgttctgggcctgctgcattacttggagtgcatattagagcaggagaaggagatgaagat

SEQ ID NO: 41069 - DNA, 961 bp, Glycine max
  Clone ID: PAT_MRT3847_137086C.1
cccacgcgtccgtacggctgcgagaagacgacaggaacgggacacaaaaggagcatcgagtaggtttcctactcccttctcatcgttggcaagatgagtgccatgaaattttgccgtgaatgcaataacattctgtaccctaaggaagacagagaccagaaagttcttctcttcgcttgccgcaactgcgaccatcaggaggttgctgataacttctgtgtgtataggaatgagatacatcactctgttggagagcgcactcaggtgttgcaggatgtcgctgcagatccaacgcttcctcgaaccaagtctgttcgctgcagtcaatgcaatcatggtgaagctgtctttttccaggcaactgccagaggggaagaaggaatgacactttttttcgtttgctgcaacccaaactgtggacacagatggagagactgaaatttgtgcttcctcagatcaaaggttcaatattggggagatctaactatttgtggttatctgaaaaaacttggctgatgcggggacagtaatactgaagtatttgtgttacctgtttaactgcagttcctgatcaaataattaatacagttaatggacaaactgttgtttgccaatgctgataaattctgaggatgggcataaatttcatggtttgttaaaaggaaaaaggatgagtgacactgcttttatggatgggcctaactttcttggtggggagttaggaatcaaaatgacttttttttttgttatatgctatattatttgatgaaaaattcttattaaaagttcatttggactctctttgatttttccccaaagcgatgacaccgattaacatataaatataggtcatccatctgcccctaaaaggggttggacgttcccaggaaaatataaatatgataatgtaaaaatgttatggttttgtatggatttgaaggcaactattataatagtaacc

SEQ ID NO: 41070 - DNA, 182 bp, Glycine max
  Clone ID: PAT_MRT3847_137087C.1
ccttgggatttcaatccctctcctacagtgtacgactagttggcgcatcagccccacatgtcatcactgttgttagattcaggttatgatctgtagatcaagacatcagtcacactcactcattttgtttcgcagcttatcgagctttctttctctggctcttagaaatgggcagaccaaac

SEQ ID NO: 41071 - DNA, 1783 bp, Glycine max
  Clone ID: PAT_MRT3847_137088C.1
gttcgtcagcgcagcttcatgtataataacgatgccttaattacaaaaagtgtttggctttcaaggtgcaaaatagtctattatacagtattcagctgcttgtatggatttgtaggatcttgtgcacacctagctatggtcaattcatcttggactaaatcccatattgaaaatctttggagatttcctgaccgtattaagcgagtttatcctccttgtgatacttcaggactccaggtactttccttggaacgatcagcaaaaattccagtattaatatctgttgcacaatttcgaccggagaaggcacacactctccaacttgaggctttttcagctgccattaagagattagatcctagcttgccaaaacctctgttattgattttaaagtggtttaaaactagttttagaagcaaaccagatttaaaatcagttttgaaccagaaactggatccaaaaaatcatttttttttgcaagatatggatctggatttaaatggatccggattggattttccatgtccgcccttaaaaataacctgtaattggaggtttttaagcggaaaaagttaaaataacagataaaaaaatatcttacattaccgagtgattgacgtcaaccgcaaaccatctccacttcttatctccggtctccgacgaactctccttggaatttgtactgcagaggtgctgccttttacaccaccagattttgcagattttagtttttaaggttatgctttttgggttctgcgactaatgttgacgatgatcatcactgcgctcatcactgccatacttgcgggactttgcattggcccaatcaacggcaggcggcggatgaagagggccgtggcgttcttccatccgtacaccaacgaccagtggcagctgtgatagggtgctgtggtgcgccgtcagatgtttcaaatagtagagccccgactttgcttactacgtgtacacctgagttcatgactccagccctcaatcgctcatagctcgtgcactcgagagctttgatgtcactctacacagctattgaactgttttggcatgaacaggcacaaattctccagcatgtagcattcagaggtttggttggacttttagggggtgctgttgctggcattcagtcaatgacagatgagcattttggcattagtgtggtagaagacatggctgctggggtcaatccaattgcacatgagcctgctggcactaaactggtggaatttcataaggatgttgcataccgaactggagtggttgctttcggggttgatgcttctgcaattcactcaatgagaattgagcattttggcattagtgtggtagaatacatggctgctggtgccattccaattgctcataattctgctggcccaaaaatggacattgtattagatgaagaaggacagcagacaggatttcttgcctgcagtgttgaagaatatgcagatgccatggtgagaattgtatcgatgccggagatggagagacttaagatggctgcagctgcaaggagacgggcagggaggttttccgagcagaggttttatgatgacttcaaagctgcagtgcatcctatcctgtgtcatatttctaggtgatggtctataggatctaattagcatgattgtaacttcagaatatagatgaagaattttgttacagaaatagctatacgtgtttcataattgattatttaattatcacctactactaaaaaaaaaaaaaaaaaaaaaaaaaaaaaaaaaaaaaaaaaaaaaaaaaaaaa

SEQ ID NO: 41072 - DNA, 1163 bp, Glycine max
  Clone ID: PAT_MRT3847_137089C.1
ttttctttttttttttactatccacaaaaggtcatctacctgggctatatatctcattattggtacttgtgcacctgggtaatttttgcatatacaaaccatgaacgtacatgaatatggactagacagattaaatcgaatatgacagaaatccggaaccaattgagttcttctctcaacttatactcagggattgcgccaaacttccaatgaagttacacccaagtgttccagagagtcaagtgatagcagtgcacagaaaattctgcactgtatgcagagtgcagaggaggtgttgtttttctatcatcaccgaaggatatataaaattagagaattatctcgtttttcaacataaactcagttgtgcagatccatatgggaatatacctgatgaaataagatgaatcttacaataaagaggcatttgaagaaaacacgaattacaataagcagtaacctaattttaatgtcaaatgacacgaaaccctaaacttaagctctctcgcctctgattctgcgagcgagttgaatgtccttgggcataatggtaactcgcttagcgtgaatagcgcagaggttagtgtcctcaaagagtccaacgagataagcctccgcggcttcctgaagagccgaaacggcgctgctctgaaagcggagatcggttttgaaatcctgagcgatttctctgacgagcctctggaatgggagttttcggatcagaagttcggtgctcttctggtactttcgaatctccctcagagccaccgttcctggcctgaagcggtggggcttcttcactccgccggtcgccggggctgacttgcgagcggctttggttgccaattgcttcctcggagcctttcctccggtggacttgcgagcggtttgcttggtacgtgccattgctctcttaatcgaaaacgacgaagggaattgggttgtacaatggtgattaaattggagaaacgattttgctatccccccggtggacttgcgagcggtttgcttggtacgtgccattgctctctgactcggaaacaaagaggagatttaggttatggaatggtaattgagtttgaaaattgttttgctgtccccctttctgtcgtcttctcgcagccgtattgacgctgctgtgctcggacctgttctgttcttgt

SEQ ID NO: 41073 - DNA, 245 bp, Glycine max
  Clone ID: PAT_MRT3847_13708C.1
tcttttttttttttttttttttttttttttttttttttttttttttttttttggtttttctgttttttttaaaaaaaaccccaaaatttcacccttttcaaacgggcacctccgtcccaaccactccccattatgggggccccaaacggccggctttttaaacctctcccgaaaaccgggatgcccaagccccccgttacccccgggggaaattgccccaattgacctggggggtaccccccccc

SEQ ID NO: 41074 - DNA, 232 bp, Glycine max
  Clone ID: PAT_MRT3847_137090C.1
caagaagactgtgcgggagaatcctaacgagtcttccgcagaaaaaataggaggtggaagccattcgctaactgagaaggaaaataatcaagttgaggcttcacctactcagaagccccaagtttctgaagatctacaggagaataatacatctaaagatgaaagaaggtcaactcctgaggtaaattcagtgactgatttgtccaaaaagggtgctacagctgatgttggc

SEQ ID NO: 41075 - DNA, 240 bp, Glycine max
  unsure (1)..(240): unsure at all n locations
  Clone ID: PAT_MRT3847_137091C.1
atcaatttgtgtggcaaacgaatttagatagtctanctctcaaatcctcttcttctctttccatncnaatcnctnagatggttcttagacgnaaaaacatcctaatcacaaaagcggtgaccatggcaaanatgattatggnttcnacaaaacctctggttcnagtctgnaccagttcccgttccccnacaccaaaattccccattntccaantttnattccccaaagcccaanntngat

SEQ ID NO: 41076 - DNA, 162 bp, Glycine max
  unsure (1)..(162): unsure at all n locations
  Clone ID: PAT_MRT3847_137092C.1
gaggttgtggtgncntttggagtntgggtntgtatttatagnagttcttctgtttggcnntgtaaaatntgggaaggccgangtttacatagtcaccgttganggagagcctancataanccnacaagggaggaatcgatggctttgaagccaccgcggtgg

SEQ ID NO: 41077 - DNA, 214 bp, Glycine max
  Clone ID: PAT_MRT3847_137093C.1
cacaaggaaacacactaatactgaaataacagaaaatagtgaaggaatcgaaataacagggctagagtgtacatataaaggaataaacacatataagacaaacagcggctactgggaagacacaagatctcaacatgaatcgtaaagacatacatgctttaaattgacccgagacactaccggctgtctgaaaacccctgaattaaactaagcc

SEQ ID NO: 41078 - DNA, 486 bp, Glycine max
  unsure (1)..(486): unsure at all n locations
  Clone ID: PAT_MRT3847_137094C.1
atgacagaaggggaggtatatcaaagcatatatttatggacaaagggaaaagagactattgaatttccagttgatcaatgagtgctaaagaagaaaacaaacctctgctgcctttccttgaaaaatattgctaggaagaacaccggtgcggttgtacaaattaatatattgatttatctgaaacccaaaaaaacacgtgtagacatgtcatccccagttaggcattccatataaattttagatgttcagaaatgaatgaagcccgccctgaatttgcttctaaaattctaatatnattgtacggcaccgcaagaaaactatataaatcacaaagacttacaaataacaaagcatatttatacattgctttatactgttatatgaaattaacttaaatacactgatagtgtaaatattttttatacttttataataagggtgttgctttttataacactacnttaaagtcaaaattaggtgatattt

SEQ ID NO: 41079 - DNA, 355 bp, Glycine max
  Clone ID: PAT_MRT3847_137095C.1
aaagataaaaatggatacgctcaaagcccaacactggggcaatgaaaggcaccatgcataaacctcaaacgaacctaggggcagattagaagttctcacccaataggttccttgctacaaggtcatgacggaagacaacgattggtaccttaaagccttacactggggcaatgaaaggcaccatgcaaaaacctcaagcgaacctaggggtagattagaagttctcacccaataggttcccagctacaaggtcatgacaaaagataacaattggtacctcaaagccttacactggggcaatgaggggcattgtgcataaacctcaagtgaacgtatgggcagatcaaaagttctc

SEQ ID NO: 41080 - DNA, 508 bp, Glycine max
  Clone ID: PAT_MRT3847_137096C.1
tgtaggagtgccgcctgcttgggggggggggggggggggggggggggggggggggggggagtttaagggacacaggggaaggcaaacaaacaaacaaaaaagcgaagccaaccatcgacataagcgtttaggaagggcgtgcgggcgattggaaatccggagcaaatagggggtgtgagatagagctgaaggaacacagaataaaggtaaggggccagcggagaagttcaaaagttaccgctagctaacgctaatatggggggagggccccggcagaggaggcaggggacgccacgccacaagtaacattagtggcacaacaaacgcaagccaccccggcagcttgtgcgcaacccaaacagcctagtggttgcaaacacccgtggggggtaactgcggcgagccggtgtggcctagaaacgcgtgcaaataagccccagctgtgggttggcaatggcacaatacggaacaacacaacgtgcgaatagagcacaagtataaaggcact

SEQ ID NO: 41081 - DNA, 165 bp, Glycine max
  unsure (1)..(165): unsure at all n locations
  Clone ID: PAT_MRT3847_137097C.1
caggntcttaaattgtagtggcattgcttttctgatcaagtgaaacgatagtgtnagggattgtgaccacaagggattacgctcactaatacacagcgaggcggtctaaccagaaaaacaacaccactactatgaaagacccggatcgatctgcattacgcgcac

SEQ ID NO: 41082 - DNA, 347 bp, Glycine max
  Clone ID: PAT_MRT3847_137098C.1
gactcataatctgagactactgagtggttcaaaggtgagaagtcgccaagatgggtccattcagtcacaagggtcaaatgataaagggcactatggtggttatgcagaagaatgtgttggatatcaacagcatcaccagtgtttaccggatccatggctccgtcttaaactttttaggcattgcacttgattcagttacttttttagcctacttcatatgcatccaacttattactgctaccaaagctgatggtgctaaaggaaaagtatgcaaatgcttcaaatttgagaggaaagataacattacccaccatatgaactaacgaagaagcatactatgctcaatt

SEQ ID NO: 41083 - DNA, 403 bp, Glycine max
  Clone ID: PAT_MRT3847_137099C.1
agcgcacaaaaagtacccttcccctcacccagtctaccactctcctccacaaccaccaccaccgctctctaggccttacccacacaagtctcctcctcctccaccacatgcactactactataaatcacctcctctacctttaccactactagatagtgctttggtttcacaccacatggatctaagcagaaagtttgaaaacataaaaagccatgaacggaacgaagcacttcacaaatatagaataagaggaaacttttcatatatttcatcagtgtttaactagtgtttaaattgtattttctttatttatttttattgtacgtgttcttattgtgttgaacaattgtaaggcacttgtccatccaagtacttccagttgcctgcatgcaatgtaatttt

SEQ ID NO: 41084 - DNA, 883 bp, Glycine max
  Clone ID: PAT_MRT3847_13709C.1
cccacgcgtccgcccacgcgtccggctcccgagaaatatgcccggccagtccgatcctgagtgggcgacgtgcgcgtggagtgctccccccgtgaatttggtgatgcttcatctgaagtctctgaagctgcaaaggctaggggagacaatggtgccaatgaatcacctcgggtcaaggatcctgcagtggttcagcgccagtcatcagtatcagcccagcaacctcttcctcagccaatgatccaactcaaatctatactgaagaaatctaccggggatgagctaggccaaggaaccggtaatggaggtagtagtaaggggactccgcgtgtaaaattcatgttaggtggggaagaaagtagtaggggagagcaattaatggtgggtaataggaacagcttcaacagtgttagttttgctgatggtggtgcaccttcttctgttgctatggattttaatactccccctcctactcagtttacaaaaatcccacaacaaaatttgcataattccgaaatggcacccagaaatacacccaattttataaacgcgaccgcatcagctactgcacccaccgttgatatatcacagcagatgataagccttctgacaaggtgcaacgatattgtgaataacctgacgagtttattaggttacgtgccctatcatccactttgataaatatggcaccgtactcaactgtagaccgaatccaatacaagaaaaaatgcgggctagttggattgtgaatgacttgctcgaggaaatgcatgaacctagaaatataatccttcaatagccgtttattttgagatttttgtatcttcacaatgtaaatgtactaccatattgatagtggcgtctcatttatagtagccttttc

SEQ ID NO: 41085 - DNA, 220 bp, Glycine max
  unsure (1)..(220): unsure at all n locations
  Clone ID: PAT_MRT3847_1370C.1
attnntaacattaggagaacacacgctggcctctctgtggtagcaaaatagtttcaaggttggtctcaagatatatgtgataggatatgcgcaagaaaaaaatataatataaatataaagccagcccaaccacatattagcactcaacttttggttataataggcgctccttagacctggtgtaccctcggactcacgnnngggatatttnccattgggg

SEQ ID NO: 41086 - DNA, 544 bp, Glycine max
  Clone ID: PAT_MRT3847_137100C.1
cccatgcgactaccgctgggacactgctgggctttccgcagacccagaaaccttcgcctagaaccgagaactcgaagtgatccactccaggtgggccatgctcggatccttgggctgcgtcttcccggagttgctgtcccgcaacggggtgaagttcagaaaaaccaggtggttcaaggccgggtcccacatcttcagcgagggtgggctcgactacttgggcaacccaagcctgatccacgcccagagcatcctcgccatctgggccacacaaattatcctaaagggtgccgttgaaggttaccgtattgctggaggcccgctctgtgaggacactgacccaatctacccaggcggcagcttacacccattgggccttgctgatgaccctgacgctattgctgagcagaaggtgaatgaactacagaccggacgattggccatgttctctatgtctggcttctttgttcatgccctggttaccggaaagggtacattgtagatcctctgctgatccctcgctgaccctgtcacaacaacgcca

SEQ ID NO: 41087 - DNA, 191 bp, Glycine max
  Clone ID: PAT_MRT3847_137101C.1
ctcaagtgtgctggccgagccgtgatacttatactctgggcttgtagaaaagcttccaaggaatggaagctctttccttacacgggatagctagacaataggtattcttgaggcgagtgatttgacaagcgtttccagccaatggactacaccgaatgcccccgaagatccagttgctgcagccaaaattg

SEQ ID NO: 41088 - DNA, 280 bp, Glycine max
  unsure (1)..(280): unsure at all n locations
  Clone ID: PAT_MRT3847_137102C.1
ctgggacactgctgggctttccgcagacccagaaaccttcgccaagaaccgtgaactcgaagtgatccactccaagtgggccatgctcagagccttgggctgcgtcttcccagagttgctgtcccgcaacagggtgaagttcagaaaatccatgttgtttcaagccaagttccatatcttcatcaaaaataatctctactacttaatcaacccaaacctaatccacacccaaatcatcctcgccatctaagccacacaanttatcctaataggtaccatt

SEQ ID NO: 41089 - DNA, 436 bp, Glycine max
  Clone ID: PAT_MRT3847_137103C.1
tagggtcagcatgaggaagaccgtcaccaagcaggccttcttcggaagcccatggtacggtccagaccagagtaagtacttgggcccattctctggcaagcccccggtcgagacaacgtgctagttcccaggtgactacggctgggacactgctgggctttcggacgacccagatgccttcgccagaaaccgagagctcgaagtgatccactccaggtgggccatgctcggtgccttgggctgcgttttccccgaactgttgttccgcaacggggttcatgattggagaagctgtgtggttcaaggccgggtcccagatcttcagcgagggtgggctggactactcgggcaacccaggcttgatcacgcccagagcattcttgccatctgggccacccagttattctaatgggtgctgttgagggttatcgttttg

SEQ ID NO: 41090 - DNA, 487 bp, Glycine max
  Clone ID: PAT_MRT3847_137104C.1
ggcagcagcctcctccatggctctctcttccccatccttggctggcaaggccgtgaagctgggcccatcagcccccgaactccggagggtcagcatgaggaacaccgtcaccaagcaagcctcctccggaagcccatggcaccgcccagaccgcgtcaagaacttgggcctattctctggcgagcccccgtcctacctcactggcgagttcccaggtgactacggctgggacactgctgggcttacggacgacccagaaaccttccccagaaaccgtgagctcgaagtgatccactccaggtgggccatgctcggggccttgggatgcttcttccccgaactgttgtcccccaacgggggcaagtttggagaaactgtgtggttcaaggacgggtcccagatatgcagcgaaggtgggctggacttctttgagaaacccagccctgtccacccccagaagattctcgccatctgggccaccccaatt

SEQ ID NO: 41091 - DNA, 359 bp, Glycine max
  Clone ID: PAT_MRT3847_137105C.1
ggaaaaagcaagtaacattaagttggattcggatacccaagataattcacattatctgaagtacttcaccaaacacaaatctaaaaactctcaaaagtcatttcgttctttgacgctcactttccggggaccaaattgggggcattagcccaggcgttgttgttgacagggtcagcaaggggatcggcgaggttctccaatggaccctttccggggacaatggcctgaacaaagaagccaaaccttgagaacatggccaatcgtccgttcttgagttccttcaccttaagctcagcaaaagcctttggggcatcaacaaggcccaatgggtcgaaactgccacctgggtaaattgggtc

SEQ ID NO: 41092 - DNA, 541 bp, Glycine max
  Clone ID: PAT_MRT3847_137106C.1
ctcttgcggaagcccatggtgcggcccaaaccgcgttaagtacttgggcccattctctggcgatcccgcgtcctacctcactggcgagttcccaggtgactacggctgggacactggtgggctgaccgtcgaccaacaaaccttcgccagaaaccgtgagctcaaagtgatccactccaggtgggccatgctcggggccttgggctgcgtcttacccgaactgttgtcccgcaacggtgtcaagttaggagaagctgtgtggttcaaggccgggtcccacatcttcagcgagggtgggctggactacttgagcaacccaagccttgtccacgcccagagcatcctctccatctgggccacccaagttatgctaatgggtgctgttgatggttatcgaatagctggtgggcgcgtctgggaggttactgtcgcaatctaccattgttgcagctatgacccatttggccttgctgatgacccaagagcttttgctgaatcttaggtgaaatgaactaaagaactggagagtggccatgtttcc

SEQ ID NO: 41093 - DNA, 581 bp, Glycine max
  Clone ID: PAT_MRT3847_137107C.1
ggctcgagatatttgcaaaaacctttttattaactaatctgctaaatggttatcatgatatatgcttcatagttactattcacctacctgtaaatctggcaaaagaatccatcaaacacaaacacaacacactcttctttatcatttgtaagggcaaagaaagtaagaaacacccttgaaaatgagctcactcggcttcaactgacactattctttttgcatttttattcttgctaaaacatttgagatatgtcactagaaattgcattttttatgtatatatatatatatatatatatatatataaccaaaacaactaatgtcatcaatacatagctgcctaaggaccaagattccctgcagtggctatttgactgtaggatcctgcattcaacatctaatggttctgatatttttgagcttatattttattattaaatttttaatgtataaaaaaaattaagggtggagtttttttttactttctctctgactgtagagaaagggggaaagatgtggggtacttttgtaattatattaaaacaaaatgttgaaaaattagaagaaaaaaagacagtttt

SEQ ID NO: 41094 - DNA, 448 bp, Glycine max
  Clone ID: PAT_MRT3847_137108C.1
gtaaaaagcaagtaacattaagttggattgggatacccaagataattcacattatctgaagtacattgcaataacatatactttaccaaacacaaatttaaaaacttttaaaagtccacaagtcatccttttctttcatgctcacttgccggggaccaaattgggggcgtaggcccaggcattgttgttgactgggtccccaaggggaccagcaagggtttccaatggacccttaccggggacaatggcctgaacaaaaaacccaaacattgaaaacatggccaatctcccgttcttgagttccttcaccttaagctcaacaaaagcctttggggcattaacaaggcccaatgggtcaaagcttccaccagggtaaattgggtcaatgaccttaccgaggggcccaccagcaattcgataacccttaaagcacccattaggataactt

SEQ ID NO: 41095 - DNA, 1858 bp, Glycine max
  Clone ID: PAT_MRT3847_137109C.1
caagttttgttttgcctgcgaaaggttgaagaattacgtagaatgataaaaaccatgagcacgcccctatacctcaccccacttactattattattgtacaacacaaccaggtccctgaatgctttttagagagagaaagggtaataagaataaggtagaagaaaaagatattagaagagaaaaaaaaagagaagaagaaaaagaagaagaaaagaaagaatgaggaggatggggggtatggagaaacggagtgaaggctgggactgccctggaacacgtaggaggcactgacactgacagaagtgctcggtcatgaagagaggtttctctgagactgaaactgaaactgaggaggatgagtctgctaccactgtggatttgatgcttaatctttcttctaagtgaagcacaaatcaattaactgaatgcttagagagagaaagaggagaaggagtagtgataaggtgatcatagagcatattataagagagtgaaaactaatggaggttggcctcaagaaggagaacatggggtttgaggaaactgagttaaggcttggactgcctggaaacggaggcactgaagaagtgctcatcaggaagaggggtttctctgagactgaaactggtcatgaagatgagtctgccaccactgtggatttgatgcttaatctttcttctaaggaggccgcaaccactgctgctgctgctgcagatccaactgataagcacaagactttgcctaaggagaagacccttctgccagcagatcctgctaagcctccagccaagacgcaggtggtgggttggccacctgtgcggtccttccggaagaacatgttggctgtgcaaaagagcgttggagaagagagcgagaagaacagcagccctaatgcaagctttgtcaaagttagcatggatggagcaccttaccttcgcaaagtggacttgaagatgtacaagagttaccgagagctctctgattctttaggcaaaatgttcagctccttcaccattggcaattgtgaatcccaaggaatgaaggatttcatgaatgagagcaagctgaatgatcttttgaacagctctgattatgtcccaacctatgaggacaaggatggtgactggatgcttgtcggtgatgtcccatgggagatgtttgttgaatcatgcaagcgtttacgcatcatgaaaggaaaggaggctattggtcttggtcttgcaccaagagccatggcaaaatccaagaacaggagctagactagtcgcacaattcatgacctgccccatcctttgtaattgtggtgcccagttggcttagtaactaaagtaaggataatagctgcagcagacacggatggacattgcagggtgttgaattatagttaatttgtgtatcattatggtttgttataatatttcaaacaaaacaatgagatgcatgtctaattaagtactaattatgaacaggaacataatgactctcaatcatgttgttagacttggctttcttatatatcgatctttgcttgttttgtgtgagtgcttgcttaataataattttaagatgtgtttgtctgttgtagttgtagcgacatgttatcatgctttacatttaaaattgtcttgtaaaggttttccttatcattatgagattccttggtattaatcatttttcatataataacaaaattgtatttattacatttacgttagtttttgttgtgatcatcaagagccgaatatatagtactggaaatgttccctgaacatggtggatgggaaacaagaacatgtgcgtgttcatcaaaaaaaaaaaaaaaaaaaaaaaaaagaaaagagaagagaagaggaaagg

SEQ ID NO: 41096 - DNA, 601 bp, Glycine max
  Clone ID: PAT_MRT3847_13710C.1
gttaggtgggaaacaaagtagtaggggagagcaattaatggtgggtaataggaacagcttcaccagtgttagttttgctgatggtggtgcaccttcttctgttgctatggattttaatagtaagaacgttcaaaaggctatttctcaaccaccgttgcctaatactcctccccctcctactcagtttacgaaaatcctacaacataatttgcataattccgaaatggcacccagaaatacacccaattttataaacgcgactacatcagctactgcacccaccgttgatatatcacagcagatgataagccttctgacaaggtgcaacgatattgtgaataacttgacaagtttattaggttacgtgccctatcatccactttgataaaaaaaaaaaaaaaatagcaccgtactcatctgtagaccaaaatccaattcaagaaaaaatgcgggctagttggattgtgagtgaatgacttactcgaggaaatgcataaaccgagaaatataatccttcaatagccgcttagtttgagatttttttttatcttcacaatgtaaatgtactaccatattgatagtagcatctcatttagctgcc

SEQ ID NO: 41097 - DNA, 402 bp, Glycine max
  Clone ID: PAT_MRT3847_137110C.1
ggaattcggcacgagccttaaaagcccttagagagctaattgttatatttttaattcaattcagtgcagtgattatgacaaaaaaaaaaaaaaaaaaaaaaaaaaaaaaaaaaaaaaaaaaaaaaaaaaaaaaaaaaaaaaaaaaaaaaaaaaaaaaaaaaaaaaaaaaaaaaaaaaaaaaaaaaaatctgggggggggcccgggccccaatttcccctttttgggggtttattttcccccctctcttggccctttttttacaacggtgggaagggaaaaaccctgggtttccccaatttaatccccttggaaaaaatcccctttttcccaggtggggtaaaaaaaaaaaggccccccccatatcccctttccaaaatttggccaacctaaatgggaaatgg

SEQ ID NO: 41098 - DNA, 559 bp, Glycine max
  unsure (1)..(559): unsure at all n locations
  Clone ID: PAT_MRT3847_137111C.1
ggcancaacttctgggatggctctgtgatgcccatccttggctggcaaggccgtaaaactgggcccatcatccccanaagtgggaagggtgagcatgaagaagaccgtcaccaagcaggtctcctcaagaagcccatggtacggcccataccaattcaagtacttgggcccattctctggcaagcccccatcctacctaaccggtgagttcccaagcaactacagctgggacactgctgggctttccgcagacccagaaaccttcaccaagaaccgtgaactcgaagtgatccactccaggtgggccatgctcagagccttgggctgcatcttcccagaattgctgtcccacaacggggtgaanttcngagaanccgtatggttcaaggccaantcccagatcttcaacaaaggtggactcaactacttaagcaaccccaacctaatccacacccaaancatcctcgccatctagaccacacaagttatccttatagataccattaaaaagtaccatattactagtaacccctgcatgaatcactgcccaatctaccca

SEQ ID NO: 41099 - DNA, 1068 bp, Glycine max
  unsure (1)..(1068): unsure at all n locations
  Clone ID: PAT_MRT3847_137112C.1
ggctcgagcttgtcccgcccctgcccctataccatagtacattagtacccccacacacccctctatccggctctattgttgccacacacaaatcaattaactgaattcttagacagagaaagaggagtagtactagtgataaggtgatcataatagagcataatataagagagtgaaaactcatggaggttggcctcaacaagaaggagaacatggggtttgaggaaactgagctaaggcttggactgcctggaaacgtaggaggcactggcactgaagaagtgctcatcaggaagagaggtttctctgagactgaaactgaaactgaggaggatgagtctgctaccactgtggatttgatgcttaatctttcttctaaggaagctgctgctgctgcagatccaactgataagcacaagactttgcctaaggagaagactcttctgcctgcagatcctgctaagcctccagccaaggcacaggtggtaggttggccacctgtgcggtccttccggaagaacatgttagctgtacaaaagagcgtcggagaagagaacgagaagaacagcagcagccctaatgcaagctttgtcaaagttagcatggatggagcaccttacctccgcaaagttgacttgaagatgtacaagagttaccctgagctctctgatgccttgggcaaaatgtttagctccttcaccattggaaattgtgaatcccaaggcttcaaggatttcatgaatgagagcaagttgatggatcttctgaacagctccgactatgtcccgacctatgaagacagggatggcgactggatgcttgtcggtgatgtgccatgggagtaatttttttttttctccacttgatgacccgatcgaaattattttggttgcaataatttgaccttgtaatagtttcaatgaaaangaatatggaacacaaaaggcagaaaaaagaagacaggagcttgatatgcacatcacaatgttacttcaaaactagtccttatccaagaaactttgcgtaaaatattatgcatgttctaaggaaatcatgggttatcatctt

SEQ ID NO: 41100 - DNA, 607 bp, Glycine max
  Clone ID: PAT_MRT3847_137113C.1
ggcatcaccctcctccatggctctctcttccccatacttggctggcaaggccgtgaagctgggcccatcatacccctaactccggagggtcagcatgaggaataccgtcaccaagcaggcctcctccggaagcccatggtacggtccataccgcgtcaaatactagggcccattctctggcgagcccccgtcctacctcactggcgagttcccaggtgactaccgatgggacactgctgggctttcagccgacccagaaacctttgccaaaaaccgtgagctcgaagtgatccactccatgtgggccatgctcggtgccttgggctgcgtcttgcccgaactgttgttccgcaacggggtcaagtttggagaatctgagtggttcatggccgggtcccacatcttcagcgatggtgggcttgactacttaggctacccaagccttgtacactcccagagcatgctcgacatcagtgccacccatgttatactatcgggtgctgttgatgataatctcattgctggtgtgctcctacgtcaagacactgacacaatctacactgctggccactatcatccatcggtactctcttgagaccctcaggct

SEQ ID NO: 41101 - DNA, 383 bp, Glycine max
  Clone ID: PAT_MRT3847_137114C.1
gggctatatatgaggagatgataaataatgggttgacaccaaattggcctacctatgcagctttgttacaagcctattgtagagcacggtttaacagagatgcactgaatgtttacaaggaaatgaaggagaaggggaaggatttggatatacttctttataacatgctttttgacatgtgtgcaaatgttggatgtgagggtgaagctgttaaaatttttgaagacatgaaaagttctgggacttgccgtccagacagttttacatatgcatccttgatcaacatgtactccagcattgggaaaatttcagagatggaagccatgttcaatgaaatgatggaatctggatttgagcctaatattatagttctgacatccctt

SEQ ID NO: 41102 - DNA, 388 bp, Glycine max
  Clone ID: PAT_MRT3847_137115C.1
ggcagcagcttcttccatggctctctcatccccatccttggctggcaaggccgagaagctgggcccatcagccccagaagtgtgaagggtgagcatgaggaagaccgtcaccatgcaagtctcctcatgaaggccatggtacggcccttatcttgtttagtacttgggcccattctctggcgagcccccgtcctacctaaccggagagttaccaggcgactactgctgggacactgctgggctttccgcaaacccagaaaccttcgacaagaaccaggaactctaagggatccactccaggtgggccatgctcgaaggcttgagatgcgtcttcccggagttgctgtcccgcaacggggggaaagtacgaaaacccgcgtgggtcaag

SEQ ID NO: 41103 - DNA, 236 bp, Glycine max
  unsure (1)..(236): unsure at all n locations
  Clone ID: PAT_MRT3847_137116C.1
tgtgacagagaatccgaggcgaagagaagagaaaaattaagatggaggggaaggagcaggatgtgtcgctgggagcgaacaagttcacggagagacagccgattgggacggcgggcagagcaagacgcggcaggactacaggagctgcgccgcgcacntgtgaccgacgagttacgcatgtcctntacaacaggatacaagttggcacttctgttcaacatatgtctacgcatgga

SEQ ID NO: 41104 - DNA, 236 bp, Glycine max
  unsure (1)..(236): unsure at all n locations
  Clone ID: PAT_MRT3847_137117C.1
cnngccgggggcgcggtttttcttttttgtttttttttttttgcggaagccatgatttaaaaactttcttatatttgctcatgttttttttgaaaggaagcctcccttggaatggcttgggagctctctctaaaaagcttatttatgacatggtcaaatgttaagtaggggggtactacaatagatgttttatgcgaggcacctccattggggtggacatcttacttgcactactg

SEQ ID NO: 41105 - DNA, 2729 bp, Glycine max
  Clone ID: PAT_MRT3847_137118C.1
tctgggtcgagaaaaatgcagcctcagcaaccagggtataacagttcaagggtttacctagagcttatctctgatcttccctggcagaaggccagtgaagaaattgaactggacttgagagctgcacagaaacggctggatagtgatcactatggtttagtgaaggttaagcaacggataattgaatacctggcggttcgcaagcttaaaccagatgcaaggggtcctgtgttgtgctttgttggaccaccaggtgttgggaaaacatcattggcatcttctattgctgctgctttgggaagaaaatttgtacgcatatcccttggtggagtcaaggatgaggctgatattagaggacataggagaacatatgttggaagcatgcctgggaggcttatagattgattaaagagagtagctgtttacgatcctgtcatggagctcgatgaagtaaacgagcccggctagggatattcgtgtagatccaggtacagcaatgattaaggttcttgatacagaactatttacatcgttcaatgatctgcattaggacgtatcatttgatctatccgaggtagtttgtgtggctacagcaaataggttgcaacccattcctccaccacttcgtgataggatggtaataattgagcttcctggatatacacctgaggaaaagctccacattgctatgcggcatttgattccaagagttttagaccagcatggattgagttctgagtttcttcagattcctgaggcaatggtgaagcttgtcattcagagatatactagggaagctggtgtgcgaaacttagagagaaatctagctgccttggctcgagctgctgcagtaatagttttagagcaacactatgtaaatgctccatttgatctatccaaggtagtttttgtggctacagcaaataggttgcaacccattcctccaccacttcgtgatagaatggaagtaattgagcttcctggatatacacctgaggaaaagctccaaattgccatgcggcatttgattccaagagttttagaccagcatggattgagttctgagtttcttcagattcctgaggcaatggtgaagcttgttattcagagatatactagggaagctggtgtgcgaaacttggagaggaatctagctgccttggctcgagctgctgcagtaagagttttagagcaagaacaagtagttccattaaacaaagggatgcaaggacttgctacaccacttgtggaaaacagacttgctgatggaactgaagttgaaatggaagtgataccaatgggtgtcaatagtcgggacatctctaacacgtttaggattgcctctccatttgttgctgatgaaactatgcttgaaaaagtgcttgggcccccaagatttgatggcagagaagctgcagaacgtgtggctacccctggggtcactgttgggctagtttggactgcttttggtggagaagttcagtttgtggaagctacagctatggttgggaagggtgaactgcatctaagagaattattctgcctgaaaagaacttaaacgacttagtttaagtaccatcgtcaatgctatccaatttcgaattcctgcctgcttaacgaatagagattttatattttggagggccgtgatgtacacatacattttcctgcacgctgctgtacctaaagatgggccctcagctggtgtgactttggtcacagcattggtatcacttttcagtcagcaaagggtgagatcagacacggctatgactggagagatgacattgaggggtcttgttctacctgttggtggtgtcaaggataagatattagctgcacatcgttacggtattaagagagttattctacctgaaaggaacttgaaggacttggttgaagtaccatcgtctgtgctatccaatttggagatcctgcttgctaaacgagtggaagatgtgttagaacatgcttttgatggtgggtgcccttggaggcaacactcgaagttatagcagcatccttgatttgcaggacgagttagtaaacctttgtctttcaatcagtaatggcttctatatcaattcaacatacataccgtcccctcctgatctatcattgtcatcgtgatatcgggtccgagtacttcgacttcaactgatcgtaattaagcaaaactcaagaaaccaacaatttggatgggagctgagctgacatctacatttatcaatgggaatccactccacctcaattatagtgtgtaaatgctttagcttgagaccaactattgtggaaggtgagcaactgcatcctttgagtgctctccatacaacatctccgggtcacacttttgtaaattatttaccctgtcaccacatatatacatttttaatatatattgcgcatagatcgtaacaagagagggcttcctctctctttaatgtggttccttcttcctgcctgccaatccttttccttatgttttagtcgttttagtcagtaaggccgagtttcataatatggtgtcaactgcatagttaaccttattcatgcaacacacctggacttaaattacagaggtacttacatttacctcattccaacgagatgagtaagggttcaaatccacgacatgttacacgcgagatcctatcttgtttcactcgaccaatctcttgggatttattgattgatcatataagaaataaatgattgaatcattttatgaa

SEQ ID NO: 41106 - DNA, 244 bp, Glycine max
  Clone ID: PAT_MRT3847_137119C.1
gtgcaacatgatcaaagttatggtttgggcacctctgcaacaaagctttgaatctctcccacatctgcacatagaggtttgtcagatccttgggaaaatgtcgtgatggtggattttgcattgataaatcttgatggaggaaaaaacctcgctatgaatttttcctccacctcttcccaagtgttaaggcttttatttggatgtgattggagccatgtgatggaagcttgcttgtggggctcta

SEQ ID NO: 41107 - DNA, 1145 bp, Glycine max
  unsure (1)..(1145): unsure at all n locations
  Clone ID: PAT_MRT3847_13711C.1
tccagcccttcgtcccctcgccgcagcctcctccgcccccccaaccccccgtcccctcaccacaacaatttgggcccaccaaaccacccgaacttgcaatactgtgtcgccaacaagcccgaaccggctcaaatgcttgcagacctttgcccagatacatgtaaaggaaggcactgttagtaatcttaaatgtcctgaagcaaaatgtgcaattatgattccttctggccttttaaaacaattgctggatgacacagattatgagcgctgggaatccatgatgttggaaaaaacacttgcatcaatgtctgatgttgtttattgtccaaggtgtgaaacaccctgcatagaggatgaagaccagcatgctcaatgcccaaaatgttactttagcttttgtaccctttgcagggaacgacgccatgttggcatagcatgcatgagtctagatatgaagcttcagattttgcaggtatggtatttgaatccataatcagacaaatggtttagttgtcaacttgtcatagatcacaggcatgatttttatttttttttggtgaatacagaggcatgtattcttataaacaaaaaaaaaaaaataacatttggattgtgagggcctaagggaagaggaagagtgtaaaagggtcaatacgaataggatgtaaaagtgcctatgaatacatatgcctatgtaattgaaacacatcctattcgtattgacatttggattttggaagaggaagagtgtaaaagggtttaattttacggctgtaatcggagtaagtctgagtcaatctttttttaaaaaaaatattctcttcctcaaatgttacaacaatatttttttttgcgaaaaaatattactactttactgtggttgtttggaaatgctcaatatctgacttatcacaagcgcacccactcttcctctattgtaagttatcatgttttatctgattgatttttattaccttatctggttcactcataattcaatttccaatttaattggttatgaattaagaatttgttgattccatctttggttcgattcttagaatattgctgggacccatgtacaaagaaaggcactcgtatcgtacatctatcnngccaactctatnntannnntcaannnnnng

SEQ ID NO: 41108 - DNA, 481 bp, Glycine max
  Clone ID: PAT_MRT3847_137120C.1
agcgaagtgtcaagatgttaaaatgacgtaaagtttttctatagtctgcagtaactagcatttgacagcttcctggttcactcatttcagtctctatggccaaccctgatatgttatctttcttaaaaactataatttttataagaaataagaaacaagatatgcatatatagatagatagtgactttctcaaagagatcaagactcactcattttccacatccattttgtttgttgcattgtatatatatcatctgcattgtgaaatgccaaaaatcctgcccttgcattgtgctacaactatttctgttgaattttctcgtgaaattaactgaatccatggtttaattttaatgatttcatttatattagtaaatagtgttctcatatttgaatatttattgtgcatggcactgaccatgttattgcttgtgctgtttctctatacatgtacttctttactaaaagagaggttagtttt

SEQ ID NO: 41109 - DNA, 358 bp, Glycine max
  Clone ID: PAT_MRT3847_137121C.1
cttttattaattaatagcaagttttgttttgtttctacatcaagtggtctggctagttgctgaagttagtttctgcaaatagtaatgcagatatacagatttagcgttgtaattgatgctctcttctggattggaagaatatccactcttgataaataagatgtaaagcttgaagtctgtgcaggattttgtatataagcattgatttatttttataaatttattttagaattaataccccactgtgggatatcttagcacactcacccatgccatgaattggacatcttgaacgtgaagtttgtggaattagacgtctgttggtggtgcggcatgcgggactgggtgggctgtgatt

SEQ ID NO: 41110 - DNA, 1199 bp, Glycine max
  Clone ID: PAT_MRT3847_137122C.1
caagattggataattagccgaataatatcatggcttctatcttccctatttctcgtatgtccttcactgatttctctgcaccccttcccatttccataagttcctcatcttccacattcccactttctcaaacaccatgcaaacccactaaacatagcaaaccaaaacgccatcatgtttccaaagtgtcatgccatagtaaccaaaacaactcagcaccaaacccagaagaaggaaaaccatcacacaacattgtagctggaaaaaataggagggatgttctcattggctttggaggactttatggtgcttcaactcttaccaacaataacaacaacaaccctttagccatagctgctcccattctccctcctgacctaaaaacctgtggtccacctgacttagcaactggtgcaaaacctgttaattgttgccctccaatatcttctaccatcatagacttcaagctcccttcttctggagcaccccttagggttagaccagctgctcatttagtcaacgatgtctacatagccaagtatagggaagcccttaagcgcatgaaagccctttcacctaatgaccctcgaaatttcacccaacaagctaatgtccattgtgcttattgtgatggtgcctatcaccaagtagggtttcctaaccttgacctccaagtccacaactgttggctattcttcccttaccaccgttggtacctttatttctatgagagaatcttgggaaacttgattggtgacccaactttcgctcttccattttggaactgggacaatcctaaaggtggcatgacaatcccttccttttacgtagataaaaactcacctttgtatgaccctcttaggaatcttaatcatcaacccccagttctcatagacctagactataacagaagggacgatgatgatcctagtgctagtgaaagtgtagatcccaatgaacaaatcgctagcaacctttctataatgtataggaatgttatctccaatgggaaactcccaaggcttttccttggaagcccttatcgtgctggagatgaacctgaacctggtgctggctctttggagaacgttccacatggtcctgttcactcttggactggtgataagagagagcctaaccgtgagaacatgggaatcttctattctgctgcgagagaccccattttcttttctcaccat

SEQ ID NO: 41111 - DNA, 438 bp, Glycine max
  Clone ID: PAT_MRT3847_137123C.1
gggggaaatgaagcttttacttttttttttacccccccccaaaattttttaatgaaggaaattttcccttttgggagatttttttcaaaaaactttttttttctttttacccgggtgcaaacttgggtttttttttttagccaaagggccaaacaaacaaaatttttagcggaaaaaccctggggttggttgtttggaaaatttttataaatccctgccctaagggatttttaagccaaatttggaattctgggggccctttttttagcaagccaagggttttccacttttggatcaaaaaaagggtgcgggaggaactgtttatttttttttttcaaaaatttttttccccccgttttttttttttgtgggaagaaaccaggtccaaaaaaccttttttttttaaaagaaaccctttttttttttttcttttttccc

SEQ ID NO: 41112 - DNA, 672 bp, Glycine max
  unsure (1)..(672): unsure at all n locations
  Clone ID: PAT_MRT3847_137124C.1
ccatgttccattctcaacccttccctttcactctcactcaacaacaataagatccttttccctcatcacactttccctttctttttttctttctccacaaaacaaacctatcgaaacaacaaccaatttcaatttcaattctaatttgatcactctgataactttcatctatggcggcggcaaaaccccaacgcactccacaggaagtggaggacatcatcatccgcaaaatcttcctcgtctcgatcaccgaaatcgccaacagcaacaccaccaccaattcgaaaatcgtgtatctggaactgactgccgccgagattctcagcgagggcaaagagctccgcctctcgcgcgattgcatggagagggttttaattgaccgtctctccggcgaattcgccggcgccggagacgagtctccgttccagtacctcgtcggctgctaccaccgcgcgcacgaggaggggaagaaaatctcgaacatgaaggacaagaacttgcggtcggagatggagacggtggtgaggcaggccaagaatctctgcgtcaactactgccggattcatttagcaaatcccgagctcttcccgagccggngttcggcgagtaccggcgccaattcgccgctgctgctgctgattttcgcggaggtaggcggcgggaatgtgtttg

SEQ ID NO: 41113 - DNA, 998 bp, Glycine max
  Clone ID: PAT_MRT3847_137125C.1
tacggctgcgagaagacgacagaaggggaatttatctttgcctttgatgtttgtcagctttttcttgcttccatagttcatggcgtgtgttcaagtcatcacagttcttctctttgcattggctcttgcaaaaattgacccctcaacatgccaaatggtgcagggcagagtcttctgcgttgactgcactcttggctctagctaaaatttacccctaacatgtcacaactatgacttatctgatattaaggtttcagtgaggtgtgatggtgtgaaaaaactggctttggcaactacagaaaatgatggctccttcaaggttgatcttcccttagaccacacaaaaccttcttctgtgaagaattgcttagcaaaacttcttggcgggccagttcagctttatgtctcaagggaaaaccaggtatcccaaattattaagggcaaagagcaaaacagctacaccatctccactccccttagtttcaggacatcatgccccctaaacacaaaatgcaaggctgggaaaaaggttggttcatccaaaactgtggatctccctctgcctccagagtggggattggcaccaagtagctattatgttcctttcttccccatcattggaataccttgatcatgtgctcaagacttcaagtgatttgtaatcacttgagtaataatacttgtggggggaaatagactgttatatggtcttgtatgttacatatgattatagatgtgtcatgtgtagtagtgtgaaagaatgccacttatagttgtggaatgtactgtatgatagtatgtgaaaagcagataaatactctactggtttgtcaacttatgttgccttgttatatagtatgatattttgctaaaaaaaaaaaaaaaaatttaaaaaaagagagggggtaaaacatcggcctgccttatgaaacaaaaaaaaaaaaaaaaaagaaaagaggggggggataaagaaaaccacacccaaagacaaagcggtc

SEQ ID NO: 41114 - DNA, 1032 bp, Glycine max
  Clone ID: PAT_MRT3847_137126C.1
acgaaaggtatcttaactccaatctgttgacgccaactactaatgtcagccaaggaccctttacatttaatgttcttactctacttcttgtatttataagcttcaaactttccaccttctcttcaatttctctttgcctttgatctttgtcagctttttcttgcttccgtagttcatatggcgtgtgttcaagtcatcacagtttttctctttgcattggctctagctaaaatttacccctcaacatgtcaagtggtgcagggaaaagtctcctgcgttgactgcactcacaactatgacttatctgatattaaggtttcggtgaggtgtgatggtgtgaaaaaactggctttggctactacagaaaatgatggctccttcaaggttgatcttcccctagaccacacaaaaccttcttcttctgtgaataattgcctagcaaaacttcttggtgggccagttcagctttatgtctcaagggaaaaccaggtatcccaaattatcaagggcaaagatcaaaacagctacaccatctccacttcccttagtttcaggacatcatgccccctaaccacaaaatgcaagggtgggaaacaggttggttcatcgaaaactgtggatctacctctgcctccagagtggggattggcaccaagtagctattatgttcctttcttccccatcattggaataccttgatcatgggctcaagacttcaagtgatttgtaatcacttgattaataatacttgtaggggataatagactgttatactgtcttatatgttacatatgattattatagatatgtgtcatgtgtagtgtgaaagaatgatgccacttatagttgtggcatgtactgtatgatagtacgtgaaggaagtatatttcctggcttgaaaaagaatataaatactctactggtttgtcaacttatgttaccttgttatatagtatgatattttgctaattaactgcaagcaggaagaaaagagttagctgtcaatggatgagagtatgagacacataatca

SEQ ID NO: 41115 - DNA, 355 bp, Glycine max
  Clone ID: PAT_MRT3847_137127C.1
cgcgacccgctcacccaatgacattgattgcctccatgtacccctccatgattgggcccccgaaatcaatcgctgttccgagaccctcatatagatcattgtgcagctggctttagcacataccttatatcggtccatgaacaagggaccctcatcctctttgggttgctgctatggctaataatgctatccacttctgcgtgagtgaccggctctgaggacgaaagggaggacaagagagacctattccagctgaagaagggtgacgctagtccgccggccaccgagctgcgcgcttgaaatttgaccctgcagattgctgatatgactggaaagagccggaaggaagttcttg

SEQ ID NO: 41116 - DNA, 365 bp, Glycine max
  Clone ID: PAT_MRT3847_137128C.1
aagggggaatttattggaggcttaacccaaaattaaaatttttaattacccaattggtggccaaatggaggtaattggaatacctggggggcttggatttggtttttttcccccaattcccggttggtttttttttgacaaggggggaaaagcacctgggatttttttccttaagcaattaggcaataattggttggaataatagttcttataaataaaaatatataactaacctcctaataattaatccttaacataattagtcgggtttttttgggaataaaagttcccttggaaatcggattaaaaagttgaggtgggtttttggagctggaatggaatggaggcatgtttctggaggaact

SEQ ID NO: 41117 - DNA, 715 bp, Glycine max
  Clone ID: PAT_MRT3847_137129C.1
ccacgcgtccgcccaaatctctgtctctgtgattctgacgttctcacttccgagccaacacaaaccctatcaccgttctgcaaagcaaattcctcccatggcggaaaccctaagccccaatcccgcgatgggtcggaagcagagactccgcatccagtctccgaccagccccttcgtcttgggctccaacaacgaccagctcgaacgcgcccgggcacgagacgcacgcgccgccgccaaccgccgcaagagcctcgccctcaaccagcccctccaggccaattcccatcctggcctcaacaaacagcagatcctcgacttgttccaaaactgcatcaaactcgccagcgaaaacaaaattaatcagaaaaacacgtgggagttgaacctgattgaccatcttactgatatcatcaaggccgaagaagagcatgatgcggagactaattttcaaaaggcaagctgcactcttgaggctggagtcaaaatttattcattaagggtggattcagtgcattctgaggcatataaagttcttggggggatgaatagagcaggccaagaagctgaggaagacactaccctggatggtggtaatattgaaagtagacaagaagaaagcaggaaagaaacgagcaaaaaggtggcaccttttggcaacattgggaatcatcttttggaggcacttaatggaaaagaaatgtgatgctgcatt

SEQ ID NO: 41118 - DNA, 311 bp, Glycine max
  Clone ID: PAT_MRT3847_13712C.1
caaccgttacgacggtcccattccctctcttttcaacctcaccgctctcaagctcctcgttctctcccacaacaaattctccggcaagtttaccgacaccgacactgcctttccccacctctaccagcttgacctcgtctacaacaacctctccggtcagattccggcagctctcaacaacttaaccccacggcgaagacgataaagagaacaacttcgataccggagttggcaagcgacaaggagatgggatttgctacggtggggagcacggtgtctctggagaggacgtgttcgcttccgacggaaac

SEQ ID NO: 41119 - DNA, 288 bp, Glycine max
  unsure (1)..(288): unsure at all n locations
  Clone ID: PAT_MRT3847_137130C.1
gtcgcangcacncgtacgtnagctcggaattcggctcgagctnttgtcngnnccnagcgnnccnngngcagntcnngtcccnnncnggctttcttggcagaattaaggantacatgctgggnaggtgctctcattnntgtctttgctcntccatatngggctcggggatgatctcttcgnctcaggattctcgggggncntcgtggtttganacactanaggggtcttcgtgtacgtggccagcnnacnagaaccactggtcgagggngtaanactgttgagtgtgtc

SEQ ID NO: 41120 - DNA, 559 bp, Glycine max
  unsure (1)..(559): unsure at all n locations
  Clone ID: PAT_MRT3847_137131C.1
ggcatctgcttcttccatggctctctcatccccatccttggctggcaaggccgtgaatctgggcccatcagccccagaagtgggaagggtgagcatgaagaacaccgtcaccaagcaggtctcctcaagaatcccatggtactgtccataccgagtcaagtacttgggcccattctctggcgagcccccttcctacctaacctgtgagttcccaagcgactaccgctgggacactgctgggctttgcgcaaacccagaaaccttctccaagaaccgagaactctaagtgatccactccaggtgggccatgctcggagccttgtgctgcgtcttaccggaatagctgtccctcatcagagtgaagtacggagaagccatgaggctcaaggccgggtcccatatcttgagcaagggtgggctcgactacttggtctgcccaagcctgatccacacgcatatcatcctggccatctgggccacacaagttatactaaggcttgcataagaaggtnactcgcttgctggttgcatcatatacgaggtcattgtcccgatatac

SEQ ID NO: 41121 - DNA, 217 bp, Glycine max
  Clone ID: PAT_MRT3847_137132C.1
ttattctaatgacaattctacagattaaccaatcgaactgatagatcagactaccactataagagtcctttatatcaactttgactatcgccataaataatactaaattcaaattcttacatgaaataatcaatctatattgatactatgatcgaacaccatctattaataattttctgtcttatatacttcctgtcattttggcattatagcatac

SEQ ID NO: 41122 - DNA, 455 bp, Glycine max
  Clone ID: PAT_MRT3847_137133C.1
gtaaaaagcaagtaacattaagttggattcggatacacaagatgattcgcattatctgaagtacttcaccaaacacaaatctaaaaactctcaaaagtcattccgttctttgacgcttactttccggggacgaagttggtggcataggcccaggcgttgatgttgactgggtcagcatggtgatcggcgaggttctccaatggaccctttccggtgacaatggcctgaacaaagaagccatacatagagaacatggccaatcgtacgttcttgagtgccttcaccttaagctcagcaaaagcctctgggtcatcagcaaggcccaatgggtctaagctgccacctgagtagattgtgtcagtgacctgaccgacggggccaccagcaatacgggtaccttgaacggcacccattaggataacttgcgtggcccagatggccaggatgctctgggc

SEQ ID NO: 41123 - DNA, 496 bp, Glycine max
  unsure (1)..(496): unsure at all n locations
  Clone ID: PAT_MRT3847_137134C.1
ggctctctcttccccatccttggctggtaaggccgtgaagctgggcccatcagcccccgaagtcgggagggtcatcatgaggaagaccgtcaccaagcaggcctnctccggaagcccatggtacggcccagacctgcgtcaagtacttggggcccatttctatggcgagcccctgtcctacctcactggcgagttaccaggtgactacagctgggacactgctgggctttctgccgacccataaaccttcgccagaaaccgtgagctcgaagtgatccactccaggtgggccatgctcggggccttgagctgcgaattccacgaactattgatctgcaacggggtcaagtttggacaagctgtgtggttctaagccgggtcccacatcttctaccatggtgggctggactacttgggacacccaagccttgtccacactcagagcatccgtaacatctgggccaccacaattatcctaatgggtgctgctgacggc

SEQ ID NO: 41124 - DNA, 289 bp, Glycine max
  unsure (1)..(289): unsure at all n locations
  Clone ID: PAT_MRT3847_137135C.1
tttccggagctaattttntggggttgagttatactcaatccatttttatgtaatatcagagtctgtacagtcttgatgctgaacacctgcccatgtccagtcttaggcataagggtaaacagggttttaaatagcatgctatagcactgctatagtggcgtagtggcccctgcccaatagaggggttgctgtagaagagtggtttagtttagcagccagccatagtggaccaaatagtgggctgaataatggccgtagcagcaatatagctgcactctgtgttgattcc

SEQ ID NO: 41125 - DNA, 541 bp, Glycine max
  Clone ID: PAT_MRT3847_137136C.1
gaagaccgtcaccaagcaggtctgcttaggaagcccatggtacggcccataccgagtcaagtacttgggcccattctctggctagcccccgtcctacctaaccggtgagttcccatgcgactacggctgggacactgctgggctttccgcagacccagaaaccttcgccaagaaccgtgagctcgaagtgatccactccaggtgggccatgctgtgggccttgggctgggtattaccggagttgctgtcccgcaacggggtgaagttcggagaagccgtgtggttcaaggcctggtcccaaatcttcagcgagggtgggctcgactactagggcaacccaagcctgatccacgcccagagcatcctcgccatgtgggccacacaagttatcctattgggtggccgagaaagttaccagattgctggtggccacgctggtgatgtgactgacccaatctacccaggaggacagtacgacccatatgggcgtggtgatgacacgagagcttgtgctgagctgaaggagaatgatctggagaac

SEQ ID NO: 41126 - DNA, 568 bp, Glycine max
  Clone ID: PAT_MRT3847_137137C.1
ggcagcagcttcttccatggctctctcatccccatccttggctggcaaggccgtgaagctgggcccatcagccccagaactgggaagggtgagcatgatgaagaccgtcaccaagcaagtctcctcaggaagcccatggtaccgcccataccgagtcaagtacttgggttctttctctggcgagcccccgtcctacctaaccggagagttcccaggcgactaccgctgagacactgctgggctttccgcagacccagaaaccttcgccaagaaccgtgaactcgaagagatccactccacgtgggtcatgctcggagccttgggctgcgtcttcccggagttgctgtcccgcaacggtgtgaaggtcggagaagccgtgtggttcaaggacgggttccagatcttctgcgagggtgggctccactacttgggcaacccaagcctgatccacgcccagagcatcctcgccatctgggccacacaagttatcctaatgggggcccggtgaaggtaccggattgctggtggccccctcagtggagtcactgacccaatctacccaggtggc

SEQ ID NO: 41127 - DNA, 525 bp, Glycine max
  Clone ID: PAT_MRT3847_137138C.1
agcagcaacatctgaaactagcacagcaactgcctaaaacatttgcctctattctgtgcagaagaagtagctgtgtgaatcaaatactatttgatggtcttaaaatacagcagataacaaagtttcatgatgctctcaagagcatcatcaaaaactgctacatataactaattgtactcgcacattcactacttggattgcttgctctctcaaaaatattttacttctgacaaacaaggcccaagggggactacggtgccctctgcatggccttccacatcctatcatcaccaacaccatgctaaacctatagcttcatcattacttcagatccaatcaagtccaccaaacatgatagcgatgggaaaggatgcgtcacaattctcttgtgtagagaagaaaggattctcaccctcttgtgtaaatccagctgtgtccacaagaacttcttcaggaccagcactgggatggcctccaattcgttccttcaggaagaacattgcaagtggaagcacttctaagttg

SEQ ID NO: 41128 - DNA, 654 bp, Glycine max
  unsure (1)..(654): unsure at all n locations
  Clone ID: PAT_MRT3847_137139C.1
gcaaagcaaagctcatccttgagttaaaaaatggcagcagcttcttccatggctctctcatccccatccttggctggcaaggccgtgaagctgggcccatcagccccagaagtgggaagggtgagcatgaggaagaccgtcaccaagcaggtctcctcaggaagcccatggtacggcccaaaccgagtcaagtacttgggcccattctctggcgagcccccgtcctacctaaccggtgagttcccaggcgactacggctgggacactgctgggctttccncagacccagaaaccttcgccaagaaccgtgaactcgaagtgatccactccaggtgggccatgctcggagccttgggctgcgtcttcccggagttgctgtcccgcaacggggtgaagttcggagaagccgtgtggttcaaggccgggtcccagatcttcagcgagggtgggctcgactacttgggcaacccaagcctgatccacgctcagaacatacttcccatctgcgccacgccaagtatacttaatgggtgccgttaatgttgccgtattgctggttggtcgccttcggtaagtcacttgatccattctacccagttggagcttacgacccatttggcccttgcttgtgacccaggaggcttctctgtcctt

SEQ ID NO: 41129 - DNA, 287 bp, Glycine max
  Clone ID: PAT_MRT3847_13713C.1
ggtcagctgtaattttgattgtctttatcaatatatgaatgcattctttcctatatttctactaatggccattttctgtttgtaatttattatttgaattagcagcgacaacactcttacatgtcctttgcaaaacaggtttggaagtcatccaattccaaactgctatgtatcatgtagtcattaaatattgtagtaacaaaattacactagtcaatttatcatagaacgtggttttcttttgaagtaatttgctatattgttggtggcaacctattgctttaact

SEQ ID NO: 41130 - DNA, 562 bp, Glycine max
  Clone ID: PAT_MRT3847_137140C.1
ggcagcagcctcctacatggctctctcttccccatccttggctggcacggccgccaagctgggcccatcagcccccgaagtctggagggtcagcatgaggaagaccgataccaagcaggcctactccggaagcccattggacggaccagaccgcgttaagtacttgggcccattctctggcgagcccccgtcctacctcactggcgagttcccaggtgactactgctgggacactgctgggctttcggtcgacccagaaaccttcgccagaaaccgggagctcgaagtgatccactccaggtgggccatgctcggggccttgggctgcttcttccccgaactgttgtcccgcaacggggtcaagtttggagaatctgtgtggttcaaggccaggtcccagatcttcagcgagggtgggctggactacttgtgcaacccaatccttgtccacgcccagagcatcctcgccaatctggccacccaagttatcctaatgggtgctgtggatggtatcgtattgctggtaggccgcgtcgatgaagtcactgacccactctaccca

SEQ ID NO: 41131 - DNA, 541 bp, Glycine max
  Clone ID: PAT_MRT3847_137141C.1
tctctcatccccatccttggctggaaaggcctggaaactgggcccatcacccccagaaatgggaagggtgatcatgatgaataccgtcaccaagcaggtctcctcatgaagcccatggtacggcccataccgagtcaagcacttgggcccattctctggcgagcccccgtcctacctaaccggagagttcccaagcgactacgactgggacactgctgggctttccgcagacccagaaaccttcgccaataaccgggaactcgaagtgatccactccatgagggccatgctcggagccttgggctgcatcttcccggagttgctgtcccgcaactatatgaagatcggaaaagccgggatgttcatggccgggtcccagatcttcatcgagggtgggctcgactacttgagcaacccaagcctgatccacgcccagagcatcctcgccatctgggtcacacaagttatcctaatgggtgacgttgaatgttaccggattggtggtggccccctcagagatgtcactgaaccaatctactca

SEQ ID NO: 41132 - DNA, 546 bp, Glycine max
  Clone ID: PAT_MRT3847_137142C.1
cactcatatcacagagcacaaagcgaagctcatccttgagttaaaaaatgcgcaagcagctgtcttccatgggctctctgcatccgcatccttggctgggaggccgtgaagctgcgcccatcagccccagaactgggacgggtgagcatgaggaagaccgctccagcaggtctcctccgaagccatggtgcggccacaccgagtcaagacttgtgcccattctctggcgagcccccgtctctacctaaccggtgagttcccaggcgactacggctggtacactgctgggctttccgcagacccagaaaccttcgacaagaaccgtgaactctaagtgatccactccaggtggtccatgctcggagccttgggctgcgtcttcccggagttgctgtcccgcatcggggtgaagttcggagcagccgtgtggttcaaggccgcgtcccacatcttcagcgaggggtgagctcgactacttgcgcatcccaagcctgatccacgcccatagcatcctctccatctgggccacaccagttatcctatggg

SEQ ID NO: 41133 - DNA, 498 bp, Glycine max
  unsure (1)..(498): unsure at all n locations
  Clone ID: PAT_MRT3847_137143C.1
acgagcgactacggctgggacactgctgggctttccgcagacccagaaaccttcgccaagaaccgtgaactcgaagtgatccactccaggtgggccatgctcggagccttgggctgcgtcttcccggagttgctgtcccgcaacggggtgaagttcggagaagccgtgtggttcaaggccgggtcccaaatcttcagcgagggtgggctcgactacttgggcaacccaagcctgatccacgcccagagcatcctcaccatctgggccacacaagttatcctaatgggtgccgttgaaggttaccgtattgctggtggccccctcagtgaggtcactgacccaatctacccaagtggcaacttcaacccattgagccttgctgatgacccagaagcttttgctgaccttaaggtgaaagaactcaaaaacagacgatttgccatnttctctatatttagcttctttattcaagccattatcacccagagaagatccatt

SEQ ID NO: 41134 - DNA, 377 bp, Glycine max
  Clone ID: PAT_MRT3847_137144C.1
acaaaacactacacccggctaaaattgagttaatgagccggccctaaaaggaaagtgcaaacttgggatttacaagaagattaaatgacctaaaaaatgcccactgatgagaccatacatattcaggggcttcttacctttccccaggcaaggcacgaaacaaagacattttttgtaccttctgcccattttccaaagtacaatatttttgctcggttggctggaaaacctccacattcaacctaggaattttttttgctagcatctggcaggctcgaaggggctcttgacagggctacatccaaggggaacgcattggttgatacttccctacgcgcgagaaaagagccaccttgccaaacgggctgactgtaatc

SEQ ID NO: 41135 - DNA, 1455 bp, Glycine max
  Clone ID: PAT_MRT3847_137145C.1
ctttcataaatatttctttcgtataactcggtcccacttgccttcttctgtaacgtgtaaaaaacaaacactataaatctcccgcacccccgagcccggaaagagatctagtgtgtctgtgactgtcagaaacaaacattatttggttttctgaattgtttggattgcgagaaaaaaaaagggggggaaatggcaaaggatattcgattcttcgacctcaacacgggcgccaagatcccttcagtcggcttgggaacttggcagtctgatcctggccttgttgctgaagccgtcgcggcggccatcaaggttggttaccgccacattgattgtgctcaaatctatggcaatgagaaggagattggctctttgttgaagaatctgtttgaggagggtgtagtgaagcgcgaggatttgtggattacatctaaactctggaatactgatcatgctccagaagatgtaccactggcactggaccggaccttgaaagatttgcagctggattatgtagatttgtatcttatccactggcctgctccgatgaagaaaggatcagctggctttaagcctgaaaatcttgtgcaaccaaacatacctaacacctggaaggcgatggaagcactctatgactctggcaaggctcggaccatcggtgtaagcaatttttccaccaagaagctctcggatttgctgctaattgctcgtgttcctcccgctgtcaaccaggtggagtgtcatccttcctggcagcaggacaagctgcaggctttctgcaattccaaaggtgtccacctctctggatattcacctttgggttcccctggaacaacctggcttaaaagtgatgtcctcaagcatcaagttataaatatgattgcggagaaactaggcaagacgcctgcacaagtagctcttcgctggggacttcaaatgggccatagtgttcttcccaagagtacaaacgaaactagaataaaggaaaattttgatgtttttggctggtctatacctgaggacctgctcgccaaattttctgagattcaacaggcaagattactcaggggtaccacatttgcccatgaaacttatggtgcctacagatcccttgaggaactttgggatggtgaaatctgagaaatctatctgtaaatttgataagtgaatggatcgaggagtgagagttctgtgaaactgtgaatcagtatactcctttgttgacttgagcaaattttattttattcctggtttgatgaaactttgcatcatggcattcatgcaaatctctcttttcgaaaccttttctttctctttatgttatctataattgaatggattcttagttggtttccactattagagtgggcttaaaattatttagtagagttcatgtgaagataatcattcaataataaataaaaaggttttaaaacatattgccatatatctaataca

SEQ ID NO: 41136 - DNA, 307 bp, Glycine max
  Clone ID: PAT_MRT3847_137146C.1
ccctaacacacacccatttgattcagtttccatggctagcctcaaggttgcatttttggctgcagtgctctgcatggttgtggtgagtgcacccatggcacatgcagctatcacgtgcgggcaagtgacgaatagcctgatcaaatgcatcggttacctccagaaacggagaaacgcgccgtcgggatgctgcaactgagtgaggaagcctcatggccgccgccagaaccacgccgaaccgcagaacgcggggaactgccctcagtcgggcgccagccaaattcccggtttaaagccaaaaaagccg

SEQ ID NO: 41137 - DNA, 560 bp, Glycine max
  Clone ID: PAT_MRT3847_137147C.1
agcaaaattggggcgccctctgctccatttaattgatcatgaatgacgggggcaacttagtttatcctagtttgctttacagatgtaaaggtgcaagggcaattaattgtccagattactggacattggctaatacagaagggcaatgagttgcacatgtgtggataaaatatacattcgggtttttatgggagttgtttgatcccaaaaaaaagggggtaaagaacaaaagcttatttttccttgtcaaacttctcaactaacaaatatgtgccgcggcaaataacaattctatttttcctattttgtaacagaatacccccaaccaatttgggcgggactttttaatccaaattcaacaagactttgtttcccccccggttttccttgggataaaaaacagcttccccatgcttttttttggacaaaatgttcaaacttttaaaaaattttgttggtcccctaaaaagggggccttccccccccggttagttaaagggataaaaaaaacccttccctttgggtcatttttggggggttgggttttttccaaaaacttt

SEQ ID NO: 41138 - DNA, 494 bp, Glycine max
  Clone ID: PAT_MRT3847_137148C.1
ccacgcgtccgcggacgcgtgggtttgacaatctatacaacaatgagataagtggtgttatcgttgaagcgctcagggttggacttgaacctcaagttgcggcacaaaaaattgctgccctggctcgacaaagagccacagacaaaaataggcagtcaccatttgcatcggccgcccaagaagctgggtaccggtactacggtgggaagctcgacgacataacggatggggtgtcctatgtgaaaagcgcttgattcgagcctttctttttattagatgtaatggcaaaatcttaatcccgaatttaatggcacatgtgttctcaaggggtgaaatcccctgagatactagaagcacttctggtgggtttagccctggattacgttagcaaaccattacaccattttacttgtttgccactgtgagtaatcttctttttatatataattctctaaaaccagggcgggtcgtttcgcccttggagttggaggggg

SEQ ID NO: 41139 - DNA, 554 bp, Glycine max
  Clone ID: PAT_MRT3847_137149C.1
gaagaatgtcacctagaatcatgctattattagttgttttttttgtgtcttaaaggaatcccttatcccttaccttttcatattgtgtgcagaggctctttctttcctcattaccaaagcagtgcaaaatcaatccctccatggagttaaaatctgtcccgtagctccaagtatttcccatcttctattcgcggatgacaacatcatttttactcgttccactcacgaggaggcttgccaaatagaccatcttcttcaagtctatgagcaagcttttgggcagagtatcaaccttgataaatctgagctaacctcaaccgaaatgttccttctatcagaactaatcaactagccatgcttttgggtgtaaagttagcggttgctcatggaaagtatttgggtcttccctctttgattgggaggtcaaagactcaagtcttctaatttgtcaaggaaaaggttaatttggaagaagcttaagggtttggtagaagcaaaaacccattacagacccaatttcacttggagcagcataaccatattttaaatcttga

SEQ ID NO: 41140 - DNA, 435 bp, Glycine max
  Clone ID: PAT_MRT3847_13714C.1
attgattgttttttttcttttattttttttttttttgttgaaatttaatattaaataccaccacagtattgttttaggaaggcccaaaacaggaaccaataactggggggaagaaaactattatagtagaacaaaaggggaattttctttaaactcaacaaacaggggggggggttacagaacacttaacaacttttcactgattaaaacctgggggccttatccccaaaaaagctatcctccggaattggtgaacggtacaaaatctaatagctcggaaggaaacccttgggggaatcataaaccaaccttttaaaatttctttaaacccaaaaaaacacaacggcacctaaacctagacaatttccaaaaggcccccaaagcaggaatgataacacaccggggaaccacttgggtgatagtaaacgaaaccgg

SEQ ID NO: 41141 - DNA, 487 bp, Glycine max
  Clone ID: PAT_MRT3847_137150C.1
aattcggctcgagctcgagccgaatcggctcgagcggctcgagcctctacattacttaccattttatttcctagaaaaattagatcttacattcacatttcaacaatcacatacttattattattaaaaaaaattcacaatactagtggccaatgctatttttagaatgacaaaaagttacattccaatctaactcaatcatttgatagtggaacatatccatactcggacctcaataataacttatattcttctagtctagttcttcctaaaagcatccatcattctttacattttctttacaatcatcgatattgcattggtatgtaatatttagtaattaacaccattacaataataattataataaatagaaacattttttttattagcctaattatacatacacatcatcttatcttctttaagttagttaaagacataatagcttttagatgtttgaagcctgggcttatgacttgtttag

SEQ ID NO: 41142 - DNA, 317 bp, Glycine max
  unsure (1)..(317): unsure at all n locations
  Clone ID: PAT_MRT3847_137151C.1
accgntccggaattccgggggcgacccacacttacgtacggctgcaagaagacaacagatgggtattcttatttcaataatgcaggttacgggggtgggcttgatggcgatgctgtattgaacaaacttttccgcgatatatattatgtatgcagaagatgatacaagatgagcattgaaacagtcatttgttgattcttaaggtacagttctgtctacaaactggaaagaagcgggaacaaatatcgctgagggaagtccttctgatggcatggatataaataaatgtggatataaagacatttactagatcagtg

SEQ ID NO: 41143 - DNA, 790 bp, Glycine max
  unsure (1)..(790): unsure at all n locations
  Clone ID: PAT_MRT3847_137152C.1
nnnnnagccacgcgtccgaaaaacatctaggaataacaactctagcagatttggaaagttgattgaagttcatttcagctccatgggtaaaatatgtggggctaaaattaaaaccttaatgttagaaaagtctagagttgttcaactggccaatggtgagagatcatatcacatattttatcaactttgtactggatcttcatctggtcttaaagagagactgaatcttagagcagtcagtgaatataaatatctagttcagagtgactgcacgttaattgatggtgtcaatgatgctaacaactttcatcagctgatgaaagcgctggatactgttcaaatttgtaaagaagatcaagagatgatctttaagatgctcgctgcaatactatggctgggaaatatatcattccaagtagacagtgaaaatcacattgaggttgttgatgatgaagctgtaaccagtactgcccagctgatgggttgcagttcccaggaattaatgacagcattatgtacccttaaaactcaatttgacgaggatactattgccaaaaatttgacattgaggcaggcaactgaaagaagagatgcaattgcaaaattcatctatgcaagcttgtttgactggcttgtagaacaagttaacaagtcacttgaagtgggtaaaccacatactgggaaatccataagtatccttgatatttatgggtttcagactgtccagaaaaacagctttgaacagttttatataaatttatgccatgagaggattcaacaacattttaat

SEQ ID NO: 41144 - DNA, 425 bp, Glycine max
  Clone ID: PAT_MRT3847_137153C.1
cttgggctgatttatgtgcttgcatggtcgtgagaagatgatagaaggggactgatacatacaagcatacgcccggaaccgcgctatagcgggccggggaaaacgggccttaaggtcccgtctgcctccgccacgcctccggtcctcgtttctacctccctcgtcgaagccgtttttaaaaacccggacgagaaccccgacgtaaagtacgcaggcgccgcggacataaacgaggcagacgaaaaaaaagacggccacgccagccggtgaagcggcgccttaccgtgccgcgtctacttccgtcgccaccggcattacggaaggtgcccaaagcatcgtcgtggcttcctcttcttaaaattctacaatcaagtaggaatccacgtcaagataagccggcgtaactatagctatcacgcacaaac

SEQ ID NO: 41145 - DNA, 541 bp, Glycine max
  Clone ID: PAT_MRT3847_137154C.1
ggcagcagcctcctccatggctctctcttccccatccttggctggcaaggccgtgaagctgggcccatcagcccccgaagtctggagggtcagcatgaggaataccgtcaccaatcatgcctcctccggaatcccatggtacgtcccataccgcgtcaagtacttgggcccattctctggcgagcccccgtcctacctcactggcgagttcccaggtgactacggctgggacactgctgggctttcggccgacccataaaccttctccagaaaccgtgagctcgaagtgatccactccaggtgggccatgctcggggccttgggctgcgtcttccccgaactgttgtcccgcaacggggtcaagtttggagaatctgtgtggttcaaggccgggtcccagatcttcatcgagggtgtgctggactacttgggcaacgcaagccttgtccacgcccagaacatcctcggcatctgggccacccaagttatcctaatgggtgctgttgaagggtatcgtattgctggtgggcccctcggtgaa

SEQ ID NO: 41146 - DNA, 559 bp, Glycine max
  Clone ID: PAT_MRT3847_137155C.1
ctcagttaatttttttactttaactttctcttacattaaatttgcaaatacccacaattgctagtttcatatattaaaaaaaagagagagaaagattctaaatcttaatatgctaatgctgccttctctataggcttttgtgcaagcatggaaagctttatgtggagcaagtaatggcacttcgacacttgtggtgccagctgggcatacattttttgtgcgccaaacaagattccgaggtccctgccaatctcaaaaacttgatattcaggtacaaacattgcaaatataccttcaaattctctacctcacttgtatatgctaattttttttacggcaagagaataagtactaactagataataatacatcagcagtataatttatcttaattgaatagaaggcatcaattgttataaattctttaatatttattttttatttttacgtataaaaaatatgtttataatttttttaacataaacttcttaaatattaattagttcagtaaatttaactgcttgaggatgcagattatgggcaacctacttgcacctac

SEQ ID NO: 41147 - DNA, 535 bp, Glycine max
  Clone ID: PAT_MRT3847_137156C.1
ggcagcagcttcttccatggctctctcatccccatccttggctggcaaggccgtgaagctgggcccatcagccccagaagtgggaagggtgagcatgaggaagaccgccaccaagcaggtctcctcaggaagcccatggtacggcccacaccgagtcaagtacttgggcccattctctggcgagcccccgtcctacctaaccggtgagttcccaggcgactacaggtggaacactgctgggctttccgcagacccagaaaccttcgccaagaaccgcgaactagaagtgatccactccaggtgggccatgctctgagccttgggctgcgtcttaccggagttgctgacccgcaacggtgtgaacgtcagagaagccgcgtggttcaaggctccgtcccagatcttcagcgagggtgggctcgactacttgggcaacccaagcctgatccacgcccagagcatactggccatgtggaccacacaagttatcctaatgagtgccggtgaaaggtaccgcattgcttttggaccccta

SEQ ID NO: 41148 - DNA, 933 bp, Glycine max
  Clone ID: PAT_MRT3847_137157C.1
acgcgtccggaaacaatgaatgagaggattagcgaaacgcagcgtgagaggaacgacatccccaatccaattcaattactagctgcctttttcttttcctaaaatctcgcctttttcgtttccgtgtccctgagccgcggcaaggcaacttcactttggaccaaattaccctccatctcccttcaaatcacaccgaacccttcccttccctttttccactcagattctctccccccactccacagtcaactccatgtgcgcttgaatggatttggtggaaggcgtcggagagagttcctcgccgccgcgcgccttcagcggctacagcaactacgacgtccgcaacgatgtctacaaccgccttcttcaaaccggccacgaccaagccgtttccaaccccgacttccgcgaacacttggaggctcacttcaatcgcttgccaccgagttatggactcgatgtgaatatcgatagagctgaagatgttctgttgcatcaatcccttcttgctttggcaaaggaccctcacaagcgccctgtataccatatacgcttccttgagaatatttcaactagaacagatagtgaagataacaaattttaagtactcattatagcccaggatcatcttcccatgcaacaaatgggggagctgtatcacctggtaaaagtaagatgagggatattgcaaatgagtttgagccttgctcgaagcttgaggacctaaatttggatgttagaaagaactcaaaggagacagaggaaaaatttctctctgacaattttttccagaggcttgaacattcaagtgtccccgttcatgaaataatattttccactgttgacaagccaaagctgttaagccagctgtccgctttgctgtctgatattggacttaacatccgtgaagctcatgttttctcccacactgat

SEQ ID NO: 41149 - DNA, 355 bp, Glycine max
  Clone ID: PAT_MRT3847_137158C.1
tgctttttttacaaaagctgtatctaactttggcttggggctatttacatctgaggggcgtgcacaaacgatttgggatcatgcataactgggctacggaaataaagccattgatgtcagaaaatgcctatattcatcccacttttgatgacaatgccatggaagaagatgtgccctgggaatcagatggaccacgttttttatcattgtctgattggccacaaatagcatatgatgtgcgtgaccaagagatatatgtgcacattacatgcactaatgcttttatgctgacacagatggcagtgaaatgagacacctgtggatatgaagggtcagatgagacttatgtgagtta

SEQ ID NO: 41150 - DNA, 613 bp, Glycine max
  Clone ID: PAT_MRT3847_137159C.1
ctcatccccatccttggctggcaaggccgtgaagctgggcccatcagccccagaagtgggaagggtgagcatgaggaagaccgtcaccaaccaggtctcctcaagaagcccatggtacggcccacaccgagtcaagtacttgggcccattctctggcgagcccccgtcctacctaacctgtgagttaccaggcgactacggttgggacactgctgggctatccgcagacccagaaaccatgcccaagaaccgtgaactcgaagtgatccactccatgtgggccatgctcggagccttgggctgcattttcccggagttgctgtcccacaacggggtgaagttcggagaagccgtgtggttcaaggccagatcccacatcttcagcgagggtgggctcgactacttgtgcaacccatgcctgatccacgcacagagcatcctcgtcatctgtgccacacaagttatcctcatgggtgccgttgaaggttaccgtattgctggtggccccctcggtgaggtcactgacccaatctacccatgtggcagcattcgaccattgggccttgctgatgacccagacgcttttgctgagcttaacgtgacggaactcaaa

SEQ ID NO: 41151 - DNA, 276 bp, Glycine max
  unsure (1)..(276): unsure at all n locations
  Clone ID: PAT_MRT3847_13715C.1
taaaatccatcttgccntgntcactaatttntcctctctacaacagcncaccanaatccttcangtgttcttnttcttccacatcaatgcctcctcacanattatacatatagcngttntgcttncttcntccaaagcaccgtngcaaatgaaaaaaggagatatttttcattagcanaggttgtgttanttgtgtttgtgggggcactttacgttatggantgcttgngctcaatttatgtaacgaaggctttgaatgttatttagtttgcgtgg

SEQ ID NO: 41152 - DNA, 586 bp, Glycine max
  Clone ID: PAT_MRT3847_137160C.1
ggcagcagcctgctccatggctctctcttccccatccttggctggcaaggccgtgaagctgggcccatcagcccccgaagtcgggagggtcaccatgaggaagaccgtcaccaatcaggcctcctccggaagcccatggtacggcccataccgcgtcaagtacttgggcccattctctggcgagcccccgtcctacctcactggcgagttcccaggtgactacagctgggacactgctgggctttcggccgacccagaaaccttcaccagaaaccgggagctctaagtgatccactacaggtgggccatgctcagggccttgggctgcgtcttccccgaactattgtcccgcaacggggtcaagtttggagaagctgtgtggttcaaggccgggtaccagatcttcagcgagggtgggctggactacttgagcaacccaagccttgtacacgcccaaagcatcctagccgtctaggccacccaaaatatgctaaatggtgctgatgaggttaatcgatggatagtgggcgcaatcgggatgactcgtagaccatagacggtagagggcagctatatgaggttgggc

SEQ ID NO: 41153 - DNA, 117 bp, Glycine max
  Clone ID: PAT_MRT3847_137161C.1
tacgactgaactacaaccccagatcctggaaatatataaaccttcaacggcatacaacaagggtaagattaaataacccaaactaacccatattacaaataactccttacaaatcca

SEQ ID NO: 41154 - DNA, 847 bp, Glycine max
  Clone ID: PAT_MRT3847_137162C.1
cgcatgcacacgcccggaagctgggtctagatatcacgtggcacagggccaagttcatccttgagtaaaaaaaagtgagaatggtattgcatggctgtctgatacccatccatgactggcaaggccatgaacctgggcccatcacccccggaagacaccatggacagcagtgaagaagaccgtctccaagcaagcctgctcaagaggcccatgggacagaccacaccgaggcaagtacttgggcccattctatggcgagccctcatcctacctaaccagtgagagcccaagcgactaccgataggacactgatgggctttgcgcatacccagaaacctacgccaagaaccgtgaactcgaagtgatccactccaggtgggccatgctctgagccttgggctgcgtcttcccggagttgctgtcccgcaacggggtgaagttcggagaagccgtgtggtacaaggccaggtcccatatcttcaacgaaggtgggctctactacttgggcaacccaagcctgatccacgcccagagcatcctcgccatctgggccacacaagttatcctaatgggtgccgttgaaggtcaccgtattgctggtggccccctcggtgaggtcactgacccaatctacccaggtggcaactacgacccattgggccttgctgatgacccagaggcttttgctgagcttacggtgaaggaactcaacagcggacgattggccatgttctctatgtctggcttctttgttcaggccattgacaccggacagggtcccttggagaacctcgacgatcaccttgctgaccatgtcaacaacaacgcctgtgcctatgccagcgac

SEQ ID NO: 41155 - DNA, 772 bp, Glycine max
  unsure (1)..(772): unsure at all n locations
  Clone ID: PAT_MRT3847_137163C.1
caccgtgagtgtctcttacagatccttagatagctaggccgtgaggctgtgcccatcttcccccgtcttcgtctgggtcggcttgtggaacaccgtctccatatctgcctcctccggaagcccatggttcggtccagaccgcgtcaagttcttgggcccattctctggcgagcccccgtcctacctcactggccagttcccatgtgactacggctgggacactgctgggctttcggccggcccagaaaccttctccagaaaccgtgagctctatgtgatccactccaggtgggccatgctcggggccttgggctgcgtcttccccgaactattgtcctgcaacggggtcgagtttggcgaagctgtgtcgttcattgcccggtcccagatcttccgcgcgggttggctgcactacttgggcaacccaagccttgtccacgcccagagcatcctcgccatctgggccacccaagttatcctaatgggtgctgttgagggttatcgtattgctggtgggcccctcggtgaggtcactgacccaatctaccctggtggcaactttaacccattgggccttgctgatgacccagangcttttgctgancttaaggtgaatgaactcaagaacagaaaattgaccatgttctctatatttaagttctgtattcaagccattatcaccagtaagggtccattaaagaaccttgctaatcaccttagaaacccagtgaacaacagtacctaatcctacaccaccaacttcgtccccgca

SEQ ID NO: 41156 - DNA, 568 bp, Glycine max
  Clone ID: PAT_MRT3847_137164C.1
acactggagattgcatgctgattctacaggtataaaaaaggggggaggctggttcatgggtctctcttgcccatacttggctggcaaagccgacaaacttggcccatcagcccccgaagtcaggagggttagcttgaggaagaccgtcaccaagcaggccttctgcggaagcccatggtacggcccataccgcgttaagtacttgggcccattctctggcgagcccccgtcctacctcactggcgagttcccaggtgactacggctgggacactgctgggctttcggtcgacccagaaaccttctgcagaaaccgtgagctcgaagtgatccactccaagtgggccatgctcggggccttgggctgcgtcttccccgaactattgtcccgcaacggggtcaattttggagaagctgtgtggttcaacgccggcgcccacatcttcaccgagggtggtctggactatttggtcaatccaagccttgatcgcgccctagagcatcctagccgtctgggccactcgtagtttttcttatgggtgctgatgatggttctcttactcgcagtt

SEQ ID NO: 41157 - DNA, 616 bp, Glycine max
  unsure (1)..(616): unsure at all n locations
  Clone ID: PAT_MRT3847_137165C.1
ggcagcagcctcctccatggctctctctttcccatccttggctggcaaggccgtgaagctgggcccatcaacccccaaagtcgggagggtcagcatgaggaagaccgccaccaatcaggcctcctacggaagcccatggtacagcccagaccgcgtcaagtacttgggctcattctctggcgagccctcgtactacctcactggcgagttcccaggtgactacggctgggacactgctgggctttcagccgacccagaaaccttcgccagaaaccgtgagctcgaagtgatccactccatgtgggccatgctcggcgccttgagctgcgtcttacccgaactattgtcccgcaacggggtcaagtttggagaagctgtgtggatcaaggtctaggtccagatctatagcgagggtgggctggactactcgggctacccaagccttggtcacgcccagaccattctnggcatctggggcacccaagtatccctatgggtgccggttgagggtattttattggttgtggggcccctcgtgaagtcactgaccccatcttccccggtgggccctttgaaccattgggcctgctgagaaccccaagcttttgctgtcctt

SEQ ID NO: 41158 - DNA, 679 bp, Glycine max
  Clone ID: PAT_MRT3847_137167C.1
gaccgtcaccaagcatgtctcctcaggaagcccatggtacggcccataccgagtcaagtacttgggcccattctctggcgagcccccgtcctacctaaccggtgagttcccaggcgactacggctgggacactgctgggctttccgcagacccagaaaccttcgccaagaaccgtgatctctaagtgatccactccaggtgggccatgctcggagccttgggctgcgtcttcccggagttgctgtcccgcatcggggtgaagttctgagaagccgtgtggttcaaggccgggtcccagatcttcagcgagggtgggctcgactacttgggcaacccaagcctgatccacgcccagagcatcctcgccatctgggccacacaagttatcctaatgggtgccgttcaacgttaccgtattgctggtggcctcctcggtgacgtcactgacccaatctacccacgaggcagcttcaacccattgggccttgctgcagacccacacgcttttgctgaccttcaggcgaacgaactcaagaacgcgagatcaccccacgcccccatcgttggcctctttgcccaggacattgctacccgacgggtccattgtgaaaccctcccgatccccctcggttgccttgttaacaccaaagcacgggcctaagccaccaaactcctcccc

SEQ ID NO: 41159 - DNA, 650 bp, Glycine max
  Clone ID: PAT_MRT3847_137168C.1
gctcataacacaaagcacaaagcaaagctcatccttgagttaaaaaatggcaactacttctttcatggcttttttattcccaatcctgggttggcagggccgggaacctggcccaatcaccccaaaaaggggaaagggggaccttgaggaaaaccgcacccaaccaggtctcctcaggaagcccatggtacggcccagaccgagtcaagtacttgggcccattctctggcgagcccccgtcctacctaaccggtgagttcccaggcgactacggctgggacactgctgggctttccgcagacccagaaaccttcgccaagaaccgtgaactcgaagtgatccactccaggtgggccatgctcggagccttgggctgcgtcttcccggagttgctgtcccgcaacggggtgaagttcggagaagccgggtggttcaaggccgggtcccaaatctttaacgaaggtgggctcgactacttgagcaaaccaaacctgatccacgcccagatcattctagccatattgggcccacaagttatcctaaatggtgccggtgaagggtacccgtattgtggtggcccccttcgagatgtcactgacccaattcttaccaagtgtcagctcgacccatttggccttgctgatgaccca

SEQ ID NO: 41160 - DNA, 1465 bp, Glycine max
  unsure (1)..(1465): unsure at all n locations
  Clone ID: PAT_MRT3847_137169C.1
nnaaggctcgagcagactttctctctctctctttctcactctctctctctctctctctctgtcacgcacagagaaaaactcagacacccacgttcacacttcgcacacaccatctctcactgttctttcttcttcctctttttctttttttttttcttttctcttaatggaatgatggaacacaacatcatcgtcaacaacaacgtgatcgcaccgtttgtcataaaaacctacaatatggtgaacgatcccaccaccgataaactcatcacgtggggcccagccaacaacagcttcatcgtcctcgatcccctcgacttctcccactccctcctccctactttcttcaagcacaacaacttctccagcttcgttcgccaactcaacacctatggtttcagaaaggtggatccggatcggtgggagttcgcgaacgagtggttcctgcgaggacaaaagcacttattgaggaacatcgtgcggaagaagcacggtggagctgggaggaccaattccaattcgcattattcgcatcccttgaagctggaggagttggacgacgaggctatggtgatggagatagcgaggttgaaggaggagcaaaaagcgttggaggaagagcttcatgaaatgaacaagaggttagagacaacagaaaaacgaccacaacaaatgatggcttttctgtgtaaggttgtcgaggacccgcagattctttctcggattctccgagaaagagaaaagaaacacctgggagagaaaaagcgacgcctcattccgcctccgccgccgacggcagcgacgtcgtcgtcgtcgtcctccggcatcaagacagagttcgaagaagacgaaggtaattataatatcaagtcttcgtcgccggagacagggttggaaatcgacaacaatagtaacaatatttgttcgccgccgccgctggggtgttggggtgaacagggttgttatgggtacaattgcgcctccgtgccggcacctttgacggtggtagcgccggcgtttccgacgatgggaggagggtatttgaggcgtggggggttttggggggaaatggcggcggaggggaatgcggtgccgccttatccgttttcgttgttggaagggggcttttagatttagttttaggttatgaaatgaatgaattattactgccacaaaatttcatcttggattttctgtcgtattgaaagttctatccttttttgtgcgttgattctgtgtaaagaaaaaaggttgggaaaaagagtaaaaaggtagtgggaaaattgttagatatttatagttgtgttcggtttcaggttttttttttcataaatattgtttttaaataaatgctttgcggatggtgtagatcaagtaacatagagttgtttcaatttaatgagtaggatcggattagaatcttgcatatataattatgtaaaatattcaaactgtgagttttgtt

SEQ ID NO: 41161 - DNA, 345 bp, Glycine max
  unsure (1)..(345): unsure at all n locations
  Clone ID: PAT_MRT3847_13716C.1
agctcggnttcggctcgagacggctgcgagaagacgacagaaggggaggaggagtcagccagacaagcaagccaccctctgctaccgcttctcatccatcatgtcgaatgaactaaaaaactatgatgtttttctcaattttcatggcttattttccggttacaccttcactggtactctctataatgctttgcgcacaagagaatcaagacctttttcacaaaacatgaatatggtcgtaaactacacactgatgacagccacattccaccctttactcttaaagcaattaaggaatcaaggatttcggtggtttgtttggaaacaaacaaatctgtgttccta

SEQ ID NO: 41162 - DNA, 372 bp, Glycine max
  Clone ID: PAT_MRT3847_137170C.1
attttagtcagtttgcacatgagttttcattctcgaaagaaagctttcttcgcgctctccctctctcttttttggcatgaatagtcttcaaggtacaatatataggcataaacgctaaggacgtaactgtttcaaatgatgtttatttagctagctactgttcaaattcaaaccacagccattaaaaaatgtgttgaggaatatttaacatacgtcgttgagtttagatggacatgtcatccatctttgatgacaattctgatgtggagtaacatccttcaccttcgtctgtggatcaaaatgatcattcagtcacttaatacgttggttactcacctttattcagtggggataccttcgcgtattgtcggt

SEQ ID NO: 41163 - DNA, 1597 bp, Glycine max
  unsure (1)..(1597): unsure at all n locations
  Clone ID: PAT_MRT3847_137171C.1
atttcattttcttgcattatattttgtctttactaatgtttcactcaacagccatgccagaaaacagaaaggacatttcacacatggaacatcccaggaagagaaactcccccttgtcttttgtcaccttcaaattcaatccttccctttctctctctttctctctcacacggtcctagctaattctttctattccttccatcatatgcaagcacaagcgtaaccagcgaccttactttcttttcttctttaattacaaaattgtcttgatccttttcattttttcatgtcggtttatttttgaaccccaaaggtagaaactttctttactttttaataattataatgagaagcatagcatcttgttacaacgaacatgcaattagagtgtctgattcatattgctcaaggccttcaacccaggcctatctcggtccaaaacttcacccttccaccagagattctgtaacctgcatgtacaaactcaccctcatcgaaacgcaaaaacaactctttattacgcttacttggtccaagaaactcttgggccaaggcttcaccataaccatcgccaattccgaacactctctgtctccctctaaatccaacgcaagacaattgagaaaaatcaaaggcaacgaaacactccaatcccacaatatcacgctacaactcctctgcatcccctccgctgcggcctacgaactctggccccgagcccgtcgccgcgtcctacctcctcttctggacggtctctttctccctctaataataaatccaacgcaaggcaattgagaaagaacaaaggcaacgaaacattccaatcccaaaattttcaagtccaagtcttgtgggatctctccgatcgcaaagtacgaggaaggaccagaaccggttggtggcttttacgtcaacgttttggtggactccgaactgggcctacgccgaggtggtcaaggggggtcaggcgaagaagggtcacctgtcgtccgcgcgcgtggaccggctgtctcgatggtttcacggagcgagacgttttccggcacagcggtttacgcgacgaaggcgaaatgctcgcagacgggaagttctcacgatatattgattaggtgcggcgcggaggcggagcgaggagagccgaagggtcacgtgttgtccgtgtgcgtggacaagaagacaatgttccaggttaagaggctgaggtggaactttcgtgggaaccaaacaatttttgtcgatggtttggtcgttgatatgatgtgggacgtgcacgattggctttttaattcgaattctgcttcatcgtgcagtgtgcatggtcaggactggcaccggcctcgattgttcgccttcgtcggagtcgtgtttgctcgcgcacatggttcgggactggtctgggttccctgtcccgttgtgcccctgtaggtgcaaggtctgagtctatcttatttagttgtttcgttcgtgttttttcatctggcttgcacgagactgtgttcgccggcgcctatttagatgatttttttcttcttcttaatcttaatctctgtcgatgatatttggtcagnngttanntaatcctgtccgtttgnnccag

SEQ ID NO: 41164 - DNA, 1674 bp, Glycine max
  Clone ID: PAT_MRT3847_137172C.1
cttagcgagaaactttctcaattggaagaagtaatagaaacaggatcggaggcagagtattttcatatattactttgaaaaaatcttaatgctaaaaatggacgactttgtgagacagagagagattctgaaacagaagaaaaaatggagaaaagttctcatgtacccaaatttggcaataacattaactggagagaatggtccaaatacagataaatttgacaaggcacggaaaggtcgaactggggcaaggataataaatccaaatgaccctgagggagcagcttcttgggttgggttctctgagtttttttacctcttcttggtttgatccagaaaggcttatttttctttgttctgaggaaaaaaattctgcttttcaatttctgggttttcaagcttcgtgtagaaggaaatggcacaacgttctcatgtacccaaatttggcaattgggatagtggagagaatgttccttatacagcatattttgacaaggcacggaaaggtcgaactggcacaaggataataaatccaaatgaccccgaggaaaatgctgatttaagttttgataatccatcatctgataacctacctcctaccagacctagaactaattcagaggatcaatccggaaaaggatcactgcatttggaagatgatcccaagaattttatcgaatctccagctcgtcatgacaatgtaagcagtaggagtggcagtagaagccatggagtaggttctgctgataaccgtagaagacattcaacgcaaagtactgggtctgagtacagcattgaacgttcaccgcttcatcgccaggctagagccccaggcagagacagtccccagtgggaaccaaagaattcatatgacagcagtcagggaacaccaggaaggtctcggttaagaccggctaatcgaggagatgaaacaccagataaaggtgcagctgttccaaagtttggtgactgggatgtgaataaccctgcatcagcagatggctttactcacattttcaacaaagtgagggaggagagacaaggcgggccaggacaagtgccaggaacgcctaatgagagaccacaagctattaatggcctatctaatgatgacaaagtccagtgttgctgctttgcgtggggtgggaaaaaatgatttcttggattggaagtctgaatgataatattctgaacagaaatgatggtaaagataatgttgtgaatggtcatgaggtgtgtgtagctcttgtaaatatccaaggctctctctctggtcgggaagacatcgttgaagcaaatgtatcgcaactactctgccgtttcttctcccttttgtttttctttctaatataaccaaagattctatgcgtgcaagattgtgatttttctttgtattttcttctttttgagccttctgttgtgttactgttatgctttacaattcaaattaactgtatgtacctgagatatagagggagagtggttatataattcttttccaatgaattggtgggttgtgaatcgaggtctattgtgttcatgttggtgttgaacttctctagtttaactgggaatgatctggtagcaaattgtttcaaaaagtgatattatcatggcctgtttgtttcagttaaaatagatgttatgttattaagtaagctcatattctatttg

SEQ ID NO: 41165 - DNA, 505 bp, Glycine max
  unsure (1)..(505): unsure at all n locations
  Clone ID: PAT_MRT3847_137173C.1
tcttnaangcaagattgggggcgnntctatccttattttntttttctttcttcttttagggagaacatccccactaggccaaaggactttgattgaactaggtttaagtttgagaagctgactcattatccataaattctttgagtcaattggtttaaaatttacaaaagggggggggggactttgggggacatattttttcatgggtgcccatggctctgggtggggggggtactccccaaaaattttgtgataaagtgttcacctgaccttttgataggagccaataatagccggtgcaggggattcacatttacccaaggacaatcctgccagggaaacccttccctcctttggcatgaatccccgcccctgggttgacatggagcccctctggttcgggggcacccccgggaataaaaacccgcctatttgcttaagtatgaaagacccctcctttccacttttgtttttagaaggaaaactattactaaggggggggggg

SEQ ID NO: 41166 - DNA, 415 bp, Glycine max
  Clone ID: PAT_MRT3847_137174C.1
gggaagaaaaaaaaaaactttattttgagttgaaaaaaaaatttttttttttttttttggggggggaaaaaaaaaaaaaatttaagggcccaaaacaaaaacaagatttttaaggaaaatggaggttttttttttttaaataaaacccaaccctcttgttaaagatattcacggggacaaatcccaagttttagttaaagattcttgccccccccacttaaaaaaaactaacacttcagccccaccaccagtgaaaaaaaccggggtttttctttaaaaataacaattccccttgcggagggccaactttttgtgtgggaaaggtcccttttgctattaacaaagaagggggggcggggcaaaaaaatttttttctggtcgggaaccccaaaaaggtttttttttgggggggggg

SEQ ID NO: 41167 - DNA, 513 bp, Glycine max
  unsure (1)..(513): unsure at all n locations
  Clone ID: PAT_MRT3847_137175C.1
ggcatattgtgaaggcattggggccaaataagacccttactagtgatgccaagaaaattctggcagatcttggcactagattgtcctccatgtccatacctagtgagaaggatgaggggaaacaagggcagggggaggatggtggtgatgatcatgatggcagtgatgatcttcatgatgattatgatgatgatgagggtgttagtgctattgaagaaaggcttaatgtgattcaggagaagattatgagatgggaggaagatcagtccatgatttgggatttagggcctatggaagcatctgagtatcttaatgctgctaatgaagcccgccggttgattgagaagttggaaagtttgcatttgaagaaagaggatcaagagtacaagtgtatgcagagggcttatagtgttcttcaaacagctatggcgcggcttgaagaaaaattcaagaacttgcttatccagaacaggcaacgttntgagcctgagtatgtctcttttcgctccaatg

SEQ ID NO: 41168 - DNA, 722 bp, Glycine max
  unsure (1)..(722): unsure at all n locations
  Clone ID: PAT_MRT3847_137176C.1
cggttgatggtgtcggtatagtagcgctagcaatcgtctttgcagcagtggatcgtgaatgaagattctcttgtttctttagagattcgagcaatgaaattcaactctgaaggtgatcatatatatgtttttggtgtaacgcaactgtcgtagatttcaccgtctcttgcttgtaaagtcatcgatcaacacttgtttctcaccaatctctgcatataactcaattccttgaatcttctgcaagagaggttaaagaaagttgcatttagtggagcaaattgatggaatgcctttacggttttgcatcttctatttcaagagatttagtgtgcggagcaataaatcaattacgttatccttgttattttaacaatttgattgaagagcttgagaaagaagagggcaatttgattgtaacgagaaatgatgtccaaaaatttgttgcacatgccaataaccaaacgagaacgactgctgaagttgttaaccactggctacaggatgctgagaatgacatagacaatgtgaatcagttgctgaaagaggcagaacaaaaaaaagttgttgttttgggcactctccaaattggatttggcgatactgtgtaggaaaggagntagcaaattaaactagggaccttgaaaagcgcattcaaagaggtagaccatatattcaaattgaacgcaatactacacttccttctagcacacttgatattctct

SEQ ID NO: 41169 - DNA, 1023 bp, Glycine max
  unsure (1)..(1023): unsure at all n locations
  Clone ID: PAT_MRT3847_137177C.1
cactttctcatccttcaatgtattcgattagaaagatgattgaaacagtactgttatggccttgtctgaacgctgattcagtttctaaagcacaacatgggtgccgtgattgtctagcattgatgatatgtgctgagctacaagctaggaatcaataaacaattccattccagacacagtaagggctcttgggaagaaagggaattccgttgtcacctatgtgatcaatcagttctttaataacaagaatgaacaaacttcaactccagagtttggggatgaaaactcagaatttgttgctgctgtttctctttctttttgtctgtgtatgggtaatgttctcattagcacttgccagaagatatcagaatcttgcaagaagccctttgcagcacaagttattccttttctccttcattctcttgagtttgaaacgaagtcagagattagagcagcatgcacccaggtcctattttctgccgtctatcatctaagatctgcagttcttccttatgcatctgaccttctcagaatggcactaaaagccctgaggaaggagtcagacaaggaaaggatggcaggtgcaaagctaatagcatcacttatggccagtgaagatatgattttggaaaacatatcagttggactattacaagcaaggtctgtactctcaaccatatcttcgtcagatccttcacctgagttacaacagctatgctgcaagttgctagcatgcatatcttctccgtgagttgcaacaaacttttttgcaagtttattacaaaagatctcatttagctgaggtatcactcttctcccccnaaaaagaaanatgttcagtgtacatagttcactnnngtatggcaantaggaaattttgagataggtttcantgcaacngaatagtcataggaagtagcattcccagatcaggggaacaatagctgttatacagccaagcaaaccagggaaaaaaaaaaaaaggaaaaaggcggccgctctaagaatcaagctacgacgcgg

SEQ ID NO: 41170 - DNA, 340 bp, Glycine max
  Clone ID: PAT_MRT3847_137178C.1
cccacgcgtccgggatcgcgagcgtccgtccttttttgcttctattgaatacttgggatcttggggcattttttatcgtgtgctaggaaaatggggtcacttggatagaggagctggacattttgaattataaacacaaggaaatatgaaattgaggcagttatgggatccaacatacctatatggttaattaaggacccatcatttatgtccaaaggaggttagcagctttgaaactgttgatcttactcctaaagctggaacatcctggtgtcatagcttataatgccttgtctttttaagaaaccaatgtttgatatttagcatgggtcttttataa

SEQ ID NO: 41171 - DNA, 250 bp, Glycine max
  Clone ID: PAT_MRT3847_137179C.1
aaaaagtttgctgcgccctgatttccatgtctcggcccaaaattgttgggtccgcaaaggtggtgctaatatgggagaggtaagtgctgaaatgctggtaaatttgggaatcctcttgggtattattggtcacctgaacggaggcagtttttgaatgaatcaatgagtttgtgggagataagttgctatgcacttcaacaggtctgaagttatagctgcatggggaactcttgaacacgtaacggtacac

SEQ ID NO: 41172 - DNA, 1796 bp, Glycine max
  Clone ID: PAT_MRT3847_13717C.1
gtttcccaagagcttcctgaagtttcagacaaaaaccttcctaaaaccaagcgagttgcatcccttgacatctttcgcggtctcactgttgcgccaaagagtcataactggtggtaaaactgctattggcctggatttacatgtctgatatcgttaatatcagcatgtctctatatctgatgaattaatgatcttggttgctgatctttgattgtgttggctatggagtggtcatgtaccattgatcggccgtctatatgatgattgttacttggggtttaacattcttgttcttgcctttgaaatggattggcatgaatgccatgcttgtttatgtcatggcagctgagggaatcttcgaaggattcatttaagactcctcttctggggtttgctattgcaaggtggtttctctcatgctccggacaatctaacatatggagttgacatgaaacacataaggtggtgtggcattcttcagagaattgctctagcatatttggttgtagcactggtggagatattttcaagaagtacacaggctcgagatccagaacccacccacctctcaatattcaacttgtactattggcattggctggttggggcatgtatacttgtcgtttacttagctttactttatggaattcatgttccagactggggattcactgtccataacccagacagcatatacaatggcacaactttaactgtgacttgtggtgttagagggaaacttgatcccccttgtaatgctgtgggatatattgaccgagaggtgcttggaattaatcacatgtataagcgtccagcatggaggagatctgaagcttgcaccgagaattccccatatgaaggtccttttaaaaaaaatgctccttcatggtgttatgcgccttttgagccagaaggcattttaagttcaatatctgctatcctctccacaatcattggattgcattttggacatgtactcatacacttacaggatcatccttccaggttgaagcactggcttctcctaggcttagctctccttacttcaggacttattcttcacttcactcatgccattcctttgaataaacaattgtacacgctgagctatgtttgtgtaacatctggagcagcagcattacttttttcagccttctatattatggttgatatttggggtttgacattcttgttcttgcctttgaaatggattggcatgaatgccatgcttgtttatgtcatggcagctgagggaatctttgctggattcattaatgggtggtattatggtgaccctcataacacgctgatctattggatccaaaaacatgtcttcattaaggtttggcattcaacgagagtaggcatcctgttgtatgtgatcttggcggagatcctattctgggctgttgttgcaggcattttgcaccgtttgggcatatattggaaactttgaattttttttaaaaaccatctcttgtcattattattaattttttaagtgtgtatccgttctgttgctgtatattcaacttggcgaatggctgcagagccatttcggttagcaaaataggttgttgttgttatgggtatcattcgctaaaaaatgtaaaggacaaagacataaactagcttgacaaaagttaagtgcagttccccatgatcctttcatataattttcattagtccttaacccgtcacatagtcatgcagcgtcaccatcctttcaagtgaacactgaagaacttccctttctagtcaatattatgtaatcctttaaatgagaaaaaaaaaaa

SEQ ID NO: 41173 - DNA, 748 bp, Glycine max
  Clone ID: PAT_MRT3847_137180C.1
caaaaagccaccagaaggggacaacttcagacaatccataccccaaagaccaagccaagcttaacccttaatttaaaaaatggaacaaccttcttcaatggttccctcatcccaatccttggctggaaaggccttaaacctgggcccatcaccccaaaaattggaaagggtgagcatgaggaagaccgtcaccaagcaggtctcctcaggaagcccatggtacggcccagaccgagtcaagtacttgggcccattctctggcgagcccccgtcctacctaaccggtgagttcccaggcgactacggctgggacactgctgggctttccgcagacccagaaaccttcgccaagaaccgtgaactcgaagtgatccactccacgtgggccatgctcggagccttgggctgcgtcttcccggagttgctgtcccgcaacggggtgaagttcggagaagccgtgtggttcaaggccgggtcccagatcttcagcgagggtgagctcgactacttgggcaacccaagcctgagtcacgcgcagagcatcctcgccatcttggccactcaagttatcctaatgggtgccttgggcggttaccggattgctgtggctccttcgggagtgcactgacctaatttactcaggtggcatttaggaaccattgggcttggctgtgacgcagaggctctggctgagctgtaggtgaatgaactgagtaggtggagatgggcagagtaatgtatgtatggt

SEQ ID NO: 41174 - DNA, 467 bp, Glycine max
  unsure (1)..(467): unsure at all n locations
  Clone ID: PAT_MRT3847_137181C.1
cctccttttttttttttaatcaaaaataaagtcaaatttattatttgctcataatcgcacacatgagggcaatttacggtttcccacaaccagcccatttaacaaggcttggagaaagggctttaaggactggatgatctctcaaagaaattggttggcctcaattacaatccggagctcaacagaggcattattggaaaatcctcctgggatgaaacatgctggattcccactaacgaccacagcacagtatccctgctttcaatacccctattgtggttagatcatactgccacagctttatatccatgactgtgagcaccataaagcccaccagcccacttgtcagtcttattgcaaggtgtaacccatgcattgtaagtggcgaaagccccacgtgtttgagggaaatcatactctctgagatggggatgagatgctgnatttggaaccaaaccgaaccctac

SEQ ID NO: 41175 - DNA, 666 bp, Glycine max
  unsure (1)..(666): unsure at all n locations
  Clone ID: PAT_MRT3847_137182C.1
agcaaaacactcataatacaaagcacaaagcaaagctcatccttgagttaaaaaatggcagcagcttcttccatggctctctcatccccatccttggctggcaaggccgtgaagctgggcccatcagccccagaagtgggaagggtgagcatgaggaagaccgtcaccaagcaggtctcctcaggaagcccatggtacggcccaaaccgagtcaagtacttgggcccattctctggcgagcccccgtcctacctaaccggtgagttcccaggcgactacggctgggacactgctgggctttccgcagacccagaaaccttcaccaagaaccgtgaactcgaagtgatccactccaggtgggccatgctcggagccttgggctgcgtcttccctgagttgctgtcccgcaacggggtgaagttcagagaaaccgtgtggttcaaggccaggtcccaaatcttcagcaaaggtgggctcaactacttagacaacccaatcctgatccacacccatatcatcctcaccatctaggccacacaaattatcctaataaataccagtaaaagttaccgtattactagtatccccctcgataaagtcactaacccaatctaccccaatgacaactgcgacccattagacgctactaatgacccanaagctttt

SEQ ID NO: 41176 - DNA, 993 bp, Glycine max
  Clone ID: PAT_MRT3847_137183C.1
tctcatctcccataccttggctggcaaggccgtgaaactgggcccatcagccccagaagtgggaagggtgagcgtgacgaagaccgtcaccaagcaggtctcctcagggaagcccatggtaccggcccagaaccgagtcaagtacttgggcccattctctggcgagcccccgtcctacctaaccggtgagttcccaggcgactacggctgggacactgctgggctttccgcagacccagaaaccttcgccaagaaccgtgaaactcgaagtgatccactcccaggtgggcccatgctcggagccttgggctgcgtcttcccggagttgctgtcccgcaacggggtgaagttcggagaagccgtgtggttcaaggccgggtcccagatcttcagcgagggtgggctcgactacttgggcaacccaagcctgatccacgcccagagcatcctcgccatctgggccacacaagttatcctaatgggtgccgttgaaggttaccgtattgctggtggccccctcggtgaggtcactgacccaatctacccaggtggcagcttcgacccattgggccttgctgatgacccagaggcttttgctgagcttaaggtgaaggaactcaagaacggacgattggccatgttctctatgtttggcttctttgttcaggccattgtcaccggaaagggtccattggagaacctcgccgatcaccttgctgaccctgtcaacaacaacgcctgggcctatgccaccaacttcgtccccggaaagtgagcgtcaaagaacgaaatgacttttgagagtttttagatttgtgtttggtgaagtacttcagataatgtgaattatcttgtgtatccgaatccaacttaatgttacttgctttttacaaaactcaagtgtcaatttgttctctcattttatacttctaagcttttgacgccacattgaatttgaactctaattgaactaaaaaatgtttcccttcaaaa

SEQ ID NO: 41177 - DNA, 1046 bp, Glycine max
  Clone ID: PAT_MRT3847_137184C.1
ctccataacacaaggcagaaagcaagctcatcctagagttttaaaaatggcagcagcctcctccatggctctctcttccccatccttggctggcaaggccgtgaagctgggcccatcagcccccgaagtcgggagggtcagcatgaggaagaccgtcaccaagcaggcctcctccggaagcccatggtacggcccagaccgcgtcaagtacttgggcccattctctggcgagcccccgtcctacctcactggcgagttcccaggtgactacggctgggacactgctgggctttcggccgacccagaaaccttcgccagaaaccgtgagctcgaagtgatccactccaggtgggccatgctcggggccttgggctgcgtcttccccgaactgttgtcccgcaacggggtcaagtttggagaagctgtgtggttcaaggccgggtcccagatcttcagcgagggtgggctggactacttgggcaacccaagccttgtccacgcccagagcatcctcgccatctgggccacccaagttatcctaatgggtgctgttgagggttatcgtattgctggtgggcccctcggtgaggtcactgacccaatctaccctggtggcagctttgacccattgggccttgctgatgacccagaggcttttgctgagcttaaggtgaaggaactcaagaacgggagattggccatgttctctatgtttgggttctttgttcaggccattgtcaccggtaagggtccattggagaaccttgctgatcaccttgcggacccagtcaacaacaatgcctgggcctacgccaccaacttcgtccccggcaagtgagcatgaaagaaaaggatgaattgtggacttttgagagtttttagatttgtgtttggtgaagtatatgttattgcaatgtacttcagataatgtgaattatcttgtgtatcccaatccaacttaatgttacttgctttttacgaaaactcaagtgtcaatttgttctctcattttacacttctatgcttatgacaccaaattgaactct

SEQ ID NO: 41178 - DNA, 1498 bp, Glycine max
  Clone ID: PAT_MRT3847_137185C.1
gccacctgatccacttacaaaccatattttagccatgccaacatgaacacgaaaatgttctcttcttcctcttcaatgtctatagcaagaccccatttggtatgaattatgaccatggctttaagttcactttttttctccactcgtttcattcccacaccctttgttacttccactagaaacataccttcttctccacgcacttgtgccagttgcattccccacaaaagagactttccactccctgcagtggcttcagtcccttaccaacccatcaactttgactacctgcaagaggaattcagtggacatggagtcacctttgaaggagttgaagacagttgtattgccaagatggagctgaaaaatggaagcattgtgaccatgatgctgccaagtggattgatcacctcatacaaggcccctatgtggcatggtggcaagttggagttgcttcataccaatgtgtcagagggagagtatggtgatgccatcattcaaggaggggtgtctctaaacttcaattttcaaactgatgatggtgaattttcttggtctccaactaattgggttctgcataagattcaaggcaatgctaatgaatctattcaggtagaattaacaaacagaacatcagatgacaagattggattaaaatacattgtgactttggaaaaagatgccttaaactcggaggttgaaatctcgaacaaaaagtctttacccgttcagatgacagggtccatcctaagtcatctcacagtaagctcaccagaagcaacttatgcactaggattagaaagatcaaattactgtagcaagcccttgtttgaatctgaatttatgttgagtcctccagatggccaggaagaaggctttggaaaaatagttgagcaactttttcctcaatggggtacaaaagatcagaataatggatcagaaggtagccagagtgaagaaatggatgaagaaatagacaactacaagcagttaagtgagaaactaagtcacgtgtacacagatgtgcctcgaaattttacagtgattgacaggggtagaagaaattcagtgtcagttggaagaactggatttgatgaaatgtacctcttcagtcctggctcaagggttgaaatttacagcaagtattcttacatatgtgttggccaagctgccatcctcaaaccaataatactaagtcctgaagatgtatggagaggtgggcagtatatacacaatccaaatcttgatgcgtaagcttgcctttgcgattgtcttaggcaaattaatagaatagaaaaaggcacaatgtgtaaaatttaggtgtccttttgaaactttatttttggtgatttggataaaagataagagcatagcaacagcaagttgatgaaaataaaaaaaggacaacatttatatattattttctgttaacagtttgacaaatgtaccaaatattcaagtagtaaagactcaaaagttcgagtgtcgatttccacag

SEQ ID NO: 41179 - DNA, 958 bp, Glycine max
  unsure (1)..(958): unsure at all n locations
  Clone ID: PAT_MRT3847_137186C.1
cacggatgccagaagacgaccgaggggactcaccacttgaaaacactcataacacagagcacaaagcaaagctcatccttgagttaaaaaatggcagcagcttcttccatggctctctcatccccatccttggctggcaaggccgtgaagctgggcccatcagccccagaagtgggaagggtgagcatgaggaagaccgtcaccaagcaggtctcctcaagaagcccatggtacggcccagaccgagtcaagtacttgggcccattctctggcgagcccccgtcctacctaaccggtgagttcccaggcgactacggctgggacactgctgggctttccgcagacccagaaaccttcgccaagaaccgtgaactcgaagtgatccactccaggtgggccatgctcggagccttgggctgcgtcttcccggagttgctgtcccgcatcggggtgaagttcggagaagccgtgtggttcaagggccgggtcccagatcttcagcgagggtgggctcgactacttgggcaacccaagcctgatccacgcccagagcatcctcgcgcatctgggccacacaagttattcctaatgggtgccgttgaaggttaccgtatttgctggtggcccccctcgggtgaggtcactgaccccaatctacgccaggtggcagcttcgaccccattgggccttgctgatgaccgcataggcttttgctgagcttaaggtgaaggaactcaaaaacggacgattggccatgttctctatggtttggcttctttggttcacgccattgtcacccggaaaagggtccanttgggagaacctttgccgatcaccttgctgactctgtcaacaacnaacggccttggggcctattgcccaccaaactttggttcccccnggaaaaggtggaaccgtcaaaagaaaccgaaaatggccttttttgagaagtttttta

SEQ ID NO: 41180 - DNA, 257 bp, Glycine max
  unsure (1)..(257): unsure at all n locations
  Clone ID: PAT_MRT3847_137187C.1
ttagatacttcatctnctgcaaagancttccagtggtgttgnatgccttcattcacggtgatanaaacttgttcaaggactacccanaattacaggaagctttggtttgggtttactttcactcaaatatttcaaaattcancaaggtagaatgttggggtccactgaaanatgtgtgtgcatactcaagtgggtgccatgaggagggtaagcaaggtgatattccagttagcgacagcacgcatatcaatatgtcg

SEQ ID NO: 41181 - DNA, 575 bp, Glycine max
  Clone ID: PAT_MRT3847_137188C.1
gagccaaaaaaaaaagcttttaaaaaaaggggaaaattttaacccccccaaacggaaggggggcgtctccccctggaaaaaaaggagggaaaaattaccagtttttttacttgggccctttttggaaaaaacccaaaaaaaaaaaaaaagaggttttccgggggcttcaaaaaaaaaaaggggaaagggaaaaaaacaaaaaaatcaggggggtttttttttggggggaaagggggggacccaaaattttacaaggcccggaattacaacccaatggtttaaaaaaagccctggaacgggggcaggtttttgaaaaaaacctttgggaactggagcgaaacaagctttttaaaaaaagaaaagttgacaatttgggcaaacttcccaggggggcaactaaaaatcccttaaaagaggccaacccttttaaaaaaaaagggggatctgggcaaaaattgggtttgggaaattggggggggaaagcccggccacaaatccatttaattttggggccggggtaaacccttaagggtcctgggggggagggccccaattaactgaaaaagggggggttt

SEQ ID NO: 41182 - DNA, 195 bp, Glycine max
  Clone ID: PAT_MRT3847_137189C.1
cactccccctgtagcggcacataaagcgcggggggtggcggggccacgcgcagggagaccgatacacttgacagggccatagcccccgccccttacgctttctcccgtccctttcgcgacacgtgcgccggttacccccgtcaatctataaaccgggggccccctagagggccccgattaagcgctaaacggccc

SEQ ID NO: 41183 - DNA, 1624 bp, Glycine max
  Clone ID: PAT_MRT3847_13718C.1
agagcttccactttcagacaaaaaccttcccaaaacaaagcgtgttgcatcccttgacatctttcgtggtctcactgttgcgttaatgatcttggttgatgatgctggagggcaatggccaatgattggtcatgcgccatggaatggctgcaaccttgctgattttgtcatgcctttctttctgttcattgtggggatggccattccacttgctctcaagagaataccaaatagacttctagctgtaaaaaaggtgatagttagaacactcaaactcctcttctggggtttgctattgcaaggtggtttctctcatgctccggacaatctaacatatggagttgacatgaaacatataaggtggtgtggcattcttcagagaattgctctagcatatttggttgtagcactggtggagatattttcaagaagtgcacaggctagagatccagaacccacccacctctcaatattcaagttgtactattggcattggctaggctcggcatgcatacttgctgtttacttagctttactttatggaattcatgttccagactggggattcactgtccataacccagacagcatatacaatggcacaactttaactgtgacttgtggtgtcagagggaaacttgatcccccttgtaatgctgtgggatatattgaccgagaggtgcttggaattaatcacatgtataagcgtccagcatggaggagatctgaagtgtgttgctattttctcccggacattatttcctacgataagaaacacttactctatggctatagaaaatttgaaacactaatttcctttaagtgctgcaggctagcaccgagaattccccatatgaaggtccttttaaaaaaaatgctccttcatggtgttatgcgcccttatgagccagaaaggcattttaagttcaatatctgctattctctccacaatcattggattgcattttgacatgtactgatacacttacaggatcatccttccaggttgaagcactggcttctcctaggcttagctctccttacttcaggacttattcttcacttcactcatgccattcctttgaataaacaattgtacacgctgagctatgtttgtgtaacatctggagcagcagcattacttttttcagccttctatattatggttgatatttggggtttaacattcttgttcttgcctttgaaatggattggcatgaatgccatgcttgtttatgtcatggcagctgagggaatcttcgcaggattcattaatgggtggtattatggtgaccctcataacacgctggtctattggatccagaaacatgtcttcattaaggtttggcattcaacgagagtaggcatcctgctatatgtgatctttgcggagatcctattctgggccgtcgttgcaggcattttgcaccgattgggcatatattggaagctttgaatttttttttaaaaatatttgcattaatttttactgtgtatccgtgctgttgctctatattcaatttggggaatgactgaatagccatttcgcttatcaaaatagtttgttgttattataagtatcattcaactaaaaaatgtgaaggataaagacatatactatcct

SEQ ID NO: 41184 - DNA, 425 bp, Glycine max
  Clone ID: PAT_MRT3847_137190C.1
gggaaggtcaccatctgttattgtcattggtggtggcatggctgggattgctgctgctcgttcgctccatgatgcttcgttacaggttatttatgggtttgttgaatagaagcttgtaatgttctggacttctagggaagtgtcctgggtgatgctagtcagtttagaattcagctggttttgtactcacatttgggtgaataagattctacaaaacgcatgaaagcagcaaatgatcattggggtcacatcttttttttatgaacctgtcagaaattcgtgagtttgcgcaaataatgcacatcatgaagtggcaaaataacttaataactttcaaggattgtggtgttgtgtgctgcttaattgtaaacttgaacttacatggcctcaattattaaatggtgcctatgttttaatttttggtc

SEQ ID NO: 41185 - DNA, 251 bp, Glycine max
  unsure (1)..(251): unsure at all n locations
  Clone ID: PAT_MRT3847_137191C.1
cccaaaccctcgtcactctcantctcaacncgtctattcctcttccctctctcccatgccatcntccctccctccacccncntcgccggaatccngtgccgtgtcaaccnctccggcnactcatcatactcnccnctgaactcagcttcgtnatcgncntcgtcgttcagcnaccngcctccttcgtanatggcgccgctctttcccggctgctactacaaccactngctcatcgtcatggaccatcccgt

SEQ ID NO: 41186 - DNA, 229 bp, Glycine max
  Clone ID: PAT_MRT3847_137192C.1
cccacgcgtccggaggaaatagacttgaacactgacttcatttttgagcaaagatttaagagggcctattctgcaggagacattacttttgaacaactcgtaacatatagcagaaagcttgattatacagagattacaagaaatgatctgcgttgtgcagtatcagtgacactcctttccgaatatatagaccagaaccagaaccatattttgtgcttacagggaagaa

SEQ ID NO: 41187 - DNA, 1837 bp, Glycine max
  Clone ID: PAT_MRT3847_137193C.1
tacggctgcgagaagacgacagaagggggtgatagaaaaaggaggagcagatgagcagcaactcaggaaaagtggtttgtgtgactggtgcttctggtttcattgcttcattgaacatcaaacagcttctccaacgttagttctctgtcattgaggtatttttgtttgatgatgctctgggaaaggtttatcacttgctcaaacttgatggtgcaaaggagaggctacatctctttaaggcagatctgttgggagtaggttcctttgactctgcttttgagggttgtgatggtgtctttcatactgcttcacccgttcatttcattgttactgaaccacagattcaatttaattgatcgagggaacgcagaccgaggcgtttccagttcgaaagggaaatgaaagtgtctttgttggtgaagggtaggtgagagaaacgaaaggggtgtgtgttgggttgaataggtatagataggatcaatgagcaacaacaacgcaggaaaggtggtgtgtgtgacgggtgcttctggtttcatagcttcatggatcgtcaaattccttctccaacgtggttacactgtcagggccaccgttcgctacccaagtaatctgaaaaaggtagatcacttggttaaacttgagggcgcaaaagagaggttgcagctgtttaaggcagatctgttggaagaaggttcctttgactctgttgtggaaggctgtcatggtgtttttcatactgcttcacctgtccgttttgttgtcaacgacccacaggctgaattgcttgatcctgcagtgaagggaactcttaatgttctcaaatcatgtgcaaaatcaccatctgtcaaacgggttgttttaacttcttctatttctgcagttgcatttaatcgaagacctaaaactcctcaagtggtagttgatgagacatggttttcagatccagatgtctgtagggaattagagttgtggtacacactttcaaagactttggctgaggatgctgcctggaaatttgtaaatgaaaacagcattgacatgatttctattaacccaactatggtggcaggacctctcttacaaccagagattaatgaaagtgttgagccaattttaaacctaataaatggtaaaccatttccaaataaatcttttggatgggtcgatgtgaaagatgttgctaatgctcatattctggcctatgaaattgcttcagctagtggaagatattgtttggttgagagagtcatacactactctgaacttgctacgattttacgtggtctgtaccccacattacaaattccagataagtgtgaggtagatgagccgtatatcccaacataccagatttccacagaaaaggcaaaaaaggacttgggaatagagtttactcctttggaagtgagtctcagggagactgtggaaagctttagagaaaagaagattgtcaactttaatccgtgatctatcctaaataaataaatgtcgatgatctcaaccacgttcaatttgtgactatgataaatgtcaggcttcagaaggaattatcactgtaaaatatggattgcaaacaggttaacattgtttgatgaaggaccgaatataaaaggataaattgtatataaattcctgaactttgggcgaattatgctttgtccttttttatgaatttcaactgtacaatgttcgagtacaaacctctcgtgatttctaaccccgatctccttcgatttattcattgaagaaagttaatgtacgatagggaaaaaataaagatatcaaatgtaacattactcgagtttttttgggtgttgagggtgtatttttgggagaa

SEQ ID NO: 41188 - DNA, 353 bp, Glycine max
  Clone ID: PAT_MRT3847_137194C.1
gacaaacgtgctcttttgcatcgtcctacggttactaatgttagcatgcgtaattatgaaggggcggaggtgctaaccactattgacggagactagaatccacactttaagaaacctctcggcatcaatgaaaagtattctcaggaaaggaaaactttccaaggaactatatcatagtcaggagtaactcctgaatctaaacctttccataaaattgaaactgctcctcatataaataattgccaattagagaagatagtgcaactaccatacgcagaaaacaatcactaggactctagatgtcacacaatcagtgcatcagtgaccaatgctccaaacgtagccattttaaa

SEQ ID NO: 41189 - DNA, 361 bp, Glycine max
  Clone ID: PAT_MRT3847_137195C.1
gaatatgaacttgtttgttatctgtgttgctgaaggaggtctggtagcatggtcatgccaagactcaggctaccaaaggtcccctctaccaaggaaaactggctatggagatcgtgcttctcaggtaaaatgctcaagtcttaggctagctgtagaagctcacagtatacgagcctataatactattcgctgagagcgcgatcaactaacaaaggactacatcattggcgaacatattatatcagactatcaaacagatgaccaacaagctttcttttatgctagtgaacgcgaagtccatcacaacgacatatttatattcggactaaataacatcgtgctctgtaatatcacatactat

SEQ ID NO: 41190 - DNA, 470 bp, Glycine max
  unsure (1)..(470): unsure at all n locations
  Clone ID: PAT_MRT3847_137196C.1
gggcattaaaaatggaaaattttagttcaagttacatttattactgggttctactaccctttttttttgttatcacaattctcctttcaacttgcatggtgtggctccatagtaaagttccttcctggattcaagggaccccttccttttgtacttgaaaccgggtcagttacacttagctagtaactgtaaggctatagtttatgggattaaaatcattaatttgcttgaatatcatagacatgttatgttacataacatttgttggataggtatgtgggagtgggtgaatcagaggatgtgcaggcattctactacttcattgagtcagagaacaatcccaagaaagatcctctcatgctttggctcactggtggccctggttgctcagccttatctggacttgtgtttgaaataagaccacttacattcaaatatgangaatacaatgngagcctgcccaatttgtc

SEQ ID NO: 41191 - DNA, 1797 bp, Glycine max
  Clone ID: PAT_MRT3847_137197C.1
aggttggccgttgaaatgggtcgtttagtttcggagggttacgtgctcaccgttttggccccaaacgacgaagcgatggcgaagttgacaacggagcaattaagcgaaccgggggcgccggagcagataatgtactatcacataataccggagtaccagaccgaagagagcatgtacaatgcggttagaaggttcgggaaggttcgctacgataccctacggttgccgcataaggtggtggcgcaagaagctgatgggtccgttaaattcgggcacggggacgggtcggcttatttgttcgacccggatatttacaccgatggacggatctcggttcaggggattgatggggttttgtttccgacggtggaggtggagggggcggagcgggttagaccggttacccggaccggtcagaacggtgcgaaagttgttgtcaagcacaggagaggaaaattactggaaacagcatgctggatgcttggaacttttggacagcattctagattcgcctcttgtcaatgaagaagcccacgtttttgttgctagcaagatttctcaaagcaatgaaatccaatggaaatctcttcgatgtaaaaagtctaaagtgaaggccatctttgcttgaatgggatgtagccagctgctatgggtgtgattttcccacatttttgttttgcgctttttttgtccattattttgttttgtgcatttgggtccaaagcttctagtctacttgtcataccatatagtgcatatatgtacttagattcagttacctactgctactactccaatttcataggtggttgtgttgctgggattggaaggttttctgtaaccaaacggggaatctttctgttagacatgtgcccattcaataaataattttacggaagaaatggaaatacaataataaaatgattctttactataaaaaaaaaaaaaaaaaaaaaaaaaaaaaaaaaaaaaaaaaaaaaaaaaaaaaaaagggcggaacgtcgttggacattgaaatgggtcgtttagtctcagagggttacgtgctcaccgttttggcaccaaacgaccaagcgatggcgaagttgacgacggagcagttaagcgaaccgggggcaccggagcatataatgtactatcacataatcccagagtaccaaaccgaagagagtatgtacaatgccgttagaaggttaggaaaggttcgatacgataccctacagttgccgcataaggtggttgctcaagaagctgatgggtccgtttaattcgggcacggggacggggcggcttatttgttcgacccggatatttgcacagacgggcggatctcggttcaggggatcgatggcgcgttgttgccggcggcggaggaggatgcggagcgggttagacccgttacccaaacgggtcagaacgctacgaagcttgttgtcaagcacaggagaggaaaattgctggaaacagcatgctggatgcttggaacctttggacagcattctagattcgcctcttgtcaatgaagaagcccacgtttttgttgctagcaagatttctcaaaacaatgaaatccaatggatatctcttcgatgtaaaaagtcaaaagaaaaggccatcttgcttgaatgggatgtagccagctgctatgggcgtgattttcccacatttttgttttgctcttttttttttttttgtccattattgtcttttgcgcatttgggtcaaaagcttttctagtctacttgtcataccatataatgcatatatgtgcttagattcagttactacttctactcc

SEQ ID NO: 41192 - DNA, 116 bp, Glycine max
  Clone ID: PAT_MRT3847_137198C.1
gggaaggctctgacgaggagtactgcagcatcgaccccaagttgaccagctgcgccaccaatgctagcatctgtggggacgaggcacgctgcgtgcgcaccgagaaagcggcctac

SEQ ID NO: 41193 - DNA, 368 bp, Glycine max
  Clone ID: PAT_MRT3847_137199C.1
acatatgcttattaaactatgtcggtgtatgtggacctagcttgctgttttgtcttgccctctcgctttggcaatttctgtttcgttcgctccaatgatatcaaaattacgtgccacgcatcatgagagggatgctcatatggcatcattatgaatataaatacaggccaagtaggccgcagctcactccttccttcatcttcttgcaggtcttctcctctaggggacccaacacttacctactcttgcagtgcgacacatacatgttctatgctgtcaactaaatgaacatgactgcccagctatttacaccgcaccgcatggtgacaccctggaccaacacaactaaagggcgttgcacaacatcc

SEQ ID NO: 41194 - DNA, 522 bp, Glycine max
  Clone ID: PAT_MRT3847_13719C.1
ttcgggtcgagattcattgctaactttcattataacttaatttgtgccaaaaatggtcaaatccttaatacttgcagtactgtttgcactttcacttcgcgttgacagtgacgtgtcaaaagagattcaactgagcaatggtcgtaaaatgccaattataggattggggacatgctgtggcattagttcgtctacgatgtaccgtatggttaaggacgccattgaaattgggtatcgacatattgacacagcatatatctatcacattgagatggaagtgggacaagcagttaatgagtttattactaatggcacacttaagagagaagatatttttatcactactaaagtatggaatactttccactctcgagggaaggctgtggaagcggtgaaaacgtcacttaagaaactgaacttgaaatacattgacttaattctcattcattggccaatgggatatgctgagggaactgatgacaatcctaggaatacaaacggcgatgcaattgactcaggagt

SEQ ID NO: 41195 - DNA, 520 bp, Glycine max
  Clone ID: PAT_MRT3847_1371C.1
ggaccggtccgaattcccggtcgaccacgcgtccgtttcattgggtttcgaattttcctctgtttccctcttagactctctctctgctttggttttctcagatttttccaagttcgcggctcttccaggttgaatttgtttcttcgtaggttctgttgcagtgagaaatgggcactttctccttttgattttcccgtcgaatcaagcatcaaaatccgagctttttcttttttgcaagtggtttttttgatttggggtagatttttttctttctttttttgggcttcgtagtgcattgaattggcgcggcattcacttgaatttgcaacgtgggagccggagctgcgatgaagtgtggtgcttggagggtattctcaaagtagcacttaattcgaggttgaatgtttggtcagagcatggattctgcaagggatgctgcgggtggtgtggcagggacagtgctaattcccatgcgttttgtgtggccatatggaggaaggagtgtgtttcttagtggttc

SEQ ID NO: 41196 - DNA, 158 bp, Glycine max
  Clone ID: PAT_MRT3847_137200C.1
ttgtttagtagagggagagcacgggatcgaatcctagattgttacctcaaagcttctcccttaatcatacaacatatgcttatactctcggctttttgataggaaatgatagaaatggaacccgataacgaaacactggatcagatagcagagagata

SEQ ID NO: 41197 - DNA, 529 bp, Glycine max
  Clone ID: PAT_MRT3847_137201C.1
cccgcgtccggcgaatccaataaaggctaccagtgctaaaggattcatggcaccaacgaagaaacctagaactacgacgaataagcggttttcaagtttaagtgaggtctctcccaagaaagatgaagtcggctcaagtaaaaataagcaacggaagaaaaatatgtttgataaattaggaccaaaatggataggcgaagaactagagcagttttatgaagcgtacaggaagcactggaaagactagacgaaggtggctgaaaatgtatctagcagatctgttgaaatggtgaaggctcttcacagtatcagtcaggtacattaatactacagtagcatagtctgtagctatatggtatgaaacttatcaatatgtactgtctttatttcagaatttcagtcctatttttgtatgtattcatttttttaaccttggctgatttgtctgaaatttagattttcttttattgaaactgattaattgatgtttggattattcctttgggttctcaaacttttgttgagactg

SEQ ID NO: 41198 - DNA, 568 bp, Glycine max
  Clone ID: PAT_MRT3847_137202C.1
gcgcctcctggagccgccgcgccataattggcgggacccacgcggccgcccttgttttcgtcgacgcgtccggttggagggagattggtcctttgatcccaaagctggctgtagatgggaaaaaggtttgtctacaaaagcacaatgaagtgagtggcaagaccttaaagtgtgacataatcaggagctggttcacattcttcagaagattttggctgaaaaggaagatcacgaaaaacccaaaccgattgatgccagattgagacatagaatagatcctgaatacaatgaggatcaagctcagatggaaacaaattcgaaaaatggtctcttgatgatgcggaaactcctaaaggatccatgttggatcttaaaatttctgaatctaaaattgcacttaccaaaaacacagttggtggaaccattctgcgtagtgatctattggcacatcttttgacagagggcaattctagagcaagtgttgatttgcagcgcactcatcgcattaaaggaatgattaaaacggtggccacagttggcattcctgagcatacaggtgtagcattag

SEQ ID NO: 41199 - DNA, 214 bp, Glycine max
  unsure (1)..(214): unsure at all n locations
  Clone ID: PAT_MRT3847_137203C.1
aacaaactgaaattatagctcctctcngcgttctcgttctctcacaccacatcacatcgcagtggtgacccgcacaaacaacaaaaccctattttttctatttccacactcgctttgtctgactctcttcatcaacgccatttcgattttctccaaaattacacttccctaaccggtccactattttaagttataagatgtttttatggttcaa

SEQ ID NO: 41200 - DNA, 188 bp, Glycine max
  Clone ID: PAT_MRT3847_137204C.1
gtcattatcctagacacagataaagatgagagtactatgatgaagctgcgttccatactgtgctgggactgtaactgcatcactctgctattcggcatggcgtactgcgaaaagcacatccctcaacacaacaagtgcctactaactagcaatagcgataaagactcctacagaaaccaagcatgcca

SEQ ID NO: 41201 - DNA, 591 bp, Glycine max
  Clone ID: PAT_MRT3847_137205C.1
gattcataaatcatttaaattgctttatatgtaatattctataacacaaatgacaagttttatattccctccaacaattacaatatttttttaacatccaccattccaacatcagaattcaacactgtttaccaataaaaaaatgaattgggctcagtaatcactgaatgaagcaaaatcttccatctgctgcatacatgttgagtacttccccttgacagtgtccttcacgtacgtagtcaaatccaatttaattttgattaacttcatttatggttcttaggatagatcaatgccaccatctgtacaaagtatatatgtggatttctagcgcttcttgattgatcacactgaacccttggaccttaagcaaaagcaggattctaaaagctgaattgaattgaactgtacaactttctctttctaaaatcccatgggtcctaaacctggggtagccatgggcatggacatgggctttcttcgtggtatggacattggctctaattcattacctgaggggggcatgggcatgagacttcttcgtgcatcggtattggctctaattccttgcgctcaacgactactgcatta

SEQ ID NO: 41202 - DNA, 263 bp, Glycine max
  Clone ID: PAT_MRT3847_137206C.1
cctatggcagattcctatgacagagcactgttgtgatcaaacgaaatccctcaagtgactaggccttgtactgatcttcttgggcctactgctgcatcttcttcctatcagagtcatgggcggaggaatgggaaatgaagcaagtgatttgagtttgttctagtggagctttgaattgggtgattggcgatccatgatggactgtgttggatggaaagttaacgttgttgatgtcgggtgatgatggaatattgggtgaaaga

SEQ ID NO: 41203 - DNA, 1557 bp, Glycine max
  Clone ID: PAT_MRT3847_137207C.1
ctgaccctttggttgtcccaaaactagtttatttgattgtcacaagccaagcacctggaaattggggatctcccacgcgaccgaacgcgggcaataatgtcaagtatggggatctcaagcaagaaaatgtgcttggatgacaagcttgaaaggaaaatagctgaaatgagaagatataaatttggacaaagcaaattgaaatcagttgatagtgtagttatgctgttccctatgttcaaggagagactgaaaacattaagaggaatgtttgaacagtatgatgaggattctaacggatctatagaacccaacgaactaaaaaagttcttagaacatcttgaacttcatcttaaagagcaagagattgagcatctttttcagtactgtgatcttgatggaagcaagggcatacagttcaatgagtttatagttcttctatgcctcatccatctcctagcagaaccttcatcctctgatatttcatccaaagctgagttagcacaggttggagaaatttttaataccatagttgaggtctttgtattttttgatcaaaatggtgatggaaagcttaaccaaaaggacatggtcaggacactgaatgagactaatccaagggaaaggtcaccggcgcgtatctctaaacaccgatttcaagaaatggactgggacaagaatggacaggtcacgttcagagagttcctctttggtttcattaattggattggaattggtgatgatgaatagatacatgagaagaagttatactacagagaggagtgcctgaagttagattgtgttgaatgtgtgtgagcttgagttttctcattttttaagtttgtgtttgagaagtttatacacttgtggaattgaaaattaagtatgaaaagaaaaacataatctttgccatgcttcagcagaaagatacgttgatatatatacacttgtggaattgatttttttttttaaaaaaaatgagtacgaattgaaaaacataatttttgccatgcttcagcagaaagatacactgatacattaagcttcttttatatacaacctagtatagataacaagcagacaaaataaaaaaaaaaaaaaaaaaaaaagaagatagagctttctctattttacaaaaatttcagttcacattaggtaacttcaatggcttttacaacttcttactggattcctagagcttgaattctcttaatcattgacaaagaacaatcatttctttccctccattcttctctgctctccttggtattctggataagtaatttgtcattgccatcaaggatgcttacaatttggctcatgcttgggcttaactgcgggttacatctggtgcaagctattcctaaccttaccaatctcatcaattcttggtcattggactctccattgagtcttatatcagctaattccttcaatggcctttttctcatctcaaattcatgaaccttcttaaccaaaagcacctctggctggctgaaatccactgccatctgtccgctaacaacttcaagcaccaccacaccaaaactataaacatca

SEQ ID NO: 41204 - DNA, 394 bp, Glycine max
  Clone ID: PAT_MRT3847_137208C.1
cgcttctggtgatgattccacttttggtggcccggatgatgccccaacgaggacatatgcggccattgtgatgaaaaggcatgtatcatctggacctgtttatgttcccaaccgaccttcgagaatagcatatgcttactccacggaacaattggctactactgccaatgccaatcaactctgccctgagcatacctctagaggtatgctctgggcggtgtatgaaacttagtctcttcctcgactgcttatgccgtgacctgaagcttagaatcgctatagctgtgatcagtagagacagccgatctgttgcttgtgattgagatgagtcatcacaggcactgagtcacttactgtgtgacgcagctgtgtgagaaaagactctaccagtcac

SEQ ID NO: 41205 - DNA, 563 bp, Glycine max
  Clone ID: PAT_MRT3847_137209C.1
ataagctgctgtctattgcttttgaacagacccttgttgagcccaatatgctggttgttgatgttgagaaatttgtttcaccacagcaagagtcttggttcaaggtggatgagaaggaacctgttgcttatgcaaaagtagaagttattgaagcatctgacatgaagccatcagccctaaacggattagcggatccttatgtgaaaggtcaaatgggtgtatacagattcaggacaaaaatacaaaggaaaacacttactccaaaatggcatgaggaatttaaaattcccatcataacttgggagtctgacaatgtgctggttattgcagttcgtgacaaggaccatttctatgatgatatccttggggacttctgtgaacatcaatgaatttagggatgggcaaagacatgatatgtggctgtcgcttagaacataaatgggagttatttggctctatcttgtttcattttataaacttagtaatttgtaaaatatgtatgtgtgtgcatgcacatttaattataacaattgtcttaagacattggttaagcaaaccaaagg

SEQ ID NO: 41206 - DNA, 416 bp, Glycine max
  Clone ID: PAT_MRT3847_13720C.1
tctagctatctcgatcgaactgtccaaggtcctgtcaccctggtggtggtccacctagggtgccgcggagggcccgttgatggttgttgtgatcgtggcgcattggttagatgatagtaaagcagcaagcgctggatgagtgggtgggatgggggtggaggtaggtgttagcaagccatgagggcgcgtaagacacagccagcgaaagcagcgaggcgagcatgtgtaatagcggagaagcggtaggttgtgtgttgaggtgaaaaaaaaaaaaaacccgtccttcttgatgacgcactgtcgtcatttcccaaggaaggttcgatctcgattgcgtacgtcgattagtgggtttgagcgcactgtgaggacaatgcctcgaagtagccgtagctgcaggttcgctcaaaggcgga

SEQ ID NO: 41207 - DNA, 1405 bp, Glycine max
  Clone ID: PAT_MRT3847_137210C.1
agcaaggatcgaccctcacgtgggataaggactagtagtggtcccgtggatgatgactgttacctttaagtgccactgccactcctccttttcttgttacacttaactttataaatacccaccccacccgcggtgtttctaggcagtgaatacaagccaaaagaacaacatggacattgatctttctcctcagttgcccaagaaagtttacggtgccaatggtggctcctactacgcatggtccccctccgaccttcccatgctccaccaaggcaacattggtgccgctaagcttgctctcaacaaaaacgcctttgctcttcctcgttactctgactcttccaaagtcgcttatgttcttcaaggtagtggagtggctggaatagtgttgcctgaatcagaagagaaggttgttgcaataaagaagggtgatgccttggcactcccctttggtgttgtgacctggtggtataacaaggaagaaactgagttggttgttctgttccttggggacacttccaaggctcacaaggctggtgaattcactgactttttttctgactggttccaatggaatcttcactggcttttccaccgagtttgtgggcagggcttgggacttggaagagagtcatgtcaagacccttgttggaaaacaaccagccaaagggattgtgcagctggaaggaaacatcagccttcccgaccctaaaccggagcaccgaaatggcatggccttgaactgtgaagaggctccattggatgttgacatcaagggtggtggaagggttgtggtgttgaacaccaagaatcttcccttggttggcgaggttggactaggggctgatcttgtgaggctggatggaagagccatgtgttcgcctggattctcttgtgattctgctttgcaggttacttatattgtcaggggtagtggccgggttcaggttgttggtgttgacggccgtagggttttggagacaaccgtgaaagctggtaatttgttcattgtgccaaggttttttgtggtgtccaagattgctgatcctgatggactggagtggttctctatcatcactacccctaatcctatatttacccacttggcaggaagttcttccgtgtggaaggctttatcaccttcggttttgcaagctgctttcaatgtagatccagaagttgagcaactgttccgttcaaagaggactgccgatgccattttcttccctccaccaaactagattaagcattccattgtttgctcgtaaagattccccatcctcatcccgtcttatctacaccggaaaataaaaggggaaataatgtcttgtgaaattactttactgtttaaaagtattttctttgttaattaggaatttcaaaaaaagttcctttttttcttttt

SEQ ID NO: 41208 - DNA, 416 bp, Glycine max
  Clone ID: PAT_MRT3847_137211C.1
ttgaggaacaaaaaagaatttttaattgacagggcaaaagatagagattcatattaatttcacccccaaaatattcatttacaatatgggtaccacggggggcgcaatggaagacgccattgtggtcggtaacccttggttggggcggaccggtcttgtgaagtaaagaattggcatccagaaagagcaacgctacttattggttcagttcaacaaaaatccggaggtttaaacacagtgtccagctatcgttttacatggtttctgagaaacttttccaggtgggaagtttccccaggtaaaccagaggcgggctgcaggtggacctttggtagagcactgggtaaaagaaaacggtttaccgcgtccccgcagggggaactcatttggaatggcaggtgggtgatttgcccttt

SEQ ID NO: 41209 - DNA, 466 bp, Glycine max
  Clone ID: PAT_MRT3847_137212C.1
gttacggctgcgagaagacgacagaagggacacgtgatcgctcaagaagcttatcaaactcttcaatgagagatttgtaatttactgattgcatttccatgttgttattgcgtgtttctatctggacataagaaaagttattaagaccaaacaaagtaagaatccagtgctttgaaagaactcctacacctgaaattatatcacctagaaaagcaaatagaactgaaatagtgaaatctcattaagcagaaagcaacttcgacagcaccacaaaatggtcactgtagaaataattgtgaccataattcaactttacaaaggtaaaattcaattcatattaatatcattttaaactcaatgaaaatatttggcatgaaccgactgtcccaaaacctattttatattttatttttagagaaaataagaaaacttaggaaagagaagacagtgagtatatacaatggga

SEQ ID NO: 41210 - DNA, 308 bp, Glycine max
  Clone ID: PAT_MRT3847_137213C.1
tggacaagttaatatttcaaagatttttggataaataaaaactttggagatcaacatccactgactcagctcctaaagtcgcatcattaataatttatttttgaaattatttttctcatgcatacttgaacatcataaatttcttttcacctttgggaggggtagttatttgaggtggggtttgccaatggccaggcatttgacgatttatgaaagagtcaattataaagaatattacaaaggtgctgcatatggaacttctttttggttgatggttgctacttgcaagtacggaggtacatgtttac

SEQ ID NO: 41211 - DNA, 519 bp, Glycine max
  Clone ID: PAT_MRT3847_137214C.1
cataagatttcttttatataaactaaaattccattaataataagaaatgcttaaattcaacataaggtatgaacaagacaccagtaatcgagacacacaccaataacttgcaaaaccaaagtagccatgtgaaatgctacaggaggaaaaagctaagccaacaagatcaagacactaaagaaagcacaaattatacaatcgctgccacatatggcaactcccctgcatccataaggcactccccaataaatatattattgtatcaggacgtgaatttattatttagccacataaatatcttattgttacataacacacctaagaagtgaacacacccctgcaccaccaccccttatacccctttcatatgacaagacttaggacatctttgcatgtcgaaggctgaattctcttatcctgctaaggccatctttaaggtcagaaaggtcaacagcaagactaacccgaacccaattctttagtccaacagcaacaccaggaaaaagaattacagattcc

SEQ ID NO: 41212 - DNA, 280 bp, Glycine max
  Clone ID: PAT_MRT3847_137215C.1
tacggctgcgagaagacgacagaaggggagatctacgtttttagggttgacaccaagcattcacacctacagcaccacctatggttctaaacattgatctatgccgagtcatatgcgccaacatctacccaaaaatggacataagatttgttctgagagattctcatgttgatctgtatgcaaacttagaatgtaacacgtattgccacagtcatctgaacacttcactgctcacttggactgtaatgtgcactgcgctgcacagaaaggacatcgctca

SEQ ID NO: 41213 - DNA, 740 bp, Glycine max
  Clone ID: PAT_MRT3847_137216C.1
attaatggttaacagaaatgttagtaatgcaatctttcaggtgggattatatagaattgggaggcaaatactacccagatatggatcggttagcagctttggaaaggggtatgaaaacatgggctaattgggtggacaataatattgataaaagcaaaatcagggtgttctttcaggccatttctcccacacactacaagtagggactctccatctttgactctccactatcttgaactgttttcttctctctcttgcattattgtgtagaaactatttgatttttgagcttcattggatattattttaattgggataggaactattaacaccaaaaaaattgtttactaataagaaacagagtcaaagacattttggttctatttaacttaaaattaaccaaaatgaagcaaaataactaataaaagtaaacaaatgaagattgataattagaccagacacatgcagcaaaataccaatatttctcccctagtcaagcttcatttgcattttatccaatgaatgaatatttgcattaacgggtgagaatgggacccttcttttggcaaggccttgacaacttgcacatagattattgcaagtagtttttcggtcgaaaagggtcttgcaagttgagtcttctatctcgaggttgaaaattatggactcactggtactgtctctgtcacatgttgaaatctaccttgcacgttttctgatatggatctaaaatctatttt

SEQ ID NO: 41214 - DNA, 264 bp, Glycine max
  Clone ID: PAT_MRT3847_137217C.1
ctcgagcccttttttgtctcgctctctctggtgttatcagaatccgactagattaactgttggtgcatgtgggtttggttctttggtgctacagtcaatggtggagatgtatcagctgcatcttctctttatcgaaatggtgttggttgtggtgcctgttaccaggtgaggtgtaccaacagtgtatattgctcagaaaatggtgtgactgcagttataaccgaccaaggttcaagtgataacactgatttcattcttagcaaa

SEQ ID NO: 41215 - DNA, 226 bp, Glycine max
  Clone ID: PAT_MRT3847_137218C.1
tttcagagacagcttcggctgctgatgtaagacgtgcctacaagaaactcggcttacaatggcatccagataagaacgtcgacaagagggaagaagcagaggctaaattccgagaaattggtgctgcttatgaggtctattatgattatctgatggttacctgacctttctcctacagtctctaatcaggacgtgcctggtcattgtggaatgggaaatgcgaaca

SEQ ID NO: 41216 - DNA, 288 bp, Glycine max
  Clone ID: PAT_MRT3847_137219C.1
tccactaatcattaaattttaattttatatttaaccttcaatatccaagatcacagttttttttattacaaacacatactacattcacttttctttcttttatctttttcttctatccataatttcaattccatttactctcttaacctattcattccatatctaatccacataactcatcactaattccacttcaccaacaaccaccacaacttcctaacattccctactcatttataattcatcttcaaactttttcattattaaacttatcctatatatcaatct

SEQ ID NO: 41217 - DNA, 276 bp, Glycine max
  unsure (1)..(276): unsure at all n locations
  Clone ID: PAT_MRT3847_13721C.1
cggaaccttcgatgctgatgtcaagcctgttggcagcaatgtcatctccgtggatggaaaggaaatcnaagntgtttctgaccgcaaccctgccaaccttccttggaaggantttgggatagactggtgatngaaggnaccgngggtgtttgtagacagaaaaagtgcangganaacncantcaaggcagganntnaagaangtgctcatcactgcnctgggtaagggcgatatcccagcctacgngttggngtccatgngtatnaactacncccc

SEQ ID NO: 41218 - DNA, 353 bp, Glycine max
  Clone ID: PAT_MRT3847_137220C.1
acgcccacgcgtacgaaaaagttgttgttgagatacatgtttgtggactgcgatagtcgagctggaagtgctgctactggtctacagtcagctcaatggcgtcttccatctgagctctgtcgccttacgtccaatcacagctcactaaaaccacccttgcaggtacaatccctctctatcaacgaagcaagtgcgatatgagcaggacgaggtctgcgtgtaaaggaattacggcctatgacagctcgatcgcgggttctactctgacacccacatgcagaaccatcttccatagagctcgaaagattgcccgacaagccggaaggggacagttattggacatggaagactca

SEQ ID NO: 41219 - DNA, 654 bp, Glycine max
  Clone ID: PAT_MRT3847_137221C.1
tttctgatttagggtattatgaaagagctgggaagctctatttggagaaatgtgaagagcctgatttgaaaagagcaggggattgcttttatttagctggatgttatgaaactgcagctcgagtgtatgctggaggcagtttcttctcagattgtttgaatgtttgtgcaaaaggagggttgtttgatattggcttatattacattcaacactggaaaaaaaaatgaaaatgctgatcattgtatggtagacagtcatgaactattcacaatagaacaaaaatttctggaaaattgtgctcgtaattatttggatcgtaaagataccagatccatgatgaaatttgttaaagcttttcactcaatggatttgaagcgtgagttcttaagatcattaagtttacttgatgagcttcttgtgttagaagaggagtcagggaactttatggaagctgcaaacattgctaagatgatgggtgatgttctacatgaggttgatctactgggaaaagctagtaaattcatggaagcttgtgaacttatgcttttgtatgtacttgggaattctctttggtctgcaggaagcaaagggtggcccataaagccatttgcacaaaaagttgagctcttgaatagaagcatatcttttgcaaag

SEQ ID NO: 41220 - DNA, 373 bp, Glycine max
  Clone ID: PAT_MRT3847_137222C.1
ggtgtttttttttttaatttttttttttttttttttttttttttttttttttatgaaaaggacacgttttatattttttgaccaacaatttgccgttaaaaaaaaaaaaaaaatagtttaaaataccccaaggcccttaccccacttatattctgggggggggagggaccaacctggaaatttaaacaaaaaaagctacatcaaagggggaggggcggttgggacaaaaaaaaaaagcgagcggattcacagaaaacaagacaggaccgggacaaagctccaaacaatctgcaaaaaaaagattaaaacctgggaaatgagctgcgaccacaaaaaagaagacgggcgggactcccacaaaaaaaaacctcta

SEQ ID NO: 41221 - DNA, 1044 bp, Glycine max
  unsure (1)..(1044): unsure at all n locations
  Clone ID: PAT_MRT3847_137223C.1
cgacccacgcgtccgcactcacctcacaccgttgttggttcaatcgcaatcatcagagagactcgccgatcaaccatggctgaccgtgcctccgccaccactcgcctccacatctccgccgcacctccctttccgatctccaaagattttcatggccctgacaatccaattccactctcaccacagtggcttctgccaaagccaggggagagtaaacctgcaataggaactgtggaaaaccatgtaatctcaactccaccaaatggcaatcgctcagagactgttaagacatctggagatggagaggatgcgaatgatggccataagcgaaaggatgtctttcggccatccatgcttgactccgaaagtggacgccgtgatcgttggcgcgatgaagagagagatactaagtcttccatacacaaggatcgttggaggaatggagataaaaacctaagtgacactcagagaatggatcggtggactgaaaatgtatccatgaggcactttggagaagcacgtcgtgccacatctgatagatggaatggttcaagcaatagagatacaaactttgaacagcggcgtgagagtaagtggaacacacgctggggtcctgatgataaggcgccagaaggtctttgtgaaaaatggaacgaccctggtaaagatagtgatctgcatgtagacaaaggtttgtctaacatttccaatcttgttaaggatgaaaaggaaggggatcattatcggccatggaggcccaactcctcacaaagccgtggaagggtagagcctacccaccaccagaatgtgatgccaaacaaacaagtgtctgcattgtcatatcggcggggccgtggggaagatacaactccaggcattgctttcgggcgtgctcggcttagctctggnggtagctccattaatagcacatatatgcatttctaattaccctggaaccttattggataagtttgaaaggaacaggagagaagctattcctttagaaatagtagggcaaaattgcttgatgtgtacagagttgct

SEQ ID NO: 41222 - DNA, 475 bp, Glycine max
  Clone ID: PAT_MRT3847_137224C.1
ggctctctcaatgatcgcttcgataactgataccactgtcaaccttgccggtgccgggctggatgctacatccactggcctcaagcccatggttggctgccccaccatgaagaccaacaatgacattacctacatcgctaacaacggtggaagagcgcaatgcatgcaggtgtggacaccatttggcagcaaaaagtatgaaactctttcctacctgccagaccttgatgaggcacaatcggcgaaagaagttgaatacctgattaagaaaggatggattacttgcttggaatacaagttggaccacagttttttgtaccgtgagctcaaaatgccaccatgatacttcgaaggactctcctggtccctgtggaaggtgcccatgtttgggagtactgatacttctcatgtgttgaatgagcttcagtacgcttagactgcatatcccgactcgcagatccgtatcataggattt

SEQ ID NO: 41223 - DNA, 391 bp, Glycine max
  Clone ID: PAT_MRT3847_137225C.1
cttctcttgaaaacccacccccccttcttttagacccgaaaaaccagaaaaaaacctaaaaaattgggggggaaaaaaaggccttaatgctgactgggaccccctgggggggccaacaagggggggcccggccgggagaacccaagggaaactgccaaaagaaacgggttggacaaagtggttgttaaacaaaaaaaaagagagcaaggtaacaagggccccaaaaccccccccaggttttttggtagaaaaaaaaaacccaccgtctccccaagcctgggaaccagcccccttaaacccctttggagaacacgataggaaagggcggggataaaaacttggaacggacttgtgagcgtccgggggggtatttgaggggggtaaaaacggg

SEQ ID NO: 41224 - DNA, 762 bp, Glycine max
  Clone ID: PAT_MRT3847_137226C.1
ggcattgcaggtctcaaatgagggaggtggaattgcaagaagtgggttgcctaaaatttttacatatctatatagtactgggagaaacccattggatgagttccctgttttttttttttttttttttttgacaatggctggatatggatatggtcttcctattagtcgtctatatgctcggtattttggaggtgatcttcaaataatctctatggaaggatatggtgagtaggctattacttgttttccccttcatttacaacatttttctgatagatatccttccactttttgtaattctacctactttagcacttaaagagttacaactctttgtatatcttctccatttaaaatttaggaatttggagatatgggacctaattgcacttgatatcatgaaactgggtcaaccttattttctggttacatttcatgcccctgagatcgatttgaacttctacaataatgatcactgcttccattggagtatcaagtgaatattattattttctcccatgtgtaagggtgtgtttgtattagggttcaaccgaatggacacaaattcctatgcaagctttgtgaaaagggagagtttggagtttttggttcaacatccgtttgggggcctcccaacagaaaaacaaatatgccctaagttagacattactcattacacattagaactttgtaagcttgtacattctggggcagtttttttgattttctaaagcctacttagcacttccataccccaacatt

SEQ ID NO: 41225 - DNA, 388 bp, Glycine max
  unsure (1)..(388): unsure at all n locations
  Clone ID: PAT_MRT3847_137227C.1
ccggaccggaacccccgggacgacccacgccgacgcctccactccgcangggcngcagaaggcnngagagcaagtaacagcgaaacaccagggcggccaaccggnnggnaaaaagacagagggncaaccgcggagcaccccggaaggagggcacacgccgcccaaaacgagaaacagccccaagagaaagacaggcgggagggaaaacacccccaggacacaaaaacccgccccagaaaggaaaaagaaacccccacaaaagcacaaggggcaggggaaaaacccccaaacaggaganacaaaggcgcgggcccacacgcggcagaagaggcccccgaaaaggaagancaagacaaacccaaaaagacagaggccagaccgagacaaa

SEQ ID NO: 41226 - DNA, 793 bp, Glycine max
  Clone ID: PAT_MRT3847_137228C.1
tgcatgcaccccattaatttcgtgtgggagaaagcaatagggatgcacgagtgcaagagcctatgcaagcgtgcattggtgagattgcccgtggtgatccctatatggttcttggccatcatattccctttctttggtcccatcaactccaccgttggcttctctccttgtcagcttcaccgtttacattatccccgccctcgcccacatcttcaccttcaaatcaccctctgccagacagaatgcagtggaacaacctcccaagtttgttggaagatgggtgggaacctttattatcaacacatttgtggtggtgtgggtcctagtcgtagggtttggatttggcgggtgggccagcatggtgaacttcatacgccagattgacacatttggactcttcacaaagtgttaccaatgccctccaccgattctaccgcctgtgccgccacatcagctcaacgccaccgcgccttcgccgcttcaccaccctcatcatggccactaagaattgcactcttcaaattgagaccacccatatatatgaagccacaccctaggctctttggtgcaatgcatatcattgttatgttgagaatgataaattagtaattaaaatgtattggccgtgtcataaacatataatgtattaatattcttcaattatcgttctctttatggccttacctttggattaaaaatttaaaatgtgtagaatttgaattgttttgattttaatttttttcattttttgaatgttttgtttagataaatcaattcaaatttctttcatttt

SEQ ID NO: 41227 - DNA, 760 bp, Glycine max
  Clone ID: PAT_MRT3847_13722C.1
ccacgcgtccgctcgtgttcttcgtgatcagaacggaaggaaatcggtgttcctgcgctgctatgctctctatctggatttaggtgaagttagtggaagtatagaaacatgacataaacatgtcttacagttcagtttcatggcaaaatctatttcggttggagatgtgggttatcttctaaatggattgcaattaataggtggtaatacactctatgctgctatagaccattgattactttgttcttaggaaaagttccttaacatattatgttttacatttttttttcttctttttctaagcaaagaggatactatgaagcctatacttgatgcaacactggcatgatacgacatagatacagaggctggtgaaaagcggaaagaggaagagatgatagaacttgaggggcctctgggtaagagtgatgctgtcaatcatgaattggtttctttggagagagagttgtcaacacttcgcaagaatggcaaagttgatgcttttggtttgtacttatatggtcttgtgctcaaacagaaaggcagtgagaatcttgcacgtacagttcttgtagaatctgtgaatagctacccttgggaactggaatgcctggactgagttgcaatccttatgcaaaacagtggatatattgaatagtcttaatctcaatagccattggaatgaggactttttccttgccagtgtttaccaagaactaaggatgcacaatgactctctgtcaaaatatgaatacctact

SEQ ID NO: 41228 - DNA, 156 bp, Glycine max
  unsure (1)..(156): unsure at all n locations
  Clone ID: PAT_MRT3847_137230C.1
aaaanancatgnacgcgnacgtacnancggaattaggctcgaggatactgnaatngttcgttacatttnatgcagtgcanttatgannnngtctaagtgctcantnanacngnccatncggntgactgangcgtncaacaacagncagagccgagc

SEQ ID NO: 41229 - DNA, 531 bp, Glycine max
  Clone ID: PAT_MRT3847_137231C.1
gctatctcgatcgaactgtccaaggtcctgtcaccgagcgcgggctgcaaaccagtagcggaggcaactgggggcgcagagggcgtgcaggagcggctgaccacggaaaccgccgctacatttacaaaacagtggttaagtaaccgatgacggttagttagtaataaacggcttaaggcccagctggtaggggtaaccggtgggacagctaaattgcgctggggaacaaaggaagatgctcgtgccaggtaaggatggcagtgggcagataacgtgggcataaaggtgtaatatatccgtaaaacacaatagggttaagcaaggtgacacgtggttggcggtagttgtaataacacgagagtagccggttaggggtggtaaaggtgcttatacaacagacacgccatgacgctgtcaaataccttgttatcgcgtattttgttggttgggagccggtccagccttagcacaagagtgacactagcagccgggattgggagcacaacacgggggtaggattaaaagccagta

SEQ ID NO: 41230 - DNA, 202 bp, Glycine max
  Clone ID: PAT_MRT3847_137232C.1
ttacgcgtttgatctttgccttctgcatgcgggatctctgtaaacagatactgcaaaagatgaataatatcgaatatttgggtgggttgaatccctgggctgaagcgttgcagacatcacggctatcctaagagtgtctcgctctctcattcatgtcccaactgtacgactgaggacaggttgctgtactgccaccaaccct

SEQ ID NO: 41231 - DNA, 357 bp, Glycine max
  Clone ID: PAT_MRT3847_137233C.1
cgaacagcacgcccggcaggcgcccgtggtacttggcgataccggcggcaatggcgccggcatcagtgaagttgccgaactccgggttaccgacgaagacctgcgcggtgaaggcaatcatcgccaccgcgccgatcaccaccagggcgatgcccagccacaggtcggcgcgttcgtacttgatgaagcatggggtgatgcgcttgtcgatcacatagctttgctggaagaacaactgccagagcgccacggtggtgccgacgatcccgatgatcagcagcaacacttccgacagcttgccgtcagccggcagttgctgggtgaagaagtcatgggccacctgagtcatgggcgggt

SEQ ID NO: 41232 - DNA, 249 bp, Glycine max
  Clone ID: PAT_MRT3847_137234C.1
acaagttgtttcttttaaattcgctttaacacattacaaaaaacgttctttcccatatagatagctgaatgtttacagtacaaaaaccaaaagaagggggaaccaataaaaaatggttgctctacaaaaacaaagggaaaagagctttgaaaagcaaaaaaagcatcctttgctgatcgacccgaattccgagctaacaaaaggggggaaaaacccagagggcaaaccaaaaactcagccgaagtgaaa

SEQ ID NO: 41233 - DNA, 1124 bp, Glycine max
  Clone ID: PAT_MRT3847_137235C.1
ggtgatagataaatcaaaatggcttgagggggcttcgttatccatcttgctaaactttagtaccagagtttgcagactgagcgtgtgactcagtgtgggaaaacgatagataccattaccatgttggttggataactgagagatgatgatgatttcaacttcaaccatggctttggcttctttactacccaaaacggcaccgcatgtcctttccctcacaaacccttccgcttccactcccttcatcttacctttcagtttccactgtttgcctcaccctcctcttctctctgccctcaaagctagttcctccggtggcgacgatttacgcggcaagcccctgctttctcagggaattggaaagggaattttggaggaacatgcctttgaagacgacgacgacgacaaatgggttgattgggaggaccagattttggaggacaccgttcctctcgtcggcttcgtcagaatgattcttcactctggacaatatgacaatggagatagactaagtgcagagcatgagaaaaccattattgagaagctgcttccctttcatccagaatttgagaaaaagatcggaagtggagttgattatatcactattggatatcatcctgattttgaacgctctaggtgtttgttcatagtacgagaagatggagagctggttgatttttcatattggaaatgcataaagggcttgatcagaaagaactatccattatatgcagacagtttcattctcagacatttcaggaagaagagtcgtaatttgtgaagttagcactgtcttttgctggttggaccatttcgttttagaattcgcttcttcttttttaatcccttttgatttctcgtgctattttattgctggtagcatgttattgctgggggcggggtatttcgaaggcatgtgtttttcgaggtctgaagagtggggagcctgtagcgtcgctcgcctttagtctcccaccactgccggttgccgtccccgccggattgtggacccttttcgctattgacaatattcgtagtgatataaaaatatgggaatgtagattatgtatatagaccttgatgataatgtacctttctgttcaaataaattttcaatttgaaga

SEQ ID NO: 41234 - DNA, 487 bp, Glycine max
  Clone ID: PAT_MRT3847_137236C.1
tagtatgcggccgccctatttttttttttttttaatatattaaagaaattttactgagtcacaatactgtttcttcactctctcagtaaaaataagcatagatttgagcaaattgccctttacttatacccttggccatttaaaataaggttccagccactccaatcccccccgaaaatcacaagctgagattactcatggcaggatagcacaatgtggaacaataattactaggggacattacatctgccctggagagtattcattcatcaccgacgtctggggcatgacatttaacttcgaccaacccactaatatgggtcagtggggtgacatccataatactaaaaaacacccctgatgcagcgacataccaccagcgcaagatgtcatttccaacaaacctttgatcccgctgttagagatcaggataaaccctacagaaagcccgcttacggccacccagtacctgacctggccttatgac

SEQ ID NO: 41235 - DNA, 506 bp, Glycine max
  Clone ID: PAT_MRT3847_137237C.1
gggaacaaaaaaataaaagggtcttttaaagcccgatttatcccttttccatattcaccattcggggggggctaaagggccccccccctgaaaaaaacaataagaccccaacgtcctcaaaaagctgctgccgggggtaattaggcctttggggcgggggaatcaaatgaggggaaaaacccccccttcgactgagcatgctccacataaaaaccaaatttttcctttgggtttggaatggccaaaaccaaatcataaagtccctccttttttcgggggaagcctttaatcatctgattaaaggggaacaggccttcactgaagccctcctgcagtaaatctaacctaccaacattttttttttccatggccataaaaaaagcttttttcactactttatgggtaaaaaaaggctttcccaggtcacggatgccttggcaagcttcactcacaaccccgccactttaatacttttccaaaaacttaaagaacttggccttgggatc

SEQ ID NO: 41236 - DNA, 560 bp, Glycine max
  Clone ID: PAT_MRT3847_137238C.1
tccttctccaactcatgtgcttacacctagctatatcaaagcctgaaagttatttcacatgacatacacataaaagccatgcatataaattgagacacatctcatttgaccaccaatcaagacccatctgaatttcaaaaccttaattaagattttctcatttgctttgtacgtttaaatggcttctgcaccagccttaaaacgcacagattctgttgtagataatatgccggatgcattgaggcaaagccggtttcatttgaagaggtgcttcgctaagtccttggaaagggtggaggattttgaaactttatcattttgatggaagaaatggacctagtattgatgacaaaagcgaaagaagtcaagttttggagggcattcttggcttaatacttagctccacacagaaagctggtggagccacccatgatgccctttgcaataaggccttatccaggagtttgggaatttgtaaaagtgagttctgaagacctttctagtgaggctattacccccacagactacctcaaattcaaggaaagggtacaccatgaaaa

SEQ ID NO: 41237 - DNA, 522 bp, Glycine max
  Clone ID: PAT_MRT3847_137239C.1
gttggataaaaaaacaggggccccccagtgtaaaattgaaccctgggcttcaaaagttcgctttacccaaaaatttttttgacctttttacccccccaaaaaccaaaaggggaaccccgggggtttttatttttgggtttaggaaaaaaaaaccgcccccctgggcgacccctggggggaacccttggggggccccttggttttccccggaaattttgacccggcccctaaaggggtaaaaatttttcttttagggggcctaaaaaaagttgggggaaaaaagggaaaaaactttttcctgggaaaaaattttttctccccaaaattccccccaaaaatccgccccgaaattaaaaattaaaacccggggggcccaaaggggggggctacccccttttaatgggggggggcccctggcccgtttttaaaggggaaaacttttgggcccaatatttataaaaaaattgcccacccccccgggaggggcctttttctttttgcgcccccagagggttttttttt

SEQ ID NO: 41238 - DNA, 455 bp, Glycine max
  unsure (1)..(455): unsure at all n locations
  Clone ID: PAT_MRT3847_13723C.1
ctagagttgagaacaagaacaaagagagcgtggtgcttccttctccgattccatggcgttcaagatcaggaagattggaacctaagcaagaagaatttgatgatgccttcaacatgatgctttctccttcaaaggaggaatctcgcccagtgaagtctcaaccttcacgtgcttcttcgcgagcaagttcggtgtctccttcgccttctttctcatcagaatcgcttgcgaagaactcagaggactcggtgaggaagaaggccttctacaagtcatgtcctccaccgcctccggcaccgncaccaatggatgtttcacaaatcagtgtccatgaagccaaggtatggtggttcattcaatgaagaaccttccttcaataaggagttgaagagaagcttcaaaagtgagaggaacatgccagtgggaaaaaaattgatgaagaaaataaacccatg

SEQ ID NO: 41239 - DNA, 350 bp, Glycine max
  Clone ID: PAT_MRT3847_137240C.1
agaaaatgtaattttcagcactgtccaggaaatttaaggattgtaattctttatgcgctcatgttattattaaaaaaaaaaaaaaaaaaaaaaaaaaaaaaaaaaaaaaaaaaaaaaaaaaaaaaaaaaaaaaaaaaaaaaaaaaaaaaaaaaaaaaaaaaaaaaaaaaaaaaaaaaaaaaaaaaaagggcgcccctttaaaagaatcaaagttaactaacccttgcatccaacgtaaaaccttttaaaaagggtaaccaaaattaaattaattgcccgtctttaaaaaactttgaaactgaaaaaaccttgccttaaccaaattaaatccctttgaagaaaatcccctt

SEQ ID NO: 41240 - DNA, 1008 bp, Glycine max
  Clone ID: PAT_MRT3847_137241C.1
cccacgcgtccgcgaacatctctccaccaccaccaccacctaactacctcctcctccctccaccactctcaatcaaaattccccttccaaaacaaatccaatcaattcaaatcaaatccctgtctcctccttaaaccgttaaataaaacaacaatactaaacaccgtttcaattgaacaaaaaatgagggaagaggattccaattggttttcgcgatgggaagaggagtttccgtctccagaagaactcatgcctctatcgcaaaccctaattactcccgatctagccatggccttcgacatccgaaaccctcacaccaccaacaccgctcagcaacaacaccaccaccaccaacaacaaccacaacaacaacaacaaccttcgaacccttcctcgctccccaacccgctacagcaacaacaacaacaacaacaacctacctccgccgagttcgccgactccggcgaactcggctctggcaccgccggcgaggagccggcgcgtaccctaaaacggccccgcctcgtgtggaccccacagctccacaagcgcttcgttgacgccgtcgcgcacctcggcatcaaaaacgccgttcccaagaccataatgcagctcatgagcgtcgatggtttgacccgcgaaaacgtcgctagtcacttgcagaagtaccgtctctacctgaaacgcatgcaggggatttccgccgccggacccggtggtccaggcggcggcgcctccggcgccgtggccgaccccgccaccgaccacttgttcgccagctccccggttccggcgcatttcttgcacccggccgcgaggccgaattcggatcacttcctgccgttcgtgccggcgctccacccccatcagcagcagcagcagatggcggcggcggcgcagtaccaccggcaggtgaggcatttcgggtccccgccgaacgggcacttcgagaacccgttcatgtctaggccgcatcttcagagactgggaggtggtggtggtggaggt

SEQ ID NO: 41241 - DNA, 395 bp, Glycine max
  unsure (1)..(395): unsure at all n locations
  Clone ID: PAT_MRT3847_137242C.1
gtccggnngggatcatggtagatggaaccctccttttactcctctcggaggccctggcccttacccagacctgggcgggctcccactccttgaagtatttccacacttccgtgtcccggcccggccgcggtgagccccgcttcatctctgtgggctacgtggacgacacccagttcgtgcgcttcgacaacgacgccgcgagtccgaggatggtgccgcgggcgccgtggatggagcaggaggggtcagagtattgggaccgggagacacggagcgccagggacaccgcacagattttccgagtgaacctgcggacgctgcgcggctactacaatcagagcgaggccgggtctcacaccctgcagtggatgcatggctgcgagctggggcccgac

SEQ ID NO: 41242 - DNA, 459 bp, Glycine max
  unsure (1)..(459): unsure at all n locations
  Clone ID: PAT_MRT3847_137243C.1
gattgagcangctctgggcggggatggaatcatatccactgaagatctgatccatgatatcatcactcttagacctcactttaagggggctatcaacttcgtgggggcatttaatcccaaagctccatattgtggcttaacaaaacttatagaccatgataaagcgggaagtgacactcgaaaccgggagacaacatctacatgcctaccaagaaaacagaagcgagcctatctaactgacaaagcagatgtttatagcttcaaggtggttgcactggaaactgtcagcggaaagagcctttctaattatatgccaaacgaagattatgactaccttcttgactgggcatatatcttgcaagagagaaggaatcttctgcagctggttgatccaaatttgggttcacaatatttaactgaggacgccatggggtgctaaatgtgctctcttattactaa

SEQ ID NO: 41243 - DNA, 228 bp, Glycine max
  Clone ID: PAT_MRT3847_137244C.1
tacggctgcgagaagacgacagaacgctctgcaaaactagattaatgttatcgcaatttaacacccataggtttattaaaactggggtgggaatacaatacactatatacaaaacctttcaatcattcatttgtttctagcataacaccgattcagaaacttcctttccttaactaccatattgccagtgatcaatgacttataatataacaacctgaaaaaatataa

SEQ ID NO: 41244 - DNA, 361 bp, Glycine max
  Clone ID: PAT_MRT3847_137245C.1
aaaaaaagaaggacaaacgggtttattctttcaatttttagaggcccaaggaaaggcccgggggatttccctcccccggggggcccccaaaacaagtgactccccaatttttttttttcaagggcccccccccctcccaattctggggggggcaaccccttcaccaagggccaaatctggaacaaaatgggttaccccaaacctggaagaaaataaaaccgttaactcaccttttgcccggggggtgaaccaattcaatttgttcttgtccccccgggggcgggaaagaaggttcaggggcggaaaaccctcccctgggacgaatttttaaagaccgtgcttttcccgaaggtttttaacc

SEQ ID NO: 41245 - DNA, 258 bp, Glycine max
  Clone ID: PAT_MRT3847_137246C.1
ggctcgaggttatacactgcatacattaaagagattgtaaattccaagcatcgatatatttctattggaaacatggatgctaaaccatgaagaacagatcttcctgagatattgagatactaggctattatgcgatagaatgcgtttgatataaacatcttccaccgtgctaatggttggcttggcacaagcattaacatcatcagaggaggcgtgtacatcatctgtaatttggcagccaacaaattcatatagttc

SEQ ID NO: 41246 - DNA, 240 bp, Glycine max
  Clone ID: PAT_MRT3847_137247C.1
gtacaccatgccgaacaactatcctatctcggtcagaccgtaccggtctgttaatacatggattcaattctcatccacatgattcgggatacgcttcatttatgttggcccgaaccggaggctgagcgtaatgtttcgccccctgcttcacaattcttaagcagacttccttgtacatacaccgttcattgcactggaacgctttctgggacactctgaactattcagttccaatgctat

SEQ ID NO: 41247 - DNA, 240 bp, Glycine max
  Clone ID: PAT_MRT3847_137248C.1
ccacgcgtccggaaaaaaataagaggaaatgtatgtggcttttgttaagaactcactttgaattaggccaggctagggcccgattttgttagctctcagagagagatctgctatgccattagctttagtcttctttgatcggtcaaaagatcactcaaagctgacctaactcagtctcccttaacacaacacataccgtgtgctaacaattttataatcgttgtgtgatccctcaaaccc

SEQ ID NO: 41248 - DNA, 294 bp, Glycine max
  unsure (1)..(294): unsure at all n locations
  Clone ID: PAT_MRT3847_137249C.1
cgtttttgtatntnnntgtttttctaaaatgggtctgtgctttacgattagtanaaattacagaatttcttaaataatttagctcatcaatacacgtacatgctgtatgcatgaatttggttatttggacttttgaaaatttagctcccactatctttggtgaacacatgtaactttgtggaatagcaaattggacagagatttgccaactaatgcgttttgtaaaatcagttactgaagttttcgtagtagcactggttttgattaaaaccaggaatgattcctgtaggtggt

SEQ ID NO: 41249 - DNA, 685 bp, Glycine max
  Clone ID: PAT_MRT3847_13724C.1
cacagaatcaagaatcgggatagcacagataagtccagctgctacagaagtttgcacgcacgcattttccttctgtaaaatacatggagtatgctgttgaagttgaaaaccacaaccacagttaaaatgtttttgcagcagaaatcaaatcctcctaataatgcttgactgttacattgagtttaagtgtagccatgagactagcaatatccataaacaccgtttccataatcccataccccttcacaaacctgaaataccccgttccagacacaaccccaaattcccgttccgtcatcgtgaagatatctgatccttgaatctccaagctgcttcctttgaatttcccattggtgaagatcacggagaaaaccatgtacaagcctttgccatcaagctgcgaatttacgtatatgccctgggccctaccaatgagctttgagtcgtcgctgggtcccactgttactgggtcgtctacgactgccacggtgccaaagtgcatgatgttggaggcgggtccactctttccggccaccgtggcggcggtggagagctcgccggtgaagtggtcgtggacgtagaatacgaggtttgtttgctttggttggagcctggggaaggtgtaagcaacaaagaaaatggtcaaggtgaagatgaagaagaagatgttggatgtgaggttcaa

SEQ ID NO: 41250 - DNA, 827 bp, Glycine max
  Clone ID: PAT_MRT3847_137250C.1
ccattcctacttttccctctcccattcctactcccaaatcacaattcctcttctttttttctttttctctgagtctcagccatatccatcatctttctctctccgccgcatgcggcggtgacgtttgatacccttcttcttatacagatccgccgccccttcttcctcccaacgccgctttctgctgtggacccggtttatgacgattccttggcaaacaacaaacgcatattgaagaatttgtggtttcacgattttacccctcgaaatcagaagtatcagtagcgtctacgcttgacaaccctacgatgatgagtcagcatccccgtaggaagctgccacgtggcaacccaagaaagggcaagcacgctgaagttgacaagccggctgcgccgaaagctactgagccgccatcctcaaatcggcttctagccggctaccttgcgcacgagttcttgaccaaagggactctgttgggtcagaagtttgagttcgacttgacccgatccggcgtggctgagccaaagagggagcaggataattacaaggaggtggcaaaccttttgaggacaaagggaacccatgtaaagggaattgtgaatcccacccagcttttcaactggattaacaaggtattatgacctggatttttcttttgtgttgtgcctctaaacgcatgaatcaatgatcaattgtattatttgcacagcttagtttgaatttgatttaagtttggggattttgttgttaccaaaaaatataatgtttgtgcttgagaaatattactcatcgaatgtgcagatcatctttatcggtgactttttctg

SEQ ID NO: 41251 - DNA, 206 bp, Glycine max
  unsure (1)..(206): unsure at all n locations
  Clone ID: PAT_MRT3847_137251C.1
gactcacgcaccaggcttatctacgacgccatggactgaactgcagccttgcacatatacggagccngctctactggacaggctactctggccagagactgcatatgtgctgctagatgggggctcgcttccagactactgcacaactactccgtttgaagatactgcgcatgtcactggtcaaattacaacatagggcatctcac

SEQ ID NO: 41252 - DNA, 422 bp, Glycine max
  Clone ID: PAT_MRT3847_137252C.1
gggggggaaagggggaaattgaccaagttcatttggggggggcaatctttcttgggtaacctttttttaggttcttaaaaagggggctggggcacataaaatttttttttattatttttggccggttaaacaccaaccctagcaggaattttttggaactactaactttgcgcatgggtcataactcaaaaaaaaaaaaaaaggtaactaagggggaaacctaaaacaggtaaagataattttcaatggaaatgctcaagggatccctttccggaaaatctccaccactttcatgccaagacccaccttttttatcccaccaaaacacattcgaatgatcaggaccaccttttccaacaacattacacacagacgcaggactaggcctttaataattctggaaattaggttctgcccccacc

SEQ ID NO: 41253 - DNA, 1650 bp, Glycine max
  Clone ID: PAT_MRT3847_137253C.1
aaaaaagtttccatatacacaaagagagtgacgcgaaagaaaaatggtgtggaatttgtccctgtcagcaactagggtagggttccctccgccaaacccaaagaaagagtagaagaaacctacaaaactcatctctataaacaactccgtttgtcactccggcggctttagcaatcactccctccgttttgcgttttggattcatttatctgctgctttatcttaaaggccaagcgataaataacctctctctctctctctctctgtgagattgagaatccgatccttcgtttccgaaattctcgcgagatggacgagaacctgctcgacgatattatccggaggctcgtcgcggcgaagaacggtagaacgacgaagcaggtgcagcttacggaggcagaaattcgacaactctgtgtttcctccaaagagatctttctcagtcaacctaatcttctcgaactcgaggctcctattaagatttgtggagatgttcatggccaatactcagatcttttaaggctgttcgaatatgggggatacccacctgaagcaaattatttatttctcggagattatgttgatcgtggtaagcagagcatagagacaatatgtttactcctcgcctacaagatcaaatacaaggagaatttctttcttctcaggggcaaccatgagtgtgcatccatcaatcgtatatatggtttctatgatgagtgtaagaggaggtttaatgttcgcctctggaagacatttactgattgctttaattgccttcctgtcgctgctctgatagatgagaagatcctttgcatgcatggtggactatcgcctgatcttaaacacttggatcagattcgaagtattgctcgtcctattgatgtgccagatcatggccttctatgtgaccttctatgggctgatcctgataaagatcttgatgggtggggagaaaatgaccgaggtgtatcatttacatttggggctgacaccgttgttgaatttcttgaacatcatgatctcgatctgatttgcagagctcaccaggttgtagaggatggatatgagttttttgccaagcgtcagctggtgacgatattctccgcaccaaattactgcggtgaatttgataatgctggtgctatgatgagtgtggatgacaccttgacatgctctttccaaatacttaaatcttctgaaaagaaagggaaaggaggggtttggcatctttggctacagacccgtcaagcccaggaactccgccacataagggtgggaagaattaacattcccgagctatacaaggtcagtgagctgaatggaggcattcattatttgtattaggtcaaaggcttatcgttctgctgcctggcattcacaacatataaagcatgacgccttccctccttggcaacgaaactaaagactggcaaggaacaaggcacttcgttgtgcgacttcgattgaccctttccctttctttctccctttttcctttctgatagttttttttttttttttttaatgtacaatgcaaattcaaacttccatatggaggaatcctgaatatcttattttgtcgccagaattttaatttagattaaattcaaaatttcgaaccttccgcttttctccttgctgtcattactt

SEQ ID NO: 41254 - DNA, 136 bp, Glycine max
  Clone ID: PAT_MRT3847_137254C.1
atacttaattcaaatatgtatttaaataggagatagtccctaatggcaacaacaaagaaaagggccatagaggcagtacgcagagaaaaagaacattacaccaagggaaacgaataatgtacaaaactacaaatta

SEQ ID NO: 41255 - DNA, 1104 bp, Glycine max
  Clone ID: PAT_MRT3847_137255C.1
taacaaaacaaaatacaataaatttggtaaagggcagtggcactttaaagggaagaaagcaccacctcaaaccagaaggggaaagtgctcctaacattagattagaccctctaccatgctcctctgcctctgaagtctgaacctccccaggaatggcaatggagaagacaacattgtttgtgttgttgctgaatgtgcttcttgtgttcagtgcctctcttgtgtcctcagagcaacaaagtcatgtctcagctgtaggggacccaggaatgcaaagagatggtctaagggtggcctttgaagcttggaacttctgcaatgaagttggtcaagaagctcctcacatgggtagtccaagagctgctgattgttttgatctttcaggttctctgactcacaaggtcacagaagctgataacagacttggggtgggggactcatttcctggtataaaaccagaaaatatcaacaacacagacctttatgcaattgaaaaggaattgtatttgggttctctatgtgaagttgcagacaccccaagcccctggcagttttggatggtaatgctgaaaaatggaaactatgacaccaggtctgggttatgtcctcaggacgggaaaaaggtacccccttttagcccgggaaggtttccttgttttggacaagggtgcatgaatcaacccatcttgtgtcatcaatggacacagctcaaagatggcacaatgcaaggggggttcagtggtacttatgatttggattctggttgtggaggtgaacacgatggtgtgtcttactatgaggtagtttgggagaagaaagttaatgttgggagttgggtgttcaaacacaaactaaggacttcaaagaagtacccttggttgatgttgtaccttagagctgatgcaaccaaaggattctctggaggttaccattatgacactaggggaatgctaaaaactctctcaaagtcaccaaatttcaaggtgaggttgagcttggatatcaagaaggggggaggggccaagagccagttctatctgttagacattggaagctgctggaagaacaatggtgctccttgtgatggagatgtactcactgatg

SEQ ID NO: 41256 - DNA, 353 bp, Glycine max
  Clone ID: PAT_MRT3847_137256C.1
tttttccgggtgtgtgaggctccttttctctgggagccctagatgaatattatatattatttctttttattaggattccagggatctattaacattgcccatttcaactcgagctccaaggctacttttttttaaacaagcaaatgacaatgaaatcaattttttttttcgaggggtttaaacaccttagatgccctcggtcaagctaagatcagaccctcattggaagaccctaaggccggttgagcccagacccttcagggttgatcatatattcgcccacatcccaaagatgaaaagttttgcctataccggccaaagggactttgtgagatgggtacaccaacaaaacc

SEQ ID NO: 41257 - DNA, 749 bp, Glycine max
  Clone ID: PAT_MRT3847_137257C.1
cggacgcgtgggataagtctcttttccgtgatgacgacgtgcgtatcgggcatcatcgccggcgatccccctcatcgccgccggtagcagcaatccccggagccatggaaccgtaattccgatacggaaaaagtctcttcccgttcccatcgtttacgtcctcccacggtcgtttccacgttccgttgaattcctccccaccccttgacggaaaaatcaaaagtaaaagcacgcacgaacgcacgcgaatcggatacacaacagggtcatcgagtttacaataacttgcagaattgggcaagcgtttttgtttgtgtttcaatgggaatgaagaaggtagcgtcgggtgtgacgatggatcacgtgctgctggcgtcgcaggagacgaaggaggcacgtgaggctcggattcggagcctcttcgatttcttcgacagagagaatctcgggttcttggactactctcacattgaggccggtctctcggcgctccagattccggctgagtataagtacgcgaaggatttgctgaacgcctgcgatgccaacaaggatgggagagtggatttccaggagttcaggaagtacatggacgacaaggaactggagctttaccgcatttttcaggccatcgatgtcgcgcacaatggctgcattttgcccgagagctctgggaggcgcttggtagagcaggtattaagattgatgacgaggaactcgctcgttttgttgagcgtgttgataaggat

SEQ ID NO: 41258 - DNA, 244 bp, Glycine max
  Clone ID: PAT_MRT3847_137258C.1
atattttttgacgaaactttacccttttttaaggcataaaattccatcacaatctctatccgcctacaagcttgcaataacaaaagaggggcaaaacaaagagcagaaaatgctacataggaagcaaatgccaaacacagtaatgcccgtaaaaaatggatgaatttccaatggcgaatatataacaatttattctctcgttgtttaccacgcgtccgaacacgcattcgcccacgcgtccgta

SEQ ID NO: 41259 - DNA, 267 bp, Glycine max
  unsure (1)..(267): unsure at all n locations
  Clone ID: PAT_MRT3847_137259C.1
cgtaaagtacttcttcacttcttctcctccttctcgctagctcatcantttnctctntgtctctcattcagaatgaccaagaaggtgctatgcatgaaccctggccccatcgagtttgagccacgtgtactcaagtcctttgccatggagggcatttctcacgtggacaagacggtgattgagatttntggacaatgtcttgagaagacgcgcaaggttttcttggctccagacgggcaaccacttgtggtggcaggctctggcacg

SEQ ID NO: 41260 - DNA, 399 bp, Glycine max
  Clone ID: PAT_MRT3847_13725C.1
aaattccaatagttttcctatcatgttcaacatgcattgtatggatacttggatagaaggtagcataaacgttggatgagatatttcatttcattttatacatattttatagctaaaaaagattgtatgacttttgttgaatgcaatacagatccagggagcttgtcaccaaagcggacatctgttgattccacgcacagtgattctggagttaactattccgcttgatactcaatggacatcacaaaatcatagatggttgcaccctcttggaataccttttcgcttgtgaacaataaccctagctttttttttttctccccattttcatgtatagaaccttcttgtgtagctaatagatggacatgatggtgggcaagcctgcttatttttcaacca

SEQ ID NO: 41261 - DNA, 252 bp, Glycine max
  Clone ID: PAT_MRT3847_137260C.1
gcaaaaaaaatattgttaatattcatccctaataaaacagaaataccagacgggtacgtacttattgattccaaaagaggactaagttactcaaactttatttttcttattggccctcatttattggcacaaatcacaacacaacattccccttttaaaagagactcattaggaggggaggcgtatgccctaaatctacatatctgtcttggaatgctacaaaccaaaatcgaatggtatggggatgtttct

SEQ ID NO: 41262 - DNA, 526 bp, Glycine max
  Clone ID: PAT_MRT3847_137261C.1
aaacgcaaaacgccttatccacttttaagaaagggtcaataacaacaatttcggggggggcaacaatcttttttttttcttcacaattcaaaattcaaaaccccgaagaaaaattggggtgcccggggggttcaaattccagggggggtttccccttattacggggaagaaacctttttggtttttcctttaacaaaacctaacaggggggggtccgggtggactcagcccgattcgggggaggacgaccactccctgttgttattggttggggcggcggcgagggagttttcaattttggggggctggggggctttttggggggcccaggtttcaatggggaaatcgggcttggcgttgaggcccacccccaggatgacaatagggaggaagctggggacctaacaggggagcccccaatcctcccactggggggactggcccggggggggaggggtccaatagaagaggcaccccttggggctttccttggggcgggggggttgaccacggggttgggccggac

SEQ ID NO: 41263 - DNA, 449 bp, Glycine max
  Clone ID: PAT_MRT3847_137262C.1
ccaacccgtccggtctaacttgttaagtgttaggtgtaaaacttctaccatacacttgtgagtagtaaaatttacatcggttgcaagaaaaagtattgttaacactcaaattttgttataaaattcaacggttgaaaatttagtagaacgattaatttttatgttagttgaatgaggtgaagattaatataagtgaatatagaattgatgacgtatcaatattaatcaaataaagttagtcaaatatgaacaaggtcattacatatatctacactattagtcgaatgatagaatttgactaatattaatgttagttgaatgagaatgagaccaattcagttgattgtgcagctaaataatcttcaatatttactaagcatgaaagttagcttaacatggataagatcaaatatattacctacaatgttagtcaaatggtagaattcggt

SEQ ID NO: 41264 - DNA, 664 bp, Glycine max
  Clone ID: PAT_MRT3847_137263C.1
cccaattacaaagatgggaacaccataaaacttcaagggtctgcacctcctgatgccctaaggctccaattctctcactaattataagatatttgtctctctcaacccttttcttatttatagcgtgtcttatttcataagcctctaacctacctaactgcctaacttctcactaacagaccctaacactaacaggcataaaaccatgctctccctccaaaagtagcacaagtttgctgaataggtttcgcattatgtatctgcaatacaaatcttctgtctctgataaacaaattttccagttgaaatataaatctgcaaaatcaacgctgattatatgcagtttgtgaaagcccagtctccaacattgatatggttggactgtatttgatcttagcaacagctataattgagtcagtgtacccctataggctgctggcaatgttggccaaggtagtcgggtatcttgatgtcccatttaggaaaaaagttcactaatgatagcttgacctgaacatattccttcccctcagttctgtctatattgataatcgcgtttattgatacttcattatctcgtccttttcgtcaagacataaccttctaaatgtctggtgagcagattttttactatgccccaaagatgtctgagagttggaaagga

SEQ ID NO: 41265 - DNA, 237 bp, Glycine max
  Clone ID: PAT_MRT3847_137264C.1
gacaaaaacaacactattaacatttttaaaggatcaaattatacattaacccaaaaaggtgtacaactcatggatatactggctttaaaaaattatacaactcaatataagagtaagtggccactgctaaaacgttgcattataatggtcactgatggtctaaggttgatccatataatgccattcttttaaggtaacaaattacaactagttttttcactgaggtacttatatttc

SEQ ID NO: 41266 - DNA, 570 bp, Glycine max
  unsure (1)..(570): unsure at all n locations
  Clone ID: PAT_MRT3847_137265C.1
gcgagtttttttttaatggttttacaatacgagaggcagaatggtttggcaccactgtttttaaaagcatcacccaatgtgtaagatcacacgctgctgtgatggatcactgataagattgctgaaaggtaggatcattgtagggtcacgaggaaataaggaaactaaataaaaataagaaaattaggaaacaaggaaataatatctcatcaaattagaatataatcacaacatatggaaagaagaacattaatgcatttgaaacacagattcccacttctcctaagtgtcttttctacagcttaaacttgacagattcaaagaagtcttcaatgccgataaatgataattacttcaagctcagtgggatgttaatgaactcctatctcttctggccaagtagaaagctaaaccattattaacacaaaatattccatttcttaatggcttaatgcatacaaaatgtttttctctcttgtagatagtttagctactttntctaatgctatgatacttcttttgaatgcattaattaatacatggtacatgtgataccatgagcaaatcaat

SEQ ID NO: 41267 - DNA, 604 bp, Glycine max
  Clone ID: PAT_MRT3847_137266C.1
aggttggagcctccaatccctgagaactatttcggcaactgtgtgtggggtaattcggtggatgctgacccactagtcttcataaaggaagaagcttttggtattgttgcaaagagtattcatagtaaaataaaagagatgttagataaggggatttttcatggggcggatagttcgttttctaaatacgagtctatggcaaaggagaaagttgaagtctttgcaattgctgggtctaatcgatttggagtttatggaactgattttggttgggggaagcctgcaaaggtcgagataacatcggtgggtgggggtttaaccattgggttggcagagagcaaagatgggaatggtggagttgaagtggggcttgttctgaagaaaaatgtcatggatctctttgccaatactgtttcgtcgaggagtgtcagatgagtaatttatttgtaccagtagttcttgttttcatatagatgagtaacttatttgtaccagtattttttgtctgcaagtatgaacaaaactttctgcgccagaaaaaagttctaaacacgttccctgttttttataggtttagtttaactaaaactaagaaagaaaaatg

SEQ ID NO: 41268 - DNA, 451 bp, Glycine max
  Clone ID: PAT_MRT3847_137267C.1
ggtttttgactgaaaaaaacagtattttgatttctgactgagagaaacaagcgatgcgattcgcgtggaaaacacaaagggacgcacgggactgaaaaacattttctgcattacaaattgacaacttttcatatacatagttaagtcctacctcacaggaggcggaagtatgcctactatatctgctaatttaggacttgatatcctaaagcaacgataggaacacgtcgccgtgagggaaatatatacaacagcatatgaaccttttcgctcgcgccaaacagaaacatggaaagtctcccactctaccttgaacatataaaaaggtggggcgagcatctaccgtgctataatattatgactggtgaggggtctccgaacaaccttatattatcaagttgttcatattggggtggagaaaaaaaacaaaaaaaccccctttttccaccat

SEQ ID NO: 41269 - DNA, 632 bp, Glycine max
  unsure (1)..(632): unsure at all n locations
  Clone ID: PAT_MRT3847_137268C.1
cccgcagtcagattattccggtcgacagctcacagtccgcgccgccctttttttttttttttttttttttttttcttttttttatttatttttttttttttttttttttttgggttggttttttttttctctcattttatatgttaatccactttgttacgcaagcatgataaaatttacactaacaaacaaccaaaggcccaaaaacaaaagcncctacacaagatgggcagcactgacacccacggaggggaaacacacccaagacaaaaaaagacggacacaacgaccgcaacggaccccacaagagcaaagacaccgggcaccaaaaaaaaaaaaaaaaaaaaaaacgggcgggagaaacaaaaaaaaaaaggcccaggacacaaaaaacccctacctggatcaaagcaaaaaccaaaccacagcccccaaaaaaaaaaagaggggacaaaaaaaaaaggcccccaaccccgtggggcaagcccagaaccacaaccaagcgggagaaaaaaaaaaaaaaaacgggggccgtacaaaagaccgcccccgaaaaaaaaagggcgggggggaacccccaacgaaaaaaaaaaaaaaaccaatccccgggggcaaaaaaaagggaaaaaccc

SEQ ID NO: 41270 - DNA, 226 bp, Glycine max
  Clone ID: PAT_MRT3847_137269C.1
ggggttttgtgctgttgatcactgcttcatcgcttcaataatactcccgattctctatcctgatctacgattccattgtgaagactcatggaatgggagctgcattcatacttaagtctcagtgcatgaagcaaaggtaggctgataagtcatacaagaaatcccatcttgcgaattactggacgaaaccttttgccggttcatcacatgccattggaattgtcct

SEQ ID NO: 41271 - DNA, 201 bp, Glycine max
  unsure (1)..(201): unsure at all n locations
  Clone ID: PAT_MRT3847_13726C.1
cgaacttaaacttggaatttggtctagaggggaaagtttgcctatataacattgacactaagttacttggcgcgtaattatgttattattaaaatttgcaaaatgacctgttttgcagtcaaannaaaaaaaaanaaaaaaaaannnccccntnaaaaaaaaagaaagnnnnnnanattgttagggagagaattgaacaaa

SEQ ID NO: 41272 - DNA, 800 bp, Glycine max
  unsure (1)..(800): unsure at all n locations
  Clone ID: PAT_MRT3847_137270C.1
tataattaagtcaaaaatatttgtttaccaaatgatcgaacaaattttttcgctaataaaaaaattaaaaactaattgaaatatcttttccaacataattttaatttatatctacatagaaattattcggttgtcatcacatgtcataagttgacagatttaccatttttttaatattttggtttttctcttttttcttttctgtgacttaaaacacgggatccacactcctagtaataagttaaaactctaccaacaccaacaacaagtatcctcaccgctgatgccatgcagttttggcgtttcagtttgatttttgctctgtaggcttcatttgtgacttgtgagccttgacacgttgtagacatgccgtaacaatcgatatcttactcatttcggttattgttcaatatgcatgccaatgcgttaatataatttgaaacaaacaaatgtaaatgctgtcacataattctattagctcatgtacaacttaatcttctaactcacgttctatttgcacctgcatatcttaatcttccatatccaaagattatggtgaatactttattccatccgtaaagatgaatgaggattcaaatcttaaattattaaaaaacaaaaatagctaccgggttaattagttttnnntttgatgtatgcaactatgtactggttttcctaccaattatgggtggtgcataagcgtgctcattgaaaggcgtgccatatacaaaactagaaatgtgacnngcgnaacaccaccgnnanncannnnaannnnnngatccnnannagnnnnc

SEQ ID NO: 41273 - DNA, 1270 bp, Glycine max
  Clone ID: PAT_MRT3847_137271C.1
ggctcgagggcgaggagaagttcaagcaggagatccagagcctccttgatggcaacttcggcagccacgcgcgccaccgcaccttcgtctcctggcgccgcttcatccaccacgaccgcggcagcgccggagtcaccgccgccaaactcccggcgactatccggtcgccgctcttctaccgctcctggctcgacttccggaaggtcctccacgactggttccggaagcgacgattccaacccggtatcatgtccgggttgactcggtcaattaagcttccaattgattcacacaacaacaacaacaaactacaaaccaataacaaaaataaaaacaaatactcttcttgtgccgtagttggaaacagtggaattttgctgaatagaaactacggtagtgaaattgattcccatgaggttgtgataaggttaaacaatgctagggttgatcactttgaaaccaaggttgggaaaaaaactagcatttcattcatgaatagtaacatcttgcatttgtgtgctagaaggggagggtgcttttgccacccttatggtgataacgttccaattgtaatgtacatttgtcaagccttgcatttcttggactacactgtgtgcaatgcttctcacaaggctcctttgttggtcactgatcctaggtttgatgtgttgtgtgcgaggattgtgaagtactattcgttgaaaaggtttgtggaggagagtgggaagggtttggagaagtggggtgaggctcatgatggttctctttttcactactcttcagggatgcaggctgtgatactggctttggggatttgtgatagggttagcatttttgggtttgggaaatcgacttctgctaagcaccattaccacactaaccagaaggctgagcttcacttgcatgattatgaggctgagtatgcgttttatagggaccttgtggatgggaaaagggctataccctttcttgaggacaggtttaaggttcctcctgttgttatgtatcagtgataggtgctgaactgctactgctgcaagtggtggtggtggagggcatctgtgacttgttgttctgttattgtaatacttgtgaaatgcacagatagtggaaaaagcaaaaaatactgattcaagattctttttttgtttgtgttgtactgtccaacatgaagcctcaaggcaacaccaagtgtaaattttgggttagatcaatacagctttgaccccgtcaatgattaagcagaaaaaaaaaaaaaaaaaaaagaagg

SEQ ID NO: 41274 - DNA, 372 bp, Glycine max
  Clone ID: PAT_MRT3847_137272C.1
gtcgacccacgcgtccgtggtgagaaccttggtaggggaacaaagataactttgtttcttaaggaagatcaacttgagtatcttgaggaacgccgtctgaaggatttgataaagaagcattctgaattcattagctatccaatttctctctggattgagaagactactgaaaaggagatttctgatgatgaggatgaggaagagaaaaaggaaataagtgtcttccattctgggaggggtagggtttatcgtgatgggtgttccaattcaaaagtttgaaatttctttgtctttgatttcatgtttttgttaccctgattgatcatatttttttcatattaacaattgaaataatacatgtgctttctttca

SEQ ID NO: 41275 - DNA, 331 bp, Glycine max
  Clone ID: PAT_MRT3847_137273C.1
gttggttgttttcttattttttgccccccaacaaaattgtattaggttaaaagccacatttttcgttgggggggggaggttctaaatggaaaaacaacagtggttttacccccaatctttcaggggatttgggtggatgtgttaaacgcgctcatatacaaaaaaaaacacttactaaattggccatcatcctggaaccaaagggttgagaggactttaaacgaaaaaaaccctttggggccatttttataaactaaagggttgtggggccggaaaaaaaaagggggtgaatggtgctttaattttgaaaaggcaaatgcgttcaaagttc

SEQ ID NO: 41276 - DNA, 467 bp, Glycine max
  Clone ID: PAT_MRT3847_137274C.1
aaaaaaccacagttttgaaacacacacagagaaacagagagattcttccattactacaaaatagaaaaataaaacttcaattgcaccttttggtgtctttttcaattctcatcccaattggtgttcatttccccaattttgaccctttgtgatccttttctcaaatctcacactttgtttggaatctgggaaaaatggggttgttttctgggatatttctggggatggtactgggcatagcattgatggctgcgtggcaacgcatgatgacgtaccgtagcgccaagagaattgcaaaggcagttgacattaaactccttgggtcccttaacagagatgatttaaagaaaatctgtggggataattttcctgaatggatatcttttcccatatatgagcaggtgaaatggctaaacaagcagctgtccaaactttggccatttgtggcagatgcagcaacattggtg

SEQ ID NO: 41277 - DNA, 254 bp, Glycine max
  Clone ID: PAT_MRT3847_137275C.1
tttttgtatgaaacagtcgcaccaaaaataccgcaggggggggaaagtttaaagggaacacggacatagttctctttgtcctagcaaaaagggccccactataccgaacgaccggaaccgaagtcccatatcggcctgagggaaatcggactgagtcacggaggcataccctttgcctcttaaaaggtcagggaccctccgttgaggtatggcactagactatgtaccgccattcttgtagacattcggatcca

SEQ ID NO: 41278 - DNA, 324 bp, Glycine max
  Clone ID: PAT_MRT3847_137276C.1
acacagaaagttttatttacctatatattatctaattctctatcagcatctggaagtcccacattgaactgctgttttgtccttagctaggactctaaaaagtgaaagttacctaagtgtcacaaacttacgtaacaaaataaaataacataatacatcatgcacaatcgatctatggggatggctgtgaacaagtcaaacttgcgtcgatgtgccccactaacgagaagagcgaggtaaacatatcacctgccacagccttgcaatatgcgacgtttgcattagccaaccgactctggaacattgcccactaccttttacatg

SEQ ID NO: 41279 - DNA, 1765 bp, Glycine max
  Clone ID: PAT_MRT3847_137277C.1
ctgatactcatgagcgtataaggcaatgtattttccctgctacgtaactgattcatttgtccttgatgaagcccaacaaattacaaatcacagtcaaggtgcagctaaactttataaaaagcttacccatctgaaacaaaaaaatgatgctcctgaaaggcagaggcgtgatgggtgtttgggactttttggccgtaaagttgatactttagatcactatgaaaggagtttgggtgatattgaagataatgtgagaatggaacagtcctcactagaagcgaaggaacttcaagctgccttcgtctcatttaagacacgatttggtgctgcaatagctttacacattcaagaaagtgtcaatcccacggaatggattactgagaaagctcctgagcctcatgatgtttattggcctttctttaccgtttcatttattaaaagatggatcagcaagctggtagtttatgttgcatgtgcttttattacagttttgtttttgataccagttgcaatagtacaaggtcttacccatctggatcaattggaaatgtggttcccgtttttgaaaggcatactaagactgtcaattgtgagccaagttataacaggataccttcccagtttgattcttcagttgtttctgtcatttgttccacctactatgattatgctttcatccttgcaaggatacatttcatggagtcaaatacaaaaaagtgcatgcactaaagtattgtggtttaccatttggaacattttctttgcaaatgtcctatcagggtcagctctctatcgagtaaatgtctttcttgagccaaaagagattcccagaatactagcggaagctgtaccatcccaggcatccttcttcatagcttatgttgtgacttctggatggaccgctatagcatcagaactctttcgattgactacacttctttccaattttataagtagaactttttgtagaaataatgatgatgattttgagccccctttaattccttaccatagcgaaattcccaggattcgtctctttggtgttcttggtgtaacatacttcatacttgctccactgatactgccatttctcttgatctacttttgtttgggatacatcattttccgcaatcagctgctgaaagtttacgttccaaagtatgagactggaggagagttttggcctacagtgcacagctccacaattttttcattgatactgatgcatataatagccattggtctttttggtttgaagaagcttcctctagcatccatattgattcttcctcttccaattctcacacttctattcaatgagtattgccagaaacggttcttccctatattcaagaattattctgctgagtgtttgattaagaaggacagagcagaccaaaacgagcataatatgtctgaattttatgacaagttggccaatgcatacaatgatccagctctgatgcgagtgaaatattctgaaaggtctgatagtcacagatctccacttcttcatagttctgaatagttcatagctacatttgtatggccttggctgcaactgtatataaggcaatgtattttcactttgaccgcactgatttggttgtccttgatgaagcatgtctgttgttttcttgtaaattgttagaattgataatgtgtttgtaacgagtgtggaaacttgtaacattagtataagtcattgcaaggccttgtttgtgagcactagcattcattgtgaaaagaaatatagtacctgact

SEQ ID NO: 41280 - DNA, 518 bp, Glycine max
  Clone ID: PAT_MRT3847_137278C.1
gtcgagggtatggtaattggggaacatgggatggctataacagaaggagggaaaacatgtcatggtctaagacccctactaatggtaataatgagtatcatgtgaataataggggaagaagaaactatagagaaggaggaggaagaaggggcaattttgtttatgtgcctaaggaggtgcctcctactcctactcctgctggatggtaagtgagtgcaaaggcgaagtgtcaaagaccttaggctgagactgcaacaaggggaccccaatgaaactgctgaggtggctgaagatatataaattttggtatcttggtaaaacatgtaagatatggtagtatataagaagacaaagacagcatcctatattctaatacatttctatgaaaggtttatggtatattttggagtttatagtttaagaatagtagtacctgccgtgttgataggtttatgtatatgcagagaaaatatgcatagacaattttaaatgaagctaaatagtgcattcttgtctcc

SEQ ID NO: 41281 - DNA, 265 bp, Glycine max
  Clone ID: PAT_MRT3847_137279C.1
ggttaatgactttgtgtgcttatcatacattgcttatgttaccgaacaagtgatgatgatggagaaaaccattcttaagaggcttgaatagtactcaacagtggcaacatcctatgtattacttgggtggtatatcaaaggctccacttcacctgctaaagacatggaacacacggcatccatccttgctgaagttgctttgatccacaatcctactgttatcttctactggcccttatctaatcgctgcttatgctgtattgat

SEQ ID NO: 41282 - DNA, 501 bp, Glycine max
  Clone ID: PAT_MRT3847_13727C.1
ttggttttgtgccacttgttgctttgttttatgccacctgctgctgtgttgccttttttctgccacgttgagatgtttcctctctcttcatctcttttcttctttacacaaagtctgagcattttctgtttttgcttctcttctcatcttcattctattttttttagcccaattgcatttctctctctatttctcccgtagagttggttgtctcttccctcctttctttctcttccttccttcctttctttcttcttctattttcttcttttctcttccgattcgaacacaaccagccgcaagaaagtcattttctttgtgttgtgcatgttgcattttctgtttttaatatgattctcttctcatcttcattctattctttggtctgattttttgtggtttgatttttgggacagactacagtaacaacggtggtgctgaaggtcaggacgatgttgaataataaagcattcagcaggcaagttgtttctacttggaagg

SEQ ID NO: 41283 - DNA, 269 bp, Glycine max
  unsure (1)..(269): unsure at all n locations
  Clone ID: PAT_MRT3847_137280C.1
tacaaaggttgctgtaggagataagattgcagtagtgctaagtgctaacacctgcagtgaacaatggcctctgcatcagcatctctgctcaagtcttcacttgtccttgacaagtctnattgggtnangggaaaaccntncnacattttcatcnatcttngnangnnacccccaaccccttangctnnccataaaacngtcccagcggataacncgtaanaccggaaaaaatggnttcccaggngggggtttttgccntggnnaanccc

SEQ ID NO: 41284 - DNA, 147 bp, Glycine max
  Clone ID: PAT_MRT3847_137281C.1
tgcagaccatccgtgtcaaaaacctgaataaatggagaggcaggattacttttattgaatgaaccaagggggccaacagggcgttgatttctatcgttgagaaacaagataaaaaatacatgaatgggatggctcagatttttatat

SEQ ID NO: 41285 - DNA, 532 bp, Glycine max
  unsure (1)..(532): unsure at all n locations
  Clone ID: PAT_MRT3847_137282C.1
cttattttgaatctaaaaaggtgataaattgataccttttatatctaaggaagactgtaaaaaaggaaacaagcaagaaacagagaatgcgcagaaagatatgagagtaaatgctcccccaaagtcagataagattctctggactcctatttccattaccaaattcctccatatcccccacaatcattacccctccattcttataccagaaccctctcagcaattctttgtcctctaactaacttattcccttgacaaaagtctactccaaattagacccatttgccctcttgggcctacggacataaacctgaaaaggtttcttctctttgggccggttcccatcataaattatgtcccacaacacagttttgtcctgtttcaagatttgttctaaactttgcttagttagtctgtaaaattagcgttgttctagatctacaaaatttatcagtttattatgttcataggatatatggttattagttccatgttcaatacanttttctggccaagtggtttatggaaatac

SEQ ID NO: 41286 - DNA, 288 bp, Glycine max
  unsure (1)..(288): unsure at all n locations
  Clone ID: PAT_MRT3847_137283C.1
aanaaaaaaaaacaaaaagaattattttgatttggaaaaaagaaaagaaagttagggttttaaaaccttaaaccaccttaaaaaccctttacattcctccttggggggaaggggggacaaaaaaaacctgttgacggccggaacaaaaaaacaagggggcctgcgcgcttgccccaaattggggcttttggggggacccgggaaaacccgcgggggccccccgggtaaccccggtccgttccctccgggcttaccaggtttccaaattttgacttaaataagggcttg

SEQ ID NO: 41287 - DNA, 373 bp, Glycine max
  Clone ID: PAT_MRT3847_137284C.1
ccattcaataaggcaaacaccagggaagggcgaccctactataccaccacaaatcgcctcagatatacagcaacaccttcgaccgctcacaacagaaaacgccggcggtttcatgaccccataaaacaccggaagcagaacaacaacaagaagcagcagcaggagcgcgagggcacaagggagagggaacaaccgcgagaagcagaagaagaatcgtcatcgaagaaggttctagaacaagaacacacaacaacaccaacaacgccgatgccgaaggagctggagcaagagctaggttcaacaacaatccaacggttctacgacgcgcgcgacacccggcacgcgcgcgaaacggtcggcgaatagcctgaca

SEQ ID NO: 41288 - DNA, 966 bp, Glycine max
  Clone ID: PAT_MRT3847_137285C.1
tgatccgaacggtgctaggttgtggttagctgagacggcaaagattttcgaggctataggttgccttgaggagcataatgttctttatgcgacagtgcatgctccaaggggaggctgagacgacagccaccaccgaaattcccaagtctccgttgacatctttatctgcatctaattcaatatacaacactgaaactttcaaagctcttttgagaacttgttattgcaatggctgacatagatcgctcctttgataataatgtttctgctgtttctactgagaaatcaagccaagtttcagatgttgaattttctgaagctgaggaaatccttattgccatggtgtataatctggttggggagaggtggtctttgattgctggaagaattcctggaagaactgcagaagagatagagaaatattggacttcaagattttcgactagccaatgatcggtggcagaaaacgaagcaaggaaatttttggtgcctacaagtcattacagtgactttgtggggatatgaaatggaaattgatcctattaatcatatgggtacttatatttgcattttgcggtaaccaacaaaaaggggcatgccattctaaaagcccttatgtttaatgttacttaattttatctttgtaatgttcccaagtgttttaggcaatctatgattcagatctgttcgatcatggcaagaacagtatgtacttaattaatgcagatcacctgcatgtgcatgtgtatttctggttcatttagccttcttgctaatggttacaactagctttgccttggcctatagcattggatttggaagcggattttttctttgcatgtatacatctgttgatgtacgtcaagtgaagtatgtttttaatgcagaccacctgcatgtgcatgtgtatttctggttcatttagcttcttgctaatggttctacaattgtcatgtggctacaaaa

SEQ ID NO: 41289 - DNA, 536 bp, Glycine max
  Clone ID: PAT_MRT3847_137286C.1
aacatggaacaaaaagcagtattgtagtgtgtagaaaaaaaaattgaatataaattttgttgttgctttaggaggcagacgagaaaaagaaaaactacttagaagagatatgacagaagagaaaatacaaatagaagagataatgtcatcacgtccttaaaaatggttatgtaaaatttcacttaatgattacacagttgacaatttgcatagcatacccaatgtgtatgcatccaatatcgaaataggaagaatgatagggaccaaaataaaaacaagacaaacaaaacaaaaccttagtacaagaaaacaacaaaagtgctgatgctgacgacgatcgattatcgaatattgggttggaaaagaacaaaagatggaatgaatgactcaattcccaaaatgagcaagcgcgtgagagaaggcaaggcagtgtgcgcccactttgcattgactgattctgcgtaacctgctgcagatcaatgctttgtatcctactcaggaattactaggcaatgacaagtcgacctgcaggcatg

SEQ ID NO: 41290 - DNA, 196 bp, Glycine max
  Clone ID: PAT_MRT3847_137287C.1
tgttgaacaaaggacttttatgagaacaacttttacagaattacgatgaacaaagattgcgaggaggaagattagatccccatgcacgagaacaacaacgaccttgcgtaaccgggatttggatagaaatatttatttattgataattatggcgatacatggaggggaattcattgggaatattatagagcccact

SEQ ID NO: 41291 - DNA, 856 bp, Glycine max
  Clone ID: PAT_MRT3847_137288C.1
ggctcgagctcgagccgctcgagcggctcgagcggctcgagagcagaaattcatacaggcttttaaattgatgttatttgcaaatatgtgtctcctaacagcaactgacttgaagcgtatttttgagaaagtggacgtgaatggcgacggattggtgagccttgaggaactgaatcgattgcttcagatgacgggcaattcccaatatagcatagaagagttggaatcacttgtggaaaagaaaagtcttggtttcagtgatttcttgttcttttacaactcaatatcggagcagaacaagggagagagcaaaggaagtgagttggagagcgacctggccaagacgtttgaggtgtttgacttggacggagatggtttcatcacaagccaagaccttgagtctgtcttgaagaggcttggcttctgggatcaaacacatgccaaggattgcagaaccatgattcgtttctatgacaccaatttcgatggtcgccttgattttcaggaattcaagaccatgatgttgctcaccaaagcttgaatatattcatcattcaattcattttccatctcaatcaataatactatgggtgcttttctgttctacaatatcatttttatggcctcaacttcttcactctgaaccaatcatgttatgtgtgtttttaaggttatgtcctctgctcgatgtatgcctagtgttgtttatattagttaattaagcccatgctactatcaagatacttctcctttgtttctttaactttgaggaaagaaaaagaaaattttttaaatttagattaaaaagaaaataaatgaaaagaaaagttcaggaatcatttgatttctatttccc

SEQ ID NO: 41292 - DNA, 209 bp, Glycine max
  Clone ID: PAT_MRT3847_137289C.1
ggaagggcaaaaccaaccggggttaagaagaaaaaaaatccttcaaagaaatattttgtcccatgggacatgaaacctactcgtttttagatattgggattcaacacctttggggcttaattttaaattatcagagggccatgggggaaccaccttggtttacaggaggagcaccaccaccttgatttggagaagcagcacctggactt

SEQ ID NO: 41293 - DNA, 793 bp, Glycine max
  unsure (1)..(793): unsure at all n locations
  Clone ID: PAT_MRT3847_13728C.1
gcatgcctgcagtgtatacagcttgggaggaacaagatcaatttcttctagcgtggcttcaatccaccattgccggcgaaatgcttccacgggtgattggatgcaaatcgtcatggcaactgtggaacaaaatccactcccactttcactctctcactcgcaccaaggctcgacaaattcgcatcgagctttgaagtctgtgtcttctacagagcacctcgatatggttctcgatggtcttcctgatgagtatgagtcgacgatttcctggttagtagccgatttgagcatctctccattgacgaagttgaaactctccttctagagtatgaagagcaaattgaaaagtccaagaagtcactcgtttccatcaatcttactgaaggcacctctgaaaaatcatccagtggtaaatctgatcctccttctcaacctgcaaaccctaattcgcaagctcaggtcaatctgacctcacaacctccttccagtgacaacacctacaatgactttatatgattttcaaaagtgaaattgaatagctaaagagttagtttcagtaaattaaataagggttaaataagttttttatgcttgtagaatttcaaattttgggttttaatccctataatttcccccccatttttagtccctctttntatttttcttgctcataattagtccctatggggttaaatttttgccttattgttgcttgggcaaaaaaaaaaaagaaattctacaagcatatacagtagtccctttttgttgcccagggactaaaacccaaatctga

SEQ ID NO: 41294 - DNA, 301 bp, Glycine max
  Clone ID: PAT_MRT3847_137290C.1
ctttgatggaaattttccagtggattcttggttaccaatttttgtgaattgtctttatcctgtaagtcaattaccttcagaagctgtcgttgtaaatgttacatgtggtagtggacgttgtggttcactcaccactgcttggatttgcattgcattctacagatgctccttgcttctgaaccaaatgattatctcagttctctggaaaggatagaaaatttgtgttctcactggacttgatactttttcacaaactaaactggttgttcttattggctttggtaaggtaacacacaagaat

SEQ ID NO: 41295 - DNA, 307 bp, Glycine max
  Clone ID: PAT_MRT3847_137291C.1
caccgcctccgctcgcatcattccctccgtctcactctccacctcttctcgctccttcttctccttatcatcctcttccaaactcaaatgcttgcgctcctctcctcgcatttcacacctttttctcaatcagcaaaaagcggaggttcgcgtctcgagtggaagatacggaacagtgtcagcaccgaagtacgttgcgtatgatcctgatcagttgaagagcgctagacaagacatcaaggagcttctgcactccaagtcctgcgatcctatgcctcatttgatcgacaggcataacggaagtacc

SEQ ID NO: 41296 - DNA, 392 bp, Glycine max
  Clone ID: PAT_MRT3847_137292C.1
gaatgcggctaatgcattgtgatttcatcaagacatctccaaagctgcaattctgcagttagccagttacagtttcagccatggatcacaatttatcggagatcaagagatatgaatgtgaataaattgagctttaaccgatcctacctctgcaagtggtataaaaaattattaatattttaacccaactttttttttacaagtctttgtttttaatttcagattgaaaaatagtatacaagactgatgtagtataccaatgcaacaaatgaaacaacgcataggggatctagttttatatggtactataccttgtagttttcaagcatataaaatgtacggtttactcgtatgcttgtcgttttctttctatgtacgatttactttgtagt

SEQ ID NO: 41297 - DNA, 286 bp, Glycine max
  Clone ID: PAT_MRT3847_137293C.1
aaatcatttaaacacatgttgtttttgtatgcgcacttccaagtgcgcaagtcattgtacaagaacaacagtgcaatgtgtttgaccctatttaaacttcatggttgcgaattgaaggagatttgatttacgggaggagagctctctagggttgaggggaaggctatgaagctcttccccttgctctccatggcttccctaacatttctcatcaactctttcatctatttgcatattttcctcgtgtggttatgtaattggatttatccatttgggggttgatgta

SEQ ID NO: 41298 - DNA, 626 bp, Glycine max
  Clone ID: PAT_MRT3847_137294C.1
catacagttacagaagttccaacataaatgggaatcatcactcgcagttctgctggtagaaaaccaagtgaaattatgaagttttttgtgacaacttttattagtatagttttaggattctttataggagtatcagttccaacattgtcaataacaaaatctcgagccgctttataggagtatcatttccagcattgactacaaagttgaatctcccatccagcttgcttccctcttttgatatttcttacatacaaaagaaatatgcaggtggcaatgcaccgtcttttgtgaagaataataacagcatctcatcaaagcatcaattaataaatgatacattgaagatatgggttccatcaaatccaagaggtgcagaaagattacctcctgagattattgaagctgagacggacttatatttgcgtagattgtggggtcagcccagtgaggatttaacatcaaagccaaagtaccttgtgactttcactgttggttatagtcagagatataatattgatgcaaacgtgaaaaagttctcagagaactttacaatagttctatttcattatgatggcaaaacaactgaatggggtgaggttgagtggtcaaagcgggcaattcat

SEQ ID NO: 41299 - DNA, 497 bp, Glycine max
  unsure (1)..(497): unsure at all n locations
  Clone ID: PAT_MRT3847_137295C.1
ctcgacagactgttgaaaaaatgatgtttgaccagancagaagtctatgggcctccctaccagtgaagagctccagaagcaggaaatgttgaagaatttatgtctgagcatccggagatggacttttcaagggctaaaatatcataaatggtgcattactattgacatccttttttgggtctgaccttattgcttgcaggctggtccagctattattatactatagtgtttacctttggtctcagtttagtatggtgttatctctttttgggttgtgaaacgcaatgaactttgttcatagtagtttcttttttggatagagaatttgcagtcagatatatattggaaacgacctttattgcatacaggttggtccagctcttcttatacttactggtgttacctttgatcgcggtttatcttgttaacactttgattgtgaacacggtaaaactgtgttcataatagttaatattttggattgggaatttgcggcc

SEQ ID NO: 41300 - DNA, 253 bp, Glycine max
  Clone ID: PAT_MRT3847_137296C.1
tcaattgactgctatagcagacattgtaaactaccatgattggaaagatgttattgctttttttttttatgatgagcatgggagaaatggaattggtgtattatgttataaccttgctgagacgccttgcaggatatcatataaagcacctttgagcccggacacatctatggaaaacatttctaatgtgcttgttccggtggctctggcagaatcactgtcaatagtggtttatgcaaatactctatttggc

SEQ ID NO: 41301 - DNA, 826 bp, Glycine max
  unsure (1)..(826): unsure at all n locations
  Clone ID: PAT_MRT3847_137297C.1
tacttaatgggagtgtagttaatttaaagaggggctaaaagaacaatgcgattctcaaaagcttccttctacactcttcttctccgcaaacctcataaccatcaccatcaaaactacgtcgttttatcgcggcgtcgcgtagtgaccttggcagtgggtgtgttgatcttgctgagtgctctctacattttctggccatcgggtcctgatctgaagatcgtggggctgaaactgaggcgcataaaggtgcaccctgtgccgccaatcaccatagacatctccatgcttctcacgctgagggtgcacaacgttgacgtctacttcatggacttcggagcggttaacgtcgccgtcgcctacagggggaagatgctgggccacgtgacgtccaggcgcatgcacgtgagggccagggggtcttcctacgtggatgctgacgtggaatttgctggcatcagcgtgctaccggagcttgtgttgctgctggaggacgtggccagaggtatcgtaccctttgataccattagccatgctaagggccaattgggccttctcttctttcacttccccatcaaggcaaaactatcgtgtgaggttgtggtcagtataataaaccagaccattgttcgtcaacattgtctccacgagtgaccacacagggtctcccgaagagtccaaagatgtatgcccccactctatgtgtatgcatccattcaaattaatttagatgtgtgtaattggtaaatttaaaataatattangtaggtgcattgtgaaataccccccactgtaactaatgtataatattaatattatgggtacccta

SEQ ID NO: 41302 - DNA, 168 bp, Glycine max
  Clone ID: PAT_MRT3847_137298C.1
cggaagctactcagacccagagacatcgcttcgtgctctctcaatggccaccgcaccggcccccgctccggctccggctccggctccggtgaagtcgcaggctctgcacaactttgccctcccccacttgaaatcgggcgccagcggcaagaccaacccctcaacgcc

SEQ ID NO: 41303 - DNA, 363 bp, Glycine max
  unsure (1)..(363): unsure at all n locations
  Clone ID: PAT_MRT3847_137299C.1
gccactctttcgaatactacagaattttgttttgcatgagaactattaacataagaccggacattgtttccttagagcaagttacacacggtgcataataagaccactttgatcatgataagaagtctgttctgaataaagtcaaagcaaaggctaataaaattaaggacacgattaataagcatggccatctagtgcttgatcgtggtcatgagtataacattnaagatcagcatacccttgatgatcatgacttatactatgattattaaatgtctgaagacccacaatttcatataacaccaattcacgaaattgaatatgtttaaacttgcacaccttcttctgancaattcgtaaatt

SEQ ID NO: 41304 - DNA, 759 bp, Glycine max
  Clone ID: PAT_MRT3847_13729C.1
ttgggttttgttaactggaagaattttgatttggtaagagtttacagtggagaaaaaaaagtggttcatagggtggagttggttatcaacgattcagcgtgcctcatgttttgccctcccatctgatgaatgctactctgactgaagttaggtgaattggtagttttattggtagcttgattttgaaatgcctcctaatccttttggttcatacattgaacctgcctttacctcattcctttttccaagtcaatttcaacttaagttggcttaccttcaggaccctccaaagttgaccacaccaaatacttgagcatatgctttggttcttcacagtgaggcttctaataggagcatctatggttatatgatggtaccttgaatgtagttcccatgtgggtggaacttgtgcttatttgttgttctactgatttctgcaggcgaaacaatagagttggggaactaagattcctctagggacttgtttgttactgttcttcatgctcaaccacggacaaggaagttgattttgtaatgtgtcactgctggaattttgtaatactaggatgatctggctgtcagtccatcagttcatggagactgtctatacttcagtcacgaggttccatgttcatactttagcttccatgcaattggacaaacggtgattgataaacaagtgtatatagaaagtaaaagaaccctttgtcgtaaacggttttgaaggccatagaagccattcgaagaggtacaataaat

SEQ ID NO: 41305 - DNA, 257 bp, Glycine max
  Clone ID: PAT_MRT3847_1372C.1
cttagagaattgtgtaaggggttctagttcaattggttaagtaaaggcacctgagttgttgtaaatctcctgaaactgtctttgatttgcacggatttaaaaatacttagagaattgtgtattcagtgaagctgggattttttttcaaaaaaaaaaaaaaaaaaaaaaaaaaaaaaaaaaaaaaaaaaaaaaaaaaaaaaaaaaaaaaaaaaaaaaaaaaaaaaaaaaaaaaaaaaaaaaaaaaaaaaaaaaaaaaa

SEQ ID NO: 41306 - DNA, 334 bp, Glycine max
  Clone ID: PAT_MRT3847_137300C.1
gatttactgtagaatgatcgacgggttttttgggtctagcttaaagaaccgttgggtgggggcatgtatagtggaagcttaacttttaagatctaggggctgattctaattcgataggaacggtagatgcaccatagtgtggaaggacttacaacctgctcgaggaagagcaagatcatgagtgggggcgctggaagcaattcagggttgatatgaagatggagtgtcgataagatcaaatttggaggtagggcgctctgcggttagagtgggagggagctgggcatgggtgatagttgaaggtgtatgtattgggtgcggttggctctgaagc

SEQ ID NO: 41307 - DNA, 274 bp, Glycine max
  Clone ID: PAT_MRT3847_137301C.1
agttgcacttaatagtatcttaggatagtctccactcatgaaattcagagttaaatatcaaatggtagaaaaagaaccgtgagaattttgatatatactagttgttggatgcatgcatctttgaggaacttaggattttgcctaagatagtgtgtgtggaaaaaagtggatgcttgatattttgatgcacgaaatctttaaccgtgtaataaaatgtaacatcagaaagggtagtacagcctatttaaaaaaatgaatgcttgacattttgatg

SEQ ID NO: 41308 - DNA, 263 bp, Glycine max
  Clone ID: PAT_MRT3847_137302C.1
catggacacctctgttattcaacaatgaggattcgcaggttatactgctcagatgcaggtcaatgagtgggacacgatgaccggaggctccggttaaggtcgctctaacatgcgccctaccgttgatagtgatcctcacatcatttggattagggcctgtcgtgccaagtacctggggtcattcttacaccagattcctgcatacctgaccgccttattccccggtgactaccgatgggacactgttggactatcagatagac

SEQ ID NO: 41309 - DNA, 370 bp, Glycine max
  Clone ID: PAT_MRT3847_137303C.1
gttatcttcggggactgactgggaaatgcaaagcaaaaggggatgctgggcccggccacgacgacctcaaaacgtgggaagaggcatgctggagctctattcaaggccatagaggctgaccttgaggaccataccgattacacctgaaatctcttgaaattacttgacatcacttactggcttggagacttatgcaatcactctggtgtaaacttaagctgccttccaatgcatacagcctttactgtattgtatacttatcccatatgaattgtagacttatgatatatctggatgtgacttcatcaagaataaagatatgatacagatgacgcactcattgcagttggatataaaagaaggggcatga

SEQ ID NO: 41310 - DNA, 1124 bp, Glycine max
  Clone ID: PAT_MRT3847_137304C.1
cttccacaaacactgcatgcgtctttgacccaactgcttcttcaatttccaatctttttggacaccctctattgctcttcctcccttggtgtagtttgtgtaaaagggtatctctatttatagagtttccattgtctctggaggcaattttcgaccttaggtgtgttttggagagtttttttttttttttttgtgttgtttagttgttgaggttggttggtttgtgagagagagaatggtgggtgctctatctgttgtgggatcatcagtaatggactctcacactggcccttgtttgtgtgtggatgctctcccaacaacaactagtgtcaatctcaagagtggtggagatgttgttttgtgcaagaatttgatgggaaggaagcataatttggtgaagcatggtggtggtggtggaactacaatgaagttgagcagttcatttgttgatcctggaagagagtggaggctctttgttagcaaaagttgcaagaggcagcgcaaggataggagagtgaccattgtcaatgagcttggaggacaatatgaggacacttttgaagatgttaaaacgcaaatgctcaactatttcacatacaaggctgatacgactgttactcatcagttgtatacactgatgtttcctgtgtttttatttactggaagttttgttgcatcaaacaacccagcagatggctaacgttttccacgcgtccgcccacgcgtccggcaagctcttgttgaaagagtgatggtaactcgacttcacctttatggtaaatgggtcaagaaatgtaaccatgctgagatatatcaagaaatctctgatgaaaacttggagttaatgagggaacggctcatggagacagtaatatggcccacagatgacacaaacacagaaaagattggttgataattcatctcaaatttttactttgtcttccaacctcttcctagtctaggtatattttttgtttcaatatcaatctgttttgtttccaaaattgtcatttgtgtcattttcctttaataggattctcagttttatgttatgtaaattatgtatatatatgtaccttgttaaatacacaatccattatgtatcgctagtttcagatgaaaaa

SEQ ID NO: 41311 - DNA, 1223 bp, Glycine max
  unsure (1)..(1223): unsure at all n locations
  Clone ID: PAT_MRT3847_137305C.1
cccaaaagcctcctcctctttctcttgttcaaccttcccacaaacactgcatgcgtctttgaccacaactgcttcttcaatttccaatctttttggacaccctctattgctattcctcccttggtgttgtttgtgttaaagggtatctctctacttaatataaagttccattgtctcttgaggcaattttcaaccttagttgtgtgttttggagagtttttttgtgttgttttgttgaggttgggtttgtgagtgagagaatggtgggtgctctatctgttgtgggctcatcagtgatggactctcacactggcccttgtttgtgtgttgatgctctcccaacaactagtgttaatctcaagagtggtggagatgttttgtacaagaatttgatgggaaggaagcataatttggtgaagcatggtggtgggaccatgaagttgagcagttcatttgttgatcctggaagagagtggaggctctttgttagcaaaagttgcaagaggcagcgcaaggataggagagtgaccattgtcaatgaacttggaggacaatatgaggacacttttgaagatgttaaagcgcaaatgctcaactatttcacatacaaggctgtgaggactgttcttcatcagttgtatgagatgaatccacctaaatacacgtggttctataattttgttgcttcaaacaaaccagcagatgggaaacattttattcgatcccttgggaaggagcaacatcaacttgctgaaagagtgatggtacttataaaagtgatgataacgcggcttcacctttatggcaaatggatcaaganaatgtaatcacgctgagatatatcaagaaatatctgatgaaaacttggagttgatgagggaacggctcatggaaactgtaatatggccttcagatgacacaaacacagaaaaaatcggctgataagttaggactttcgatctcttcttttcccttcagtcttttaatcttgcctctccctagtctatctaggtttaattttggtttcaatggcaatctgtaaattgtgtatatctctaaacctttccatatacgatcccttatttagatagtttgaaatgaaggatttacaatagcgattaaaaattttaggcatttgtttgagtgtaaccaatcgctagaatctattagccatgttagcttccgaagtttatggaaaagtaaagaaattatcttttttttcc

SEQ ID NO: 41312 - DNA, 1210 bp, Glycine max
  Clone ID: PAT_MRT3847_137306C.1
tgcataggatggtgggtcttgttccagaagcctcctcctcctactcttgttcaaccttcccacaaacactgcatgcgtctttgaccacaactgcttcttcaatttccaatctttttggacaccctctattgctcttcctcccttggtgtagtttgtgtaaaagggtatctctatttatagagtttccattgtctctggaggcaattttcgaccttaggtgtgttttggagagtttttttttttttttgtgtgttgtttagttgttgaggttggttggtttgtgagagagagaatggtgggtgctctatctgttgtgggatcatcagtaatggactctcacactggcccttgtttgtgtgtggatgctctcccaacaacaactagtgtcaatctcaagagtggtggagatgttgttttgtgcaagaatttgatgggaaggaagcataatttggtgaagcatggtggtggtgggtggaactacaatgaagttgagcgagttcattgctagatcctgcaaaagggtagaggctctttcattgttaatgaagttggaggacaatatgaggacacttttgaagatgttaaagcgcaaatgctcaactatttcacatacaaggctgtgaggactgttcttcatcagttgtatgagatgaatccacctaaatacacgtggttctataattttgttgcttcaaacaaaccagcagatgggaaacgttttattcgatcccttgggaaggagcaacaagagcttgctgaaagagtgatggtaactcgacttcacctttatggtaaatgggtcaagaaatgtaaccatgctgagatatatcaagaaatctctgatgaaaacttggagttaatgagggaacggctcatggagacagtaatatggcccacagatgacacaaacacagaaaagattggttgataattcatctcaaatttttactttgtcttccaacctcttcctagtctaggtatattttttgtttcaatatcaatctgttttgtttccaaaattgtcatttgtgtcattttcctttaataggattctcagttttatgttatgtaaattatgtatatatatgtaccttgttaaatacacaatccattatgtatcgctagtttcatatatgtaccttgttaaatacacaatccattatgtatcgctagtttcagatgaaataaaaacaaaaaaatacctcccagg

SEQ ID NO: 41313 - DNA, 289 bp, Glycine max
  Clone ID: PAT_MRT3847_137307C.1
gacgcgaacaccattgaatcttgattctagcaagcagagctaatgacaattttctattgaccaagaaggtggaggaatcttagtggacaaaactggacaatggatcacagcaatgcaaaacactccaagtagtaacttgaggcgagttgcagcttggaagaaaggctgttaaatggttaagagagcgctgtccgagaaggcagaggacaaaaggagagattgaaactcattgggacaagtgcctagaacaaacagcaacagtacggagcagctggtagcatgtaagagg

SEQ ID NO: 41314 - DNA, 420 bp, Glycine max
  Clone ID: PAT_MRT3847_137308C.1
aattcggctcgagacggctgcgagaagacgacagaagggggaggttgtgatttgcattatatgatacttggaatttaagtttttatcagtgtcacctagcataggccactataatattctttgcatagtttatatgaggattttgttgttaaaaatactgtttctcacattcacacagtatctatctctttccatacaggtccatagtgctgttattaaatcatgatgcttttgaataaatggaaggaaccaatatcttgttgtcattaactccaccctgttaatcaaattaaaagtggaatatgaacattgattaccactgaattgctcacttggtatggctctcaagcatcctcaaacttccttttttttggctcagcatattcaaattcctaataacaaatgaactgtatagtgggg

SEQ ID NO: 41315 - DNA, 326 bp, Glycine max
  unsure (1)..(326): unsure at all n locations
  Clone ID: PAT_MRT3847_137309C.1
agattccnnnaanncnnagcnnnnncctannnnancnnngnagtcggntnnangnntnacagntccanagnntgccnnncngncnnatctcctnagtngctntngannancgtgaannnncgnnggnggnnggtntgnacgctgtncannngccggnnannntatgcanggnnnngntggnccacgncgnncnagnntgcnnngactanntcncnntgtgacaaggtttnnnnngnnccatttnanntggtgtaggcnagcaatntgnatgggggggtcgtggctnnttccganttggccggncnncgatcatcannnnttngcga

SEQ ID NO: 41316 - DNA, 292 bp, Glycine max
  Clone ID: PAT_MRT3847_13730C.1
aattttccagccacggccggcggctcgcagagtacaataaacagggacggagaactatttgatggaccccccttcctcatgatgcggtggagaagccgcggccactcggtcctgccagatgttcttggggttactgtacaaggggagaacgagcagagctaaacaagaatttaaaaaggacgaaggaaggagaccgccatcctgctcagatacaaagatctaagagggttgtttcccccgcatcctccaaagctgtgagcatcagaataatattttcccaaagagtgcatcg

SEQ ID NO: 41317 - DNA, 1005 bp, Glycine max
  Clone ID: PAT_MRT3847_137310C.1
gctgattgatgtcatgttggacctacaacataccgagccagaattctacacccgggaaagtgtcaaaggagttattctggcaatgcttgtagctggttctgaaacttcagctactaccatggaatgggctttctcccttctcctcaaccatccaaaaaaaatgaataaggttaaggaagagatatacacttatgtaggtcaagatcaaatgctgaatggattggacactacaaaactgaagtacttgcaaaatgtaattactgagacacttcgcctgtatcctgtggctccactacttctacctcacgagtcctcaaatgattgcaaagtctgtggttttgacatcccgcgaggaacaatgttacttgtgaatctatggcccttgcatagggacgttaacctgtgggtagatccagcaatgtttgttccagaaagatttgagggagaggaagctgatgaagtttccaatatgattccattcggtataggaaggagagcttgcccaggagctgttttggcaaaacgtgtcatgggacatgcattgggaaccttgattcagtgttttgagtgggagagaatcgggcaccaagaaattgacatgacagagggaattgggcttacgatgcctaaactcgaacctttggttgccttatgcagaccacgtcaaagtatgataaaggttctgtcaaatatataaacgaggataaaagatgcatacggggatctaatttgacaacttgaaagaatatatatatatatataataaattatattgagatgtgataaaaaataaaaaataatacgtctcaaatgagtatttgtaaagaaaatgtttgatactatgatgtgttattcaacacttaaatgagagaaaaataaatatgtataatagcttaggtttatgatttgatacaaaatatatgtttttgcttttggttatttgtcatggcaattaaccgtgtagtgtgtaataaaatgttgatgtcagcaacccatatttaacat

SEQ ID NO: 41318 - DNA, 208 bp, Glycine max
  unsure (1)..(208): unsure at all n locations
  Clone ID: PAT_MRT3847_137311C.1
cccgaccccaggccggccacccaacgtttatttgaaccgcagaacagggaagggggggggcgacaaaccgaaagaaagcggacaagacccccacaaaacnaangncgaaaaacaacaccggcagacacgccggcgggcccagcaaacacaccccccgggaggcgaaccggagccacanaaccgccgcccaaacccaaaggccaagcga

SEQ ID NO: 41319 - DNA, 459 bp, Glycine max
  Clone ID: PAT_MRT3847_137312C.1
gcggcgccttcgcattcctctcgccggattctttcgcatacgacgccgtctgccgacgtttctgccggcgaatccccgccgtcgtcgtctgggggggctaccgcctcgcaccggagcaccggtacccttcccaatacgacgacggcgaggatatcctcagattcctcgacgagaaccgctggtatcgatggcgaggacggactggctgtggaaggcgtttctgccggaggggtcggatcgcgatcatggggcggcgaatgtgagcgggccaaattcggaggatttgtcgggtttatattacccggatacccttttgtttgtgggtgggtttgacccgttacaagattggcaaaagaagtattatgagtggttgaaaaaatcagggaaaaatgctcaattgattgagtatccatcgtcgattcatgcgttttatatatttcctgaattgcccgagtcatc

SEQ ID NO: 41320 - DNA, 334 bp, Glycine max
  Clone ID: PAT_MRT3847_137313C.1
tggagtttacaaatggcagtgacgctgcatcaaatttggcgcgcccaaatcgtttgtttccaagggtcatagagcagatcttggctgatatgtgcttaagagctacggccctgaactagaatacagctcagctgatggaacagaatgggtactgggtgagcaccatcatatgccagcattagtaagcagcaactgtagaaaaagtctatctactcaaagacgtgtcgaaagaaattgtacagaacttggttgcagaatcgaactcatgcatacatactccacaagagaggttgttgtgatggcgatagtagcaccagatgatgtttacaggata

SEQ ID NO: 41321 - DNA, 1281 bp, Glycine max
  Clone ID: PAT_MRT3847_137314C.1
ccggcgccttcgcatcgcgtccgaatgattctacagagtcactcaaatggcttccgaaactccaaaaccaaaagccgttctaccatggacaacccgcgtttcaatttcctttctctctaccctaacggacttttcacgccgctctaacggcactgttaatcgccgtctcatgaacttcctcgatcgcaaaacccaagccaacgccaaacccgttaaaggcgtttccaccaaagacgtcaccgtcgacgccaaacggaacctctggttccgaatctacaaccccgccgccgccgatgccgacggcggcctccccgtcttcattttcttccacggcggcgccttcgcattcctctcgccggattctttcgcatacgacgccgtctgccgacgtttctgccggcgaatccccgccgtcgtcgtctccgtcaactaccgcctcgcaccggagcaccggtacccttcccaatacgacgacggcgaggatatcctcaggttcctcgacgagaaccgcgcggtgctgccggacaatgctgacttgtcgaaatgcttcctcgccggcgacagcgccggcgcgaatttggctcacaatgttgcggttcggatcggcaagtcggggctccagttgactcgggtcgtcggggtggtttcaatccagccgtggcttcggcggggaggagcggacggctgcggaggttaagttcgacggggcgccgctggtgtcgacggcaaggacggactggctgtggaaggcgtttttgccagacgggtcggaccgtgatcatggggcttcgaatgtgagcgggccgaattctgaggatttgtcgggtttgaattacccggatacccttgtgtttgtgggtgggtttgacccgttgcaagattggcaaaagaagtattgtgagtggttgaaaaaatcagggaaaaaggctcaattgattgagtatccaactttgattcatgcgttttatatatttcctgaattgcccgagtcatctcagttgatctcacaggtcaaggatttcgtcaccaagaaaatttctgattttcaatcaaatatatattaagttcatgttggagtcaagtgtgtatggctatgcaagttcttgtttcaagccttctaaaaaacaaaaaagtatttagtattattagtatttgtaagattttattactattatatgtttggatctctccaaaatttaaaaagtaatattttggttgttataaaaaagtattaattttatacttataaaaataaaacattttatacagttttatttactt

SEQ ID NO: 41322 - DNA, 748 bp, Glycine max
  unsure (1)..(748): unsure at all n locations
  Clone ID: PAT_MRT3847_137315C.1
ggtccggaattcccgcctcgacccacgcgtccggtgtgtttttcttcttctcaattggtacaacagagtgtgaagagcacatcaactccaccaccaaccactccactccaatttctcagatccaccctaacaaaaaccaccaactcgaccgattcataccgagtcactgattcattcaatgccatcaccaccactctctgcatcatagtcatcatcatcatcatcatgcagagcgcagcgtcatcgtcgccgtcgccggaggccattctggaatggctgcacaaagaaatgggctaccgtccgctcggcacctacgccgccggcaagtctcacctgccgtccgtcgactccatccgccggatttgccgcggcaacatgattccggtcttgaacttcctcgtcacgcgcgccaagtccgagaagaccgtgcggaacatccgccggaacatcaccgtgcacggcggcgcagacggcgccggagaggcgaaggaggaggtcagggggaagggcgcgaggaagaaagagaggtcgctggccgccgtcgtcgatggttccgagacggcgacgacgagggaagcggcgcttgcagagcgggatttggcccgnnaaagaggtggaaaaggctgaggaaccgttgtgaggagggcagaagaaggaatttagagcgaggatgcctcgaggtttccagggagggaggctgaaaaggaagagaatgcctcgatgaaccgagccaattaccaggcattag

SEQ ID NO: 41323 - DNA, 385 bp, Glycine max
  Clone ID: PAT_MRT3847_137316C.1
ggaaactcaactttcaatattgcaacgctttaccgcattcatataaattacacaattgatcgaggtgctctgaaagtgagcatagacatttcagaggcatagtatcgctaatcaaactcactagctcaccacatttgagagaatactcaataccatgtgtcgagcacataataggaatgtacggcactaatattccatccactgtgacgggtaaagaaccatatatacagagaagatgatggtggctgcatgagtgcgagtgagggagtatgcggtgagggatctcttacactggtcgtttcactatattagtacacggtcagattacctatgtgatcactatcttacgtacttttgcaatttgatcccttaacttttgaaaaat

SEQ ID NO: 41324 - DNA, 226 bp, Glycine max
  Clone ID: PAT_MRT3847_137317C.1
ccatcacttgaagtgaccattggtcaacatcaagtagggtttttagcagttatactgggtaaaacactataaagggatcaaggaggggcatacaaggatccatgtagcaacagagctcgattgaagagggatcgatataaaacgatgcaacattttgataaactatgacatgcctgatccaagagtcgcatacttaaccatggttggtcgagccggaagatccagg

SEQ ID NO: 41325 - DNA, 109 bp, Glycine max
  Clone ID: PAT_MRT3847_137318C.1
gacatataaaatacttccaaacagggcttgatttaaagtgcctaagactggggctgttcagaaaatatgagaaacggcggaccaaacccggggccaccaaaattctttt

SEQ ID NO: 41326 - DNA, 440 bp, Glycine max
  Clone ID: PAT_MRT3847_137319C.1
gaaaaaaaaggcccgccccggggagggccaggggggggaaccttagggcaaacttttaaagcaaaaccgttataaaaactactgggtgggacccacaagaaacacaggaaaccccctactcctccaagggggaacccccccaaaaattggaagggaattttaaacccaaaaaaaacagccaaaaacaattgggggcctccggaaaaaaaaaaaaaaacctttcatggacccaccaacacaatcatggggttgttggaccttgggcatgtcccaaaagttgacaaaccaacttgaaagggcccccgtaaagggcctgggaagggccaatcaggggtccaaacacattaaaaggataaggtcccaagaaaacggccccagtttgggagcaaattttggcataaagctttgacccccggatgaaataaacaatccatttttaa

SEQ ID NO: 41327 - DNA, 276 bp, Glycine max
  unsure (1)..(276): unsure at all n locations
  Clone ID: PAT_MRT3847_13731C.1
gattcgtaccatcncattcaanctngcagcatcgacggnaccgatgtngttcctccatgataacgttgtntatncgcgctcaactccnnttcctccntcggnctctatgaccctttggtgntcccaaggncactggagacccttattgcactctctcngtngntcgtctntcttcgcntncaccaacgaanntgatctccgcaaagncatgagtaagtntggtcnngtgaagaacttangnttngntagggacattngtattatnctttaatgtat

SEQ ID NO: 41328 - DNA, 353 bp, Glycine max
  Clone ID: PAT_MRT3847_137320C.1
ttcatcactaaatttatttttttaaggggattgggtttataaagagagaaacattatctcttttaaaaccctttctgtattagggggagaaacccagtttttcttcttttttaaaaaccaaaattgtacccccctaaataaccgggggaacaaaataaccccacccttggggggtttttcctttttaaaccccccaaaaaaatccctcgttttctattcgcacaagggggatttgtccccccttcaaaaaaacccccttatttgttaatacacccttccaaaaaatggtcttttccggggggggtcccagggtttttcaggggactaaatttcattttcaaaagggggggggt

SEQ ID NO: 41329 - DNA, 462 bp, Glycine max
  Clone ID: PAT_MRT3847_137322C.1
ggcggttcattcatggaattatattaatagacatgcaaaactgacatttttagattcatatggagggttacatgaataccggaatagacatacaattgatatgagagctttcttacatggggtactttttctaatacaatatggaaaacataggtttcaattcacacttgctgttcttttctttttttttaattaagaaaagtgtaaaagtggtgaggaaatatcgctgggaaaataactccagcttttacctgtgtgatactgccttcgtacgtggactaaccctgtccagtgtttcctgagcagaggataattatggggaaagaatgttctttaaaaacacacaattgtatggaccaagtccttccagctggggaccactttacctgctgttttaaatttgtccatcgggaaagaatcagagttgccttctactggattgtttcacacagagggtttttg

SEQ ID NO: 41330 - DNA, 334 bp, Glycine max
  Clone ID: PAT_MRT3847_137323C.1
ttttttttttttttttttttttttttttttttttttttttgttttgggtttttttttttaatacctgataaatgattggtttagggagtaaaaaacggaggggtagaatcagacaggaaacctagcctccccccccaaaagggaaaaggggcgggccggccccccccaaaaaaaggaaggggcccaaaaaccccgggccaagggtatcaaaggggggggggaccaaaaagaatgggaccgaagaaggggcgaacaactaactatgcccagaggggaaagcccaaccccctaaaaaccctccgatgggaaaaacacccccacccaaggaggcccc

SEQ ID NO: 41331 - DNA, 360 bp, Glycine max
  unsure (1)..(360): unsure at all n locations
  Clone ID: PAT_MRT3847_137324C.1
catcgccagagagccgggctacgcgcacaaccacgactgacccggcccaggcagcagagcgcagacacagaagcacagcgaaccgaccnagaagactcgtcacatattcagatagcggcccctaacacagaagccttgtccatcttctttaggccccgaacaagagctgcggagggcgaggaagctctggctgaggttctctcttcgttttctttcagccatcatgcgatcttgagcatgagctggagaccactaaccatgagaggcatggcgtggcaaaggtcggattggtgggttaaccttgcgctgggggaggaggggagaccgtgtttgctcatgttggggactgacactgacacc

SEQ ID NO: 41332 - DNA, 453 bp, Glycine max
  unsure (1)..(453): unsure at all n locations
  Clone ID: PAT_MRT3847_137325C.1
gcgagggaaggacgaagttggcggcaagtttagaacttgcggcgccggcggcaagtttagaacttgcggcgccggcggcgggtggcaccggccaggagtgtcgtggttgtgcagcggagcttcgcgagatcagcaaaagcttctggagggagagaacaaagaatctctagtttgttaacaatggaagacgggaacaacagtggcggttccaccgcaaagaaaatgataaggagttgctattgttcttggatgagcacaggggaaattcatttggattttataaaaaaaatacaaaagaaatttacacacataacataataatgacatttattactcagatattaatcactcatctttatgtgcttacattcttgatattaatttggacgacttctatggtttcaactttaaaaaaaaaaaaaaaaaaaaaaaaanaaaaaannnnnnnnnnnn

SEQ ID NO: 41333 - DNA, 196 bp, Glycine max
  Clone ID: PAT_MRT3847_137326C.1
ggttaagacactgacatatagtcaaacacagtgatctgacatcgtaatgctctttatttttgtaacaagggctacatactatttcacatgtgcaagaggacactcatcaaccagatattgtgagactcttacagttctcaagaactcgtggcagcataggatcagcggcgtcagagctcagaactccattcttaac

SEQ ID NO: 41334 - DNA, 454 bp, Glycine max
  Clone ID: PAT_MRT3847_137327C.1
cccaaacaaaagggaaaatttctaaaaattaaaataacccacaggccataaaatcctttggtttttggcccttttcccaaaataaaaaaaacgggaaaaggtaaaccttttttggggacgggggatgggttttaaaaaaaataaaaatacccggcccctttgaaccaataaaagcaagttctgggtttttaagcacgtaataaacccctcatcactccaatttagttccaaaatttgggaattagcccaatagggttttgagaatcatgcaggattcttgggccctaaccggaaaaaaattttaagcctagggggttcaaaccccccattggggaactggggggggttgattgggccctttgataacaaaggacttttaactggggataacaggggcaaataaagggtggtggaaaccatttttgaccaaatggggggggggggccccattttt

SEQ ID NO: 41335 - DNA, 635 bp, Glycine max
  Clone ID: PAT_MRT3847_137328C.1
acatcctgataacaaatacccatcctcggatgaaattgatcaaattatatcagctgagataccttcacagcaagatgatccagaactgtattcattagtaaaaaaccatatggttcatggcccatgtggaactctgaatcctggatctccatgcatgaaagaaggcaagtgcagtcgtttctatcctaaaatgttccagccgcatactgttttagatgttgatggttttccgatctatcgtagaagaaacaatggtcactcaattgagaaaaatggtgttataattgataacaggtatattgtaccttaccatccaagattgctcagaaaataccaagcacatatcaatattgaatggtgtaaccaaagcacttctatcaaatatttatttaagtacatcaacaagggatatgatagagtaactactgttttgattcatgaagataatgatcaaactcagaatggtggcattcataatgatgagatcaaagaatatctagattgcaggtactattaaaacttgatctctaatttatctgaccatcattgttataacaactacatctatcttcctgacagatacatatgtccccgtgaatctactaggagaaatatttgggtttccaatacatggc

SEQ ID NO: 41336 - DNA, 254 bp, Glycine max
  Clone ID: PAT_MRT3847_137329C.1
cctctctagtactgcgaggtgtgacttgtcgtgagttccttcaaaccgcattggtatctggccatcaggactcatggttagcgcagtgcatatcgcgtttgctcatatggcagcaggtgtagtaatcatccttgccattggcactgcgtatccaccacaccgagccgagcagagcatgtatcctgagtactagtgcagtatcatcattagtgatcacatgaccgtgctcgatgtgtcatttgatcgcatgtgtg

SEQ ID NO: 41337 - DNA, 443 bp, Glycine max
  Clone ID: PAT_MRT3847_13732C.1
aaaaaaaaaactttttttttttaaggggcaagggtttttcccaattagggaagggttaaaccgaaaaaaaaaaccctttttcccctttacaaggttcttcttctggctaacttttaagctttgggtttaaacccccctttggtgggtaaattccccaccaaatccctttggtgaaggggaccccaagggggggaaaaatttcttttttttttttcaaaaccaaaaacaaattttttttcttttttttctttgggccccaactcccccataggtgccttgatttgaacctgccccaattccaaccgttttgaatacccttccaaccccaaaatgggggggttcccccatttttaaacccccatttcccccccgccaaaacttaattttataaaagggtttgggttaaagttaaaaaaaaacctttttttttaaaacggtttttt

SEQ ID NO: 41338 - DNA, 563 bp, Glycine max
  Clone ID: PAT_MRT3847_137330C.1
caggaattgaggaagattaagttaatcttatatcggggacattggaacttgattgcgacctggatttgaatggttctgtttcaatgccacaaacaccagctgcacccccaactaggccaacacgttccaggagaagggtaaggattgaggaagaaagttctgatgaagattcaccttctgcagttcctaccacccatcattctgtaataagtcgctcacagagagcaagcaaaacggcagcaatgaacaagatgtcttctgccactagatcgctcaaaattgatgaaatggaagaactcgaggaagaagagtctgatgtaacatcagaagcttctgatgcattcgattagtacagttaaatatgtgcttaacatgatacatctaatggtcattaagttgttagcatcttgttgttgtattgtttgattacttagattgcaggttctgtacagaagagcgcatcaatagtcaagatagcatttgatcgttaagtcatagtatataactgtaacagtatcgcaatgaattggagtgaatgaatgaaagaaattcttgtgtgtagc

SEQ ID NO: 41339 - DNA, 123 bp, Glycine max
  unsure (1)..(123): unsure at all n locations
  Clone ID: PAT_MRT3847_137331C.1
attcagaatggccggaaagaacaacccgcgatccaattcgcgaatgaccatctttctcttnctcctcgctttctntctcgtcctattcctcttntntctctntcctctncgcaccccttcttc

SEQ ID NO: 41340 - DNA, 553 bp, Glycine max
  Clone ID: PAT_MRT3847_137332C.1
gaaaaacctgtctccaaccctcatttcatttcctttcctttcttcagcactatggattatcagtttaaaaaccaaaatatagcaaccaatatgactcacaacctaaaagctcattactatcttgttaagcttactcaattactcgtttcagtgtccgtgtgttccttcatcttctctccttcttccttgcttgttttcctacattacttcaaattctatttctctacattccctttccaactctatacacacaacatagacaagaactccatgtttctactttgcaatggtatccttgtttttgttggtataactaaatctctctccggctctagttgttgtgatgataataagccttctacgtatgttaaagatgatggttcacaatctcggttttcggttattgaagccaacgagctaatgttggagatagtagaaactgaagaacaaactagtgatcctgatgaacagaacactgtagttgagcaagtaatagaaatagaaaattgtgctgaagaagaagtacaagaaaacattgaaaagatcattttgg

SEQ ID NO: 41341 - DNA, 437 bp, Glycine max
  Clone ID: PAT_MRT3847_137333C.1
caaaaccttaaactcttttctcttcctttctctctatctaccacttttgttgagcttttgaattttggacaacatgatatttcacagaaactgttgtcaagtttgtgtcctttgtgttatgaagtgtttttgaacatccattattttgttctttgcaaattcatgaagtggattcagtttgaaaggtcaagcttttgcagttcatggtcaccggatcttaaaagggtatcttctattctaagctgaaacagtagtgttggataaaaacaaagaggcgaaacagtgtttttgtttggtggcgagagaagtccatttgcacagaattttgtggattctagtgtttgaggaagaaggggaagtgtggagctttgtaatttgtttgtttgtgttatatatattgttcaggaagttgtgtacaaagaaagaaaagttttact

SEQ ID NO: 41342 - DNA, 462 bp, Glycine max
  Clone ID: PAT_MRT3847_137334C.1
tttgcactttgtttccccaattcctcatcgtttaaaacccaaaagagggaaaagcaagaccttcaaaataaattaagtgtaggtaaattctttcattcattcatccagtttccttttcccaagttatcatgtcttgaccgggaaaccgactgaggcagtttctcgattctctcggcgagttgaggtgacagcttcttagccggtttccgttccttctcgggtcgaaaatcaaaccccaaagcttcggatacctcttcggagctccacccagcttttctgagcgaatctgaaaacttatccgctttcaaaagcagagcatccaacagcgcttgattattcaacaccaccatctctccctcgaagaatccagaagctgaaacctcaaccatttcgtttatatccgattcgccccacccacccgctttcaaaaccgaccctattttccctatgtattcttccacc

SEQ ID NO: 41343 - DNA, 505 bp, Glycine max
  unsure (1)..(505): unsure at all n locations
  Clone ID: PAT_MRT3847_137335C.1
gttttgccccaaaaacgttttattatgatctgctaaagagggttggagagttgttccctggtccttcaaaggcaacaagagcatatcttcactctgaggcagatgtagagagagcattgcaaaagattggctggaccataaggaagagaggcttaaccactacccaattttacttcgctaggcttattgaggctgttcctatgtagtggggattgaaagcctagaagatgctgacgaattgaggctatgttttctgggagaaatagagtgaagtggttcatgataatttgtgtggagctagtgcctagtgagttaccggtccattgggttggtggaatggaggcaagctccctttaagctgttcagaagttacagcgattattactcaagggtagtaattagttcctgtattgcattttttttataaaagtgataatgataataataataataataataataaaaccacactttttgatactcttttccaagaaaagataantat

SEQ ID NO: 41344 - DNA, 681 bp, Glycine max
  Clone ID: PAT_MRT3847_137336C.1
gttacaccatctgagcaaaagaagcttgagattgaattgcggaacaaggctcttgaatccctcaaagcaaagaagggcatgaataactaaatgcatcacatccaagttttatgttgttttatgctttaaaaacttattgagaaatatcttagcttgtttaagaaacttggttttgcaaatgttatgtttatttattcatcggtaaatgtttgatgtcatctatctttaatgctggcagcggaaatggatagatgatgctttctgagtaaatctgttgagtacaactctatgcagacattgtcctatatttactgatgaattttatgtcaactctagatgacctggtgagaagaccatgtgcagaccctttattttgaacttcaattcaggtgaagtttttcattcttttagcatattttttagttctagaatagcttcataagtaactctgatgtattacgtaggtggttctttctggttgtatatttttcaaaactaacattggcatgtcggtagtttttcctggaatgtgtttcccggaattctccatgatgtatttgtggggtccgtcgcgattgatgtagctgtatgcttttaagttttaagcattctggtctagtggtttttcgtgcagggcaattaagagtttgtgtggctgttatgcttgcttccaattttcct

SEQ ID NO: 41345 - DNA, 2108 bp, Glycine max
  Clone ID: PAT_MRT3847_137337C.1
ccggtccggattcccggcgtccgccacgcgtctcgacgctatcaccggccggtaacgtcacacaaacccaaaatcacaatggcgttctcatcgtccctatggtcttccctcttcgttgcaaacccaaacagaaccgccatttccactcgattctctcacaaaccgcccaaactccctctctcgccggcgttcgccatcccgccgctctccacggccactgcggcggacgtctcgggcgccatcgacgggactacgatcgcggtggtgagcgggggattcgtggcggcactggcggcggtgctgtcgctgacggacccggagcggcggcggcagttgcaggcggaggaggtgggcggcggcgacaaggaggtggtgagggagtacttcaacaactccgggttccagcgctggaagaagatctacggcgacaccgacgaggtgaaccgggttcagcgcgacattaggttgggccacgccaagaccgtggagaacacgctgagcatgttgaaggacgaaggttcccttcagggcgttacggtttgcgacgctgggtgcggtaccggttctctctctattcctcttgccaaagagtgcgctgttgtgttcgccagtgatatctccgccgctatggttgccgaggctgagaaacaggcaaaagaacagcttgcaaccagtgaagatggatctgtgcccgtgatgcctaagtttgtagtgaaggatttagagagcttggatggcaagtatgatacggtggtctgcctcgatgtcttgattcattacccccaacataaagccgatgggatgattgcacaccttgcatcattggccaacaaccgattgattctgagttttgccccaaagacgttttattatgatctgctaaagagggttggagagttgttccctggtccttcaaaggcaacaagagcatatcttcactccgaggcagatgtagagagagcattgcaaaaggttggctggaccataaggaagagaggcttaaccactacccaattttactttgctaggcttattgaggctgttcctatgtagtggggattgaaaggtgagttttgcatgattagaggaaattcttagtgtaaattgttaggccttctattaagtgattttgtatgctattatcctccacatggaccacatataattctattgtgtatatttcttcatagcctagaagatgctgacgaattgaggctatgttttctgggagaaatagagtgaagtggttcatgataatttgtgtggagctagtgcctagtgagttaccggtccattgggttggtggaatggaggcaagctccctttaagctgttcagaagttacagcgattattactcaagggtagtaattagttcctgtattgcattttttttataaaagtgataatgataataataataataataataatatcacactttttgatactcttttcttgtcccactcctctcttctggagatacagatcgaattggagacttctcttgtgtggacaaggctcttgaatccctcaaagcaaagaggggcgtgaataactaaatgcatcaaatccaagttttaagttgttttatgctttaaaaacttattgagaaatatcttagcttgttaaggaacttggctttacaaatgttatgtttttttattcattggtaagtgtttgatgtcatctatctttaatgctggcagcggaaatggataaatgacgctttctgagcaaatctgttgagtacaactctatgcagacattgtcctatatttactgatgaattttatgtcaaccagatgacctggtgggaagaccatgtgcagacctttattttgaacttcaattcaggtgaagtttttcattcttttagttctagaatagcttcatagtaaatctgttgtatatacgtaggtggttctttctgattgtgtatttttcaaaactaaacattggcatctcgggagtttttcctgggctgtgtcccggaattctccatgatttatttgttgggtccatcgaggttgatgtagttgtatgctttgtacaaatgtgttgtcgtgtacttactttgattgtgtgcaagaatttggtgatatctttt

SEQ ID NO: 41346 - DNA, 646 bp, Glycine max
  Clone ID: PAT_MRT3847_137338C.1
ccacgcgtccgatttcttttgatttaattaagggtacctagttgaagcaagcaacaagataagaaagcaaagccggagagagaggggggatgacaccacatcctctgttttcattctcattcttagttttccctgccattcaaattttcacatgacctctcattattatttttattattattagtttcttttgtttctatcaccaaccattcatctttggatggtgaattccccatctgggttcctctctttttcctttgatctcttcgccttctctcaatttcttcttctctgatcccagaaaagaaaaaaaaactaaaaaacattaaaaacaaaaataaaaaaaaaaacatagctgctttgttttctctctttgctggattagatattttggttcagtttttattattgatgctcctaagatccgattctcttagatcgaatttggcataacccacttcgtatctgattgaagcacccactgggttctgtctgagattcaacataagaacagatggagtcggatcttggcaagctcttcattgggggaatttcctgggacaccgatgacgaacgtctcaaagaatattttgggaaatatggagaggtgatagaggctgtgatcatgagagatcggacaacaggc

SEQ ID NO: 41347 - DNA, 239 bp, Glycine max
  Clone ID: PAT_MRT3847_137339C.1
ggaaatcctggagtctgaagaaaaaggggatcccaacaagccctcaggattcagaagtgttaaagctcctgtcactaaagtggctgcgtcgattggaaatgctcagaagttgcctatgtgtgacaaatgtggcactggattgttggtgtgtttgtgaagctgcgggaccgtcaccgccaccctgagtgttacgtgtgcactgactgtggcaccaactgaaacagaaggcgatttctttg

SEQ ID NO: 41348 - DNA, 690 bp, Glycine max
  Clone ID: PAT_MRT3847_13733C.1
tcattgatgttgattgttatttatactgaattacagggataaaggccgttacagagcaagggccagctgtaatcatcaacaattgccactaacagacttgtcggctaaatattctaacagaatcgctaatgctataacagaatggcaaaatgctgcagcaaggagggacaggaatctggtgtagtgctagcggatgattctgttccttgtcactatctggctgggagaaattacacgaagtcgctgaggtatttgggcctcgtggagtatctcttgggtctattgggcttgagattgctaacataaaaccttggcttccacgaccacattgcatcgtcaatcatggcctcatttgtccataatatcaagaatcacaacaaaatcatgaccgcaatttaaaaccttttaaccgacataggacacaacacactaaacacaaaacatttggccagtgaagcaatgaacataatcaaaacagttaatgccattttccaaacctgaaatcaggtccaacgtaaggcctagccgccatccggccacgccttaacatgtaaactttctcaacattcaaacaatccggccacgccgagcacacaaactctaactcactgtcaccatccccttttgctatgtccacaattaaactaaggtgaagacgcatatttaccccagaactatcatctccacacg

SEQ ID NO: 41349 - DNA, 707 bp, Glycine max
  Clone ID: PAT_MRT3847_137340C.1
attcggctcgagggcgaataaaaatattgtcttggctactgtaaaacatggaggacatctggcattctttgaagggataactgcatctggcctttggtgggtaagagctgttaatgaattccttggtgaattacgtgctagccattttatgcatgtacagaagaagatcactaaaccaaccataccattggactcgtcaattgatcaaggcccttatgttaatgttaaggaagatggaatggtggctgcattgaacaatgagccaaaaactgacaacgtggaagaaatacaggtaatacaggatacagataatgacggtctagagatgattccagaagaaaaagtggttaaacaagatgagcttgagactaatgcaaagattcgaggttctcctggcattgctcaagcttgtgttcatgatgcagcagtgcatgtaataacacctttcaaaagagacctaggccagttatctcgacaaaatcgatggtccatctggttgctagtttatattgctattaccacaagttggcctctggttggttcggctctatatattgtgtttgggaaaaagataagggatatcctaccaaatggattagtcagaaaataatttcttgattgctaaaattattgttgtatttgtctgtgtagatgtataagaatatacccccatcatttttttgtcccgcaatcgggggaattttccc

SEQ ID NO: 41350 - DNA, 212 bp, Glycine max
  unsure (1)..(212): unsure at all n locations
  Clone ID: PAT_MRT3847_137341C.1
gattgagtctaactatgatgtgccagagggagtggatattcggggnngatatgatgcagagtttggcaaaaatgcctcataaaagntggcttgaaattcgtgntganttncaacgtgagttcaggaaccatatcaggtatgcnttagantgcagaagataagcaaataagangtanaatgaaggggctcttcacagagtttgancctgccac

SEQ ID NO: 41351 - DNA, 511 bp, Glycine max
  unsure (1)..(511): unsure at all n locations
  Clone ID: PAT_MRT3847_137342C.1
cctcgtgccgaatgcagatgagtttaccaatgatgaggaacatggaaaggttagtggaataggtgatgatatgtctgtggatttgaccaggatgcttcacacagaaggggggcagagagaagttgcttcacttctaaggcactcgctgtgggaaagaagcagcaaagaaaatgggacataagttatgatgtttaagacgggatcaccagtgatagtagtaatgagcctagtggcaactcaccagaagaggctccataatattgatgtcagaaaaattcaaaatgtaaattaaaagagaaatgttttttttacaactaaaagagagaaagagaaatttgagatgtaataaatgatgtgatggaaaaaagataaataaaaaaaaatgtatgaatggttgtataaaaaaaaaaanaaaaactcggtttttttttttgttttctaaggtccaatgcacaatccgcatttcgaaaaactttcctgagatacttgatggcttgagtatgtagtgggc

SEQ ID NO: 41352 - DNA, 1277 bp, Glycine max
  Clone ID: PAT_MRT3847_137343C.1
acgtggattctttggtgattgaatattgaggacataaattatcacatggacgaatcaccttaaggaggggagatctgttctagcatctaatctagaaaagtaaactagaattaaggcattcaggtccaactctacacattaaatatcaccaagatgctctaacagagaactaagaaatacaagtaaaatacaagcacctaccatcatacataaagagtacaacaacctaacagagaacttgcaggtttataaaatatcgcaatgcatgctgtggtctttctttcacatacccttcccgtgggctttcccaccctctcctaaacaaaaattacatgaataaaatctagaactccattttcacgatcgcattggaagcttcggctgctccatactgcatccagtcttttgcacatacaatggcctctactgtctctggccgcaaggaacttctatactgatccatctctttgacttttgtatcaaagacagattcaggaggaacacttgaaaccggaacagacaatatatcccgagccatcttggaaagagtagggtacttgagtttgtttagcttccaccaacccaatacatcaaagtccggaacacgtggcaacagtgattcttccagatactggtccagttcagacttcatttgatggctggatgtttccatgatgtagacatcaaaatctgttagtccattatctggcatcagagttcctcctggagattccccagccctcgggtgacttccagcatttccttcttctgcataagccggggttagtggcaggggaagggctacatactcgtgaaacagctcatgaattccatcatcaacaatcttaacatattcatgggcatcctcgccatagattttagtgaaactaaactcaacaagcttcatcttgaaacgaggatccataactactgcaatagccaaaaccaaactgcaatctttccagtacttatcaatcttttgttgcatgggtttagtaaggttgctgatgaaaggatcctcactcacaacagcacgagacagatccaactgcaatttccaaacttcatggaagaaggtaataacagtgggatgagttgctgtggtaagaatatttgctgcatcaaaaaggggcttcaagtatgtgcagagggtctcaaccagcttccaatcctgcatagatggggcacccttgtaatcaggatcagaagtgtccaaacaagaaaacacttcctgtagttcagaagctgccaccagcatctgatatgttgaataccac

SEQ ID NO: 41353 - DNA, 250 bp, Glycine max
  unsure (1)..(250): unsure at all n locations
  Clone ID: PAT_MRT3847_137344C.1
caaattcctcttctactactcacacctctcttttctctcccantctttctcccncctcaattacttctccttttttttctgattttnncnttctttctttgaaggtttcgttttgcaggncgctccaatggggaaatcctcctcttcgctcaagaagaaacgttctaagaaattatcggaggccnaggtaagcagtgnaagtnagagaagtangaanagnaaatcccagaangtgcgtcgncgtaagtnt

SEQ ID NO: 41354 - DNA, 3067 bp, Glycine max
  Clone ID: PAT_MRT3847_137345C.1
gcaataaaaaccatgtaacctgcataggaacataaaggagtttctactgaaatataaaatataaaggtaataaccagagaaaaactacaggtcacgtactctctaatctctaaaactatctcattatatcagcttacggtcacattttttaagccatcttataactgttcagcaatggcttggaggaacaccgacacatttctgggaaaaaaaaaaaaagcggtggattccacgtacagctgtagacagtgggaatcatatccaatacggtagcaaaagactcctaactataagcaacatgcatcaaaactaggtggattcctgatgctcctgaatcctggtgattgaatattgaggacatacattatcacataggacgtatcaccttaaggagaggatctgttctagcatctaatccagacaagtaaactagaatttaggaattcaggtccaaatctacacattaaatgtcaccaagatggcctaacagagaactaggaactacaagtaaaatacaagcacctaccatcatacataaagagtgcaaccacctaaacgagaacttgcaggtttataaaatatcgcaatgcatgttgtgggctttctttcacatacccttcacattgtaaggtccaacagtgggctttccaaccctctcctaaaccaaaattacatgaaaataaaatctagaactccattttcacgagcgcattggaagcttcggctgctccatactgcatccagtctttcgcacatacaagggcctccactgtctctggccgcaaggaacttctatattgatccatctctttgacttttgtatcaaagacagattcaggaggaagacttgaaaccggaacagacagtatatcccgagccatcttggaaagagtagggtacttgagtttgtttagcttccaccaacccaatacatcaaagtctggaacacgtggcaacagcgattcttcgagatactggtccagctcagacttcatttgatggttggatgtttccatgatgtagacatcaaaatctgttagtccattgtccgacatcagagttcctcctggagatccccctgtcttcgggtgatttccaggattcccttcttctgcataagccggggttagtggcaggggaagggtcacatactcgtgaaacagctcatgaattccatcatcaacaatcttaacatattcatgggcatcctcgccatagattttagtgaaactaaactcaacaagcttcatcttgaaacgaggatccataacaactgcaattgccaaaaccacactacaatctttccagtacttatcaatcttttgttgcatgggtttagtaaggttgctgatgaaaggatcctcattcacaatggcacgagacagatccaactgcaatttccaaacttcatggaagaaggtaataacagtgggatgagttgttgtggtaagaatgtttgctgcatcaaataggggcttcaagtatgtgcagagggtctcaaccagcttccaatcctgcatagacggggcacccttgtaatcaggatcagaagtgtccaaacaagaaaacacttcctgtagttcagaagctgccaccagcatctgatatgttgtattccacttggtttggtcgtcaattaaaagcttcctttcactggggacctgaagttgcagcttgaggtccaggaatttttcctcatgtgactctgaagtcttcacatattttacgctatcccgaattttttttactgtgagatgcaccgagctcaacaaatcatctgcaacattgcttaaagttcgggcaatgcaatttccaatcagcaactgaccattgaggataagtggattcttcacagagagtaatggtctgagatgttcaagggcaacattactcagtgcttgattgcaagtgatagaaaacagcctaccctccaacccccaatcagaaaggcaaacagctacagcatggctgagagcagagtcagaattagggtatggttccattacaacattgagaattctcctctgcaacttccaatcactatcgacaaaatgtccagtaataaacacataccccacagattggcttgaggtccaaacgtccagtgtgagacacacacgtccaggtaatccatcaaaatacttcataacacattgcttttccatcaggtaagttgcaacacagtctccttgaattgtgttaaatgtcaccatattgaactggggctgcagattttggacaaatgcaacaaaacccggatgctcaaccatgtgaagggggtaatcatgcataatgatcattctagcaatctcatggcggcaacgatcttgatcaaaaatgatgtaaggagtattaggggatctataacgtcgctttggtgcactgctagcattgccagcagcatcacttccccttgaacgtggagtataagggctgaactgattctgatcttgaccgcgcagaagagctgggcatgtccccttggcgatgtggcgtttaaggtggctagtaccagcaacctttgaaccagtgctgtaggcaaaactctgcttgcattgcttgcaacatgctcttctacatccaggactgactgtttctatggtgaagtgttcccagactatagacttctttttcctcctcttgcttggctgagtttctggagtaggttcctcactgttcaatggagtttcagcatttattatctcatagctgggtatgttgctagcattgactatctcatagtgtggtcgagaattaactatcggatgatcgtgtagtgtttcactagtttgcagcccatagtgaggcaacaaatgagaattggctagctgttcatgggacagtgtctcagagtcagttagttgatggttggaaactgcctcagaatggtccatatgatgattgctgggaagtgtatcatactgggccagatgattatgaggtaacggtttaatgtctgtgagatgaatgtcttgcattggttcagtactcggcagtggatcagagttgggcagcgattcaggttgaggcagctgatcttcaggctcgagccgattcggctcgagcg

SEQ ID NO: 41355 - DNA, 601 bp, Glycine max
  Clone ID: PAT_MRT3847_137346C.1
ggctcgagaatacttaacagtcaatatttatttttcttactttcatataaaagcaagtttctcgtttgaaatgtctcctgcagggtgattaactttaaactcttcaccctttcttgtgatcaaacactgtatcattataaaagtgcatggctattctggtagatgagcttatttgatattactttgtttattcctttatgatgtattcagcttgttactgccactggttgctacaatatgaccaagtgtccaagggaaatgcgggagattgaggcagtgatggcaggggcaccatggccagctcagaagatctaagtttgacctcacctcacctgtccttgatctgaactggtctgctaagtttgtattttttttattaaataaatattagaaagtaactccactctcccagatcctccatgtaatcacgtgattagtggcaaaaatttaaccaataagcatttcaatgcaaagctcggcattagtaatgttttctttgaaaaattgtgctatgttgtagagatgcaagttctcggagccaattgaaagcgcaattatgagattgctcctaatcgacttatcaatcaaatattgatcattc

SEQ ID NO: 41356 - DNA, 1977 bp, Glycine max
  Clone ID: PAT_MRT3847_137347C.1
cttaacagtcaatatttatttttcttactttcatataaaagcaagtttctcagttagaaatgtctcctgcaaggagattaactttaaactcttcaccctttcttgtgatcaaacactgtatcattataaaagtgcatggctattctggtagatagagcttatttgatattactttggtttattcctttatgatgtattcagggaggagcatcctaagttgtggatggagctacatgtcaaaaacagggagaagcttctcacatcccttcgtcaacacctctccgactcttctcgttctctccatggcttcgtcctccttcaaggtggcgaggagcaaacgcgttacgacaccgatcacttggagctcttcaggcaagagagttacttcgcttacttgtttggagtcatagagcctggattctatgcagctattgacgttgcaactgggaattctatcctatttgctcctaggttaccttctgagtatgctgtttggttgggggagattaagccactctcctactttaaggaacactacatggttaccacgtgttgcttctcagatgaaattgaaagtgtattgcaacaacattaccagtgttccgggaaacctttgctgtttctcttgcatggccttaatacagatagcgataattactctaaaccagcacagtttcagggcattgataagtttgacaaggatttgactactttgcatcctatattgactgaatgccgtgtcatcaagtcagagctggaaattgctcttattcagtatgccaatgatataagctctgaagctcatgttgaggttatgagaaaaactaaagtgggcatgaaggagtatcagcttgaaagcatttttcttcaccacacctacatgtatggtggatgccggcattgctcctatacatgtatttgtgctactggtgataatagtgctgttcttcattatggccatgcagcagctcctaatgacaagattttggaagatggagacatggcgctgtttgatatgggagctgagtaccatttctatggatctgacataacttgttctttccctgtgaatggaaagtttacaagtgatcaatctcttatatatagtgctgtgctagatgctcataatgccgttatatctgcaatgaaacctggaataaactgggttgatatgcacatattagcagaaaaagtgattctggagtcactgaagaggggacatgttatattgggtgatgttgatgacatgatggcttcacgcttgggtgctgcttttatgccacatggtctggggcatttccttggtattgacacacatgaccctggaggctacttaaagggcctggaaagaagaaaggaacctggattaaaatctttgcggacaatcagagatctccgggaaggaatggttatcactgtggagcctggatgctactttattgatgctttgctacttcctgccatgaatagtccagaaacttccaagttcttaaatcaggaagcaattaataggtttaaaggttttggtggagtccgaattgagagtgatgtgcttgttactgccactggttgctacaatatgaccaagtgtccaagggaaatgcgggagattgaggcagtgatggcaggggcaccatggccagctcagaagatctaagtttgacctcacctcacctgtccttgatctgaactggtctgctaagtttgtattttttttattaaataaatattagaaagtaactccactctcccagatcctccatgtaatcacgtgattagtggcaaaaatttaaccaataagcatttcaatgcaaagctcggcattagtaatgttttctttgaaaaaaaaaaaaaaaaaaaaaagatgcaagtcggagccagtgtgctatgttgtagagatgcaagttctcggagccaattgaaagcgcaattatgagattgctcctaatcaacttatcaatcaaattttgatcattc

SEQ ID NO: 41357 - DNA, 280 bp, Glycine max
  Clone ID: PAT_MRT3847_137348C.1
ggagttggatgagtttctgaagctttctatggagatgaagaatccactgtcctgcatggctgtgcccacggtttctgttcacgttaatgtgtgttgttgggtttagttggtttggtttgtcagcctaagttagtggatgttctgcccacggctgtccctacggtttctgttcaagtttatgtgtgttgtttggttcgtctgttgacgtttacagatgtcgttcggttgagttcgtttggtatgtgttacctgctaaatttagttctgcactgctaaggtt

SEQ ID NO: 41358 - DNA, 335 bp, Glycine max
  Clone ID: PAT_MRT3847_137349C.1
acaaaacggaaaaacctttttatggatttccgctcaaaaaccaaatacggtttttattctatgggggatggaacccaccttcccaatgggggaagggaaaaacgaaaatttttaaacacaaaaccggttacttcaactgaatatacaggggtaagaactttggagccttttgggtggaaaacccccttttgggaagaatcaaaaaattgtccaaacctgcggtggaagaaaaaaaggggggcaacagttttgatacaaaattcactgggttggtgaaaaaaaagggggcccctgaaatccttttaacggggggccctggctttcaaaacattttg

SEQ ID NO: 41359 - DNA, 708 bp, Glycine max
  Clone ID: PAT_MRT3847_13734C.1
ctgaattggtcccactgagcttgcctctgtggttaagtacagtttgcatagctccatacttttacagttggaacagtagggacagctgtcagtgcttttccacccacaggtttctctcctgtgttgagtgttgtcttgagtgatcctaatgaggtagagagtacaaatgttagctctttgcaggtgaagaaactgaaacccagaaacttactgacttgcacccaaattaaaaagcaagcagtggtcttgttttatacctcagtttacacattggtcacattcatataattttattgtagttcattactctcattttccttctgggaatgagagagtttgaaactaattttctagcagccaacaacttacacagtgatatctttgtgtatattcatttttacccatattaaaataactatatagatttgtaaaataatttagagattaaatatgttgtatatgattgaatatgtaattgtatttgacatgaaatttattttcctcattgataaatactctcagaattagcatctgcatcttggctactcttaaatgcaagagtagacactacgcacattctaaagtaacctaaaagggctgtttactagcaatagcataaattagcatttgttctgtttacctcatgtgcttagtgacattcatcaaacagctcttgtatgtggtggtacagttcttacaatgcatgtg

SEQ ID NO: 41360 - DNA, 424 bp, Glycine max
  Clone ID: PAT_MRT3847_137350C.1
ttttttttggggttttttttttttttttttttttttttttttttttttttttttttttttttttttttttttttttttttttttttttttttacccaaattaaaaaatgttttttgaaaaaattacccccagggggggtcctaaccggggggttttatacaaaaaccaaacctcccatgggccttgggggaaaaaaccaaggttaaaattccttttttggaccgggggggatacaattgttttttttcccactcaggccccactgaaacgggttttgattaacaaaacctcccctttgaaacccttttttttttcaaaacccccccgggggggggcaaaaggttttaattggtaactaaatgggggggaaggggcttttatttccctgggagaaaattattttttatcggacctatgggggtat

SEQ ID NO: 41361 - DNA, 131 bp, Glycine max
  Clone ID: PAT_MRT3847_137351C.1
tactgcactttatgggttgtgaagcatgcataaaacagccatggtacacatttctttctacggaaacgattgtaaaacgttcaataaccctcgtaatccttacaagaaggagcggatggactccaagttga

SEQ ID NO: 41362 - DNA, 275 bp, Glycine max
  Clone ID: PAT_MRT3847_137352C.1
ttgcctttttttttatttattttttctacttttttcttcattacattccttgactgaggaacgggtcctcacaacttccaatggtcgaagagaaacaccacaaagcactcgactctttcaacccactcacgggaccaggatccaaaagccattagactccaatactggttacgacagcacatcatattccaagccttctgatgactatgactctggagtcaacacgccatcgcaagtgacatctagcattatgacgatgaagggaaccacccaca

SEQ ID NO: 41363 - DNA, 450 bp, Glycine max
  Clone ID: PAT_MRT3847_137353C.1
ctcactagctcactaccggcctgccgtcctttttttatttttgtaaacgcctacagcttctaatgaagactggaattttgataggaacgtccatgcctctcatcccttctggatgctattactttaaaaagaaaaccatgtagttgcattacatctaacaaataatgaatcacatttatttttttcaattataagctttcaggtgactatcttaatagtacttcagtgttaggtatatttgggtgccgaagccaaatatgcctaacagtgacatctttggaaacgtgaagtccagtactagtaatgcaagtgcggtcttccagggttcgaaaatctatgccagaaaaccattggctaacccttgatcctaaatcctagctttcttacacgcgcctacgacgctatagattgtgtatacagccttgtatacaaaactcttggcccattgtt

SEQ ID NO: 41364 - DNA, 266 bp, Glycine max
  unsure (1)..(266): unsure at all n locations
  Clone ID: PAT_MRT3847_137354C.1
tgacatcctccatgtctgattacaagaagagattagatgttgcaggttacgtacccatacagacaagatctaaagccaatcagcaagaagatagagatttccaagccaaatacaatctaccggacaccgaattcgtcatcacttattacggctgttcttccagcagtctggtggcgggttacatctacatcacacctagatatgtncatttttgacgcttatgttggagcactgagtgtacctgtcgtcatagcaatcaccgacat

SEQ ID NO: 41365 - DNA, 475 bp, Glycine max
  Clone ID: PAT_MRT3847_137355C.1
tacggcgcgagaagacgacagaagggaatctaagaacaaaaaaattataaaatttgataactttaaccaaaccttttgttcatcttgtacaaaatggatcataaatgcaatttttataattgatactttggaggatgtagtatatcttatttattgttttaaattgcacgttgcaattagcaacatcatgggaaattgcttacgaatatggccacaatgctttgtggagacctcaaaatattgtggtcgcaattgtgattgtggactatagtttaaaaccgctaacaacctgatgttgcttgaaacctataatttccgctaagtgattaatataagagcaacttctataaaatgttgtttgaattgtatttgatcattattataacattgaaaaagaaccaacaaagtgaatacttgtaatgcttccttcttgattttactgagttagatgagaatgatttttttttctctgcac

SEQ ID NO: 41366 - DNA, 195 bp, Glycine max
  Clone ID: PAT_MRT3847_137356C.1
gactcacgcgtcagtacagttgtccagattctcatatcgttatatgcgtatttctttcaagactattactgcaaaagagttacatactgtcatgtctttacgagctttcctgttatccgtataattatcattgtcttacattttcatgagtactttgggtgcttccaagtagttgtaatgggtaagcattaattg

SEQ ID NO: 41367 - DNA, 833 bp, Glycine max
  Clone ID: PAT_MRT3847_137357C.1
accagtgatcgtacgtctccagaggcagtctgatgcaaggcattcagatgactattatcttaataagactctccgtgcccaacttagaagtcaaaagaaaagagttactgaagaagaaaatgcttccaagaaaagaggccttggcataagacttcttccagctactgaacaagattctgccacggcaaaatcggtgaaattttcagcaaagtttgacaaaaataggaaggacaagagggcattgatcagttctgaatctatcttctctggagtctctagctattctatgtctgacaagagaaaacgagagctagagtcaaaacgaagaaaaatttgtgcgacttcagcatccagccttctagctggtagggtaaagccatcatcatggtcacagccttcaagcaagcaaaagggaactgtaagatgttagaaagatgaaacatgtctgacattggttagcactggtcactggcgaccttgacaattggcagtggaattttgtacataaaagttgctgttgtgataattttatgttatgttttcggttgtaaaccatttatgaatttattaatggaagcagatatatttttcatcattccctcccctcctcacacccgcagagactaagaaatcttgtttcctcttcaccttagtaatttgtttttagctagaattgtaatatgacgtccaaatttgggtggtcacggttgagtgtttcaatccatatatgtttcattaggaattgaggctgatggccgggacagttgtcattgttgaacaaattgaagaaacatgatatgatgttggtggagtaaaattaaagttgatggact

SEQ ID NO: 41368 - DNA, 915 bp, Glycine max
  Clone ID: PAT_MRT3847_137358C.1
atgaggagagatgatgttgataattttaggaagccctcaaattttcattcttctcctatgagtgatctaaaaaacaatgataaaccttctgaccacacttctgataccctccttgcgttcgctgctccggttcccgggtggccttcacgtgtcagcagggcgggtccctgcggttcttccccagaacccattcctgctgtccggtcctttttgcccaaggaatcttctgccggtgggggccgaaggttcctgggacccgcgggggcggttttcagaaacaaaagatggtttggatgctgctaaagatccatcaaaatctgaagcacttggatgttcgcctaaagttggaaagtcatctccgacttcatcaaccatgaactccaaatcattgggtcatgactgcagatctgaagatactgaaatccctaattcttttacgaagcatggagtgatggctgatagtaacattcacacaaagaatgaaaattgtccaagtgatgctgccagggatgaaaatcaaaagaagtctgtaaaagagcgaccaaaatcctctttgaattcgaattcaaaaggattgcagtcaagcaggagtatgcaaaattctgtcccaaagcaagtgaattcagatgccagagattctgttcatgtttcatcttctaaacctttgatacatcagactgcaagtatattaggctctagtgagtctaatgcatcattgcaccatcagaaggttttacaagtgcagaataagatttcatcttcagcgccacagaaagttgaaaaacttaaccaaacaaacatccacacttcctccaagttgaatcaaagtcatgtatcatcagtgaatccttctccaatatcgaattcttcaatgctgagtgatgaagagcttgctcttctattggatcaagaact

SEQ ID NO: 41369 - DNA, 288 bp, Glycine max
  Clone ID: PAT_MRT3847_137359C.1
aacaaaaaattattatctttaatagcaatgctgggggttatgctacaaaagcacataaatttatattggaccaaattaagagagaatctccttcttctttcaaagacaaccatgtgttcaaaaacccgtgatttttaaaaaataataaaagagggctttttatcttacaaaaacaaattacccggcttaaaaagactccaaatacatatccttttaagaactcactttcgcctataaaaaatagccctctcatctttttctaactggttagccctttccttttgataa

SEQ ID NO: 41370 - DNA, 432 bp, Glycine max
  Clone ID: PAT_MRT3847_13735C.1
tccaaggaaggtttcccgtcatcactgtatgacgtcctccattctttgggggggggggggggggggggatgaggtaaatatagaacgctctagagaatggaagcgtagtagccgaggagatagacccaacttatatagactagtgaaagaaatactaaaaaacgagatagagtgacacaatgagagacgatcagtaaagataggtagtcacggtgcgaatgcacgtgaggcaagtgacggaggtaccgataggagagccaaaaaccatggcaacgtaaagtgatgcccgaatttaaataatagcagttgtatcaaccaagccgtagatacgaagacggttcctggaatggcactattcaaacttaaacgggaccggttagggcacgcgtaacgcctatatcgtgattctgggaatttgaattttaggacgat

SEQ ID NO: 41371 - DNA, 723 bp, Glycine max
  Clone ID: PAT_MRT3847_137360C.1
cggaccgtttattaaagccttttggggtctagtgaggagaagttgcagtgcacagtgtgcttggaggatgttgaggttgggagtgaagcaaaggagatgccatgtaagcacaagttccatggtgattgcattgtctcatggctcaaacttcatggttcttgtccagtttgcaggtttcagatgccatctgaggattcaactcttgaagccaatgtgggagttggaaatggggacaatcagaacagtgagctggtcagagctggagaagagagaccaagaaatggaaggaggaactggtttcctgtgctgcaatcatttaacaattttcttccttatccttgatcaatactttgttgggttttaaattgcagtcgtggttgtggctgtggttgtggtctccttgtgatccttgactttgtgagaaactgcaaaaagatgcgattgatgctgcaattgtgattgcaatgctgtcgcggagagctaaagaaccttgatgctgctgccaaaattgctgtcacggaccgtttattaaagccttttggggtctagttttcctcaccctcatcaagcatgaacagctaagtctagacactgtcatgcctctaaaatccttcctaattgtatatatcatttagatttccttgtctgactttcttgtaccattcaaatgtatatgtttgtcaataatttgcaaaaacagaataaacttaattattattctct

SEQ ID NO: 41372 - DNA, 394 bp, Glycine max
  Clone ID: PAT_MRT3847_137361C.1
cggccggccttcgttttttttttttttttcgatgggataaagccgagagctcacgtggcatgggagcttgactacggagagagccactaacggcacccgacgaagcagcgattcttaccgtgacgtccagcctccccccggtaggaggactctacatcgtgccctccgaagacaagcaccactcctacctggtgggctccgggcaatgctcctcactcgtttcccagagcgtgcaagcgccgcccgacgccgtgtggtccgtcttccggcgcttacacaagccccaaacctacaagcacttgatgaagagctgcgccgccaaaaagccctttcacatggcccgtcggattactcgggagcggaagtgatttccggcctgcccgccgccaccagg

SEQ ID NO: 41373 - DNA, 743 bp, Glycine max
  Clone ID: PAT_MRT3847_137362C.1
cacgcgtccggaaagagttgctggtttgatgaaaaaacagaagaagctacaagcgatgggaataatcgggagacaagatgattggaaaacttggggacaagaagctcaagtaaaggttggttctcgattgatgcaactgttaatagaaacagcctacattcaaccgcctaccaatcagattggagatggtccaccagatatccaccctgcatttagacatacccttagaacactttcaaatgagtcacagagggaaactaggagatatggtgttattgaatgtgatcctctggtgcaaaatggccttgaaaagtctgcaaggcacatggtcatcccctatatgccaatgttggtgccacctataaactggacagggtatgacaaaggagcatacttgtttttgccatcgtatgttatgagagtacatggagcaaagcagcaacgtgaagcagttaagagggctcccaagagtcaacttgatcctgtttttgaggcccttaatacccttggcaataccaaatggagggtaaacaaaagggtgctctgtgtgatagatcaaatatgggctaatggaggacgcctggctgatttggtggatcgtgaaaatgttcctagccctaaggaaccagatacaatagatgaagcagaaatccgaaaatggaagtggaaagtcaaagctgtgaaaaaggagaatagcgagagacattcacagcgatgtgacatagaacttaaacttgctgttg

SEQ ID NO: 41374 - DNA, 363 bp, Glycine max
  Clone ID: PAT_MRT3847_137363C.1
cgggagttttttttgcgcacactattagctgagggaacatataggcctgaaaacaccaaccatgaaagaacagagaaaaattctagttgcgcacctaaaacgaataaccgcggacattgacgtactaagaggaaaagggagtccttttgttgtttacgagagaggaactgaaaggtaagatctcttacagcgctacacttctggcccaggataaaacagattcgaccactcgccaaacgatgcaataacagtatgctctaaccatagaaacttaagaaacgcctgtaatgaactttttgaccctgaaaaagacgggcgcacaaatgaggaccgggtgtgcaactgatagtccactggattatg

SEQ ID NO: 41375 - DNA, 108 bp, Glycine max
  Clone ID: PAT_MRT3847_137364C.1
gacgccccctttacaggcgcataacccgcggcgcgagttgtggttacgacacagcgcgacccctacagtggggagcgctctagcgcgcgctccttggggtttcttccc

SEQ ID NO: 41376 - DNA, 984 bp, Glycine max
  Clone ID: PAT_MRT3847_137365C.1
gtcttgcatcttcatgatgaagattttagtgtccgattagcctgtcggaataccctgaaacgagtttgcccattgatggaaattgaaggaatgcttgctgtactaaacacacacagtttcctttctgatcatcgaagtgattatgaggactttctccgagacattgcaaagcaatttactcagcatcttcggcctagagttgatagttatatggcatcaacagtacaggcttttgacgcaccatggcccataattcaggcaaatgctatatacttctgcagcagcatgctttctctatctgacaatcagcatattttagctgtttatcattcacaggtcttcggtatgctggtgggaaaattgagtcgatcacctgatgctgttgttagagcaacaagttctgctgctctgggcttgttgctgaaatcctcccatttatgctcatggagagctgttgaactcgatcggttagaatcaacatcacggaaccatgatgtggagtctacgaaaaactagcaacaattctggaatatataccaaaatcatgattagctatgcgcttgaagcactgccttttgggaatggtcgagtggactagggtgctgctccgcatatttgtcatgtgaaagtcacccggatattggaagagatccctttgatgttcgtgtacagtgttgtgttagcaatcgcctcttccgtacttatccattcttttgttttgttgtaaagcttgaaatagaccatcgatttcttagtttttctttgaaatgtacatttatgttatgatcgtgtaaattgttgtatattagtcacactagaaactacatcgcggaggagatttttgcacatttcattatttgttttaataatttatattaaaaattgatggtgtccaagtactaatagatagccaaggtatttttaaaaaaaaaaaataaaataaaaataaaaaattttaaaaaaaatataaaaccccctttatat

SEQ ID NO: 41377 - DNA, 1001 bp, Glycine max
  Clone ID: PAT_MRT3847_137366C.1
ctgttttagggttctttgggcacaaaaaagaattctcaaataaatctcaatcaatatctcctttgtatttgtagttgtagggtttctcctttctctctcttttatcttctgtctccctttcttctccttcgctttgatccaaattttaatccttttttcatttgctcaattatttgcaccgatattcttcttcttcttcttccccttttgcttcggtttaagtttcaagttttaatcaaagaaagaaaatagtgtttcaagattcaaactttttcgtattgggttctcttttctctttgagtttttttgcttttctttctgggttttctgttttcatggtggatacggatgggtttggaactgggggcgatgttgggggaactcccaagacaggggatcttaggcaactgggaaatgttcccacagtttttgatgcatcacagtatgcatttttcggttcagacactgctgttcaagaagttgagttgggagggttagatgacgatgatggtttgcttgagtctaatgaggaggagttcattctcaatagagaagaggctgacaatttaaaatctctttcagatattgatgatctgagtactaccttttggaagttgaacaaggttgtaagtgaaccaaaaggcgcaggatttattggtgaacagggatcgagagaaaattctgcggctgaatgggcacacaaggatgatgttcttaattggtatgaccagaatgcttatgataatgaaggttctttggatggcagaagaatgccatcacagcctcattcttctctttctcagttacatgaagcaaaggccttgtacagaacatcctcttatcctgagcagcaaaggcagcagcaacatcaccagctccaacctagtgaatcggctcccaactggtttgatcagcatttgtatggtacggaaactaatcaggatggcaaacgatggtcatcacaaccgcattccaccattgcacacttacaagagtcaagg

SEQ ID NO: 41378 - DNA, 453 bp, Glycine max
  Clone ID: PAT_MRT3847_137367C.1
gctcttgaactttcaagcattagtttgggccaatatagttaaacttatgcctagagagatggatggccctcatacagataaaaatggatttaaggctgttgcttttttatgaaaaataagcttaattgacttaatttactagcttgcagtacctattaaagaggattaattgtagaacctgtatgttacaacatttgaatccctccaaaatgaagcaagtttagagtgggggaaaaatcagattgatagagaaaataaagaacatgactctgtggaaaataagttagggtttaaatgataatgttagcatatataaagtttaaatagtatcccttgaagtcaaataatacccagactgatgttggaatgagaaacaaatgttgaaacctgtctataagagctacattagaaattgaaatgatttatgacctgggaattgtggacaaaaggatg

SEQ ID NO: 41379 - DNA, 695 bp, Glycine max
  unsure (1)..(695): unsure at all n locations
  Clone ID: PAT_MRT3847_137368C.1
ctggtaggaccgaggaagcagagaaattcatgtcaaaactttcagagacagggcaagctgtgaaaactcatgacacttcccaagagcttgatgcttcaagtgatattatgtactctcagcaaataagtgatttgtgtacccaggggaagtacaaggaggcaatgaaactatttcaagagtcagagctcacgggaggcgggttagtgagggtttctttgttcttgcttttccttcgctgggcgccgtggcgcgaaggcgtatcccctggcgtcctgccgctctgcacccctgcgtggccgcggcaccccgccgggcatgtggccccggcgtccccggcgtgcgccgccacctcctccacgcccaggtgcgcgctccgtctctgcgtccttgtctctcctgcaaagtgaggtgaaagaagctcgagtgagtttttgctcgggggaaaacttgactggtgattgataaaagggcagttcatgcaaccatccttactgacgtaacaagcaatcacttgaaggctacatctgtggctgattcatgatctgactatctgggtgataatgatgattttacaacatgaaatcagcttttactatgaccaggataataagtgtaatgctacaagattccgagaggagaaaggggtactntaagctntcgatggtgtgattcatttgttatcaatgtaagattta

SEQ ID NO: 41380 - DNA, 397 bp, Glycine max
  Clone ID: PAT_MRT3847_137369C.1
ccccccccccctccccaaaaaaaaaataaaagaaaatagctacaattgtgatgacgccaatgctctaaactaaattcttatattgaaatgtttccagcacgacaataacaatgctagttctatttagtttaattctcaaacttcatatatctctaaaatcacacacacaacaaaaaatgctgcaacctgcttaccagagcagagttaaagaatccgcttgaccgtttatttggggaaccaaactccaccttattgtccagcatcctctcatagggtgctctgtcttgattacttggagatgactgatggccctattagttgctggaaatttcatacaaatattaattatgtctccctggaggatggtgcaggtgagtaactgtgatcacttgagtct

SEQ ID NO: 41381 - DNA, 1481 bp, Glycine max
  Clone ID: PAT_MRT3847_13736C.1
ggtttggccgatgttcctttcttgtgatccgaggagaacgaagagtcgttcctgagaagctcgtcgctatgggttctctccctgtgcccgcatttccatccaaacactgccttgacgagagcagccacattgacgaagccaccctctcggcgctattcaagtcgcagcagagccacctgaacttcttcttcgaccacatcgaccactcccaaaccctagccttcacgcgcgcgctcctcaatgccgccggcaccgtcttcttcaccggcgtcggaaaatccggcttcgtcgcgcacaagatctcgcagacgctcgtctctctgggcgttcgctccgcgttcctctcgccggtggacgctctccacggcgacattggaatcctcaccaatcgcgatgtgctcatcctcctcagcaagtccggcgccaccgaggagctcctccgccttgtgccgtgtgcgagggccaaaggcgcgctcctcatcgcgctcacctccgttgaaggcaacgcgctcgccgcggcgtgcgacatgtccgtgcatttgccgctccagagagagctctgtccgttcaacctcgcgccggtgacatccaccgctattcaaatggtgttcggcgacaccgtcgccatcgcgctcatggaggcgaggaatctcaccaaggaggagtacgccgcgaaccatcccgccggcaagatcgggaagagcctcatcttcaaggtgaaggatgtgatgaagaaacaggacgagcttccaatttgcagagaatcggatttgattatggatcagctcgtggaactcacaactaaaggatgcggatgcctcctcgttatcggtgacggttaccgtctgatcggaacgttcaccgacggtgatctccgtcgtactctccgagccagcggagaagccattttcaaactcactgttgggcaaatgtgcaacaggaatccgagaactattggtccggaggcaatggcggtggatgcgatgaagaagatggaggcacctccatcgccggttcagtttttgcctgtgataaacgatgaaagtatcttgattgggattgtgaccttgcatggtttggtttcagctggcttgtgaattgtggtgtcactgtcattatatattggatatattatcgctttattctttgtagtttttactcctattagcatttgagtcccacccaatttccaagtgggattcacctgttcttgtgtacttattgtatcatcatctcagaggataggattcagaagcattctttttttgcccccttcttcttttgctccgaaaggataccagttgtttttgccatttcgcacctgccgacattgcggggttgtttctactaggagtttccgtgcattaattattgatgtaactaggttgaacaattccagctagaacattgtgatgtgaaaatgatatttgaaaaactcgtgtaatgcgtttcattagtatataatccaatattatgtatat

SEQ ID NO: 41382 - DNA, 370 bp, Glycine max
  Clone ID: PAT_MRT3847_137370C.1
taccgctgccggtaccgagtccgggattaatcccggctgactactacgcgtagtcgtccgcggccgtccttttttccatgaaaaaaacatggcgtgaacaatagctaaaaaatataatactgtgataaacctgtccttaacaattcgcttctcactatactcataagtgtttggaataacccattgttcgacgggatgagattcaatccgcccatgaccgtccttttacgtaacaaaggaagaatttttgaacgggactgtactttattaaccggttcattaaacatgctatatcctatggtttttccatacaaaacggtgtgaagcacccttcaaagcatacatgatcataatgtaccattcaggcttg

SEQ ID NO: 41383 - DNA, 1223 bp, Glycine max
  Clone ID: PAT_MRT3847_137371C.1
gagagtactaaagaaaatatggagaggaagaataggattcttgtatttgggggaactggttacattgggaagtatttggtgaaggcaagtgtctctttaggccatccaactttggtatacactcgccctcttaatgcacaaactcctccctctaaggcacaagtttgcaaggagttcacaaacttcggggtcacacttgtccatggggaacttgagcatgaccagatcttggctgtgattaaacaagtagacattgtgatatgcactctggcatcccctcaagtgatggagcaactcaaaattatagatgctatcaaagttgctggtaatataaagaggttcattccatcaggatttggcgcggaagaagattcagtaaaacctcttcctccattccaagctgttcttgataagaaaagaaaaattagaagggaaattgaagcagctgggatcccttacacttctatatctgcaaattgttttggtgcatactttgtcaattatttacttcacccatatgaaaatgtgaaggatattactgtctatggcaacggggaagcaaaagctgtgctaaattacgaagaagacattgctatgtatactgttaaagcggcgaatgatccaagaacatgcaaccgcgtcgttatttatcgaccccagaagaatatcatatcacagaatgagttgacatcattgtgggagcaaaaatgtggtcaaacttttcgcaaggatttcgtttctgaggaagagattgtcaagctatcacaatccttaccctctccacacaatattccggtttctatccttcatagtgtatttgttagaggggacctcgtgaggttcgagataggagaagatgaccttgaagcttcacagctatatcctgattataactacacatccattgatgaacttcttgatatatttcttgttgatcctccagcccctgcctctgctgcttttgagtgaagacattttaccctgcacttgttggttataaattgtaataaagtaggtgatcctcccgattaccgttgaataacatgaaaaggcataaatgtttgggatacatgattaatagacttaaatatgattttattcttaataaatatttgattttatattaattttttttggtgtatatttgtcgccttgttttttcttctctttctatgataaggttattttctagctatcatcgtgttaggacttaagaggtgcaa

SEQ ID NO: 41384 - DNA, 1258 bp, Glycine max
  Clone ID: PAT_MRT3847_137372C.1
acggctgcgagaagacgacagaaggggatgttaagcatttgcaacctagcaatggaggcgattaggaagagtaggattcttatatttggaggaactggttacatagggaagtatatggtgaaggcaagcgtcacgttaggccatccaacttttgtctacactcgccctcttgatgcacaaactccttcctctaaggcacagctttgcaaggagttcaactctatgggggtcacacttgtccatggagaacttgagcatgaccagattctggcagtgattaaacaagtagacattgtgatatgttctcttccataccctcaagtgatggagcaactcaaaattatagatgctatcaaagttgctggtaatataaagagattccttccatcaggatttggcgcggaagaagattcagtaaaacctcttcctccattccaagctgttcttgataagaaaagaaaaattagaagggaaattgaagcagctgggatcccttacacttctatatctgcaaattgttttggtgcatactttgtcaattatttacttcacccatatgaaaatgtgaaggatattactgtctatggcaacggggaagcaaaagctgtgctaaattacgaagaagacattgctatgtatactgttaaagcggcaaatgatccaagaacatgcaaccgcgtcgttatttatcggccacagaagaatatcatatcacagaatgagttgacatcattgtgggagcaaaaatgtggtcagacttttcacaaggctttcatttcggaagaagaaattgtcaagctatcacaatccttaccctctccacacaatattccagtttccatccttcatagtatatttgttaaaggggacctcgtgaggttcgagatagaggaagatgaccttgaagcttcacagctatatcctgattataattacacatccattgaccaacttcttgatatatttcttgttgatcctccaccccctgcatctgctgctttcgaataattaaagccctttcaagtttgttaaaatgaagtttgtgatcttccaaataccgctgactaaagcataattgtatttatctttgaggataagatttgttagtccaatctaggttttgctatgttctctaaataagattggtatagtatactcatgtaccatataaagaacaagcttgcataagaatttgattgtgtatcttgtgattaagaattacaccgataaataatttttattagataaaacatatttt

SEQ ID NO: 41385 - DNA, 2123 bp, Glycine max
  Clone ID: PAT_MRT3847_137373C.1
ggctcgaggtccctggtcactactcacaaatgtgaattgtccccagtctctcgagaacttagaatagaatactcgtcccacacccaattttcttctctctctcctctcatcacttcatatattcgcaatttctcttccaccgtgaaaccctagacccaactgcgagcgcggagccaagccatgtccctcaaccgcctccgccctctcctccctccgatccctctctgcctccgccgccgctgtggctccctccgcctcctcccctcccgcccctcttccccccaccgccatgatctacgaccgcgccgccgaggccgtgaagtccaagctccggcagctcgagaaccccgacccccgcttcctgaagcatgggtccccccggcccaccctctctgaccacacgcgcatcctgtcctcccccgagacgcgcgtgaccacgcttcccaacggcctccgcatcgccaccgagtccaccctcagcgcccgcaccgccaccgtccggcgtctggatcgacgccggttcgcggttcgagaccgaggagaccaacggcaccgcacacttcctcgagcacatgatctttaagggcaccgagaggcgcaacgcgcgtgagctcgaggaagagatcgagaacatgggaggacacctcaacgcctacacctcaagggagcaaaccacctattacgccaaggtcaccgacaaggacgtcccccaggccctcgacatcctcgccgacatcctccagaactcccgattcgaggaaactcgcatcaaccgcgagcgcgatgtcattctccgggagatggaggaggttgagggtcaaactgaggaagtgatttttgaccacctacacgctactgcattccagtacactcctcttggaagaaccattcttggacctgctcagaacattaagacgatcaccaaagctcatctgcagagttacattcagacacattacacagctcctaggatggtgatagctgcatctggagctgtcaagcatgaagacatttttgagcaagggaaaaaggtcatttataagttgtgaacagatcccactaccacatctcaattagtttctagagagccagctatttttactgtttctgggggcatattgcttggtgatgatatcaacccctctcattttgctgcgactttttttggggtcttgtggaaagacagcaagaggtggaaaatacatgggttgcgagctatcttgggttcttggaataaggcagcaggaggaggaaaacacatgggttctgagttagcacagcgaattggcatttatgaagttgccgagagcattatggctttcaacaccaattacaaggacacaggtctttttggtgtttatgccgttgccaagcctgattgcttggatgatttgtcctatgcaataatgtatgagacaaccaagttggcttatcgtgtttcagaagatgatgttacacgtgctcgtaatcagttgaaatcttcactgctactacacatagatggaacaagcccagtggctgaagatattggtcgtcagctactcacatatggtcgaagaatcccatttgctgaattgtttgctagaattgatgctgttgatgccagtacaattaaacgtgttgcgaaccgatttatctatgacaaggatgttgttattgctgccacgggtcctattcagcgtttgcctgattacaactggttccgacgcagaacctactggaaccgctattagttcattatagtttttttgcctcatttaaacttcattggaggtctggcaaatgttttattcaaatttacaagatttatgcctctggatggctgctttggcagccatttttcatttatttgtcatggacctctattttgtaacatttttgcagtaataagtatgctgttgtcagtgatgtaattggcatccttcgcaattactcattcctgttgaaaatggtgtttacttaaaaattgcccttgtttctcttgaacctcatatttggtttttggaccctttgaactcatcgattcaatcaatagtgcaattggatgttcttaaaaattgcccctgtttttctttcaaaaaaaaaaaaaaaaaaaaaaaaaaaaaaaaaaaaaaagcttaacc

SEQ ID NO: 41386 - DNA, 691 bp, Glycine max
  Clone ID: PAT_MRT3847_137374C.1
tttggtgtttatgctgttgccaagcctgatagcttggatgatttgtcttatgctataatgtatgagacaacccaagttggcttatcgcgtttcagaagatgatgttacacgtgctcgtaatcagttgaaatcttcactgctactacacatagatggaacaagcccggtggctgaagatattggccgtcagttactcacatatggtcgaagaatcccgtttgctgaattgtttgctagaattgatgctgttgatgccagtacgattaaacgtgttgccaatcgatttatctatgacaaggatgttgttattgctgccatgggtcctattcagcgtttgcctgattacaactggttcagacgtagaacctactggaaccgttattagttcattatagtttttttttttgcctcatttcaacttcatgggaggtctggcataatgttttattctaatttacaacatttatgcctctgtttttcatttatttgttatgggcctctattttgtaacaattttgcagtaataagtatgctgttgtcagtgatgtaattggcatccttcgcaattattcctccttgtcgaaaatggtgttttgattaaaaattgccttggtttgttttgaacttcatattggtttttggaccctttgaacttgttgattcaataatgcacatggatggatttgtgcct

SEQ ID NO: 41387 - DNA, 194 bp, Glycine max
  unsure (1)..(194): unsure at all n locations
  Clone ID: PAT_MRT3847_137375C.1
gctcgagattcattaacaccgtgttcgggtgaagactttatgaaatcgaggtcgcagtatgccaggcacagcgtcatgttatttgatgcatnccggctngtacccaagaacaagaacatggattatggcttcctgcttttgctcctcttcttccatatcttccttcctcactcctgctggaaacccaagtggag

SEQ ID NO: 41388 - DNA, 1213 bp, Glycine max
  Clone ID: PAT_MRT3847_137376C.1
tacggctgcgagaagacgacagaagggggaagaacatgtggctatgtggcacctatatgttgattagtgccttatccagcaaggctgggctctgttgtgttgacagttgtggtggtcgttcaagatttttaacctgaaatcttcacttcacatctctctatcctctcaatcttcatctccaacaagtgtttctgtaaccatggcatccaccactctatcccctacaaccccttctcagctatgctcaggaaagagtgggattttcagtccctcacaggcacttcttgtgaagccagtgaagaggcagatgatggggaagagcaagggaatgagaattgcatgccaagccaccagcattcctgctgatagagtccctgacatgggcaaaagacagctcatgaatctgcttcttcttggtgccatttcactcccctctgctggaatgcttattccctacacctacttttttgtccctccaggttcaggttcttcagctggtggtactgttgccaaggatgctgttggaaatgatgtaattgcagagaattggctcaaggcacatggacctggtgaccgaacccttgcacaaggattgaagggagatcctacctatcttgttgtggagaaagacagaacccttgcaacatatgcaattaatgccgtgtgcactcaccttggatgtgtcgtgccatggaatcaagcagagaacaagttcatctgcccttgccatggatctcagtacaatgaccaaggaagagttgtgagaggacctgctcccttgtctctggcattagcacattgtgatatagatgatgggaaggtggtgtttgttccttgggttgaaacagatttcagaacaggtgatgctccatggtgggcttagactccttaaagccgtccctctgttgtcatgtatatttaaacatgaaattcaaacattctgttttgtattaatgcataaatatattttgtaatcaaattgatattttgtgaactgaagctaagatggaaaggaacctgaacgggtcacttttttccgtgtactgaagctaagatgaaaaagaacctgaacaggtcacttttttccgtgtaaaaaaaaaaaaaaaaaaaaaaaaaaaaaaaaaaaaaaaaaaaaaaaaaaaagagtgggccgttttaaaggatcaaactttacttccccggccttgcaacgtaaaagtttttttttggggcc

SEQ ID NO: 41389 - DNA, 670 bp, Glycine max
  unsure (1)..(670): unsure at all n locations
  Clone ID: PAT_MRT3847_137377C.1
ccacgcgtccgctcagcgtaggccttttacttctgccaggccatcacccgcaaaataatatgggcagacagaaaagaaaagatgatgatgatgatgatggaggagcctaatattccttcggacgaggagttaacactctcttatagtgaacaaggcgagaagcttggcgaagtcggagaggcggttggcggtggcggagagagaggggccgggagagtcaccaagggcgatggcggggattgttgagggctttgtaagagtgttaacttctagttttttctgtatatatagatagcaaggaaggtttttgtggcgtagtggatatggctatagttgaatcagtggggaagattcctttgcaagacccacctgaggaggagttttgtgctgctgacttgacttggaccaagtttggtaattctgagcaccatgatgaggttcccttcattccctatgacagagttgatgcttttataattggcgaatgctctaatgtcgagtgcacgacgaggtttcatatcgagagaggaaagaaaccgactattagaagcttgaaggactacaaggacgattagtatctggagtacaggctgtactggtgctcgtttggccctganattatgggaggaggcttattacctaatcgaggtatcgactaatactcaaaatc

SEQ ID NO: 41390 - DNA, 201 bp, Glycine max
  Clone ID: PAT_MRT3847_137378C.1
caattttcttactctaacatcttttctctttcttggcgatgaaaatcttgtacgcaatgagggcgaagtcagaattggggaagcttggtgagctggtccaacaaagaatggaggtcgtctgtgacggagacgacgacaggattcggaggcattatcgacgatggtgttggcattgacttttttgaagtggcccaataaaaa

SEQ ID NO: 41391 - DNA, 367 bp, Glycine max
  Clone ID: PAT_MRT3847_137379C.1
gggggtgggggttttttttttttttttttttctttctttttttatatgaatgctcttttcggtaaagagttggcctgacaaaccaattgtagcaactgccgaaaattcttccgcgcccacaggaagctagcaacatttttttacccattcaaatgtttggggggggggggccccaaatatctagtataaaaccaacgtatcccacagggggggggggggggccccaacaaaatttaaagggccctacacccgagggctgaaaaagaccatataggaaaaaaaaagacccataactagatgttatgctctctgaattgtcccatacaacaccaaaaacaaaacaattgtgaaaaaaaaagccgccacc

SEQ ID NO: 41392 - DNA, 808 bp, Glycine max
  unsure (1)..(808): unsure at all n locations
  Clone ID: PAT_MRT3847_13737C.1
tttttccaaaacacaaacatatattgtcaattcccctcagatataccttaatatccatttcacagcatgccaacacttctttcaagggtttgataggaatctactcacaactcctacaacataagcaatgcctagtcatatatagaccattgcatacataatactacccactacaaaagaataaggcacctggataaaggagtaaaggagtaactggtttaggagtaaaggtttagccagattgtatagaaaataacaaagaatataatgatccccgttttaactatgatagatatagttggtggctctctgtcaatcctccatggctctatccattactagagtgtttaggtctttaggaggtcttgtgacccacttatcccttatttgcagtacttgttgaaccacaccccaatgtgaaggaagcattccaagtcagattgaggccttttgagtgcatgaacatcattttgaaacataatgattttgacctctactcctttctcctttaacgcccgagcatattgcaatccatcaaaaattggaacacgaatatcttgagcacctaataggaaaagtgttggtgcttttacctttgagacgtgtgaaataggagacttgctttgaaagagcgtcaaatcatccgctgaaggtggttcagtaaagcaatttttggcaatggttccccgggcctctacatagcaccaatcagggatatccnnnnnnnccaatcatcaatnnnaggnnnacaactggattgattgcagcagctnntacaaacttgtctggtgcctgnnnaatcaannnc

SEQ ID NO: 41393 - DNA, 516 bp, Glycine max
  Clone ID: PAT_MRT3847_137380C.1
tattatttttttttttttttttaaagaaatctgttgcctatgggaccatacttgggcactttgcttttgaatacgaaaaactttccaagtttttctttttgaatgagactggccccccatttttcggagccttggggagtttacaggggacaacacaagagaattttgggcttaaaagggtataaaacaaaaattggacgtttcacttcgggggccttttggacctaagaaaatgggtttggtaaccgggaccaaaaaattgctcagggatttaggcccttgttcgaagaacaacacccaatgtgtccttggacacccgaaaattatattaaattgccccaaaaggtgtcttcttggctggaaaattgtgatataagacacccaagtttggaaatggtatggccacttggttgctggagccgaccttatgggttaacaacggggccatgggaacttttgagagttttatcctgacccctgattctggtgaaggggcccgggtataaaaacgcccct

SEQ ID NO: 41394 - DNA, 386 bp, Glycine max
  Clone ID: PAT_MRT3847_137381C.1
tcgaatacgcgttttggtttattatgggaatcatcatgaccgtcttataactattagaccagcatcgaagtcaccctatgctccctctagagactgaaccataatctaacgctggcccagacctctgggagttgcctagaagaacccaaaaactatgtgacgagaacacagccacaacacagtgttctattgggatgaccctcttggtcacttgttcactcccactaactctgcttatagcggcgctgtttactccttctccattcacaggctccagaagcagactgacttcaacagcaaagaaacctacgactgagacggacacgccctcaagtaccttgactgcgacggaatcacttaatgcactgacgaagacgaatacagtg

SEQ ID NO: 41395 - DNA, 687 bp, Glycine max
  Clone ID: PAT_MRT3847_137382C.1
gttgttaggaggagaaaggatcaaaaggaagaagcatcaccataaagcaagacacttttttcctcttcattccttccttcaccttcttcgttgcttgcggtgccctagattttctctatcctttcaatcgttcccgaattccctcccgctagggtttcccatggattccgaggacgatatgcacgacgccaacgatgtggagtcccttgacgacgatttctacagtggcgagaccgaggacgctcccatggattactacagtgactacgacgacgaagctgacgattacttcgacgatgctgacgattctgaccgggttgagtctcgccgccctgagcaaaactttacaatattgagggaattggatatccggcaaaggcaggaggatgacatagctagagtagcggcagttctttccataccgcgggtttctgcgagcatcctacttcgtcactacaactggagtgttagtaaggtgcatgatgcttggtttgctgatgaagatcaagtccggaaaacagttggtttgttggagaagccagttttccagattctaatacttagagagcttacttgtggcatctgttttgaaatgattcctcgtgcacgggttgaatctgctggcttgtggccaccccttactgctattcatgctgggcaggatatattggcacatcaattaatgat

SEQ ID NO: 41396 - DNA, 336 bp, Glycine max
  Clone ID: PAT_MRT3847_137383C.1
gtttcatcttttaaaggcgcttccgttaaggttgagccagacaccttgagttttaccagaaaataccagaaattatcttacaaagttaccttcacaacacaatctcgccaaacagaacctgaatttggaggtctggtgtggaaggatggtgtgcagaaggtgaggagtgcaattgttataacgtatctgccaccaatatgaaaacttcacttgggactacgtataacttaagcagtatttcttttttttttttcttttttttttttttttttgcaataagcaaaattttctgtactatgaagtgtacgcatttttattacaggaaaaatgctgtgg

SEQ ID NO: 41397 - DNA, 219 bp, Glycine max
  Clone ID: PAT_MRT3847_137384C.1
gatcaagtatttacctgacttggtgggtgattctccctgaaggttacaaaaaacaagtctcaattgggtaggaatgcctgaagaaaacaacggttttaatccatgggttaaggagaactatcccaagaagaataccaagtttgagactcacaacgcccccgttgtgccggaacaccatttcgccctttctgcctgggtgtctaaaaatgttaaagagga

SEQ ID NO: 41398 - DNA, 461 bp, Glycine max
  Clone ID: PAT_MRT3847_137385C.1
tacggctgcgagaagacgacagaaggggaattaattaaaagagtcttataattagagacaaatgaagtatttatgatttatgggtgattttgggtaaacttaaaaaataattttaaaataggtgatttttaatttttttttaataaatagatagaattacttatttcaagtaaatagtttaaacaaacatattagaaaaaaaataaaatttttattttatttaaaaaaatgcttacttgaaaaaaataagaataagcaaactaaccctatatttaaaagtaaaaattaagtagtattaaaataaataagtgtaaatagtgtaattttgtatgaagtgaatattatatgcatttttgttggtgtcaaatgttgatatatatagtcatgaattttgagttcttcttattacattattcaaccattatgagaccagatcggatagagagtttctttatcaaatt

SEQ ID NO: 41399 - DNA, 674 bp, Glycine max
  Clone ID: PAT_MRT3847_137386C.1
agctcctcccagggataaggttgtcattctaggagatggaaacgtcaaagctgtttatgtgaaggaggaagacattgggacttataccataaaagcagtggatgacccaagaaccttgaacaaaactctgtacgtgagaccccctgcaaatgttttgaccttcaacgagctcgtgtcgttgtgggagaacaagattaagagtacccttgagaaagtctacattccagaagatcaacttcttaagtacatccaggagtctcctttccctgctaatttgatgttggcattaggccactcaatgcatgtaaagggtgattgtacaaactatgagattgacccttctttcggggtggaagcttctaacctttatcctgaggtgaaatacactactgtcgacaactatttgaatgcgtttgtctgaagtccagagaatgcgttatcatcaataaactgctctacctaagctgatcaataaaatcagagcatcttgtttattgctcaagaatttgtaccttgtcccttattgtcgttcgctacttcgcttagcttggcactgcttgaaagttcttctaatattaaagttctattactatttgttttggtgtgaatgtgatatttctaaggtccttatcaggttgtttacggttgaatttgaatcaaatgttagacaaaaa

SEQ ID NO: 41400 - DNA, 332 bp, Glycine max
  Clone ID: PAT_MRT3847_137387C.1
ggaataatgattatggtttgtggagatgcaacggcaaggcgttgaggaagtgagcatacaagagttggcgtcgaatccttccctcgagaaagatcaactgaaccatctgagataacacgtaaacgatgaccctgcaaattctgactatgttgacatggatagggaactttccgaggtcattgccttgaccgatgaactccttgcaactgcaaaccagaatgaaatcgctgcacctcctaataatgctgctgcatctccagtcttagccatacataacgagaatcaattgcgagatactacttctgatcatcacgagaaacttcctgttggca

SEQ ID NO: 41401 - DNA, 540 bp, Glycine max
  Clone ID: PAT_MRT3847_137388C.1
ggcattgaaacctcttctggttttgaaagctagaccaaagatcccaaaataggagagctaaccgcaaggaaaaaaatattggattcccggccaaaattatgttcaattgtttcaaaggccggggagccccctaaacccccccaggggggtgggggcttcactaaacccccttagatcccaattaggggcccctccccccccaaaggatcccagggcaaaagcccctctatccaacccaaggggaaaggccgggggaccatattggtcccctaacgaaggggcctttatgcccccaaaaccccccccatagaaaagcctattaattaaaatttttattaaaaaaagaaccctaaagcctaccattttcactcctttaccctaagcaacgggctacgggggggggggccctcttagccttcaatcattaggcggaattttatccaccccccccctctaatctaaaaattgggacttttacttacagaacattggttctaacttacttccttcagaaaagttaaaaaaacacaattaaattta

SEQ ID NO: 41402 - DNA, 166 bp, Glycine max
  Clone ID: PAT_MRT3847_137389C.1
cgcctcgaacgacgaagactacgatgtcgcaccatcgtctatcccattcccacgcccaccgccttgctccgcacaagagctctagcagagagaggcacaggaatggcctcccgcgcaggaataacgctcgcgaaccggacgcgactcagatctagcggatgaggat

SEQ ID NO: 41403 - DNA, 428 bp, Glycine max
  unsure (1)..(428): unsure at all n locations
  Clone ID: PAT_MRT3847_13738C.1
gggccgtcaacccacgcgtccgcttcgatgacaatggcagaaactttaacaaagatggagacctcgttgactggtggactcaacagtctgcaagtaactttaaggagcaatcccagtgcatggtgtatcagtatggaaacttttcctgggacctggcaggtggacagcaccttaatggaattaatacactgngagaaaacattgctgataatggaggtcttggtcaagcatacagagcctatcagaattatattaaaaagaatggcgaagaaaaattacttcctggacttgacctaaatcacaaacaactatttttcttgaactttgcacaggtgtggtgtggaacctataggccagagtatgcggttaactccattaaaacagatgtgcacagtccaggcaatttcaggattattgggactttgcag

SEQ ID NO: 41404 - DNA, 341 bp, Glycine max
  Clone ID: PAT_MRT3847_137390C.1
cctgctgcaccggcccggacttactggccggacccacccacgcggtcaatctctcaatctctcttctactttcttcgtgctcgatcttgctcggggagtgataatccacctatgtgctggcctcaaactacaacaatgacctcgccttccacactgagctcacgcggtgaacactttcctatccaaccttggactagctggcacaggaacactcactatgcctcaagttccacaacgggcaacttctgaaggggcacatgaccaacaatctgatctggtgcggcaccttcacctctaggcaacggtccatgagggtggactttattaactcactaagcagc

SEQ ID NO: 41405 - DNA, 1317 bp, Glycine max
  unsure (1)..(1317): unsure at all n locations
  Clone ID: PAT_MRT3847_137391C.1
ggccgggcccgggccatcctcaaaaaaaaaacaaaaaaaacaagacaccaaccaaagtttcagtttctctctattctaacgttgttgaatggcagtagatctggcaaatattaggatggaagagaatatggcgattcaagaagcagcttccgctgggttgaagagtatggagcatctgattcgcgtcctttcttctcaaatcccttctgcttcgtcttcttcttctaacgcacaccaccaccgtcttaatctcaaccaccttgactgcgcggaaatcaccgacttcactgtctccaagttcaaacaagtcatcaacttgttgaatcgcaccggccacgctcgctttcgtcgcgcaccttctcatccttctccttcaatttctccctctcaacctcaacctcagccacaaccacaaccacagacgctgactcttgattttgcaaaacctgttatggtaaagtcaaatcccaaccctaacccttcttctaccgatttgtcggtttctcaatattctaagaccaaggacacaaccacctttagtatatcccctcccatgtccaccaccacttcttccttcctgtcatccatcaccgccgacggcagcgtctctgacggcaagatcggccccgncatcctcgccggcggnaagnctcctctcntctcatcccaccggaaaaagtggtacgacgccactctctccgncggggaaagctcttcctccgctcactgccattgctccaagagaaggaaatctcgtgtgaaacgaatgatacgtgtgccggcgataagttcgaagattgccgatatcccagcggacgagtactcgtggagaaagtatggtcaaaaaccaatcaagggatcaccttacccacgagggtattataagtgcagtagcgtgagagggtgtccggcgaggaagcacgtggagcgagcccaggatgaccccaacatgctcatcgttacctacgagggagagcaccgtcatccgcaaccgcgtctgccggaaacttctgccggcgccgccgcggattttgtctctcagcctgtttaagcgagggaggagatcggcaaagcatggcaccgacagagatgagtgattttgcaattaacggggggaaagaaaaagaagggaacttcttgcaagcgagggaaagaaaagaaaaagaagccaagtcaacttttgctttgttgtggaccaaaagagtcgtctactggatggataaggacttttatgtaaatttgacaaaaaattatgaaatactatacttagacatgtttttttgttcttatttaatagacattcattcactctcgacc

SEQ ID NO: 41406 - DNA, 405 bp, Glycine max
  unsure (1)..(405): unsure at all n locations
  Clone ID: PAT_MRT3847_137392C.1
agacgtacgaacacacctaagttcactttactcacgactacagaaagtgaccggcagagccattattcacctggagatggtcaccttaatcatagtacatttctttctaattctgctagcattcatagcatccactgcagacgctactctcttcnaccctccatccttcattactcagcagctccccaacattcactatgcacatatcaactcctcactcactgcctgtccaaatccatgtcttatctcaaaatcgaaccctcaccatagtcccaatgcttataccatctagacaggctgattctcaacttccaaaacatgcatttgcaataaaacattttctactacctcaagtagcgcagatattaacaattcctgctatgctacatcaaattcaactctatc

SEQ ID NO: 41407 - DNA, 442 bp, Glycine max
  Clone ID: PAT_MRT3847_137393C.1
aaatatcaattggagaactgccctaatagatgccccagttgggcttaatagcactgagactcaaggtgatccaggttttggtgtttccttgggcatttaggacacatggaaacggaacatcacttatttttatcacgctaaaacacggttgctaggagaataaaccttggtgaaggcgatttaaacgagagaccaggattttagtctacagggcctaacaaaagtgcattccggttgatttggcctataagaagcgaaataccgcctctgataagaaaaatgtggctacctgaacgcccctagaagcgagatcgttggcggcctgaataaaaactatgttaactgggcgaatccccaggttcctttcctaaaggccggacgggtctagacaaccttgcccttgggtggcctgagttccttgggggccctggccccctgaaag

SEQ ID NO: 41408 - DNA, 253 bp, Glycine max
  Clone ID: PAT_MRT3847_137394C.1
gttcacaaaaggtggaaaatggcttgtttggaagtttgagggaggccgatctcttgctgattacatggctgatcaaagcttcccttcaaacttagagtctatcatgtttggacgtgtcttgcaaggcgtcgactcttctaaacgaaatgcattgatcatcaagcaaataatgcgcccgataattacatcgcttaggaaaatccaggacataggcattgtacaccgggatgttgaacctcccaattggtggttc

SEQ ID NO: 41409 - DNA, 153 bp, Glycine max
  Clone ID: PAT_MRT3847_137395C.1
tccgggtgcgcttgctactcctcgtcttcctgataaccgtgcatgtcatacccaagatggaagtctttacactggggggcgggatattgagctcgtatgagccataccaaggtctatcctttgccctactaccagcatataatattatcatat

SEQ ID NO: 41410 - DNA, 741 bp, Glycine max
  unsure (1)..(741): unsure at all n locations
  Clone ID: PAT_MRT3847_137396C.1
ttgctgcctgcgttctcatacctatatttttttggtgagagaaaaacctaaagagaaattttgaagatggtaatagcgtctagactcttacctatgaggatttgccatcacatttggttttagaaattctgtgctccggcaggctcagcgcaatggaccttgtttgtttagaattgacttccaaaacatttggtggtagtcatggtttgcaccctttcaagttcaagtccttggttgcctttgctgcatttcaattgtgtgcctcccatgttacctatgcaagaatgggtttgaattctcagagggagttgtatgatagatgtggaggaaattggaagcgagttttgaggttcttgcagtctgtggaacaatcctctcagatggtcgagacatcatcaggcaatgtactatttcattatatcaaattattacttttgtttgcttttggtcaaaaagaaaaaagtattttcctgcgtgaattatgagttgcctcttttattgagttcattaggcatgcaatgttagcgtctaaaagtttttacattatcaaccagttagaaataatcttttatatgatttttaagatagctattattataaaattcagcaaatgtactgtacaccacgatttatgattggatacagtataaaaaattttatactatcggtgcatggattatncatttattagtattgggatcttacaagaagtatgtctctcaagggtggggatattttcat

SEQ ID NO: 41411 - DNA, 1171 bp, Glycine max
  Clone ID: PAT_MRT3847_137397C.1
agaaaagaaaaagtagagagttgtcgtgaagcatacattacgtaaccaaacttgaaaatttacataaagaagtagcttccacaaatccacacaccacatctatacaccggacaagaaactagaagtaacaaaacagtatctactgcaaaaaacatattctaatttaagttcacatttgaacataaaaaactacccccaaacaaagaaaactaacaagagatttaaaaatcaaatccaccgaaatctccaaaaccagcgtcgtaagaaccggcatcagaaatcatgtccccaattagaagtccacccaaggctcctccaagcaaccccgcacccaatcccattcccaaattgttcttccccggtctttgaactgctgcagcagcaggaggaggaggagcgtaaccgtacccgggttgtggcgcgtacccataagccgcttgtggcgcgtacccataagccgcttgtggcgcgtaaccgtatccatgttgtggagcgtatccgtatccgtgagcgggttgaggcggcggaggataggcatattgtggcggcggcggcggaggatacatggcgggatacgcggcagaagaagtggagcccaccgcgggagcaggataagccgtgacggggtccaccttgtgagaaggcgaggtaggtgcgggtgctgataccttggctggggctgcgaattcatcgccaaatttgtaggagaaattgagggctcccttgggtttgccggagggttttctgacctggtaactaacgtgctggaaggatttaccgtcgccaggttgcttgaggagttccatgagaggaacgtggacctggccgatgtccttatcggtggcgagggcgcgctcggagcggatcttgatttcgagggccaaacggttctgccgcgccaccgattcatcaaaagtgaacttgaccggaaaattccatgttgggttggtgccgccgtttctgtggacgggagtcttggtcttttgatcgccggagagtgaaagcacagcatatacatccatctttgagaatatattcaagtctttgagatcctttgctgaagccaggttgagttctagggttctgtgttccatgctcagcgtgcctgtgggttttccaagccgcatcggctcgagctcgagccgctcgagccgctcgagccgctcgagcc

SEQ ID NO: 41412 - DNA, 621 bp, Glycine max
  Clone ID: PAT_MRT3847_137398C.1
tttcttcttacattttccatctctttcccgggaaagggttaatactaactagctttgcgtcctttctcgatcaacttgattttttattctatttttgtccgaattgttgagaattttcagaaaattcgattaatgttcttccctctatgaacatttttcgttcgtttctcgtttaactttattgattccggatcacgtctttgtgttcaattacttgacgttgcttgcatttgcaacatttctttaatcgaaggtaaaaagatgaatctgaagaacatgaaggttccgaacgttcgaggtggcggggggatctctgcgctgctgaagcttgggattgttggtggaattggtttgtatgcagctgctaacagtctctacaatgttgaaggaggtcaccgagccattgttttcaacttggtgtcaaagacaaggtctatcctgaaggaactcacttcataattccgtggtttgagaagccggttatctatgatgtccgtgcatgaccccatctagttctagttgagagtacatctgggagtcgtgatctacagatggtaaataatacatgtagctaggatttgcgtgtagtcacagagaaatggttttggtatcaaattcgta

SEQ ID NO: 41413 - DNA, 1248 bp, Glycine max
  Clone ID: PAT_MRT3847_137399C.1
gaaaaagctggctaaaccccacaacaaccccaaacccttcactctttcccttatcgaaaaaaaaaagataaatctgaagaacatgaaggttccgcacgctccagctcttctcggcgtccatcggaaatttccaaggtaaaaagatgaatctgaagaacatgaagattccgaacgttccaggcggcggtgcgtcctctgcgctgctgaagcttgggcttcttggtggaattggtttatatgcagctgctaacagtctctacaacgttgaaggaggtcaccgagccattgttttcaaccgtctagttggtgtcaaagacaaggtctatcctgaaggaacacactttatgattccgtggtttgagaggcctgttatctatgatgtccgtgcacgaccccatctagttgagagtacatctggtagtcgtgatctacagatggtgaaaattggacttcgagttcttactcgccctttgcccaaccaattacctacggtttatcggacccttggagagaattataatgaaagggttttaccttcaatcatacatgaaactttgaaagccgtggttgcccagtacaatgccagccagcttattactcagcgagaggctgttagtcgggaaatccggaagattctaactgaaagggctgctaacttcaatattgcccttgatgatgtgtcaattactagtctgacttttggcaaggagtttactgctgcaattgaagctaagcaggtagctgcacaagaagctgagagggctaaatttgttgtggaaaaagctgagcaagacaagagaagtgctgtaattagagcacagggagaagcaaaaagtgcccaactgattgggcaagctattgccaacaatccagcttttatcacactgaggaagatagaagccgcaagggagattgcacatactatatcaaatgcggcaaacaaggtttacctgaattcagatgatctattgttgaatcttcaagagatgaaattggagccaggcagaaagtgagtgtgttagcctgtttgtttctttttggttttagcttgtaaactatcaatttcaggatcgattttcttgatatgtttttgcaaattcggatatagctggcttgattagacaactgagcggcaaccctttaaatctttgggaaaggattaattgagatccaaacgaatgcttcacattacatgaatgaaataatttcagctagaggtttagcatcctgatttaattttgctgcctg

SEQ ID NO: 41414 - DNA, 402 bp, Glycine max
  Clone ID: PAT_MRT3847_13739C.1
acgcgttcgaacacgtctgaaaacacctcttaaaagactacagaaatatctggtagaagtcgaattggagtctcgagcagacattcgaaccattgtaaaaacccaccacacgaacctacttcacttgttattcttctataccaaccgtcctaaatcacttctcacttattaatacatacctaatgcatccctttaaaaccttatcttccgaacttaaagtcataaacctccattgctctatgatagagtacgaatttccctggatatatcaccatggattcttcatctccattaagagtttgacgcaccaatcctatattgtgacataaagcctcataacatttagatggatgaattatagacttcttacatatctcatttctgtctttcaaaactttttat

SEQ ID NO: 41415 - DNA, 643 bp, Glycine max
  unsure (1)..(643): unsure at all n locations
  Clone ID: PAT_MRT3847_1373C.1
ccacgcgtccgaaacaccaaaacgacgacgttttcctcgacgcgcttcctcactgccccttccaccattgctccggcgccgccgataaatcgccggaatcttcctcctcttcttcaattctctccgaccccaacccaccctccccacctccggcaaccacaatccgccgccgttcaacccgccgtaactcaccggttagggagaccacgaataccggttccagccacaattcgaccaccggaaacgtcacgaaccttcggagcgatcgaaatctcggaacttcaaacggaaatgagaatttccccgagaaatgcgattcaaatcgagagaaagttcgtccctttcaatctccaagcgttggcaccgaagaggggaacgaggaatcgacgttaaccaccgccgagaacgaagacggcgtcaccgattccgctgactcggcggtggaattcagtaattcccctttgaattcgctcgattaataacggggtntggtgatttagaacaattggtgnttcaaatcaatatttntccggttgtcttaatgaaattcccaggtgggggttaatggtacaatgttttttttggtttttccgggggaccccttttggaacaattcagaagggggaaaggtcttttggtgggg

SEQ ID NO: 41416 - DNA, 237 bp, Glycine max
  Clone ID: PAT_MRT3847_137400C.1
tttgtgaagccacaatttaaaatccggtatgataccccgtttaagaggcttggtttggagggccattcttccagggccaagaaaaagaagaataaagcccttgttccttatattatacaagctatttacttcggggtccttttcattctccataaggtcaatggattgctattacttggcttcaattgtgacaaccttgctttttttgatttaacccaaacaaccatatattgttat

SEQ ID NO: 41417 - DNA, 637 bp, Glycine max
  Clone ID: PAT_MRT3847_137401C.1
ctcattcacatattttttgtccacaaaatgtccaaatgcctcttgatttgtcgcgcctaaacaaattttcccaccaaggactaagatgctccttgtcatggaacctcagctgcttcaggaaaggcaggagctattgttggtgcatttgggttcttgtatgctgcacaaagtaggcaccccgataaagttgatcatggttacccaactggtattggggttaaaaactccctcattgtgcttggtgtgatcaacttctttggaatggtattcaccttgttagtgccagaatcaaagggaaaatcactggaagagttgagtggggagaatgaagatgatggtgctgaggctatagagatggcagggtctgctaggacggttccagtttaaccaaagtctatgatcaacaaagtagttcataattctagtgatgctattattgtgtgacaatattacttcgggttttctacagctagatgcacaataatgatgtagatatatgtttctcggtgctgtaactttaaaaatcaattataaagggtgtgtatttcattcttgtttttaattagaagtgttgtctcaatcatacgtgtatttgatatctgtagctaaaggtattgaagcaaaaaaaaaaaaaaca

SEQ ID NO: 41418 - DNA, 1924 bp, Glycine max
  Clone ID: PAT_MRT3847_137402C.1
gtaggaggccatgagtaaaaccgatgatggtaaagagatagatgaagcaagcaagcgatttgtgaaagcgttgaccagaaagtgtgaactacaaagtgtaggaatgagcatataccaccagatacctgcgttgattctggattcttgaagccattccttctattttctggtgacagcttcttcttgtgctatactatataacaactcaccctctctccttacctcttcattcccaacacaaaacactctctcctccttcaacctagccctggtcactaccaaaccaagtgtcccctcctctcccttgttaacaggtagctgagttagtgagtaatggcaggaggacaactaggagtgcttaatgcactcgatgtggcaaagacacaatggtaccacttcactgctattgtgatagctggaatgggattcttcactgatgcctatgatcttttctgcatttcccttgtgaccaagttgttggggaggttatattacacagacataacgaacccgaagcctggtgctcttcctcctaatgtgcaagctgctgtgactggtgttgcactatgtggcactttagccggccaacttttctttggatggcttggtgacaagatggggagaaaaagagtctatggactaactcttatgcttatgtagtgtgctcccttgcctcctctttgggtactcatacttgggacaaggtgaagaattgacagatgaaaacaacaagtatggcttgttcgaaggaatttgccaaacgccacgggctgcatttggttggaaccaccgtaacttggttcttgttggacattgccttctacagccaaaaccttttccaaaaggacattttcactgcaattggatggatccctcctgcacaagacatgaatgcaatccatgaagtttataggattgcaagagcacaaacactgatagcattgtgcagcaccgtgccagggtactggtttacggtggcctttatcgatatcattggacgtttcgccatccaattgatgggtttcttcttcatgacagtcttcatgtttgctcttgctataccttacaatcactggaagaatcacaacaatattgggtttgttgtgatgtattctttcacctttttcttctccaattttggtccaaatgccaccacatttgttgtgccggcagagattttcccagcaaggctgagatctacttgtcatggaatctcagctgcggcaggaaaggcaggagcaattgttggtgcatttggattcttgtatgctgcacaaagtacgaaccccaacaaggttgatcatggttacccaactggtattggggttaagaactccctcattgtgcttggtgtgatcaacttctttggaatggtattcaccttgttagtaccagaatcaaagggaaaatcactggaagagttgagtggggagaatgaagatgatggtgctgaggctatagagatggcagggtctgctaggacggttccagtttaaccaaagtctctgatcaacaaagtacttagttcataattctagtgatgctattattgtgtgacaattttacttcgggttttctacagctagatgctcaataatgatgtagatatatgtttctcggtgctgtctgtaactttaaatcaattacaaagtgcgtgtatttcattcttgtttttaattagaagtgttgtctaaatcatacgtgtatttatatgtagctaaaaggtattagagaaaagttttgtctcggttcctttgttttatctctgtctatgcatagtttatggtattttatcatatgtatgcatacttcaaccgagggacaaattctacaatcttaatgcaattataaaacaattttatttcaaaaaacattctctggatccttcatttgactttgtttggagaataagtttgatgttggg

SEQ ID NO: 41419 - DNA, 583 bp, Glycine max
  Clone ID: PAT_MRT3847_137403C.1
aattttattttaattaaaaaaataggggggcatttctttttggatttaaaaaaaaaaaaaaagaaccctttgccttttcccggccgaaaaatattccaaggcctattttattacttcaaaaaacaaaattctttcctttttcccaacccaaaccccccaaaaagaggggaacccctaaccccccaaaacctaaaagagggccttccttcccctttggggggggaaacaaaatccttggccggcctgggttttttctaaaggggccccgggtccgtacggggtttcgaaaaaaatttttttgaaaaaaattttgccccccccccggcttttttttaaaaaaaacaacgatttttttttagcccccccttttttcccgggttccaaaaagggggcttggggattccctggtattggggggggggacccttcgaaggccctttttttcttccttttcttaaacccttcccaccctttccgggacccgcaatggtggtggttttttttggtggaaacttaaaaaaaaaagaaatttgggaataagggtttttgttttaagaaacccctcttttgggttttttcaaac

SEQ ID NO: 41420 - DNA, 1025 bp, Glycine max
  Clone ID: PAT_MRT3847_137404C.1
ataggattgcaagagcacaaacactgttagctttgtgcagcaccgttccatggtactggtttacagtggccttgatcgatatcatgggccgtttcaccatccaattgatgggtttcttcttcatgacagtcttcatgtttgctcttgctataccttacaatcattggaagaaccacaacaatattggctttgttgttatgtactcattcacattcttcttctccaactttggtccaaatgccaccacatttgttgtgccagcagagattttcccagcaaggctaagatctacttgtcatggaatctcagctgctgcaggaaaggcatgagctattgttggtgcatttgggttcttgtatgctgcacatagtacgaaccccgatacatacatggcagaaaaggcaggagctgttggtgcatttctgtatgcgagtacgaaccccgtaaagttgatcatggttacccaatggtattggggttaaaaactccctcattgtgcttggtgtgatcacattctttggaatggtattcaccttgttagtgccagaatcaaagggaaaatcactggaagagttgagtggggagaatgaagatgatggtgctgaggctatagagatggcagggtctgctaggacggttccagtttaaccaaagtctatgatcaacaaagtaagttcataattctagtgatgctattattgtgtgacaatattacttcgggttttctacagctagatgctcaataatgatgtagatatatgtttctcggtgctgtgtaactttaaatcaattataaagggtgtgtatttcattcttgtttttaattagaagtgttgtctcaatcatacgtgtatttatctgtagctaaaggtattgaagaaaagttttgtctcgagttcctttgttttaaaggtttcctctgtctatgtatagttcttcaagtaatggtatatcatatgtatgcatacttttaccgaggaataaactctacaatcttaatgcaattataaaggatttttattttc

SEQ ID NO: 41421 - DNA, 516 bp, Glycine max
  Clone ID: PAT_MRT3847_137405C.1
aattcggctcgagacggctgcgagaagacgacagaagggatcatgcttcttcataaatttattttcaagctccttgattcccttggtggctaacataatggactaagtgacttccttgattcttaagcctcgtttctttctgaactaacatactgtgcaattcatgcacattccatgtatctttcatggtattatagttcatttagaacgggccaaactcagacggtaatgagtttagaataaactgaacaagaaagttctcattcacaaccattatattcccaaggtcttaagtcttgctgcaatgtttgtcatctcaatgacatgttcatacatagtacgtgaaccactaaacttcatggtggtcaatgtactcattaatgtcccaacaacagacttggctggtgttgggaattactctcctactaatcccataaactttttaacactttcgattttagggagagttgtcttaatactttctgcaacagtcattctcatcaacattaggctgag

SEQ ID NO: 41422 - DNA, 1350 bp, Glycine max
  Clone ID: PAT_MRT3847_137406C.1
attccctacacacactctctctcctccttcacctagcagtggtgacaacgcgtccaaccaagtgtcccctcctttctcttgttaacaggtagcagagttagtgagtgatggcgggaggacaactaggagtgcttaatgcactcgatgtggcaaaaacacaatggtaccacttcactgctattgtgatagctggaatgggattcttcactgatgcctatgatcttttctgcatttcccttgtgaccaagttgttggggaggttatgttacacagacataacgaacccgaagcctggtgttcttcctcctaatgtgcaagctgctgtgactggtgttgcactatgtggcactttagccggccaacttttctttggatggcttggtgacaagttgggaaggaaaagggtttatggcttaactcttatgcttatggttctgtgttccattgcctcgggactctcttttggcgacacccctaagggtgtcatggccacactttgtttcttcagattctggcttggctttgggattggtggtgactaccctctatcagctacaattatgtctgaatatgccaacaaaaagactagagggtcattcattgctgcggtgtttgcaatgcagggttttggaatcatggctggtggaatagttgccttgattgtgtcatctgcatatgaccacaagtacgatcttcctagttacaaggacaatccagctggatcgaaagtggattcgcttgattacgtttggcgtatcatcttgatgtttggtgcagtcccggctgctcttacctactattggcgaatgaaaatgccagagacggctcgctacacggcccttgtagccaagaatgcaaaacaagctgcttcagacatgtctaaggtgttgcaagttgaggttgaagctgaagaagacaagttgcagcacatggttgagagtgaaaaccaaaagtatgggcttgttcagcaaggaattcgccaaacgccacgggctgcacttggttggaaccacggtaacttggttcttgttggacattgccttctacagccagaaccttttccaaaaggacattttcactgccattggatggattcctcctgcacaagacatgaatgcaatccatgaagtttataggattgcaagagcacagacactgatagcattgtgcagcaccgtgccagggtactggtttacggtggcctttatcgatatcattggacgtttcgccatccaattgatgggtttcttcttcatgacagtcttcatgtttgctcttgctataccttacaatcactgggaagatcacaacaatattggggtttgttgtgatgaattctttcaccttttt

SEQ ID NO: 41423 - DNA, 188 bp, Glycine max
  Clone ID: PAT_MRT3847_137407C.1
gcactatcgcttatgcaaaacaataattcttatttctggacggaaaaaacagagagtttccctcgatagatgaaactaattcgtctcaaccaccgaacaccataatcatggaagtgcgtcatcttttaggagcgggtggttgtaaaagcacttattttttcccacctgaacaccctacggaggcaccc

SEQ ID NO: 41424 - DNA, 172 bp, Glycine max
  Clone ID: PAT_MRT3847_137408C.1
cccacgcgtgcgtacgaacgctccagcggatgctatcgacaggcgtccgatggagattcgtgccgggcatcagggtgatgggcgatggattaggtggaacctgatggctccgcatggatggacccaacgcatggcgtgatgatcatatcaggccagcaggcgcctcatttgg

SEQ ID NO: 41425 - DNA, 456 bp, Glycine max
  unsure (1)..(456): unsure at all n locations
  Clone ID: PAT_MRT3847_137409C.1
aaattttatcaatcaaacataactctttgaggaaatcacacttccccggccgtcatgagtcagctaattaattggtatgtctaattttcaccaccaccttatcgggtcttcaaaatttaatgctattattctcagatttcttttcttgttcctacattctgactttgcatctgtcactgttctgagaactgaattttgttgaattattagaaaaatagaaatagattctgggttttcatttctagttttaaaattgtttattaagcatatgaacaccgtcaccactcaccatagctcaattctctgtctttatttttttatttatttgctttgatactttccccggtgcttatatggatgcatagaaatagaaaatttgctacagacttgtaaccttggcatagtttcttcatgtcttcttcgcagnatttttctgtacctatatcattgatgata

SEQ ID NO: 41426 - DNA, 498 bp, Glycine max
  Clone ID: PAT_MRT3847_13740C.1
agctcggaattcggctcgagattttttgtttatacatatctattgttttcagtaatggtggtggtttcacttttagcataactttgagaatatgacacgctgattagcattgggcacatatatatgagttgcagaagcgaatatgctctatttggaaacgccaattggagttggattctcttactcaactgatacttcctcttatgagggtgtgaatgacaaaattacgggcaagtttttaatgttcacccgtctctacttgacatcaccaactttctacttttttagtcgtcccttgaaataattctcaatttcattggtttgaatggtgattggtaaataaccattagatgcaagcattttcacatggctaaagaaagagtttctaaaggaagatccgggtcaactttctttcttcttcattttccccttcttaattagttctcactatctcccttttgcttttcttgtttggtatctttacctttcacaaaattc

SEQ ID NO: 41427 - DNA, 483 bp, Glycine max
  unsure (1)..(483): unsure at all n locations
  Clone ID: PAT_MRT3847_137410C.1
ccggnngnanngggcccncggnnncngnnaagnanggnngcngaccgnagcnnncggnagcgnngnggngnnncnnccggggnctaaaancgcgcngcgaaagaccngngncgntnnnnnaggnngnncnagnaggntgtagcgngngagcggcgggangnngggcngagnagnncggagtgagagnccatagnnganngcggagacanaccggtgncgcnngtgtgacagcggagagnagnnggngnctncnagagagagngcncgngangaaggcaanggagagagcactgggaggagnggaggagggcggnaggagggcgggggagnangancgaggnggagancatggangngcgngggggggagggngaatgggncgngnnngcgnngggggcnngcgnnggggaganggtgaggagngangagganggcngagnggcnnngtggngnncgcagannncanaccnnccagagggggcg

SEQ ID NO: 41428 - DNA, 312 bp, Glycine max
  unsure (1)..(312): unsure at all n locations
  Clone ID: PAT_MRT3847_137411C.1
ctcgagccgctcgagccgattcggctcgagcgccttccagtaccagctccgtgaagcgcaagtctgacgattcatcctcgtccaacaccccctttaccgcgcccaaggtccgcagggttgccaacatcgacaccggccttgcttcgcgctatcatcacaataaccctcgcgcatctncaggcgcttcatcaacctcgactacctcaccctcgatgcccagcttgagtttccgccaaactgtcgagctttcgcagaagttccagaagtactacaagagatacgaagagctgtactggaagctgactgaagcgg

SEQ ID NO: 41429 - DNA, 405 bp, Glycine max
  Clone ID: PAT_MRT3847_137412C.1
ctatcctttttttttttttttttttttggggagatttgatttgatatatatatggatagatatataatgacccttacccttctctatcgctcgctttcctttgacgtttgtgacccttgctgggccggcgaatgctccgggctttatgccccacccagaaagacaaaagggcccccccagacaaagggtaccgaaaaaccccctagatccaaaaatttattaactccccccccaaaaaatcgcaccctgggcaggacatgctcaacaccgcccccgcaagaagtcaaagacgctcccatcacaaaaacgggcaaacaggacccaagatcgaaaagactcttgacaccctctcccagggagccacgcaagatcgagatgaactcccccgccttctacgcgggggcc

SEQ ID NO: 41430 - DNA, 328 bp, Glycine max
  Clone ID: PAT_MRT3847_137413C.1
ggctcgaggtgctgcgtggatcagcgactctatgatcaatgatacggggatccatcattgtgaaggtctggcaccatccattgttagagaagggtttcttgagggacatgaatgattgttctaggcttagtgcatagcgctgaagagcgcacagctattgatcatcgtgggcctatcaggggagatttcatcaacgatgattatgatacccataggggccctgagctagggtcagcctaggaaaggcacaacactcgaaagcgacctttgactggcggggaccacgctactcgctgtggtgatttagacacaagcgttgggttttttg

SEQ ID NO: 41431 - DNA, 332 bp, Glycine max
  Clone ID: PAT_MRT3847_137414C.1
aacaaccaagaattatattcaccaaagtgaatagccttgttctcaaccaacaaccatgaattcaggttttagcgaagacgggcacaacacctcttgaacattaaaagaaaaatgatgaaaatagtatgttcagttcagctgttcactaaccaaaaaaaaaaagttgacgaagtgtaattatcccacctaaaaatatctgcgacactgatccagaaaatgctttaatattcccatttcttcaactccctgccataaggaggactttcctttacctttgttgatcccacttttttccagtttgtagacagaactgtcccattagactcaacaaa

SEQ ID NO: 41432 - DNA, 362 bp, Glycine max
  Clone ID: PAT_MRT3847_137415C.1
gtgagagagaattctatttttacttgttaccccgaaaatgcttttggggccctaaaaagcatttccccagggtacaaataggaaaggcgctagggtagctctagcaagggaactagagtggggggggctcgcacaccacacaaaacatgataaccgattttacacacagtctcatccccatggtgctcaaaattcatggacgaaggggggaaccccgtttttttgatatttaaagaaaagggggggggtggtttcccatagaaagcccttgctcccaaagaaatgggaaaaggggtttgtaacaggaggggggcccaccacccgaggaagaaaatgaggactttccccccttttattggagg

SEQ ID NO: 41433 - DNA, 138 bp, Glycine max
  Clone ID: PAT_MRT3847_137416C.1
aacacttgggtttttactcattgcattacctggagatgctagaaatattagggcccgaaggcgacatcgaatttgacaagcttggtgtggaataaacctagcttaagaggggcaattggggaaggcgttgactttccc

SEQ ID NO: 41434 - DNA, 181 bp, Glycine max
  Clone ID: PAT_MRT3847_137417C.1
ttcttacataagagtggtgattcgtcctacggcatcgggaatctccctactgggcagatatagtataggccatcgcgccaggctggctcttccagtaccaaccatgaagttatcatctacctcttctgggtcagcaaaccaagctgggtcatctatccccaagaccaattgtagaagggtc

SEQ ID NO: 41435 - DNA, 998 bp, Glycine max
  Clone ID: PAT_MRT3847_137418C.1
cggctcccacgcgtccgctcaacaaatgaatattctcggacaatcattcaacgaatcaaacaacggaagctactcttgttcgtcgccggagactggtagctcctctaacattccaaacacttttcactccgacgaggaagtgcacacactagcttcggcgcgtcctaagaaacgtgcggggcgtcgaatttttaaggagacaagacacccggtgtaccgaggagtacgaaggaggaacaacaacaagtgggtctgcgaggttcgtgttcccaacgacaagtccaccaggatttggcttggaacgtatccagtgcctgagatggccgcacgtgcgcacgacgtcgccgcgctcgcgcttcggggcaagtcggcttgcctcaacttcgccgactcggcgtggcggctgcccttgccggcgtcgacaaatgcgaaggagatacggcgagtggcggcggcggctgctgtagcgattgcggcggaagacagctgcggcgagcagttacagaatagtattgtgaatgatgccgttgctgatgattgtgaagttagcagaagtgacgtcagctttgatgaagattccaatagcaacaaaggtttgagagttttttgtgatttggatgaaattacaatggcagatgcaccggtttttgaggacatgcgtgagtggcttcagagtatggcggatgagcctttaagatcgcctacttttgtaacatatgttaatgttagggatgtctggaactttgtggaggatgatgctgaggtatccttgtggagcttcacaatttagtgcgtttagtttgttctttgtcttctttcgtttttggtttttgtacataattaggaacggaggagtacgaaaatgtaccaagaccgagacgatataaggagctagctatatagggaggatcataaaactgtaagacattgcaaattttctcattcagttgtttttgtaattctcataatcatatagataaaggaaaggtttgtaaaat

SEQ ID NO: 41436 - DNA, 216 bp, Glycine max
  unsure (1)..(216): unsure at all n locations
  Clone ID: PAT_MRT3847_137419C.1
ctaagagttgctgcttcttcagcgactccgcacctcgtagcatctgngccctcaacaaccatggctgaaatcgaaactaccgttccagattccactcaaattgaggtataactcttcaatcgctggagcttcgaggatgttgaggttaatgatatgtctctggctgattagattggagtgtctacatcaaagcatgctaatgttagttcctcacac

SEQ ID NO: 41437 - DNA, 318 bp, Glycine max
  unsure (1)..(318): unsure at all n locations
  Clone ID: PAT_MRT3847_13741C.1
gaagagaatggcaggagcagaggggtaaacagagaacagtacgtgtacttgcgaantgtcggagcaggcggacggtacgaagagatggtggagttcatgcagaaggtggtggtgggtggacgcngcgtcggagntcacgtggangagcgcaactctctcggtggctacaagactgatcggtctctcgtgccgctggcnatctgtctccatcgaacagaagaggaaggcgcagaacgagaccagtgtcctcgtgaacatacagtccaagngagacgactcagcagttgcgcanatctcaactctcgntcaactcnanct

SEQ ID NO: 41438 - DNA, 712 bp, Glycine max
  Clone ID: PAT_MRT3847_137420C.1
cgcccacccttggagtggaaaagaaagcggcggaggataagttgtaccaacttcaacaagagggggctacagaggatgatattaaaatggaaatgaaggacttcggtatgaaaagagcaactatatatggatggccaaacacgtatgtctttacaaaggcaatgggagaaatgcttatagaaactctaaaggaaaacgtgtccgttgttattgtacgtcctacaatggttaccagtacttacagagaaccttttcctgggtgggtcgaaggagtaaggaccattgatagtttaattgttgcttatggcaaaggaaaattaacatgctttcttgcagacatcaaggcaacttttgacgtgataccggcagacatggtggtgaatgcaataataagtaccatggtggcgcatgcaaataagccatgtgataatatcatatatcatgtgggctcctctttagaaaatccagttagataccacaatctccaagactatggctttagatatttcaaggccaaaccatatgtaaacaaggaaggaaattatgtgatggttcgcaaagttacagtgttagacagcatggctagctttgagagatacatgttcattcggtacttccttgcattaaagggactagagctaggcaatgctggcttttgccaatattttcagaggacgtatcttgacattagaaggaagatctatacagtgat

SEQ ID NO: 41439 - DNA, 355 bp, Glycine max
  unsure (1)..(355): unsure at all n locations
  Clone ID: PAT_MRT3847_137421C.1
gggaaaggagaggccccggcagggaccggaccggaacacccggcccgacccacgcgaccgattagataaacagccccggccacgagggacaggggggggaagaaaaagaggaggaggccgaccaaccacaggaaacnnaagaggaagaggaagcggcccaaaacaggagaagaagaaacagcaacggacaaccccgcagagagacacccgaaagagggcgacccacgcagagcgagagaggagaaccaacccaaaccgcagaagaaccggaggaccggacgacaacaggaaccaacacaacgcagcaaaagggaccaacacggaacgaacacgaacaaccggcacccaccaaaag

SEQ ID NO: 41440 - DNA, 406 bp, Glycine max
  Clone ID: PAT_MRT3847_137422C.1
ggcttcaattggtgaggcaccaacatcatcaagcttgacagaatacaccggtgttgataggatgccagatgatatgaatgatatgagaattacggatgataatgaaatggtagccaccgttgtacatggtaaccgaacatagaccgtacatattattgatactaccatggtgggtataaatggtcaaccgaagcatactataatctatatggcagagcggattgctggacatggatcatttggagttgtcttacaagctaagcgcttggagactgctgaaactgtggctatctaaatagtgcttactgactagaggtctgaacaccgagagctgctaacaatgcaccttgttgagcacactaaatgtgtctgtataaagcattgtttattttccaccacgctgaaa

SEQ ID NO: 41441 - DNA, 424 bp, Glycine max
  Clone ID: PAT_MRT3847_137423C.1
actttttatttttcctttatgtttctgctaggccagagaagggacgactgataaccaaccctgcgttgttcaatcgcgcagtgttgatggtggtgctacttcgctagtgttgcgggggagctcaaagaactcaacgtgtaaagctcgtgaagcacatgcacggcataatgatactgccacaaaagatggtaatgtaagggctggccattttactgttgtaatctaactattactgattattttcagacctaccattatgagattctcttgtacaagcggaaacttccttgtggctcacgccgacttattttgggactaacactcgttcattcacctttattggttctttttgagccacaggggtttttgaccaccggtaacatgactactccaatgatggagattgctggggtcttttgacact

SEQ ID NO: 41442 - DNA, 420 bp, Glycine max
  Clone ID: PAT_MRT3847_137424C.1
tcgcgcacgcgtgcgtgcgaatcttgtcaattctagtcagaatcataaggctgaactgcttagccttacgcctgtggatgtaggaaggaacaaggtgctcatgacatacatggaggtggagcactggtggatgctcagtgttaaaatagcaccactgctatacagtgtacatgttgtcatgcctgataggaatgagggtaccgtttcctaggaaaaggagattaatgtactctgcagattgtctgaggttaaacaaccttgggtggagcgacactgcactactaaagagaaggactaaagcttctctggagagactcttcattgtagttgtgatgggagaggacatgctggcgctaacaaactgctgtaggagctgaggacactaagggaaagcgacttatggagtggctcaaacgggga

SEQ ID NO: 41443 - DNA, 210 bp, Glycine max
  Clone ID: PAT_MRT3847_137425C.1
aagcacgggggtcggctcgaggataactttatccagacccaggttttttttttaaactggagaacaaaactgccatgatttttgctttcggaggaggccatttcatgaatatattctgccataaatgcatctaaaaaagtttgcccgaacatactaaggatatatcattcttagaatatagagtaatcccaatgatgctaatatagtgag

SEQ ID NO: 41444 - DNA, 348 bp, Glycine max
  Clone ID: PAT_MRT3847_137426C.1
gtgtttttttttttttttttttttttttttttttttttttttttttttttgtttttttttttttttttttgggggggggaagggatccattgaaaaaggcttttttacccgaaaggaaagcccccttgaaagaaatccctcaaaaaattttcccctgtttgggtgtggccaaaaacttaccccaatcccttaatccccatccctttttttgggggggaaaaaaagggaaaatttcacccttacctttgtgcccggcccttggttggaagcttttaaactcagggggcttgaaaaaaatttggggggggggcttcggtggaaaaatttgaccgggaaaaggaaaagggg

SEQ ID NO: 41445 - DNA, 480 bp, Glycine max
  Clone ID: PAT_MRT3847_137427C.1
ttccagtattagtctagtactagtaccttagctaagcacgagtttacaataagtcaataattttttaattgggatacagaacttagcattagcatctttttgaactgaatccttttaagctcgtttgaggcttgtttgttaattaacaaaatcacctttctttaaatcatgagtgttggttgttgcagccaaatccagttcttaaccagtggtggaggttcaaaggcatggaaaggagacatggataaagataagacagatgggatcaagttttattatgatggacaaggatttatgtccgcggagctggaagaaaccaatgtcaaagttgtttattatgatattttggggaaagttttgcatgttgtgaatctgcccaaggggttaggtacttctgtctctgccatatagaagatgttttcgtgtttcaaagaggcaatagcttcagcctcagcctcaggaaacgatagttaagtatgt

SEQ ID NO: 41446 - DNA, 1835 bp, Glycine max
  Clone ID: PAT_MRT3847_137428C.1
ggaagcgtacgtcaaatgttgtttcctgttaactaacgaacgtccgaaagtctgttttgctggcaactacacctcactgaagcttcctcaaccgaaccccacgccacgctacgacgcgtcgtttcattattattcatagtcttcctttgcatgcgccaccatcatcaattcaattccaatgggtaatatctgcgctcgtttgaagtcgaagccgccgccgcaatcctcagccaagaagcgttcctcttcccgccgagagaggaggctcgacgacgccgcgattcgcgagcaggccatcgccgccgcgattctcttcaagcagcaccagcaacagcagcaattcgatcgctccacttcgcttcggtatccgaatggagtctccaagaagaataacagcaacaccttgccaaggagttcgagttccagggcaaggtccctcaccgaccctctccttcaacctcaccagcttctcaatcagggtgtgaatgtcgatgatcttgagacaaatcatattgtccttgttcacggaggtggcttcggggcctggtgttggtacaaatccatagcacttctagaagaaagtggttacaaagtagctgccatagatttaactggttcgggtgtgagttcatttgatgcaaacagcattacaagtctgtcgcaatatgtgaagccacttaccaacttccttgaaaaacttttggaaggcgaaaaggtgatcttggttggacatgattttggaggggtatgtatatcatatgcaatggagatgtttcctcttaagatttccaaggctgtctttattgctgcagcaatgctgactaatggacaaagcactcttgatattatttctcaacaggcaggttcaaatgatcttatgcgacaagcccagacttttgtatatgctaatgggaatgatcatcctcccacttcttttgatctggacaagtcattgtcgagggatttgttattcaaccaaagtcccaccaaagatattgcactggcatgtgtctcaatgaggtctgtaccatttgcaccagttttagagaaggtttccctttcagacctgaaatatggatctgtaaggcgattttatatagaaactcttgaagacaatgccatacccatttcactccaggaaaacatgataaatgcaagccccccagaaaaggttttccgtttgaagggggctgatcattctccttttttttcaaagcctcaagctctgcataagttattagtagaagtctcaaagatcctttgagaacattcattgtctaaattgtttgtgcagccctaccaacagtaaagcttcagtgacatgaaataagaatgtgcatctgccttattatttaagtctatcattttgtgtgacttgtaacatgtattacttgtagcataaaattactagtcaaaagattcagtatttgttgattaatgttgcaagttacccctagaaattagaaaagaatatttgtaacttgttgagtctacaacagctgtgcgcattcacatagtacgatatcataatgtagaggcccattgcaaggaagaaagaggtatgggaatcaaatgtgtttacatttttttgatggtccattaatactgctggttgctggagcattcttgagaatcccgaagactgcctagagctgctgcttttttctatgcttctcctttttgtcataggcagttctccccaatatttttacttgggaacaagtgttttatacctttagcaacatgagtaaataaattctttgtgctttgcaaagttgcaagaaagctgatatgctatagtgttttgtaatctattggcaaattttggtgactgt

SEQ ID NO: 41447 - DNA, 386 bp, Glycine max
  Clone ID: PAT_MRT3847_137429C.1
cttgcaactttgcaaagcacaaaaaatttattgggtcatgttgctaaggggataaaacacttgttcccaagtaaaaatattggggggaactgcctatgacaaaaaggggaagctttgaaaaaagcagcagctctaggcagtctttgggattctcaaaaatgctccagcaaccagcagttttaatggaccttcaaaaaaatgtaaacacatttgattcccatacctctttcttccttgcaatgggcctctacattatgatatcggactatgggaatgcgcccagctgttgttgactcaacaagttacaaatattcttttttaatttctaggggtaacttgcaacattaatcaacaaaaactgaatcttttgactaggaattttatgc

SEQ ID NO: 41448 - DNA, 974 bp, Glycine max
  Clone ID: PAT_MRT3847_13742C.1
gaaatgaatgaaattttttccttgattggtatattaatatctaaatgttccccataccacactagatagcacctcaaaagaaggccacacttgttgcagaagaaaagtgaagtcataatcctatggattttgatccaatattaccagtatgcctgcatcatatcatattcacctgaaaactgtagcctgaataaattttttacagagatgatcatccacatttcaaaccttggtcccgtgtaagaatccgttggaaagatgaggacagaacattcgctgaacagtgcaatgacgtacagtgggttcaatcaatattctccatttacacacttcctgcactagcagtccatggtcttctgatcttctctccaatgtggcatttgcttgcgaggaagatgtaggaattggaaaatgaaagagataaaaaaaagtgacatctttatgaatctcatcaactacatactacagatcagggttacatacaatattagggtagatatgttgatagcatgcacatttaatgaaagaatctcttgcgacatctagcagaaccaagctcctcatactcagacttggtcacacacatagcttcaaaatccggacttgatgccaacagtgaacctccacgccaaacacctagtatggggatcttcttgagtcgttatcttcacacgatagtcatcaggaactagaggccgaagctccttctctagtctctcggcaaactgaggaaataaggtgcttccaccagttaaaatgatgctttcatagagaacagggcggagatgtggatggcacgcattaacagcacgtacaatgcattctgctagcccagcctggttcattcccaaatcagcaggacggaagatcatctctggcacaagaaaccgttcatttgtcaagtcaaattcattttttgtcaaatcaactctcttcctgttctctgggtgctcggcaatttccgtgaaattcac

SEQ ID NO: 41449 - DNA, 2138 bp, Glycine max
  Clone ID: PAT_MRT3847_137430C.1
ggctcgagaacgaagacaacaaagtctgttttgctggcaactacacctcactgaagctttcttaaccgaaccccacgccacgctacgacgcgtcgtttcattattattcatagtcttcttttgcatgcgccaaaccatcatcaataattcgtgggcggacgcgtgggcggacgcgtgggcggacgcgtgggcggcagctcgtcacggcaatctcgatacgaattcgaagggtaatatctgcgctcgtttgaagtcgaagccgccgccgcaatcctcagccaagaagcgttcctcttcccgccgagagaggaggctcgacgacgccgcgattcgcgagcaggccatcgccgccgcgattctcttcaagcagcaccagcaacagcagcaattcgatcgctccacttcgcttcggtatccgaatggagtctccaagaagaataacagcaacaccttgccaaggagttcgagttccagggcaaggtccctcaccgaccctctccttcaacctcaccagcttctcaatcagggtgtgaatgtcgatgatcttgagacaaatcatattgtccttgttcacggaggtggcttcggggcctggtgttggtacaaatccatagcacttctagaagaaagtggttacaaagtagctgccatagatttaactggttcgggcgtgagttcatgatgcaagaacatcattacaagtctgtcacaatatgtgaagccacttactgacttccttgaaaaacttccggaaggcaaaaaggttatcttggttgggcatgattttggaggggcatgtatatcatatgcaatggagatgtttcctcttaagatttccaaggctgtctttgttgctgcagcaatgttgactagtggtcaaagtactcttgatattatttctcaacaggcaggttcaaatgatcttatgcaacaagctcagacttttatatatgctaatgggaatgatcaccctcccacttcttttgatatggacaagtcattattgagggatttgttattcaaccaaagtcccaccaaagatattgcactagcatctgtctcaatgaggtctgtaccatttgcaccagttttagagaaggtttccctttcagacctgaaatatggatctgtaaggcggttttatatagaaactcttgaagacaatgccatacccatttcactccaggagaacatgataaatgcaaaccccccagaaaaggttttccgtctgaagggagctgatcattctcctttcttctctaagcctcaagcgctgcataagttattggtagaaatctcaaagatcctctaagaacattcattggctaaattgtttgtgcagcctacccacgataaagcttcagtaacatgaaataagaatgtgcacttgccttattatttaagtcttttattatgtgcaagttaaaattttgaaatctagcttgtataccctgtaatttgtaactggtattacttgcaacataaaactcacgttagatattgaagtactactagtcaaaaggttcagtatcgattagttacccctagacagaaaatccgtaacttgttgagccagcaatgcaggttcacgttggtaagatatcataatgcagaggcacattgcaggaagagttttgagcatcaaacgaggagcatcttgagaagactccatggagctactacttttctctacacccttccttttttgttttaggcagtttttttccaatatttttaattgctactctaataataagtgttttatacgtttagcaactcgagtaaataacctctgctttgctaagttactggaaagcagatatgctgaaattttggtgactatagtgattggtgattattatcgccatcccctaaggaggagttaatgataaaatgtagtaagaataatcattaaatcatgcttgagggttatgtgtttttgcccgtatataaaagcattacatctctatcaaacaattattctctggaatgtaagtttgggaatgcagtattcctatgtttggtacaagaaatataaatatattctccggagcatcaaacgaggagcatcttgagaagactccatggagctactacttttctctacacccttccttttttgttttaggcagtttttt

SEQ ID NO: 41450 - DNA, 985 bp, Glycine max
  Clone ID: PAT_MRT3847_137431C.1
cccacgcgtccgctcactgaaacttcctcaaccgaaccccacgccacgctacgattcgtcgtttcgctttcttcctttatattttatttaatttcgtagtcttcttttgcatgcgccaccaacaccatcatcaattgattcaattcaattacgataagaatgggtaatatctgcgctcgtttgaagttgaagccggcgccgcaaccctctacgaagaagcgttcctcttcccgccgagagaggaggctcgacgacgacgccgccattcgtgagcaggccatcgccgccgcgattctctttaagcagcaccagcaacaacagcaacagcagcagcagcaattcgatcgctctgcatcgcttcggtatccgaatggagtctccaagaagagtaacgccaacgccttgcccaggagttcgagttccagggcaaggtccctcaccgaccctctccttcaacctcaccagcttctcaatcagggtgtgaatgtcgatgatctcgagacaaatcatgttgtccttgttcatggaggtggcttcggagcatggtgttggtacaaatccatagcacttttagaagaaagtggttataaagtaactgccatagatttaactgggctcggtgtgagttcatttgatgcaaacagcattacaagtctgtcgcaatatgtgaagccacttaccaacttccttgaaaaacttttggaaggcgaaaaggtacttggaaagctttctatttttataactaatggattgatttattctatccttaattccttattatatatctctattggctctgttccatccttattacatctgagaataacttttttgtgaattttctttccatttattccttacttttcttttttggattcttatcaaggtgatcttggttggacatgattttggaggggtatgtatatcataatgcaatggagatgtttcctcttaagatttccaaggctgtctttattactgcagg

SEQ ID NO: 41451 - DNA, 1463 bp, Glycine max
  Clone ID: PAT_MRT3847_137432C.1
ccggcataagcttcgagcgctggtgcggggcgtttcttccagacaatttcacaattattttattccattatgatgccaatatggatggatggtgggatcgtaatttgactagggggggcatggacataactgctcaaaaccaaacaaagtggtggtttgcaaaaagatttctacatccagatatagtttctatttatgattatatctttctctgggatgaggatttaggggtggaacatttttctccatcaagatacaaggaaaacttgactcttgcatctttctctctcacactataccactctctttttctccccttttcatttcgattcctttggataaggggatcgttatgggattagaaatggtgaagaaataaatttttaatatcaagccaattattgatttgctctaggcccaaaataaacagagatacattatataattacaattagagcttagaaccaagaaatttcatagatagagtctatgaacgcagaggcagtacaaggtgttcagatttaagtgagggaccaccatgcactgggtttgtggaaggtatggctccggttttctctcgatctgcctggtactgtacttggcatcttatacagaatgaccttgtccatggatggggagtggatatgaagctaggatattgtgcacagggagatcgaactaaaaaggtgggagttgttgacagcgaatatgtttttcaccagggaatacaaactctgggggggagtggtcacagaatgacaaaggtttcaaagctacaaaggacaactatgaaacaaggtggagtaggaattgatgtgcgaactgagataagaaggcaatcaacatgggaatttgaaatcttcaaagagcgttggaataaagccattgctgcagacaaaaactgggttgatccctttaagagtgaccaaagacgcataagaaaacggcgtgacacccaacgccttcctaagaacaatatttaactttgttgcatatcttaaagtttcattcacagggcattacctttatttataggcataatttagtttgtgtagatgagtaaaattcattcaattttgagaaaagaaaagagttatttttctttgttctttatattatcttctttggtttcatagtttattaaaaaaaaaaaaaaaaaaacattaaaaattttttttttttttatatataggcataatttagtttttggagctgaatgaattctcaattcattcaattttggaacctcaacatttatatatttttgttcttttcattcatgtcgcaaaaaaatccctttctctttaaaaaaaaaaaaacaagccccccttcctgtagggcctatgggtttggtgggttaagttcattaactaaaccatgctcaacattcatttttggtatgctggaaatgtgaacaagtgtattttgctgagattaatcaaattgggttgttggctctctca

SEQ ID NO: 41452 - DNA, 1271 bp, Glycine max
  Clone ID: PAT_MRT3847_137433C.1
gcagaagtttcttccagacaatttcacaattattttattccattatgatgccaatatggatggatggtgggatcttaattggactagcaaggccatacacataactgctcaaaaccaaacaaagtggtggtttgcaaaaagatttctacatccagatatagtttctatttatgattatatctttctctgggatgaggatttaggggtggaacatttttctccatcaagatacattgaaattgtgaaggaagaaggattggaaatatcacagccagcccttgacccaaattcaacagagatacatcatagaattacagttagagctaggactaaaaaagttcatagaagagtctatgaactcagaggcagtactaggtgttcagaggcaagtaaagggcccccatgcactgggtttgtggaaggtatggctcctgttttctctcgatctgcctggtattgtacttggcatcttatacagaaatgaccttgtccatggatggggagtggatatcaaaataggatattgtgcacagggagatcgcactcaaaatgtgggagttgttgatagtgaatatgttgttcacaaggcaatacaaactctgggtggtagtgatgatccgactaaagtttcaaatcggcaaaggacaactccgaaacacggtgtggcggccttcgatcaacgagttgagatacgaagacagtcaacatgggaacttgaagtcttcaaagagcggtggaatagagctattgctgaggacaagaactgggttaatccattcaagagtgataaaaaacgcacgagacaaaggcggaaaaccaaccagttctcttagcaattttttttgtctaacctggtttcatatgttagggcttcttcattcatagggcattaataataatatatataggcataatttagcttttgtagctgaatgaattctctattcattcaattttggaacctcaacatttatattcttttgttcttttcattcatgtcacaagcgagccccgccctttttttttcttttttttttttttgccatacgagtctttctttgatattttttatttggatgtaagttatcatacatgcatccttagctttatcataaaagatataatgaagaagcttccattcttgtagtgcttatggttttggtggtttaagttcattaactaaaccatgctcaacattcatttttggtatgctggaaatgtgaacaagtgtattttgctgagattaatcaaattgggttgttggctctctc

SEQ ID NO: 41453 - DNA, 392 bp, Glycine max
  Clone ID: PAT_MRT3847_137434C.1
acgagtctaaactccaaagcttaaatggaaggagatgacgaacataattatttaataaaacaggaagttgtgttctttttgtctccttatcttgatctaatatctcctttataattaagttgttcggtgctctagttttagtggatgtttaagggcaggcaatgttttattttaattatcttttacatcagtaaattttggcatatgacattctgaatgccgaagctctgattggatgctatttgcaactatgtggtggtaaagcctcagaaggggtttttgttggtgctttcctttccatgtcttcaacagcagtggtcttgaagtttttgatggaaaagaacaccactaatgctcttcatggacaagtcactattgcgaccctgatgttc

SEQ ID NO: 41454 - DNA, 782 bp, Glycine max
  Clone ID: PAT_MRT3847_137435C.1
ggccgggccgggacgaatatacataaaagattatgaagtttgagttgtaaaatgccgcttccatgcgttattatacctgtagcactatggataacggttgtgttggggaagcttgtaggggataataatagaaaggtttaatttaatctcaagctctcagcaaaaagatacacgtcccaatatatttattatgcagtacaggcaaatgaaagaaaatacaaaggcttgacccaagccatatttatttttttccccacaaataagaacatgaacatagcaatggatgattataagaaaaaggaaaaagtgaagcaaacataaacgtacaacgtagctggccgatgtagtagtggagcttaatggcaaacaaaaaaagagaaatgagagcaaagtagaggaggcaccaccggaaaacacgaataacactcttctactcttccaatttatgtgtattgataataacacacagctagctcttcccttgttctgtgaatcactgggggggatttgagatcttatgttcaaacgtcagggagaccatagagtaatatatactctgcatgtaaacgtgggtgattaagctacgtttggattcaccgccattgtgcacgtggtacttgtgattcagatttggattaaggataacttgtttcacatcatcaattctaactattatgcatgtgcttcacctttcaccgattatttcatgttcaagccagggaattatataaattaaatttaattatacgccaggccgaaaaaaaaaaaaaaaaaaaggcccc

SEQ ID NO: 41455 - DNA, 693 bp, Glycine max
  unsure (1)..(693): unsure at all n locations
  Clone ID: PAT_MRT3847_137436C.1
gcagtacaaggtgttcagatttaagtgagggccccccatgccctgggtttgtggaaggtatggctccggtttctctcgatctgcctggtactgtacttggcatcttatacagaatgaccttgtccatggatgggcagtggatatagagctaggatattgtgcacagggagatcgaactaaaaaggtgggagttgttgacagcgaatatgtttttcaccagggaatacaaactctgggggggagtggtcacagaatgacaaagaaacaaggtggagtaggaattgatgtgcgaactgagataagaaggcaatcaacatgggaatttgaaatcttcaaagagcggtggaatgaagccattgctgcagacaaaaactgggttgatccctttaagagtgaccaaagacgcataagaaaacggcgtgacacccaacgccttcctaagaacaatatttaactttgttgcatatcttaaagtttcattcacagggcattacctttatttataggcatattttagtttgtgtagatgagtaaaattcattcaattttgagaaaagaaaagagatatttttctttgtgaaaaaaaaaaaaaaaaaaaaaaaaannnnnnnnnnnnnnnnnnnnnnnnnnnnnnnnnnnnnnnnnnnnnnnnnnnnnnnnnnnnnnnnnnnnnnnnnnnnnnnnnnnnnnnnn

SEQ ID NO: 41456 - DNA, 601 bp, Glycine max
  Clone ID: PAT_MRT3847_137437C.1
acgagggattgcgggagaaccggtcggtcggtgcggttttcaccacagtggtttgggcatttgaagtcgccgtctcctgcggcccccctgcccgggacattgcagggcgtgccagccggcccctctccggctcatgcctcgccgtcagtttgcgtttcagggcacagagtcaaagccttgtgacgcggaatcaccggtgccggcgacccttttgattaagcacttgccagaagccattcctcacgtcaccctctctcggatcttggccaatttcggcgcttcctctgttcgcccttgctctaccgccaggttgagaaattgtgcttttgcggatttcaaaaatgagattgtggcatctcaagcacaacgacaactaaatgggttgagatttcttggtcaagtcttgtcagcagagagagctagtaacccaactgagaatggtgaaaaaagtagcggagaccagctgggaaaggacccttatacatctatgctgatgaatgcaaatgttaccaaacctattgatggagatacaatatcaggaggcctccctatttctcgacctattgctgatagactttgtgtcagttatccatttccttcc

SEQ ID NO: 41457 - DNA, 329 bp, Glycine max
  Clone ID: PAT_MRT3847_137438C.1
aaacaaaactgtccattaaatactaaatctatgaatgattcatgaccgatttacaactatcagtccaactgagcctgctggcgcatcgaattagtatcaccattacaggtatggacattgcatactaacctgatagaaagagccgagctttactcatacctcgaagtcaaatactactacacttgaacaccttgatgtcctaaactgtattacgtgagcgcaacttcgagatggcctaaaccgcattacatgagcacaaatacgagatgtctgggaagaggaccaagaaagtaaagcttgattatgtgcacccctgcattcagaattac

SEQ ID NO: 41458 - DNA, 299 bp, Glycine max
  unsure (1)..(299): unsure at all n locations
  Clone ID: PAT_MRT3847_137439C.1
gtcgctcgtacgcgtacgtaagctcggaattcggctcgaggctttgccctagaggcccatcagcagatgagtggataaagaaatgggaggcacacaggcaaaggagttttatttagtcacaaagaggagtggaatcttgtacattttgtcagaaaatgtacagaactaaaaanaaaaaaaaagggnggccgccgactagtgancncgtcgncccggganttatttccggnccggtaccngcaggngtaccagnttnccctatagngngncntnttananctgggngtaatcatggncat

SEQ ID NO: 41459 - DNA, 742 bp, Glycine max
  unsure (1)..(742): unsure at all n locations
  Clone ID: PAT_MRT3847_13743C.1
ggtccggaattcccggngtcgacccacgcgtccgcaacattttgctctcaaggccacaacaatggccaacaaagtccatgttttgttgtgtgtccttgtgacaacgttgttgagttgtgatgttgttgttgttgtttggggccagacattcgcttgtgatgttgggaagagccctgcagtggcaggttatggtttctgtgagtaggcttgggattccaaagtatgaatggtggtccgaagcacttcatggagtgtccaacgttggccccgggacgcgattctccaacgtgattcctggtgcaaccagctttcccatgcctattctcactgctgcttctttcaacacttcgttgtttgaagtcattggaagggtggtgtcaacggaagcaagagcaatgtacaatgttggccttgctggtttgacatattggtcaccaaacattaacatattcagagatccaagatggggaagaggtcttgaaacgccaggggaagaccctgtgctcactagcaaatatgcagcaggctatgtcaaaggtcttcaacaaactgatggtggagaccccaacaagctcaaggttgcagcttgttgcaaacactatacagcctatgatgtggataattggaaaggaattcagcgttacaccttcaatgccgtggtgactaagcaagatatggaggacacattccaaccaccattcaagagctgtgtgattgatggcaatgttgccagtgtcatgtg

SEQ ID NO: 41460 - DNA, 452 bp, Glycine max
  Clone ID: PAT_MRT3847_137440C.1
gctttgataaccctcccttcaattgggtcacacgtgtttacaataaccccgtcactgtccctcatgcatgttgctatgtcgtggaatagtttataactctgactcgcacggtcgcgcacttctttcggaagatctaaaaggtcaatttttggtaaccctgggatgcttaaatgcgtgttgaggtctttgatggattttgttgtggtttcgtgaatgactgggagttggagaaaggttgcaagagatgaagcgccggaagtgtagtagaagaaagtggggatgttgagtgcgttagtgacttgtttggcgcagaagttcatgaagtctagtactatggcttttagggttagtgttttggagagggaggtgatgacgtgggggaggtggtggttgctggagcgggagagttcgagggagaggatgtggggtgggagaatggtggggatttgagt

SEQ ID NO: 41461 - DNA, 277 bp, Glycine max
  unsure (1)..(277): unsure at all n locations
  Clone ID: PAT_MRT3847_137441C.1
gaaattttgatanacngcgatcacaggttgacgcaccttaaaaccggaaacaaaagnaatgcgttacttggtttcaagaatttctcaatttnttcctatttctnctgtgtangatttcttaagggaaagaaaatccactctactgtgatggcacacagacttcgtgaatcnttttcttttccactnttagtntatntacgaacactctcctatntgatacaggacttcgtgtcagatttaaacttcttctgtttcccntctcagtttntgtntaatc

SEQ ID NO: 41462 - DNA, 1212 bp, Glycine max
  unsure (1)..(1212): unsure at all n locations
  Clone ID: PAT_MRT3847_137442C.1
cgtctcgtgtcagcagcaaatttggggctnnntactccctgtnntgatccnntttattccagatnnatgtgccttgtttggtgcggttgatgggctaaggccactaataatagcatccatttctctagtgcgccccggaaaaccaaattattgtagaccaagatcagtccaatgtatcaaaaaagaaagtttcatcttggcatagaatggtagatgttatgagccctcttctggcagaactaatgtcaccaccggcaattgccctcttttttggtttcctctttggtgcggttgcatgtctaaggaacctaataataggagaccttctttttttttgtgtcatccaagactctcttcaattacttgggaatgggaccattccttgcattacccttttgcttggtcgttacctcactcaaggcttgaaatcatcaagtgtcaaaccgttcacgctcattagcatcatcatagctcgacttttgttactacctattattggattgtttattgtaagagcagccgcaaattttgacttactccctgttgatcctttatttcaatatgtgctggtgatgcagtatgcgatgccaccagctatgaatattagtacaatggctcagctgtttgaagtaggaaatgaagagtgttcagttatcctcttgtggacatatagtgctgcagccatagcactcactgcctggtcaacattcctcttgtggctactatcttaaggcgtcttcattcctgatttcactgcctaaacacttttatacagaaacacatataatggctgtgtgactgacaatgttatacaacaattttctttcaccacttttgttctagtcaaggtcacatataacccatgccacacaacatagaagttaggagactgaagtgattggctttctcttcccctacaacacaagacactgccattcagaaattaagtatctagcaattccacccatgtcttccttttcggcaaccttctacagggacaaattgtattttaggtactgaaaaaagtttgtgttttatgtagttctccattggaaacaaaacaaaaagggtttacttatagccattttcccattttgattctttgtatttttattcattttttagttcaattcttcttgtatttcagaaactagtcttaccgaatttatattgtttaataacattttatattcaatgagaaaaaaaaaaaaa

SEQ ID NO: 41463 - DNA, 468 bp, Glycine max
  Clone ID: PAT_MRT3847_137443C.1
tgtgtttctgtataaaagtgtttaggcagtgaaatcaggaatgaagacgccttaagatagtagccacagataatggctgtgtgactgacgggggtgtacaacaattttctttcaccacttttgttctagtcaaggtcacatataacccatgccacacaacatagaagttaggagactgaagtgattggctttctcttcccctacaacacaagacactccattcagaaattaagtatctagcaattccacccatgtcttccttttcggcaaccttctacagggacaaattgtattttatgtactgaaaaaagtttgtgttttatgtagttctccattggaaacaaaacaaaaagggtttacttatagccattttcccattttgattctttgtatttttattcattttttagttcaattcttcttgtatttcagaaactagtcttaccgaatttatattgtttaataaca

SEQ ID NO: 41464 - DNA, 710 bp, Glycine max
  Clone ID: PAT_MRT3847_137444C.1
cccacgcgtccgcccacgcgtccgcccacgcgtccgcccacgcgtccgcccacgcgtccggttttttggtttcctctttggtgcggttgcatggctaaggaacataataataggagacgatgctccacttcgtgtcatccaagactctcttcaattacttgggaatgggaccattccttgcattacccttttgcttggtggtaacctcgctcaaggtatcaaaaatcctagcggctttttattttattttattttatatcaatttcatgggcttagcttactttgtcatgaaattgcaggcttgaaatcatcaagtgtcaaacctttgaccctcattagcatcatcatagctcgacttttgttactacctattattggattgtttattgtaagagcagccgcaaattttgacttactccctgttgatcctttatttcaatatgtgctggtgatgcagtatgcgatgccaccagctatgaatattagtaagtgatacagttcattccatatttccatgtgtgcttttaattgaagtacattcacttgatctttcattagccatagattccttattgtcaaaattcaatgatattaattattatgcaggtacaatggctcagctgtttgaagtaggaaatgaagagtgttcagttatcctcttgtggacatatagtgctgcagccatagcactcactgcctggtcaacattc

SEQ ID NO: 41465 - DNA, 179 bp, Glycine max
  Clone ID: PAT_MRT3847_137445C.1
gagacctaaagtctggcggagctacccgctgagtttaagcatatcaataagcaaaagcggacgatctagaggatccaaagcttacggccgctctataggaaccaagctgacgtactcttgcgtgacacatcttagatcactatacggccacctacaacgaattgactggccaaagcttg

SEQ ID NO: 41466 - DNA, 558 bp, Glycine max
  Clone ID: PAT_MRT3847_137446C.1
cactgagcatcgtctagctatctcgatcgaactgtccaaggtcctgtcactcgtttggcaataagcactacaaccactcagcaaatgctctcatgcaacaactattatttaaatacgtttgattcaattgtggtgtgggcgggttgaaaagtaaggggtaatgtttgggttgtttatttaaattgaaatttaaattgcagcaatttaatttgtacgtgtactaacacccgttgaagttgacttcgcgatacgggttgaaaatttacaccatcaccggatggtggtcttgtgctacgtggaattgcacgtgcattatgtgtttagctgaacataattaagttgtggagatgtgcctacagggagcgtaagaccagtcagcgtcagggtagtagcccggcccgtaacagccaagcacaccaacccttcacaccccccggtgtttaacagcacacccgcaaccaactaggtgcacaccaaagtagcagtggtactcacaagcaaagggttggagtcgagatcgctgagcttagatgtgataggtgacgagcaacaaaaagc

SEQ ID NO: 41467 - DNA, 289 bp, Glycine max
  Clone ID: PAT_MRT3847_137447C.1
gttagattttgaaacgctcatccggagtgagggcacattgtgacacagacagcaccctccatacaacgaggtgcccgcgcagatggaaacaacttcaactggtagactctgggcgcttagaaactctgatcggctccatgggggatcttaaaaaatgataatctgaaagtgcgcttcccaaaaacacagtgtcaggtaccattttgcgttgtgacctcttggacatttttttgacagagggcaaagttagagcaagtgtagaatttacgcgagtcatcatattcaagga

SEQ ID NO: 41468 - DNA, 264 bp, Glycine max
  unsure (1)..(264): unsure at all n locations
  Clone ID: PAT_MRT3847_137448C.1
ttnnatctcagaattntcnanaagagatctttttctgntctntgaagaaagangggtctttgcttgattttngagatgtctctgntctcagatctcatcaaccttaacctctccgataccaccgagaaggtgatcgcagagtacatatggatcggtggatcaggaatggacctnaggngcaaagcaaggactctcccaggaccagttagngacccttcagagcttcccaagtggaatatgatggttccagcacaggtcaanctc

SEQ ID NO: 41469 - DNA, 969 bp, Glycine max
  Clone ID: PAT_MRT3847_137449C.1
gttcaaaactatttgcaattgctttacttgcctcaggtcaaagttctactataacaggaacatatgcagggcaatatgtcatgcagggatttcttgatttgcgactaaagtcatggattcggaatctgctaactcgttgcttagccattgttcctagtttgattgttgcactcattggtggctctgctggagctggggagctcatcataattgcatcgatgatcctatcatttgagcttccttttgctttgattccactcctcaagttcactagcagcaaaatcaagatgggagaacatgtcaactcaatcacgatctcggctattacttggatcattggttccctcatcatgggcataaatatatactatttattgactagctttgtcaaattgcttctgcacgtccacttaaaaattgttactaaggtgtttcttggaatattgggattttcgggtgtgacattatatatgggaggcattgcatatctagtgtttcgcaaaaataaaaaaactacacactttctggcatttagaacatcggaagaacagcaagtggcaaatgaacaaggtgatatatcaatgtataatctgccaagagaagacatagtaagcatgcaattgcctcaaaatagtaggagtcccacagatattgatagagaaatatcttagtgaggtagattaactagatacagtcctagcaaagcttttatcagggatatataataagatcccattttatgttaatttctagaaattgaacatatgcaaaagggaacattgctcggggcaaattaattagtaccaagcacatcacctcacatatatgtataaagttacaatcagtgcgaatgtagaaaatgggtgggatcaattgtaatcatatggtaaaaactatgcaactataaagttgtgtgtatctttgtgtgggtaacaattttatataagatcacaaggatctctttggaat

SEQ ID NO: 41470 - DNA, 2797 bp, Glycine max
  Clone ID: PAT_MRT3847_13744C.1
cggacccgtgggatgagttattgatcatttttgtatatacattttcgatttttctctcggttgttcctttggctctcgtcaaaagcaacaactgcattcaaagggagggctaaaaaacaatgttgccatcattaacacacatggtttcgctctccattttgaatctcctccacactcaaaaatcatagtacatagatagatagctcctttattatacacaaacaatcacacaccgtatcccttgttttgagtttccgaggtcagaacatggcctgcgccgaaaacagacaaccgaaggttcctgttttcctctgtttcttctcatttacgtttgttgccagcgttttgctgaattgcaaccgggtttggggccagacattcgcttgtgatgttgggaagagccctgcagtggcaggttatggtttctgtgacaagtctttgggagtggaagcaagggtgaaagaccttgttgggaggttgacattgcaagagaagatagggaacttggtgaactctgctgtggatgtgagtaggcttgggattccaaagtatgaatggtggtccgaagcacttcatggagtgtccaacgttggccccgggacgcgattctccaacgtgattcctggtgcaaccagctttcccatgcctattctcactgcggcttcattcaacacttcgttgtttgaggtcattggaagggtggtgtcaacggaagcaagagcaatgtacaatgttggccttgctggtttgacatattggtcaccaaacattaacatattcagagatccaagatgggggagaggtcttgaaacgccaggggaagaccctgtgctcactagcaaatatgcagcaggatatgtcaaaggtcttcaacaaactgatgatggagaccccaacaagctcaaggttgcagcttgttgcaaacactatacagcctatgatgtggataattggaaaggaattcagcgttacaccttcaatgccgtggtgacacagcaagatatggaggacacattccaaccaccattcaagagctgtgtgattgatggcaatgttgccagtgtcatgtgttcctacaacaaggttaatggaaagccaacttgtgcagaccctgacctcctaaagggtgttgtccgtggtgaatggaaactaaatggatatatagtttctgactgtgactcggtagaagtgctttacaaagatcagcactacaccaagactcctgaagaagctgcagccatatccattctggcagggttggatttgaactgtggaagatttcttggccaatacacagaaggtgctgtcaagcaagggcttatagatgaagcatccattaacaatgctgtcgccaacaacttcgccacgttgatgcgtctaggattctttgatggtgatccaagaaagcaaccttatggaaaccttggtccaaaagatgtctgcactcaagaaaaccaggagcttgcccgagaagctgcaaggcaagggattgtgttgctgaaaaatagtccagcatcactgcctctcaatgccaaagccattaaatcgttggcagttattggacccaatgctaatgctactagggtcatgattggaaactatgaaggcatcccatgtaagtatatatcacccttgcaaggcctaacagcctttgctccaacaagttatgctgctggctgtcttgatgtgcgctgccccaatccagtactagatgatgccaaaaagattgctgcctctgctgatgccacggtgatggtagtcggtgcaagtctagcaattgaggcagaaagtctagacagagtcaacattcttcttccaggacagcaacaacttctagtctctgaagttgcaaatgcatccaagggacctgtgattcttgtcataatgtctggaggaggcatggatgtgtcctttgctaaaaataacaataaaatcacaagcattttgtgggttggttaccccggagaagctggtggagctgccatagctgatgtgatctttgggtttcacaatccaagtggaaggctacctatgacatggtatccacaatcatatgtagacaaagtgccaatgaccaacatgaacatgaggccagatcctgccacaggttaccctggtagaacatacaggttttacaaaggggaaactgttttcgcatttggagatggattaagctactccagtatcgtgcataagttagttaaagcgcctcaattggtgtcagttcaactagctgaggatcatgtgtgccgttcctcagaatgcaagtcaattgatgttgttggtgaacattgtcaaaacttggtgtttgatattcaccttaggatcaagaacaaggggaaaatgagcagtgctcatacagtgtttttgttctctactcctcctgcagtgcacaatgcaccacagaaacacttgctgggttttgagaaagttcacctgataggaaaatcagaagcactggttagtttcaaagtagatgtttgtaaagatttgagtatagttgacgaacttggcaacagaaaagttgccttaggacagcatctgcttcatgtgggggacttgaagcatcctttgagtgtgatgatttgaaacaagccgtcaaatcttcagcattcagtcttttcttttttttcctagttcgtttccttgttaaaaaaaattaaaggggacaagaaataattctgaggtaattgtaacaaattttttgatttctttttcaaataagaaaatgaaatcaaaaacaagtttttaagtaaggccacaaaagttttttttaataatacggtatttgttactc

SEQ ID NO: 41471 - DNA, 203 bp, Glycine max
  Clone ID: PAT_MRT3847_137450C.1
gaaaatatcttgtggctgtgggtagcaacgttcaccaaacgggtttgtggtggtcaccacttcccatgccacctgcttgctacgcctagttttgttagtcaacttttcaactcgttcacatctccttttctgccaaaaccctctgcaagaacaagagaagagactaatctttctttccaaatattactgagatttattctaga

SEQ ID NO: 41472 - DNA, 759 bp, Glycine max
  Clone ID: PAT_MRT3847_137451C.1
ccaaaaagacccttttggcctagtctctttcttataataaggtaaccaaaataaacccaaatcacaggtcaattaccgaataatccagattgagggggaaaaaaaataagagtacaggggtcctggagaatgtaacaatacgtaggtctgagaaggaagaaaaagtgaaaataattatatctcacatacacggagcagctttatttctatctcaaacaaaaatagaacaagcttcagttactccttcaatgaatttgacatgaagagacaactttagcatctgacaaaattattgtcaacaataatctttcctgatgtaaaaaatgaaatgaaactggaaggcagctagttgacaacatcaagaaccagcttgcgagactttagaacggaccacctaagccgacggtaataggcagcttgaagtaatgccagtgatagaacaaatatccatttgaatcccatcagttttctctcttccatctcaggttccgcagcccaagtcaggaatgatacaatgtctttacccatctgagattctgtagcaggggtaccatcttcatattcaacagcaccatcattaagcattttaggcatagcaatagccccgccaggaaaataaggattatagtgcagtccttctctaatcgaaacaccagcaggagggtcacgataaccagttagaagtgcaaacacatagttctgaccattgtgacgagctttggtaacaagacttagatctggaggataggctcctccatt

SEQ ID NO: 41473 - DNA, 356 bp, Glycine max
  Clone ID: PAT_MRT3847_137452C.1
ttaggcgtcgagggtttgagaatactaatcttttttacactgcctcagtattgggacatagcttatgctttttttaaagggactgggatggctaatcgccggctttgatctttgttgacggccaatgtgcggtattcatgatcagatttgattcaatgtcaccagccgagagcacaaactaatgctcctggcttgccttctaaatttcttatggcaatctggagaatcagggtaccaacacgaggggcggttgcctacatttggatgggaaattgtgttgggtactttagctggtatggtaagctcccaaaaattattgaagtgaaatgtaggatttttaaaaactaaatttgaaa

SEQ ID NO: 41474 - DNA, 198 bp, Glycine max
  Clone ID: PAT_MRT3847_137453C.1
ttctcttcttactatacactctaacttttactcttatctgtctatagggcgccctagagatctcatagaacaatggtgatggccgagggcgatcttggcaacacttaatatctcactgttactactcactgaattcacaaactaaatatctcatccaccgtaactaaatcactttcttatccctatcctcgttttcat

SEQ ID NO: 41475 - DNA, 189 bp, Glycine max
  Clone ID: PAT_MRT3847_137454C.1
aaaaactaaaaaaatatagttattaattcatatttcaatgccacaagcctttgtaagatgttatcattttttctgggcaaaggggggtggttgtatcgcaactcaagctgtttatctaccagtcatcctcattcaaaatttacaacatcgattgggggaacagaactttagcccctgagtaaaacagat

SEQ ID NO: 41476 - DNA, 257 bp, Glycine max
  Clone ID: PAT_MRT3847_137455C.1
ctttgagagatcaatatatatactacattaatttattttgatgtaaatcttaaggactatttttcgttctttgcaacactccactcattactcagaaaaaaggaagacacaacacacaggatccaaagtgtcgtacacagaatgtctcattctcttgtttcagtgattttggtgaaagttattcttgcagccatgattattgttctattttcacatgctgtgagaagccaacaaatttgtcttgcatcttgcaaaga

SEQ ID NO: 41477 - DNA, 558 bp, Glycine max
  unsure (1)..(558): unsure at all n locations
  Clone ID: PAT_MRT3847_137456C.1
gtaagccctcggaatnntcggctgcgaggtgctacagnntcattcanntagcatgacatnnncaatcaagnnttcttcactttctatctattttcnnagagtagcccgttcatttatttgtttggccncnntttcccagacagctgtggcgggtgcgcgcncnnacgtgtccccaaatcgtnntttcggtggtnntagtttctcttttccttctttcaggtaaccaaccagtctacctgatctactccctctctccgcacccctaaaaattataaaaaaaaacctacaccannatttttctcttccgtattaaataaccacnncaaatcaaaaatctaaaacccatcgtgaagggattctttcttttctaaccaccgtcatcagcgatcggattcggattcggactccgtctcgggaaaaattcgagaaagatttnttcgaatttttcacccactgctttgttgcgcacgcgatcggttatcggatatcgggctccgattttccgcctctccgcgaagagcgttgggttcatttgcactaatggaggggaaggaggtt

SEQ ID NO: 41478 - DNA, 812 bp, Glycine max
  Clone ID: PAT_MRT3847_137457C.1
ttcgtcttctgacgcatgggcggacgcgtgggcgggggcgttttcatgaatctagattcacacaaactgatttttcttttctcttcacattcttctaaattttggccccttcttcctcaatgataccagggccactcggaaacacaacaacaacaacagcaacaagtgtgcataatggagggccaagatctctcgccacctcgcatggacacatctcgaccgtccctcggcttccccttgggcactgccctcctcttgatcatcatcttcagcctcagcggcatcttctcttgttgctaccactgggacaagttacgctccttccgtcaatctctctctcatccccaccctgctccctcccacacccaatcccaaccctacacggaggtgaagcaaagcaagggtgagagtttgccggtgttgatgcctggggatgaagtgcctaagttcatagccatgccttgcccgtgccaaccttcccggctggagactatcgttgtcaccgtcgagaagccgccgcacaaaccgccgctcgtggtggcgcctttgtgttaattaattagcatcagaagcatgttaattaattgtcgatgctgtgttacagtgtatatatatgcatgttgccaccacggccttttgttctatgacccactgaagacggtaaggtttaagagagcaaaaaaaaaaaatagattaaggattaaaggatgtatacttaggtaccaggtcaattcccagatcgtgaccacttcatttgtgttgttcttctatgtgattattaattgaaacaaaccagctgtacttttaaaaaa

SEQ ID NO: 41479 - DNA, 1557 bp, Glycine max
  Clone ID: PAT_MRT3847_137458C.1
atggctcaacctccacctcgtgagaggactctgagggagatagttgcacctgatttcacttatgaaagcttgtgcattcaatatcctgatgagggtgttccatatgttctcaagactggactaatacatttgctgcccaagtttcatggtcttgtaggtgaagatcctcataagcatcttaaggagtttcatattgtttgttccaccatgaaacaccatgatgtttgttccaccatgaaacaccatgatgtccaggaagatcatatctttttaaaagcttttcctcattctctggagggagtggtgaaagatgggttgtactaccttgctcccaggtgctttaccagctgggatgacctcaagaaggtgttcttggagaaattcttccctgcatctaggaccattgccatcagaaaagacatttcaagcatcaggcaacttagtggagaaagcttcaacatggagaggagtatgattgatgctgccaatggtggaactcttggtgatatgaccactgctgaggctaggaatttgattgagaagatggcttccaactcccaacaattcagtgcaagaaatgatgctattgttcttagaggagtcaatgaggtggccacgaattcatcttcatctactgaaaataaaaagcttgaaggaaaacttgatgccttggtcaacctagtaactcagcttgccatgaatcagaaatctacacctgttgcaagacaatctggagtcaatgagcaacctgaagcttatgctgcaaacatttataatagacctcctcagcagcaaaaccaacaacagaaaaataattatgacctttcaagcaatagatacaatctagtgcctccaccagtagtagcagctgcacctgaacctgtcaagcttcattctacacctgaaaaagaggttgagatagttgcacaaaagaggaagcttgctaacaaaaatattcatgtaggtggaccttcttctactaattttgactcacagcagcctcctatccctcttccattcccacctagagcaatttcaaacaaaaagatggaagaagcagaaaaagagatcttggagaccttcagaaaaagtagaggtaaatctgttcctcatattcctgagaaatgtaaggacccagatgtggtgattcatttggcaaatagaagtgttgcttaccccgcatgtttcatagaggatgtgctggttcggattgttgatgattatatgtttgattctgttcttcatggtaggaaacatccatttttatctgatatgcatacttgtcattccttatgcattgaatctgaatctgagtttgaatttgatcctgtatctgatttttatgctgagagtgaatttgaatttgagtctggttctgcttttctgggtgttgtatttcttgatgttgattttttagagtcagaatgcactaaccatgttgcaggaagttcatatacttctgacttggtttatgaggtacaggctgaggaaccttcttcttctcctaccctggttcctcctatgttcagcctgagaactactgtaccatctgattag

SEQ ID NO: 41480 - DNA, 1331 bp, Glycine max
  Clone ID: PAT_MRT3847_137459C.1
ccgacgggtcgtgtcgactgagaagcgtgggaaagcttttgatcaaatacttacatttccctgtcaagatgaactgggggctacagaattgagaaatcaggtccactgtgttaccttaataaccacattttacaatgcatatggaatctacggtccaatttccagctccatcaccactctcccacttcaaaattcttgtctccctcttccctgccacgaacaaagcatcatcacgctatcatccttcggagaaaaatattaccaatcactcctagaatccaatccctctccttggtatttgatgcctcctccgccattcaattccacgctctggtcgcatcgatcatcatggatcgcgctaactaacaatccataaaggcgttgttgttctatttcgtttgggtgcaaacggggacacgctcagaagcgtgctgttttgatgtaatcgacgtgctccccgtgctgccgcgcgagatctcgtgcccggttctgtctaacatccgaagccccaattaccttatcacacatcactttgggtttctcaggataaccaaacacctcttcaaatatgaaggagcaatgggttggatttgcatccaatcttcctagagcttggagaatattggatggattttgctgactatctcaccattccagctacaagatgaatgggtatacagtgatggaaagtcgacaacttgtgttgcctttatcctttctatgtataaagaggctgaagtttttggtcccattgctaattccattcaagtaaccgagttcaccattcgcgatgcatacatgctcagaattttcgaggacaaccaaacacgcctaccaagttggtgcaacaatgagaatgaccggattccattctgtcagattcttggtgaatacaagatggaactgcctggctataacaccttggagccatatgccaacatgaatgagtattgcccttctcttcctccaacttatgataggccttctcgatgttagatccatcttcttccatcgtttctatcattttgaattgcctgttaaatttaacttaaggcatcaagtactttggtgttctaaaattgtctataaaccattcaacacggcattgtgtatctacagcttgatggtcaactataaaaaaaaacacagtacaagattgatatttcccccccgcactggccttaattttacaccgcctggaaagggaaaaccctgccgtaacccaattaattggcctagaagcaaatccccctttcccgatttggcttaataacgaaaaggcccggacggttgtcccttcaaaacactcccccaacctgaatggggaacgg

SEQ ID NO: 41481 - DNA, 554 bp, Glycine max
  Clone ID: PAT_MRT3847_13745C.1
agagtatccccaccaatggggaaagtgcgcaacaactgtgtttggcttttgctgcaaatatcgtaatatcattgcgcattgccatttgcagcaaaggggagtggcgatgatattacgatatttgggaatgtgcaacaaaagacactagaggtcgtgtatgatgttgagggtgggaggatagggtttggtgctggtgggtgcaagtgattttaatgattaaacatgctttgggctagttagggtcaaaggaatcttaattggttttaggctttccttattactattgttgttgttactgcaataatgtacaacagtggaaatagaaaagggaaacccataatgtgggggaaattaaatagtgattaattgttggaaaacatataatccccccccgtaaaagaatggaggaggtgaaatatgtatgcctctccagctgtgcgattgcttgccattgtccatatgtaagatgaaaaaaaataatgtaaacttgttcttgttttttaaaaaaaaaaaaaaaaaaaaaaaaaaaataaaaaaaaaaaaaaaaaaaacac

SEQ ID NO: 41482 - DNA, 440 bp, Glycine max
  Clone ID: PAT_MRT3847_137460C.1
aaaaacccaaacaaaaagggcgcggggctttaaataaattggcaaatggggggctccattaccgcattaaaacacaagaaaattgaaacattaaataggaggcaagatttattggatccctagccttgcattttttttatgggaagggggggccagtcctgtaataaaaggaaaccacatgcccccttaaaaagaaatgcttttaggaatccccctgcaaggaaacccttcctcactgttaggagggaacaaagggtatggcaattgaacccgcccaagtcgattggagaaactttgatcattggtcttccttgcaaggttttcctcaatttttttgagcttggtcccaaatttttaaaaggcttgtaatgcttttgagtcaaaggtccaatgggggttggccctttggccaagggaaacctcataaaaagcatgccttg

SEQ ID NO: 41483 - DNA, 167 bp, Glycine max
  Clone ID: PAT_MRT3847_137461C.1
cacatcgtggtctcatcccgttcccatcaatcactcgtcttccacgttggcgtcgtcctccggatctgagtctctctgagtggtgccagtgcggcctgagtctacgctactgtctacgggggcgtcccatcatctaagtatccgacgatgggtaatgcgtcgccgtt

SEQ ID NO: 41484 - DNA, 439 bp, Glycine max
  Clone ID: PAT_MRT3847_137462C.1
ccacgcgtcctttttgtttggggcagaaactcaggtggccagctcgttctttgtaaaggagcaggtcaagtagttactaccccaacaaaggttgattgtttgactgacctcatactaaaaacggatgctctgggatcagagcattcaattgctgttacagaggaaggcgaagtcttgagttgtctgagctgctggttctggtaggctcggacattgccgtgaatctagcatactgggattttctctcacctcaactgaatatactccaagattgatcaaaaactttgatggtatcaagattaaaaagatatctgcaggaatgttgcactcagcttgcattgatgaaaaagggatttggatgaccgaacgaagatttcagaccaaatattgcttgagagataccattttcagacgaagttgcttgtggaggttaccatac

SEQ ID NO: 41485 - DNA, 1337 bp, Glycine max
  Clone ID: PAT_MRT3847_137463C.1
ggtccggattcccgggtcgacccacgcgtccgcctctctttcaccaattctccaaaatttcaaccccccaaactcaagatttgtgctgtcagagcgattcacattgcctgtgttacggttgtctgctttcaaagcttttgaagttgtactttcggaatttgcaaggtagtgttgtttaggacacttcaattttcttcggttccaaaacatgatgtctcaagaagcaatatctgttccttccaacaacctcagagacccctcggttcaacttcatgaaccaaactcaaactcaaattcaaaccctaataatcctaaccctaattcacttaagagaaaaagaagcctacccggaacaccagatccgaatgcagaagtgattgctctgtcgccaaagtcgctgatggcgaccaaccgattcatctgcgaagtgtgcaacaagggtttccagagggaccagaacctgcagctgcaccggcgagggcacaacttaccgtggaagctgcggcagagaaacaaggaagaggtggtgaagaagaaggtgtacgtttgtccagagaagagttgtgtgcaccacgacccttgcagagccctgggagacctcaccggaataaaaaagcactcacgcagaaagcacggtgagaagaagtggaagtgcgaaaagtgctccaagaaatacgctgttcaatctgactggaaagcccataacaagatttgtgggactagacagtacaaatgtgactgtggtacaatattctccaggaaggacagctttgtaacgcatagggctttttgtgacgccatggcggagcaaaatgcgaggcttccgtcggttttgtcaaaccttggaagcgagattttgatgaatgctgctcaagctccaagagtaatgccacaggctttacaattacatgggtttcattcagagtttggtgggccaggccaagaaccatacattggaaattttgcggatgtgaaccatgatgagcataagctaaggatgccactatggctagaccagaccaataatcctcttcagcttaatcatcatcatcatcatcatcctctaagcgtttcaagcaacaactcttcaagtttgttctcaccaggaacaaccttggctgaagtgaacaacatgtttgggacatcatcgtcgtcacagggacagtggctgaattaccgataccacccagaagcatcatttacacatgccaacgtttctattcctcatggactgaagctagagcaagaagaaaacaaagggaacttgtcgcatagcagccccaagtcagaatctgctgataataatatagtgtgagctctttgtaccaaagtcacat

SEQ ID NO: 41486 - DNA, 744 bp, Glycine max
  Clone ID: PAT_MRT3847_137464C.1
aaaaagaaacaattcatatttatatatactaacgcatgcaacaaggatatataaattacaaaattaattattacatccaagcctcgatttaaaagaaaaataaagcaataataaaatacatgcatctctctctcacacacacacactctctctctaattaagtttagggaagtgcaggatcatgactgagtgagagaagagagattagcagaagaattagtagaagtgttggagttgttcttatggttatgcatccacaccttgaaaacctgtctagtgacacccacacttttacagaacctctcaatctcatcatccacctcttttctctgcagcttccaccccagcttttccgcgaaccccagcatcttctccttctgctcagcactgaacttcgtcctgaacctcttcttgctgccgccactcctctctcccatctccgttattcttcccacgtctccgcccccggagtactccatcatgtccccactccctccagtcacggcctgcaaccctccttccaccgcggggcacgtgaccttgcggtggaagttgcgatggcagccgcaggctgcgcactggagggagggggacgagacgctgtccacgtccagggtgaactccccacagccgtcggtagcgtagctaccgaggctggctgcatggttgcggaggcactctcggtagagatagtttaaacatgaagatgatgatgatgagttctccctccacccctcgcttcgt

SEQ ID NO: 41487 - DNA, 768 bp, Glycine max
  Clone ID: PAT_MRT3847_137465C.1
aatcagactgccaaccattacaacctggcatctggtactacggcctccctgctcacaattcaagtataagactcaactaccatatacgtacatttccaaacacatactacttcagctacgccaccaagcgcacaacaaagatcatgggtgttaaagttccttcaagcatacttggaattcacccattgcttttcattagagttttgcagatgtgccagtggcgttttcctccagatgttcctcccccttataagggatacagggatgaggactggcaagacaatgatggagcactaaatacaatatccatgactcatcctcgcctcccaattgaacaccccaactgcttggttgaaaaggaatcagactgccaaccattacaacctggcatctggtactacaaatatgtggagggtgatcacatactattcattattaatcgtgagagagcaggagtgcagtttgacgtaatctatgacagtattttccaacgctgtaggaagcacgtttttaggaagaagcttccaacaatgcctaatgaaatcaatcactagcacaccattctttactctcccatgttcaattaaaagagatgattggagagatatcagagaccataatcaataggatgttacaatcaccataagtgtacacaattattgtctcaatattaaacatcatgaaatgaattgttgaattttgaatttttgagctttgcaattgtgctatggaaaatgggtatgatgagtgctagcgtaaccatttgtt

SEQ ID NO: 41488 - DNA, 1862 bp, Glycine max
  Clone ID: PAT_MRT3847_137466C.1
gctagcatatataacaagcaaccctcaccatttatattgtttcagcgaagactaggggagaaattgatgttctttaatgtgaaaaaggttggaacggttttcgattttaagcctgcaaagagccttcctttgtttttctctttttgagaagaaggctctttgttgttgttgattttgaagaaggaaggaagaaagaaaaaaaatgttgaggctatggatttcttatctgcaattgttggaacttttcgtgagttcattggttcacatgctttatgggttttacatatttagctccgctgttgctggggatctctcacaggttctcaatgaatattttcacaaggctaataataatgtgaatgttgaaattcctcaataaatgatcttcctccttggttcaaaagggatcagattgccactccttacaacggggcttttggtacttcagataagaagaaagagttcttgtcctaatcattatctatcgtgatagagcacgagtgcagtttgaattgttctatgacagtatttaccaaagctggaggaagcaagttgttaggatgaagcctccaacattgcctattgaaatcaatcactagcacggagcacagcaaggcttgtggacattcgcagtttggacgaatctatgaacaagggcattaccctgaatgggacgaggatcaccctattcattttgttgggcactcagcaggagcacaagttattcgtgtcttgcaacaaatgcttgcggataaggcattcaaggggtatgaaaacacctcagagaactgggtattaagcgtcacatccttatcgggagcatttaatgggactacaagaacctacgcagatggcatgctgccagaagatgggagaacattgaaacctatttgcctgctacagctatgccgcattggggtgataatatatgattggttcgacatttcctggctgaagaactactacaattttgggtttgatcactacaacatgtcttggagaaaaatgggcatatggggtcttgttgactgcctattggggaatgcaggtccatttgcttcaggagattggatcctccctgatctcacaattcaaggctctataagactcaactaccatatacgtacatttccaaacacatactacttcagctacgccaccaagcgcacaacaaagatcatgggtgttaaagttccttcaagcatacttggaattcacccattgcttttcattagagttttgcagatgtgccagtggcgttttcctccagatgttcctcccccttataagggatacagggatgaggactggcaagacaatgatggagcactaaatacaatatccatgactcatcctcgcctcccaattgaacaccccaactgcttggttgaaaaggaatcagactgccaaccattacaacctggcatctggtactacaaatatgtggagggtgatcacatactattcattattaatcgtgagagagcaggagtgcagtttgacgtaatctatgacagtattttccaacgctgtaggaagcacgtttttaggaagaagcttccaacaatgcctaatgaaatcaatcactagcacaccattctttactctcccatgttcaattaaaagagatgtatgaaaagaaacaggctattcatttcagttaatgccccttcaccttcttaaatgtaaatatttttcccacgttctctcatttttataccaccattttctgtattttgtaggattggagagatatcagaggccataatcaataggatgttacaatcactataagtgtacacaattattgtctcaatattaaacatcatgaaatgaattgttgaattttgaacttttaaaaa

SEQ ID NO: 41489 - DNA, 392 bp, Glycine max
  Clone ID: PAT_MRT3847_137467C.1
aggaccaaacaaaagggggccagggcccctaaaaaaacccaaaaggggaaacctaaagaaggcttaaaattgaaacggaaagggacacgggaaaaaaaaaacaaaaaaaaaataaaaaaaagaaaaaaaggggcccccaaaaaaaagaaaggggaaagaacccctgaggccaaaaaattaaaaaaggactaaagaaacatctttggcaaaggctactggggaaaaaaaaaaaaaaaaagggggcaaaaaaatcccggacaaaaaacagggacaacctaaaatatggagaacgcgccaggggcaaggatcctgacaaaaaatacccaacttctataggaaaaaacaaaaacaatggttaccaaaaaagcaccgcaaatggctaaaatctcaaa

SEQ ID NO: 41490 - DNA, 461 bp, Glycine max
  Clone ID: PAT_MRT3847_137468C.1
aaaacagtcccaacccataaattcccatggaggcccgaaaccaaaacccaaaaatccgggggggggaaatcccaaaaggcaaaaccaaaggggaagggagttaaagcccaaaaaacaaggggggggggcaacaaaggcttggaaaatttttaaaggactaaaaacccggggggctggaaggcaaaaaacctgagcccctgccctggggaaacgtggccaaacccaaggatccggagaaacccttgggggaaggcagtctaaccctttggaagccccttaaaccccggaaaagcatcggggcagccaaacaaaggcggtttccacagggcccaggggggcccataaaagaacccaggggaccggtggggctcacggaacacaaaaccgggccccaactggaattccaagcagggaacccatcctttccttaaaaggaatccaactccctttgccaatggggc

SEQ ID NO: 41491 - DNA, 536 bp, Glycine max
  Clone ID: PAT_MRT3847_137469C.1
gtaaaaaaccaaaccaagcggtgtaagtcaaaaaaggggaagcgggggttaaaaaaaaagaaaaggggctgggttttgggggggcaaaaccccaaaacgggcccaaaaacaaaaggacaagggtgtttattaaaaagggacttaaagaaaaaactttttggggggaaaagggtgggggggttttttaaaaaaagggggaggaaaaaataacccaaaaaaaccacaccaacaatgatttattggggcccctcggaaacgggggggggaattcggatccgcaaccccaattttttttaaagggaaaaggctaagtgggggcccctcctgcggggggaggggacggggggactcaccggggactgggagggggggggggggcaaccagaaaaaaaaaccttggggtgaagaaaaaccccttgggggggcccccatgaaaatgcccctggggccgggccaaggactttggggggggcgccatgaggggacggaaaaggggggggggggcacccacatggggttgggatttggggggggaa

SEQ ID NO: 41492 - DNA, 424 bp, Glycine max
  Clone ID: PAT_MRT3847_13746C.1
ccgtgggtgcttctggtgcattatttggcttactaggaggcatgctatcggagctcttgataaattggacaatatatgccaataagtttgcagcgttattgactcttatagtcatcgttgtaatcaatttagccattggagttcttccacatgtggacaattttgctcatattggaggatttgtctctggcttttttcttgggtttatctttctgattcgcccccagttcaaatgggttagtagtagacacaggaattctcactctacagctgctgcaccttcggtgaaatataaacacaaaccttatcagtatgctctgtgggtcatatccttcatactactcattgccgggttggttactgggctggttttgctccttcgaggtgttaacttgaatgatcgttgccatgtgtcattacttaa

SEQ ID NO: 41493 - DNA, 279 bp, Glycine max
  Clone ID: PAT_MRT3847_137470C.1
ccacccccaattttggggggtggtgctttcaacaaaaaaaaaaacctttggtttatgagttttttcccaccaaaaggagggcccagtttatttgggcccttggcttaaccaccctagagaaggggtctttttgaccattcccatcgtggaaatttcatgccaacgggggccgtttttgacatctcagatgagggtggaaaaaaattaatagatcgaactagagcttccaaattattaaaaggatagctcatggcctatttttaaaaaaaaacaaaaacc

SEQ ID NO: 41494 - DNA, 201 bp, Glycine max
  Clone ID: PAT_MRT3847_137471C.1
agctcggaattcggctcgagcgctgtgtagaaagattttgggattttttctgttcagagtcgaagagctatgggggctaattcctcctgagtcccgagagacccacaacccaaacgaccaaagcagccacatcaacagacacacatacgcagctagatcagtaacacgcgaccctgcttcatggtcgctatgaccgcacaa

SEQ ID NO: 41495 - DNA, 142 bp, Glycine max
  Clone ID: PAT_MRT3847_137472C.1
ctcaacactacatgttttgaacttctcaacaccttatccagccattttggacaccgtttccaggccacacgcttacaggcttcgatggatcacgtcatgtcacgacatgctccaagtctcatgaatgattgcacctgtgaac

SEQ ID NO: 41496 - DNA, 432 bp, Glycine max
  Clone ID: PAT_MRT3847_137473C.1
cccccccaaatcccttttcccaccacgccgctaatgctgaagaggaaaagacggaagtgaatagaaccacctgcatgcccgctgatgtgcttgcaaagcgagcccatgaataagaaaaacatgttgctcacgaaagccctacggctcaaaatccagatgttgaccagaacactacaacaaacgtgaataggcaggcaaagattataaaccttagacaaaaagcagaggcagacctgcagctgttcactcatggcaagctcaatgatgggaaacacatgccggtcactaatgccacagcgatcaaaaatcaggtggtgacaagaccattatactacaggaagaaattcgcacaaataatgcacgttatacaaaaactgcaatgtgaactaaaactagcaaccgtcaggctgctgcattgcgtgaagcagctat

SEQ ID NO: 41497 - DNA, 383 bp, Glycine max
  Clone ID: PAT_MRT3847_137474C.1
acgagagaatatattacatgttacacattttacatttacagtatatggattatggtattcagtttagacattggattttatgtttcatatgtctcatcttagcagatttatttatgctatgtatttttcctccttgaaaatggagagatcatttctcaagaaaccttctttgagttgagctttattacttttttgtactaaacaatgcgtgcaaagtttccttggttgtaattctgtaaactcctttgttttgcatcttctattatcttttggagcatttggcttctgtatgctgctaaaattgagctgcttgttgagctattttgtaccacatgagctacaaagtcgaaatactaagttatccaggctgctgtatgcaatgg

SEQ ID NO: 41498 - DNA, 1195 bp, Glycine max
  Clone ID: PAT_MRT3847_137475C.1
agagcgcggcgccctattttcgttttttcggcaatggcactcgaccttttgcttctccatttgactaattttaggaattcttattaatttcaggatctcatcatctccatccactcgggagtgggaaaaactatttttatcctctgcacaatgtcctccatggcttcctccaccgctttcttcacacccctccatgatttcactcaagccagaacaaccccatcaccccctttgcctttcatcaaatcctcctttgcttcctccaagtcaaccttttatcaccctgccctttccatacaaacctcttccaactttccaaggcatcttggaaagcctatgtatttctacatacactatttggaagatcacaacaaatccaagtttttttctctacccgagtcatccgatcagactcggacaggtcaactcagatccgaacccgacccgaaaacagacccggttcactttctccggcgactactttaatctccaccgttcatcacgtgtggttcagccctgaccccagcaactaaagtacatcactttcctcagagagtcatcggcttggctcaccctattcttcgcgtcggagctccccgctgccgcgccagagacgtcaggtccaacgacgccggacagcggccggagatcagacagggctccgccggagaagaggcggctccggttgtggtggatggagttgagcgccgtcttgcacttgtggccgggatcggtgtggccttgcgctaccgccaccgttgccgccatccaaacacgattcaagtaactcatatttttcttctttctcttattttcttcttttttcctttctgtttgcaacacaacacaattcagacttgctgcctgagtgtaattcagaacacaaacgagagctgtatgtaagagcacgaaccgagtgatgtgtgcacaataagttaaaactgaagatgagcaataagtatagctatgcaatttactttggtgtctttactaaagaaattatcagtttagggaagaaaattatactgtattaccccaaaatgattgaatatagtatatgtttctctctttctttttttctttttgtggaagaattctctggccatttatattattattctctaagtaatatgctttcattgaaaaaaaaaaaaaaaaaacaaaaaagacgaacaaaaaccaatagtgagacata

SEQ ID NO: 41499 - DNA, 268 bp, Glycine max
  Clone ID: PAT_MRT3847_137476C.1
ctcccttactctctctcatattatgttttttttttcgtcaaacattttgaaaacgaaataatcgagtaatgcttagttttgtttttatattattattattattatttgaacttaatatgggcgtaaaaataaattagaattttatataaattatgaatttttattattattaaactgaccttagttagtgcagcttattttttttaagtgcaaattttatttgtgtttagtttaattttgatgctttattattagtaaaacaaaattg

SEQ ID NO: 41500 - DNA, 400 bp, Glycine max
  Clone ID: PAT_MRT3847_137477C.1
tttccggttcattaactgatcatataaagaatgggggggggctgactgtaaaagggcgttcgccttagataaccgttgccccttatcataccaatcctgacaatgccgcttgtagcacttttggcgcgtcttctcaaaggtggaaggcccaaacggctggaaacattttcgaataccattgtgcagattgaaccagacgtgatatcaaggttacagattttgagtaccactaccaatggtgattttcgcccaaggaaatagaacatctacaatggtctcaagcttaacgctggtaaaccgcttgttgatggccttgacaaccattgtacacttcaacttcaatgatggaatctggcttgcaaaaagacagagggataatcgtgccgaactatggaaggaa

SEQ ID NO: 41501 - DNA, 516 bp, Glycine max
  unsure (1)..(516): unsure at all n locations
  Clone ID: PAT_MRT3847_137478C.1
cacgaagaaccagggcttcgagctcactaagcaaagatacggcaaggccaacgttaaatttttacgcgtatatcgtgagggtggaaagcatgaagtcaaggaaatacgtgctcgcgttctcttagaaggtgctttcgagatcagttacacaaacggtgataactctaccatcgtcgcgaccgatacacagaaaaacactctcttcgccctcgccaaacttcatccaattgaacccttagagcaatggtgtctgcaagtagccaatgattttctgtccagacataagcacatctcagctgtcaatctgaaggtagaagagcacccttgggacaggatccaggtggcgggcaaggaacacccccactctttccagaaaggaagcggcggtatccgtattgtgaagcttcgcatgcctcgtaatggcacaccttcactctcctncggcttcagagagttggagatcatgaagaccacccaatctggctttgaagggttcatcagagacgactacacaac

SEQ ID NO: 41502 - DNA, 115 bp, Glycine max
  Clone ID: PAT_MRT3847_137479C.1
cgcacgtttggtatgatgcacctgaaaaggattttcaaacgggagggggcatttattaggggcatgtccgaacgatccataccgactagggttcaattgacactgggacaaacaa

SEQ ID NO: 41503 - DNA, 196 bp, Glycine max
  Clone ID: PAT_MRT3847_13747C.1
gttgaacacccgcgagaagacgagagaggggggggcataaggggaagagcccccgcggaccccccagaggaaacgagaagacggacgcgcgcatgcgacgaaaaaggcgcgcgacaaggaaaccaaagaggcagagcgcaggacgagggggcacaacgacgggagaggcaaaaacaggccacgacccaacggaaag

SEQ ID NO: 41504 - DNA, 338 bp, Glycine max
  Clone ID: PAT_MRT3847_137480C.1
tttttttttttttttttttttttttttttttgttttttttttttggaggctcattgaaccttttatatctacaaagaaatatgtaaaggtcatcaagcaggcatagcagctccccctaaaatttctgatgctcaattgaacctttttacaattgcagggaagatgtcggaaaaataatttaaagacagaaaatcccagatttaaaaccctatccacccatttcacggagaaaaccattctttgcaaaattgagtcccccaaaaaagcactagccaaataacttttcccctctacacaaaaaaaaaaaaaaaaaaatccaatacccctcactggcatct

SEQ ID NO: 41505 - DNA, 399 bp, Glycine max
  Clone ID: PAT_MRT3847_137481C.1
ggtaatggcaacatagatggactgaccactgcgctgctgattgactataggtcacatgcttctgcagcgggcatgtatggcctagctaaatggtgtgcacgctggatgggcagtcatgggttctgaatatgcattgtggactgccaaccaatagagattctgattaacaagaacgatgacacaacctccgaaggttatagggaatgttacaaacacatacaagctgccaatcaggaaaaactagaactcttagctggacgtgatagctgcacaaacatttgagactgggattacatggggaccaactgcacttcctgatacgatacgaaaggaggaaatgcaaaccctacactggtgaaagaggacacagatcatgtcacagtgtggctccaacggatc

SEQ ID NO: 41506 - DNA, 515 bp, Glycine max
  Clone ID: PAT_MRT3847_137482C.1
tgctaaaaagtgccaaatcgcatgttgctagcatttctaaaaaatacaatgccacaccatttctacagttttcgtgtgaaataacaccacttgaaaaaaaaaaaaaggagtattacaatttcagcatatagcttatctatctaaaattacaactaccatcccacaaggtgatatcactcccagtaaactttacataaattgaagcttggttagctccatacaaaaatccaatatggctgaaactcaggatatgaatggttgtgccattaaaatgtaggtaaaggattcctcaatgtgagaatcgtttacctaccccgcacgctggcagaagattgaccacttctcacgctgacaatatcatcatctatttcactattatctaaacaaagaccattttggtttacactcacttcagaactagcattactgctagtagcatgaggagagccggagatactaccagttcggctacgctgagacctagacctcacactatacattgaaaaaactggaat

SEQ ID NO: 41507 - DNA, 334 bp, Glycine max
  Clone ID: PAT_MRT3847_137483C.1
tgctctctgagcttgaaaaacacgctacgaccggattctttcttttcaacacccgaattcgggttgactctcttgcaatctcattcctcaagatcgctttcgctgcttactcaggaattatgtcttttccgcggcattatcaagctgaagatcggggtctacatattggttactggtccaccgttgatggaaacacctatcgtgaccacaatccgaaaagaagcatcgaacaattattataacaagaattgttacattgacaatgataaccgcacaactatggctgaccattttaagttctacaatgctgatcatgctaactatgctagatatg

SEQ ID NO: 41508 - DNA, 610 bp, Glycine max
  Clone ID: PAT_MRT3847_137484C.1
gaattgaaccaactcgaaaatagttcggaactcgattcaataatcagctcgttgaatttggttcatgaaccaaatgagctgaatttgagctcgttaaataaatgacccaaacttgagctgctaatagttcaactcatttgattcatgaattggctcaatatatatatatatataattgattgggttttctattattttatatatatctagggcagggtagtttttatttatgcagactttggttataattatgttttttttgtcataccttgtggccctacaaagctaatagaataagttcagttttgtcttttcacaaaaattaaacaatcattttatctaaaatctaccaataaattgaaaatttgaattgtataggatttaaaaaatttgacttttggttcatgtgatccaagctaacaagctgaattgaactgtttgtgagcttgaactgagttgagttcgagctgaaaaataaggttcatgaaccaaaagtcaaatttttcagcaaaagatattaatgagccgaactgaactcgactcgtttccggacctacttctgaatattctaagttaaaatacatatcatgagaaagatcgtgaaaagata

SEQ ID NO: 41509 - DNA, 630 bp, Glycine max
  Clone ID: PAT_MRT3847_137485C.1
gccttggctattccataccaccactggaccatgaagggcaaccaaattgggtttgttgtgctgtactcattgaccttcttctttgccaattttggtccaaatgccacaacattcgtggtgccggcagagattttcccagcaaggctaaggtctacatgccatggtatatcggctgcagcagggaaagctggggcaatggtaggggcttttggctacctgtatactcaaaatgccattggactgagaaatacacttatagttttgggagtggttaacttcttggggctgctgtttacattcttggtgcctgaatctaaaggaaaatccctggaggagatgtctggtgaggctgaagaagagactactgctgctacaagagaatcagcaatggagcctggtcttggagttaggtcttctgtctaactgcatggttagtttcttttattatgtaacggtaggcttttagtattgcactttggagtatttcacgtaggagtccatgtatagtcatattgaagttgagtttttttttctttaagcttagggtttcgggatttatttctttgctttgccttcttttgtaacagaatcagttagcatattcagttttagttgtttatgaaacaaaaa

SEQ ID NO: 41510 - DNA, 324 bp, Glycine max
  Clone ID: PAT_MRT3847_137486C.1
tccaggaaggtttcccgtcatcactgtatgacgtcctccttctttgggggggggggggggcaagaatagagcggttgggggtaagaaattgtggatggcataacccccctttgctagagccaggggatccttaacaggtgcagatgtagattaagggcgggaataggagcaagagtgaagactggaatccctagataggaacgaaaatgccagacgacagacagagccaagacaggaaatatatttggcgataggtaaattatagttgaaagatgattgtcagtacccatatgataatagagttaagagttagcagtgtttaag

SEQ ID NO: 41511 - DNA, 120 bp, Glycine max
  Clone ID: PAT_MRT3847_137487C.1
gttatccgctattcaatctcgtcgccactagcacttgttcagccgaagctcaactctaatgctctgtgctctacgacagcacactctaagagaatctctctcatgaatcatgacttattc

SEQ ID NO: 41512 - DNA, 348 bp, Glycine max
  Clone ID: PAT_MRT3847_137488C.1
catgggataaaaatacccgcccatttactaatctaacgtccacctgtgacaatgtttttatacttccactggagcgtacaacgccacaaaacaaaccgggggatctctgaactttcccttcaaaagtctcgctttcgggaaaataaaatctttccttgaaacgtctcacctctatgcgtacagagcagacttccaaatagtgcctattccacgttggtgagggcacgaattaggaaaaataatgccccttcttgtgggacatatgctgggtcacaaagatttgtggcttaagcaaatcagaatttgaagggtcccgggttctgagcaccttgggccctttcacattgt

SEQ ID NO: 41513 - DNA, 261 bp, Glycine max
  Clone ID: PAT_MRT3847_137489C.1
agacccctaaggccaaggccaaggagactgcgaaggccaccgcctcgaagaccaacaagaagaacaagaaggccaaggagcccactcccgagcccgagtcggacagtgacgaggaaatgaccagcgacagctctgctagcagcgagtcccgagtctgactccgagtcgtctgcttctgatgctgagagcaagcccgcccccaagaccaacggcaaggctgctgctaagaaggacgactccgactcttccagcgaggaagac

SEQ ID NO: 41514 - DNA, 242 bp, Glycine max
  Clone ID: PAT_MRT3847_13748C.1
aatgaaccctgctcggatcgtggggatgtctctctctgtaaacgcagaaggcggtgttcctggcgccaagactgggcctggtgattttaggcttgatgttgcgtggatcaaagcgatgatagctttgtgaactccacaagtcatagttttatgtcacatcggccctttccttctttatcaccctgcctcagtggcgacgctgaactcatctagcgaccacgagcacaggtgtatacatagca

SEQ ID NO: 41515 - DNA, 156 bp, Glycine max
  Clone ID: PAT_MRT3847_137490C.1
gcgaaatggcaaaaatttaatcttggaaatctttacaaaagtcttaaaacaaaggcatggtcctgcacaaagaacactttaagggtttccattgcctactagatggggaccatacccatatacctttcacgagggatgaactttattactttacga

SEQ ID NO: 41516 - DNA, 822 bp, Glycine max
  unsure (1)..(822): unsure at all n locations
  Clone ID: PAT_MRT3847_137491C.1
gctcggnaatgcggctcgaggatatcattctgagtttgttatttggtcctgaaattcaaaaggcattgaaaatacaagtatgaacaactgtttctctgcaccacatgttgactgtaattattggcagtttggcacaaaaagttgtaaaagggtggtggctgctaggttagaggtcttgtgaaatctctctatggagggtgagaaaaggcgcggtaaaaacaatacaaattatggactataagtgggttcccaagcttaacaataaaagtgaaactaaaatcagaggggaattgtgattgcttgtacatagttttttcatgattaaaagaataattcattatgacaatacaagtaaagagtatgaaacaagatggctacaaggatactacagagttgttagagaaaagaaaatacatcaggtcaaatcgaattgccacaaagtatatgcctacgccttactggtcaacctttttcccctgttatcccccttctattgattcatatctatttatttgtatttaatctgcacgtaaatgaattcacttctaatgtgtttagcagcttgtcaaattataagtatagatgccttgtttccaagcacacaatggttctaaatttcgatagtttaaaattgtatgcttgaaacctttgttgcagctgcaatatattcaatgcaatatatgtgattttacaagtttgaaatatagtaaagtgttttttgttctgcctcactcatttctatgcangaaaagttatgagtgtatttcttaaaattctagtctatcttttgcatagggnagtccatgccaatattattacatg

SEQ ID NO: 41517 - DNA, 467 bp, Glycine max
  Clone ID: PAT_MRT3847_137492C.1
cggaggagctccagaattccttcaagtttaagcattatataatacttaccaaaatttacgtgctcaagaatgtagaacagaaaagaaaacagagcaatggtagtgatgaggcaataatatacataaagcttgaggatgaaatttttcacaagttaagctcgtggtccttctgttttccattgcaaactcagcagcttgcacctcatgagctgaggaattacaggtcaacgggattaatcgtggctgttgaagctgacaaaattccaacatttcgtcaagaattagcttctctaataaatgaaacctgaaggcatcgacaaggctactggataatttattatatgatagaatcttaatactttcatgagacatgcatttttacgcagattgaattctttttgcaagggtttgagctgccaaattttgaaattttgttttttaattttctatgatcccttttgttctgc

SEQ ID NO: 41518 - DNA, 1715 bp, Glycine max
  Clone ID: PAT_MRT3847_137493C.1
ctctatcgcatcgctcggtaatcccaattctaaactcattcaaactatggcagcgtcttcgctctgtgcctctttcacctctccatttgcaacgtcgctaactggttcatcacgacccatcacacctacctccccattccactttaattcaaattgaacccgaaagccaacgacttcaagcttccctcggcagttctcaattcattcgaaccatgacatcggttttgctctggtcctctttcacctcgaaataatggaagcggtcccggttgctcacgttttttcttaagtcttgaagataacatatttcgtatttttggtggagatcgaattcagggcttaatgcgagctttcagagttgaagacctacctattgaatccaagatgttgaccaaagcattagacgaagcccaaaggaaagtggagaactatttctttgacattcggaagcaattgtttgagtatgatgaagtacttaacagccaaagagatcgagtttatacagagagaagacgagcccttgaatctgacaatcttcagtctcttcttattgaatatgctgaattgacaatggatgacattttagaagcaaacattggttctgatgctccaaaagacagctgggatcttgaaaaactaactgcaaaaattcagcaatattgctacttgttgaatactctatcccctgatttgctggggaacacatgttcagattatgaggaattgcggaattatctccgtcttcgtggtcgtgaagcctacctgcagaaaagggatattgtggagcaacaagcagcaggcttaatgaaagaagcagagcggttcctaatcttaagcaatatcgatcgcctgtggaaagaacatttgcaggcactaaaatttgttcagcaagccgtggggttacggggatatgcgcagcgggatcctcttattgagtataagcttgaaggctataaccttttcttggatatgatggcacaaataagaagaaatgtcatatattctgtatatcagtttcaacctgtgctggtagagcaagatcaggacaaaacagagaatcggaaatcaggaaaacgtaatgcacgaactcaggttaatccaaaccctgatccagttggcactgtcgagccttcaacgacaagtactacttcctaatatagcactcaagactaatatgtatctggagttccaacatattgaacgagaagtagaaagcttcagttgatcctccatgtttgttgcaatttattatagagattgcatatgatcaaatgttgtaaatatttacaaatgtatagcaagctgtaaaaagcttctgttaatcctccatgcatgtcgcaatttatggtaaaatagaaattatgatgctcaaaaaagtttaaaaaacgtggaacccgcacgcgcgctatgaccacaaaaccctagcacctccctattccgcctttcttcgcggagacctccagctccatccaccttcggtttccggaacgcggcggagaaagcgccgccgatcgggttcggtggcgtccctcggaggcttgttgggcggcatcttcaaaggcgccgatacgggagaagccacgaagcagcaatacgctgcgaccgttaacataatcaatggattggaaccggagatttctgctttgtcggattccgaactgagggacaggacttttgcgctgcgagaaccgcgcgcagcatggccagtctttgga

SEQ ID NO: 41519 - DNA, 863 bp, Glycine max
  unsure (1)..(863): unsure at all n locations
  Clone ID: PAT_MRT3847_137494C.1
ccttatcttatctctcgttatatccatctttacaactttcatttcatttccctatttcagacacagaaagaaactggtgtctccgtttgcagcgtcactacttgctacaacacgagccatgaaacccaccttcccaatccactccaattcaaatttctcactataaaccacttcttcaaacttccctccgcaattcttaattcattcgaaccatggcagcgtcctcgctctgttcctctttcacctccaaaacatggaacccgcaccggccgcactcatgctatcaccacaaaaccccaagccctccgtattccacctttcttcgcggcgacgttcagctccatccgccgtcggtttccggaacacggcggagaaggcgccgccgatcgggtgcggtggcgtccctcggaggcttgttgggcggcatcttcaaaggcgccgatacgggagaagccatgaagcagcaatacgctgcgaccgttaacataatcaatggattggaaccggagatttctgctttgtcggattcggaactgagggacaggacttttgcgctgcgagaacgcgcgcagcatggccagtctttggattcgctcttgccagaggcgtttgctgtggtgagagaagcttcgaagagggttctgggccttcgtcccttcgatgtccagctcataggaggcatggtccttcataagggagaaatagctgaaatgaggaccggagaagggaagacactggttgctgttttgccagcttatttaaatgcattgagtgngaagggagttcatgttgtaactgtcaatgattatctagctcggagggattgtgagtgggttggtcaggttcctcgcttttctggattg

SEQ ID NO: 41520 - DNA, 367 bp, Glycine max
  unsure (1)..(367): unsure at all n locations
  Clone ID: PAT_MRT3847_137495C.1
acgtgggactatcctcggtacctacatccacaccatccccatcgttggttcatgcacgtggaccatcctcggtacctacatccacaccttccccatccccggctatagccaacatgcctacagatgaagatgctacaaatttggcgatggaagaccacccccttaatgattgtccaatgattatgctaataaatggagcgttccatccatctaaggttccaacaaaggctgtctccttgtccattaggcaacaatttggtcagccttgacctacttgggagcaattccnaaagatcatcaggatctttttttcccatcgttttaaggtggttctatcagcttgcaagatcacgtcattcgttgtcag

SEQ ID NO: 41521 - DNA, 177 bp, Glycine max
  Clone ID: PAT_MRT3847_137496C.1
ctcgagtcggataagaccacagacaggtgcgagaagacaacacatagaccagcaccactgcttgtggacttatcgtcaaagaacactaaggtcttcagtcatgactcgagcgcttggagtgcatggatccaatccaacacaagctcgacaacgttggtgctgtcaagctgcatgacg

SEQ ID NO: 41522 - DNA, 153 bp, Glycine max
  Clone ID: PAT_MRT3847_137497C.1
tttttaaaacaaagatgtgtctgtgatatttaagtaaaactgactggtcaatgtgaacactaccgtgagaccagagtaaccgagttcaaaaactgacaatctttcaaaaggcgcatcttgtgtcataaccaacttcgaatgtattaatcctgt

SEQ ID NO: 41523 - DNA, 517 bp, Glycine max
  Clone ID: PAT_MRT3847_137498C.1
gggtttcttgggaacaagggggatggggaaactgactgtcccccagggcacttcccgaagggttaaaatactgccgcttcctatagggggaggagctggcgcaaagaatgctattctcatgactctgccaaatgctgatctttcaatgtggagatatgtcgttggagaactcgtctattaagtttataagatgacttctccctacataaaatgtacagtctctttcttaatggcattcggaaatttggttgatgacaccatcaatttagaggcttttacccacaagctggtgcactttggagagattcatgaaaaagttgtatcgaaatttacacaacaggaatttcttacacattggtcggctcaggggctttctgcaacaactctgatggctgatgggtgcccatctatgcatgctatggtgcacgatcgctcagtgtttacaataccaggagattctgtcattggggttaagctgacacccactaaccatatgtgtgcctatgggctcaatcct

SEQ ID NO: 41524 - DNA, 391 bp, Glycine max
  Clone ID: PAT_MRT3847_137499C.1
gaacaaagttaatagtgtcagcggcaacacctcacatttacgatggatctatgggacaaaccctgaccacttccacctatagaggttttactggctcatgtctgtgctgagtgcgttgtatttcttgcatttctaggcttgggctatctgatactcggattgagggtcaggatctacaaacacctgaaaaggatgatatatgccctataggctagctcccaaaaaggaatataaataacgccttgatgacaatgactaatgccactaatcacaacatatattcatgtgccttaacatcatgcttggtaggttggtttgatctcaaaacaatgtgaattctttttgggcgggctgcctactatactctattcgacccgagaattaattgctg

SEQ ID NO: 41525 - DNA, 577 bp, Glycine max
  Clone ID: PAT_MRT3847_13749C.1
attccttaacccttttaaccaaaaaagggtaaagaataaaaaaattctatattctatttataggaattccattttctatttttagaaaaaatttacaaaatttatagaaaataaataaaattcaatttggtataaatccccaaaataaatccccaaaaccaaattaaaaaattaaaaaaaagaattggccaattcctttaaaattctaaattccttctttaagaaaaaagatagattccaatagaataaatagagaatttaagcgggtagcgggaatccaacccccatcgttagcttggaaagctaggggttataatccaccgtgattcatcattttgatttcaatttaaccgctctaattcaaaacccaaccggaaacttttgtttcattcggctcctttaccgaaaaaattaagagatgggaaatcaaaaaattggcccctaacatctatgtcagcccttttggtttggatgaataagtttaaaacatcttgctttttaaaagaaccccctaaaagaaccgcattataaaaatccatggtttttttctaagtacctcggtctctatttctattta

SEQ ID NO: 41526 - DNA, 146 bp, Glycine max
  Clone ID: PAT_MRT3847_1374C.1
ttgagggaaaggtgtatttaatcacccttcgacccaaaacaggcaatcaattaatctaaccgcatgtactcctccacacaaaaacactggcctttaacgccctacaatactccaatcgaacaaccacaaactcatcaaaggtcagc

SEQ ID NO: 41527 - DNA, 545 bp, Glycine max
  Clone ID: PAT_MRT3847_137500C.1
aaaaataacttgtttatcacagaacgtatttattcacataagtcattttttattcgttacaaatcgagtgattataattattgttaataaaaaagataacatgctatgctaacaatgacaacaacacactgaaacttgtgtttggtacaacgttgaccctaagcaccgatcatgtaaatgaaatctttcactaaagcaatgagttgcttcgctttcagtggatcgaaaatttctatcccatggaacccttcttcttcaaagtccttcatcacttgcaaccccttttcttccatcaaccgtgccagctcctttccacgatccaccaatgggtccccaccattgccactcaccaataccctccaccaatgctccctcatcttatccaataatttctcaaccccattctctgccgttggattgcaatattcatggtcacgatcaacaccaattggtagagccaattcccacataaaatcggtaacacacaatggaagaatcgggttattctcaagccttaactctgactcgtttctcttagttccacc

SEQ ID NO: 41528 - DNA, 479 bp, Glycine max
  unsure (1)..(479): unsure at all n locations
  Clone ID: PAT_MRT3847_137501C.1
tagcccgtgctcttaaagctgcttgctacatccttgatagagctgccgaatcacggcctctccctttgggccaagcatgcgtcacgatccactggcctcacacgacctcgctacctctcactctacaaatcctgctgcttatgctctacaaccacagcatcgtgccttacttacataacctggacctaaggctaattcttaagaccttcttcccagcgactatctaaccagagttctggtgctgacggcgcttattcatgtcactctnatctactaacccatgcttactcaccctctcaatcctggagctacctcattacaattattgcagcctatgcttcagaaccttggtggccatcattcacatccactgagattgatcacgataccatgcagctgacttcttgtgctgtgatactgttactgctggaacatgctgatggcatacatatctgctgcagtatggctacacccgatgc

SEQ ID NO: 41529 - DNA, 420 bp, Glycine max
  Clone ID: PAT_MRT3847_137502C.1
cggacgcgtgggcggacgcgtgggcggtacgcgtgaccaacgtacgcgttccacacaaggatattatattattcagatggaacaatactaataataatgtataaaatactatttcaagacacaagcaccaacatcaatacatctaattcagagactttcagttttcacccatcatttctcatctccaacatcttcactcattaccgagatacagacccttactcaaaaccctttaacataataaatctgaaacctcatgcattggatttaaatacgtataatggaactatcttgcctcgattagcaatatgatacttgataactatcatggaccaactgaggaaactggttagtgctgttcactccacatatttccatcttgggttgatctgataatgccattgataaatattgaaaact

SEQ ID NO: 41530 - DNA, 653 bp, Glycine max
  Clone ID: PAT_MRT3847_137503C.1
aattcgcggccgcagaaattttttttttttttttttttaaaaatgaaatatagcctttttttttattaacttccatttcatttctacacgtctgaaggattgtacaagcaagaatgtccacttgcatgtgctggtagcacatagtggaaacaaattgatcttttaaactttgaaaaattaaagtaaaagagcagatgaagtgtgatctcatgtcttgtatagctgctgagttaaaacatccaaaactgaagtcaaaggggccatgctggttggaagaaagaaactcctccatacccttctttcttatactttcctagctcttttgcctcggatgcccttgctctctgcattgtttccaaagcatctgtctcggaattgaagtcataaaaggtacttgctgcagtaagcttcaaagaaaggaactctacttgatgctgcaaggactgcacatagtttatgatttcatccaacattactgccatacccatggtcttgtaacatcctggaacaatgttctgtaagcaccttaatttctcattgattttccctcttctaaccctttctgctaaactgtgactatcagtagcttgacctcttctggctctgacatgaaccacttcccttgctttctcctcttctgttacattgctttt

SEQ ID NO: 41531 - DNA, 416 bp, Glycine max
  Clone ID: PAT_MRT3847_137504C.1
aattattaataacccagtgtacaggatgaaagctttattcggagcattgacatttttactgcacctgcttactcacccaatgaccatactgttaaaacaacgcctaaaacataatgtttagtgcaaacactaatcttccttgtgcacaatcttaaatctttttgtgaaacaaactgatccaactgtgggattgtttttgcccctcgattaaaacgctgttactatcccgctgtctcattggtactgtacccgccagccttctgtattgaaacatgagcataaaagttatgcatggtcacgcgaggccagggcaggctcatcgtccttggatatcacgcaagggttgcctatcttgacccctttgaccgttactacgcccatttgcgtcatggcgaacctacttcccagaagagagc

SEQ ID NO: 41532 - DNA, 283 bp, Glycine max
  Clone ID: PAT_MRT3847_137505C.1
ctaacatgatggtcacgtcatgttgagttatgtgcttgtgtttgctactacttcacattttcctgcgctttgtgccaatacagtcagcacctgaaagtgccattgtgacacagattcctggcttcagtggcactctaccttccaagcactatgctgggtatctgacgctggataagagtcatgggaggaccttgtactactattttcttgaatcagagggtataccttccgaggagcctgtgggtctgtgagctaatgggggacctggctgctctagcttcga

SEQ ID NO: 41533 - DNA, 525 bp, Glycine max
  unsure (1)..(525): unsure at all n locations
  Clone ID: PAT_MRT3847_137506C.1
gaaggtttcccgtcatcactgtatgacgtcctccttctttggggggggggggggggggaacaaagggccgagggcgaacttgggaggatagagcgtagtgagatagggtaatagaatcgagtaacaggggtgccaggtggatagagaaaccctggggcataggcgggggaaaagagcggcgtcgttgtgattagccagtaccaaaatgcagtggcggcaaggctggcttacgaacattagcccagcattgaagccaaaaggggtggggtgtaaggtgcacgtggtagccggctgggagtaaaattaagccggccaaaggcggggctagatgttgtaatagtaacgtccactgggctgagtgttcagcaaaccgacaacagcatgtaagcggccgttacaacgttggtactgggcggttgggctgtgtgtttggaagtggtatcntgagtggtatgctggtagtaaaaaatgtgcgtgattggcataaaagttgttgaataaagttgtgcaacgaacactacccgg

SEQ ID NO: 41534 - DNA, 248 bp, Glycine max
  Clone ID: PAT_MRT3847_137507C.1
ttcacttatgtgtgggcttttaaaatcaaggcataactatattagatggggatttttatttgttcttgaaaggctgcttatgagatgcaaatttttgttagatgaatatgaaatgcaacaatcaaggagcagtgatcttgggagtgggctgaaagattggcatcttgagaaagcccatgcattgattgacataatgagcagtgctatgttgtttcagataaatgaaaaagattgcaccaataagtatg

SEQ ID NO: 41535 - DNA, 779 bp, Glycine max
  Clone ID: PAT_MRT3847_137508C.1
taataagaagaaggttgttggaaatgggaatgggaatgggtttgggaaagtggtgagggctttgcagcaatcaatggtggtggagggtgagaagagaagagcttcttttgatgggttaggagggttgagtttggatttggggaaagctgagttgctgaagggtaatattaatgctaataatcataataagtcttcattggctgctgatctcactgcttctgatactgatagtgtttcctctgggagcacgtcaggagcacatgactcttctggggctgccaagggcactaaggagcctcgtggcattgttgtgtctgccaggttttggcaggaaactaacagcaggctgcgccgccttcaggatcccggttcgcccttgtcgaccagccctgcttctaggattggggtgccaaacaggaatgctcagttgaaaaggtataatagtgatggtcccatgttgtcgccgcgaaccatggcttctcctgtcagggggaatgtgaatgctcgacctgcttcgccgagtaagctttgggcgggatcatccccctctaggggagttagtcctgctagggtgaggagcacggttgccagttctatcaatagtggttcaagtaacacaccctcgattcttagcttctctgctgatgtgcgaagagggaagattggggaagatcggatatttgatgcgcatacattgaggcttctgtataaccggtatgtgcacgggcggttagtgaatgcaagggcagatgctacatttatggtgcagaaactgaatg

SEQ ID NO: 41536 - DNA, 284 bp, Glycine max
  Clone ID: PAT_MRT3847_137509C.1
ttttactatatttctttttttctttttttttcttttttactattccatattgactcctagggggtcatattaactcaataccccataaccccacaatttacattctctccttcacatatgacacataaaaatagcacccttaaaaaactgacatgaaaaatataaagggcatcgacataagtagaacaactctggactaaaacgacccccattaaatcatatatctcaaattgattaatcttacaacctaaccaccaaaataatccaacccaaccaagatgctt

SEQ ID NO: 41537 - DNA, 408 bp, Glycine max
  Clone ID: PAT_MRT3847_13750C.1
cgttatgggaaacccttaccctccaattcctttcaatttcttcttttcaacttttaaaaaaattgacatgaagaatgagtgaaatcctgttaaaaaatggttagccacaacagtcagcagaattcacatcatcttgtaagaagcatagatccttctaaagaacaaatgagtctcatttatgtcctttaggttaatggaaaatgataaaccaagaaagtgagaaaatatttgatagagatcagaaaattggttgggagtttaacatctgataagtgttactacaagacctctgagaggttcaaatatttatacacagattccattactttagatctaacagaattgtaactgactttcaactgtctataacagactctaaccaactctaacagctaactaactcaatta

SEQ ID NO: 41538 - DNA, 499 bp, Glycine max
  Clone ID: PAT_MRT3847_137510C.1
gtttctgatccgcatggccgtccaaagaggggcgattggaaaaacactggggcgacggtgcaaatgaccgctgcgctaattgtatctggcgacaacaggctgactgagaaaacaagtaccacttgcagagatgaggacatccagggtgatgattatacaatggcaactgaatatagaaaatgtgtatcggatgacattaggtggcatctgactacctcgttgatgtacattcttgcatcttttctcactgctggaattaaatatagagcggaatgtgaggaatattcacattgccggcttattttacgacggcagatacaaatattggactaaacacgagaaaaatcttgctttgacagaagaggaaaagatggaagtgattagaaatagaggcactcctgctgatgttcttgcaaagcgagctcatgaatttgaaaaacatgttgctcatgaaagccagaaggatcaaattcctgctgatgacaagttgccttctact

SEQ ID NO: 41539 - DNA, 182 bp, Glycine max
  Clone ID: PAT_MRT3847_137511C.1
ggttgttcttttattgtagggtgtatgcactatgtcaaatggggtaaagcgtctgcctattgcgctgcgtcaataccttaaggggggcactccatcaatgccgtacctcaaatgggattgacctcaggaaggctgtgtgtttttaacatccatcgctaactttaaaacggcattccctaaaa

SEQ ID NO: 41540 - DNA, 669 bp, Glycine max
  Clone ID: PAT_MRT3847_137512C.1
cgagagcaactccatcgatgttaaattatctaaaaataccattgaaactggagatgattgtgtttccatgattcaaggagtcaacaatattactatcaacaaactgaaatgtggccctggacacggtattagtattggaagtcttggaaagtatgcggatgagcaagaagtgaaagacattcgcgtcaagaactgcacgatggttggcacaaccaatggcctcagaatcaagacatggccagataagtatccaggttcagcatcagctatcaccttcagtgacattgtcatggaaaatgttaaaaatcctatcatcattgaccaagagtatgattgcgaaccagcaaactgccaaaagaagccttcacttgtaaagataaaagatgttgttttttcaaacataaggggaaccacaatttcaccaattgcagtggatttaaggtgtagcaagcagttcccatgccaagatgtttaacttaagaacataaacctgaaccttggacccaagccgctgggtttcagatgtaccaatattaaaccagactatggggggtgtcaaagaccagcagttagcctataaatcttgacattcaagcattttgcagttcttgcaataaggagggaagggcaagtaatggttttgacaatcaaaccaaatgagggaaacat

SEQ ID NO: 41541 - DNA, 960 bp, Glycine max
  Clone ID: PAT_MRT3847_137513C.1
cggtccggattcccgggtcgacccacgcgtccgcccacgcgtgccgataaatactgccgtgtcacaatctgctaggcaaacaaattccaaaggaaaccagtgttatctggtctcaaccagtataggtgacatttttcctttggtaagtttaaactttgagggtggagcatcaatggttttaaaaccagagcagtaccttatgcataatggttaccttgatggtgcagaaatgtggtgcatcggtttccagaaatttcaggagggagcctcaattttaggagatcttgtcctaaaagataagatagttgtgtatgacatagctcaacaacgaattggatgggctaactatgactgttctttgtctgtaaatgtttcggtgactacaagtaaggacgagtacatcaatgcggggcagcttcatgtcagcagctccgaaatacacattctttctaagttactacctgtaagctttgtggctctctctatgtacataatgttggtatgaaaatttttatgtgaagtgttgggaatcaaagtcatcagtcaagataatgtaaaaataagttttcaacattaatcatgggaagaaagatcaagtgagaagacaaagatttatgttccaagtagcttggaagaaatgcagatttggatagaagctttgacaattggagatttcgatgaaaggttgagaagggaaaattttgacaaaattctgataagtggaaatttcgatggaagttcaaagaatgattagttgaaatatcatgattgtaagtacccaatttttgactgggtaaaaaggggatgataaacaaaagttgattaaaaaaactagttattattaaaatttctgaagtttgaataaagaattatattatgaaacttcatgtttgtaagtacccaattttgaccgggtaaaaggggtggggtgtggtaaacaagggttgagttaaaaaaaaa

SEQ ID NO: 41542 - DNA, 390 bp, Glycine max
  Clone ID: PAT_MRT3847_137514C.1
tttttggttttttttttttttttttttttttgagcaaaatataactcatctaaataaatttcatgggaccttgtcaacaatattgctataaattatttactttccttcgtaaaagttacaactcaaatacaattaacaaaatggaaaacgcccctgcggtaaacgagtttgcctaaacaattttcattgcaaagtttcctatacccccatatcccaaaaaaatctgacaaataattttcttatgaaactcttatatggcataacctgtatacaggttcaattccaaggaaataaaaacagggcttcatcacaagcaccggcgcttcacataaaagagatgtacatatttgctgaggagaccccccaacctgacaattagaataaaatttt

SEQ ID NO: 41543 - DNA, 710 bp, Glycine max
  unsure (1)..(710): unsure at all n locations
  Clone ID: PAT_MRT3847_137515C.1
gaaagctgtgagcaactggagctaagctcaaattccaataatatcgaatccttggggaaggcaataatggatgcttctgctgtaaacccgtcactggaaatgtggctgaaagattctgtgcttgcattatatccagatactaaagattgttctccagctctagccaatttctttaatgctcagcagcttttttctggaagcaagaattctaaaggagctcaacaaatgttgcccactatatgtcatagacctctatcctcatctggttccttagaacgtagagatgttgaggaatctcgctcatacatgagctcttctcctaatctagggtttgctgtcaagcagctgacacctactgatttgaggagttcattgctatctggaagaaatgaaacaggaagcaatcctgttgagtctcctgttcaggtgaaaaggaaccttggtagtcatcgcaattcaggaatttggcatagttacttccctcaaggacacatatttgaaagaataacatacttaaccgtattgggttgtattgcatttgctagcattaagttgtcgggaattggtcttagcaggactcttactggttctcattgggcttntactaaagctaatgataacattgcttggactgcagattcagttgattaccctgtagtcccagcttatattaggcanagtaccatggccaacaaagtgaagaggatcct

SEQ ID NO: 41544 - DNA, 336 bp, Glycine max
  unsure (1)..(336): unsure at all n locations
  Clone ID: PAT_MRT3847_137516C.1
ggggcgttgctaatagctttagtatgctccaccctacattacnatatttttatattcatggtgtacttaaaacgtaacttcttatttatctcatataatagtggcataagagttttgataccctccaatgcactcttagttggttttaggttaataacctcatccgcccattcactgggagcaagctataaaactagacctgtgtccgtttgatttaaaataggaatgatcatatggctttctatctctaaagcccatgttatagtctcccttttatactcttgtgtcactaggtgaccctttgaaaagttttgccattgtaactttggaccggtt

SEQ ID NO: 41545 - DNA, 597 bp, Glycine max
  Clone ID: PAT_MRT3847_137517C.1
gggttgttttttctttttattatatttattttctaaaacaacacatgtgagcacccctttttgggactgggccgccctggggaaggggttttaagagttccctccctgaaaatgaaccagcaggatttgttgacttaaacataaaccgtgacttcaactccttttcccggataagggatttttgccccaaccctatccggtaagaacccaggggttttccaataaagaaacttcttcatagaaacaaatagatggaaaaatttggggagttttattttttttcctgggaacggtagctcgcttagacacctggagaaaaaatctctgggttctatttttttataaaaaaaagccatcccgctctttttaaaagtcgacctgaaaacacaaaggtgcaataattgttggggtgccttctcccgggcttgaaaaacgtcccttaagacaaggctcctgttagagaacccttgggaagaatgaactctcccaaacattgggctaggggaacagttttcctcacctggggtgtggggccccaacaaacgatcgaaacactgccttttggtataagcctcttggtataaaaaaaaagaattt

SEQ ID NO: 41546 - DNA, 787 bp, Glycine max
  Clone ID: PAT_MRT3847_137518C.1
aatgcccgctaacacacctgacaccagaccatgatacccactgacaagaaaagtacacctaatcaaccacgcacaaccataagcctctctcacttctcttgttaaatcaattggaatcagattctttcttctgttctctccgtttcagttgctatggataataagaagagaggggcgagggagggtgaagatgaagatgagatgaagatggagaagttttacgcgctgttgaggaacttccgcgacgcccgtgatcgccggcgaagggagttggtggagttggaaaaacacgagagcaacatctggaagaagatgatgaagggcaccgccccaactgcaacgaaggacaataaggcagaagtttctttcgaatttcaggactttaccaccgagattcaattcagaaagccacctttggtttttcctaatccagtttcatcatgtgacactagcaaagacaacaataaaggtaacaagaagaagaaacagcaggatcttgctctcgatctcaaactcgctctctagtgatgatcaccaatatcgaccttcaattgtatcagagttttctcaaatggccgcttatatatattattattcctgtgctaattaacgtcgtgtatatgatgcaatttacttcacaaatatctatcatctatgaagttctttatgtgttcccgtcataaaaaaaaagttctttaatgcatgattcgaccgtggtttatgacgaaaaaaaaaaaaaagttttaatgacagaggagagagtggagaagaagaagagggggaaacc

SEQ ID NO: 41547 - DNA, 696 bp, Glycine max
  Clone ID: PAT_MRT3847_137519C.1
ccgggactctgcaaaccaaagcaagaaggaacattgtaatcgtaagctccgaagcttcatgatattccaacaaccttcaaagacagagaagaaagaagaaaacaacctcaacaaacaaacatcaatggcaaacacgtattcgtggctcttcctcgcgatttgtgccaccctcttgcttcttctgtcttcgtcgccgacagcggacgcgggagcgctgggcatggaaatgacatggataccctccatgcccatggaagaggagttccagctggacagcgagatcagccggcgcatcttagccacgaccaagtacatcagctacggtgcgctgcagaggaacactgtcccctgctctcgccgcggagcctcctactacaattgccagcctggcgcccaggccaacccttacagccgtggctgcagtgccatcaccaggtgcaggagctaaatttattattttctattttttttttttaaattttcatattcgggtttcattgtatacatgaccaagattcaatgtttatgtattattgtcctgttgccgataaataattgtcgaattaatgacagtgattcatcattttatttcttattttggctttttaaaataaggaggtgtacttagaataaagtgcacttatattgttgattttctgaacaactgcccatgcacccaacaaaatcttttgttct

SEQ ID NO: 41548 - DNA, 284 bp, Glycine max
  Clone ID: PAT_MRT3847_13751C.1
ggttaaaagacagaagataagtagaacataggattggttgcccatttttcctacttattgtaaatggtgtatcttttatttttttatatacttagttgtactctttttatagctcagtctgtttcatgccaatattctcatatttattgtttgcttacaagacataggttgaaattctgaatgattcaaactgtttgaatctcattttaaattcataattaattagtgtgtgttctgtaacattcattaactactggtcttctttgcaatgtgatatacttaaa

SEQ ID NO: 41549 - DNA, 349 bp, Glycine max
  Clone ID: PAT_MRT3847_137520C.1
tccatcactcactgcatacatatcacctccacaaggctcactcagcgacgcgccgttctcgacacaggctctaagacgcccgctgcaaacccctggcgccctcgaaacttccaataatcgcttccgccgcctcggcagtcgacccccctccctcttcccgtcgtatcacacaacacccaacatggccttcgccccgccccttccgcgcctcggcgcccctctacgcctgcccaagctcctcgcgagcctgcccaacctcggcgagctgtccgtcgtcaagccgtcaaattgccgcaacccgtctcgtgtcttcctgatcacgcgctcgaaaatccggtacactgcacgc

SEQ ID NO: 41550 - DNA, 600 bp, Glycine max
  Clone ID: PAT_MRT3847_137521C.1
gagagagagtaaaaaggaaaaaagcatcgcgtttggtccgtgtggtctttctggtagattcgacgaaacgcgaggctatttcggtatttcccaatttcctatctccttaatcctcaaacaccaaacaacaaacaaatggagcaagcaacactagcattgtgttctgctcactgaaactaaaaccaaaatcacaatccccaaagcaaaaacccaaatcccaaatgagattatgacaacaacacatgagcgcgtgcatccaatcccaaacctagctatgtctcccaccacttcctcctccaccgcccactggacctccgacgccatacacggcggatccctccgccgcgtcgacctcgactccggcaccaacggctgggcctctcctcccggcgaccttttcctcctccgctcttccaattacttcacaaaacgccaaaaatcccccgccggcgactacctcctctccccggccggcatggactggctgaaatcccaatccaagctcgagaacgtgctctcccgggccgacaaccgcgtgggccaggcccttcgccaggcccaagcacaaggaaaatcccttgaaagcttcatcttcgcagt

SEQ ID NO: 41551 - DNA, 622 bp, Glycine max
  unsure (1)..(622): unsure at all n locations
  Clone ID: PAT_MRT3847_137522C.1
gaaaggattgtcacatgcacttccctttactaacgtttcaacactagatcagctggaagatgttaaaagggtgttgtcatagtgtatatattgatagaaaaaagaagaagaaggaagtataatagaaaggaaaaggaagggaggggggaaataaataaagaaagatgcaagagttgatatacaaagttggtgagggtgactaaatcagattcttgagtgtgtgattgggtcttttggaaggcatgattcgttcattcattcagtgagcattacttgtttatgtaaagctttttagatttggcctgggactcaaaatcacacattattgcaaatatttttcagtttgaaggtattcattattggttgtattagtgtaaatatttatagcaaacactaaagtacaataggaaggaaaaggaaggaaggagaaaaaagcaagaaagatgcaggagttgatatacaaagttggtgaggatgacaaaatgagattcttgagtgtgtgattgggtcttttggaaggcatgattcgttcattcattnnagtgagcattacttgtttatgtgaagcttttttagatttgaccagggactcaannnnncacattattgaaaatattatttt

SEQ ID NO: 41552 - DNA, 436 bp, Glycine max
  Clone ID: PAT_MRT3847_137523C.1
acggctgcgagaagacgacagaagggggggggatcattgaaatttgttgatctttctgctaacaacttctcaagtggaattgaggaaattggtggagggcaatgtggtattcagtttctgaatttgtctcataaccttctgaaaggtaggttaccaaattcaattggaaaacagaattcacttaaaagtttggatttgagcttcaatgaattaggctccaacttgccagaggtgctgggaaatttaacctcattggagagattgaagctgcagcaaaatcacttcactggcaaaattccaaatgaatttctcaagttgttaaagctgaaggaattaaacttatctaacaatcttcttgaaggggaaattccagagagaaaaccttttgattgactttcctgagagttcatattctggaaataaagggttatgtgga

SEQ ID NO: 41553 - DNA, 315 bp, Glycine max
  Clone ID: PAT_MRT3847_137524C.1
tccgggtttactccccttttttttcatttataaaaaaaaaaaacaactcgttttttctgtaactttataggctgctttaccatttaatttgctggcaccctcttcttcacgctatctaaaaaccatgctaacaaacgcttcattctctgtttatacttttttatagtaagatcacaacatattttactcccctttaattcccaacccacttactccataaacaacaccaccacctacatatacacccttacataatattctacatattccacttttctttttttcgaacaaaaaccttctaattttcccatctaa

SEQ ID NO: 41554 - DNA, 710 bp, Glycine max
  Clone ID: PAT_MRT3847_137525C.1
ccacgcgtccgcccgaaaataagagagaccagtcagtagggagacgtccgcgaggttgaagagtgttgtattgtgtcgtggcacagaaaaacgaagctcagaaaaagagagagagagagagagattgaagaagcgattttttttatgtgaaattgaagagtgaatgaaaaatctcaatcccatccatggatgagcaattgaatttgagctgaatcggcgtcgtttcgatttcactcggtcacactactgtttctctgagcctgactcggtcagattcttgtaaacgcttcttctccgcaaaccctagatattggagattgatgtgatgacctcttcacctacctatctgcatgcagtgctgaattgatacctcttgtttttatctcatgctattttagttgtgtaacatctaacagtgcctgtttaatttgttacaccttgctgaataataagcagatcaatatactcaaatttaaagttttgcgatattaattagcattgaatgagagcatttgtcaattacattatcagtggagttgaaaggaacattttggttcggggaaaaagcatctttgtaaagtttttggatgtactttctagttgggtttgagaaaaggggaaatgctaccaacctgggagtattataacatttgatttcactactccagtatgcgatctattttttttcagtggtgcatttaataataaca

SEQ ID NO: 41555 - DNA, 775 bp, Glycine max
  unsure (1)..(775): unsure at all n locations
  Clone ID: PAT_MRT3847_137526C.1
gggggagattnctctcgaccatttctcttctcgcgtctcactctcccaccgattcagtttcggacactcactcccactcgctccgattaccgcaccattctgcgtcgccatttagggtttcttcgctcctctttgttggatcttcctcactttgcatcgttctcttcgattcgtaaaatttttcttgcttctcctgtcttggctcgagatccgggccaagcacagaagaatccgtttctgatttgcattttgtactcactggtttggcttgtttttttctctttgtataaatggcttcgagcgaggggtttctgaccgatggccagagggaactgctaaaaattgcaagtcaaaatgcggagaatctgtcttcgtcgccgaagtctcagtcgtccttgctgtctgaccatcatgtgaaagcccctgctggtggtaaggcacaaaccgctggaatagctgtgaggcatgtgcgtcggtcacactcgggaaagtatgggaaggtgaagaaggatggtgctggtggtaagggtacttggggaaaattgcttgatacagatattgtttctcacatagaccggcatgatccaaattatgacagtggcgaggaaccctatcagctggttggaactactgtcactgaccccttggatgaattcaagaaagcagtggtatccatcatagaggaatatttcagtaatggagatgtggaattggcttcatctgacctcaaagaacttggctcatgtgaatactatccttacttcattaagcgcct

SEQ ID NO: 41556 - DNA, 471 bp, Glycine max
  Clone ID: PAT_MRT3847_137527C.1
gctttggtgagggatccaacacccatcagcgtaatacttctccaactccacttatctgtgcggggcccccaactcaacatgctgttgttagtctttcttccttcctcatttgctacgaatacttttcatgtcttcatctttcatctagttttcttgtctttcctgttacgttgttttaggtctcaacacctcaaagcaaagtaggtagaagaaactggaccttggtttaattaaacttggcttctgcaagaagatttgttccttcattttttgtagcatactagaaacactgaatgagactgatggttacttagttgttcaactccttgttcagcttctgatttctcttctcttctcgtccagtttcattttccctaaaccaaaggcgtttaaaatatgattttttgtgaaaagatgaaacagtgtgcatgttggtaacttgaatttagaagttatcaacagagattttga

SEQ ID NO: 41557 - DNA, 530 bp, Glycine max
  Clone ID: PAT_MRT3847_137528C.1
gagtatgttaaagtcaattagcttggcatggcctgctttcaaagctttaaaccagaaggaccactagaggttttgctggatttgggtctaagcgtaagccaaccagaaaggatctagacaaatacgacattgttgtcgttggtggtaacctcagatccatcttctccagacatcttgatgacgatgctcacggaaagtactccatgatggttgtcttaaatgagccagttaaccagttatggcctttgagaactgtctatgaacagcagagatgttccaaaactgattatatgatgaacgctaagcatgggattaatatgtacaccgcttatgaaatcaccacagttgacaaattcctttctgaagagaacgctattgttcttaagaacggaagaaagattcaatatgagcaacttgtcgattctatgggtcttaatgaagacttcgacgccattcctggacttgaggatgcctttgcagatgttgaccacccagtcgtctgatctaaagatcactcttcatggagatct

SEQ ID NO: 41558 - DNA, 271 bp, Glycine max
  Clone ID: PAT_MRT3847_137529C.1
gcccattctggtggttacttttccgaataccattgtgcacattgaggcatacatgaagggaagggtggagcttttgagtaccactaccaatggtgaatttgttcaagggaaagatctcaacatgggacatgttaatgtaccatctgctgctgaagccttacatccagttacacttcaactccattagtggatatctggtttgaaaaagacagagggataattgaggagtatcttggaaggatctctatcgttcattatatcgttgagtaca

SEQ ID NO: 41559 - DNA, 682 bp, Glycine max
  unsure (1)..(682): unsure at all n locations
  Clone ID: PAT_MRT3847_13752C.1
ccgagcgtccgctatgccgttaacttcttgaggtaaattcgtctcacaaataaaggagatggattataagtggcgaaacgtcttatagatgtatattttgcattgtttaaggttttaatttctggcacaagcagcaaccaaaaatttgataaaagcagcaaggcaaatcgaaaagaagaaaaatcaagagagtcatcagaatcacatgtggaattggactctcgtcttctatcatctctcctaactggagtgaatagagcatttccttttgtctcaagtaatgaagctgatgacattgttgacattcaaacaccagtacttttccaattggttcattcaaagaatttcaatgttggagttcaagcactgatgcttcttgataaaatttcatccaaaaatcagatagccagtgatcggttttaccgtgctttgtactctaaacttttgcttccggctgccatgtatacatccaaggcagaaatgtttattgcacttcttctcagagcaatgaaaagggatgttaatttaaggcgtgtagctgcattttctaaacgtctattgcagatcgcacttcagcagccaccacaatatgcttgcgcatggtcttttccttctttctgaactccttaaagccagaccacctttatggaaccctggtgttgcagacgnagtctgttgatga

SEQ ID NO: 41560 - DNA, 268 bp, Glycine max
  Clone ID: PAT_MRT3847_137530C.1
aaaaccaattagaatgacgtttagattacaaagcaaaaaagaaatggaacaaaagcgaagggacaagcaagaaggaagcaagagctgatggacgagatcacgagaagaaggacccgcgagaatgcaggttgaacatatcaggcggtggggtcaagagcgagaccgccctagacccgggagttaccattgagggtagccgaagaccggatgaccaaagcgctgggccctggaagaagatagagtgtgctgtagaatgcaaccggcgagc

SEQ ID NO: 41561 - DNA, 420 bp, Glycine max
  unsure (1)..(420): unsure at all n locations
  Clone ID: PAT_MRT3847_137531C.1
gatctcggatttcccccaatgaccattgagcattttgatagataacttctgcacaatgtagagtgagtatacagagagggaaaaggattgcacgtatcatgcagacaactgcttcattaaaatgagtggctaatggttagatctaatgaacccaaatatatgtcatccccagagcactaggaattggaaaaggattgtgggggaatttcttttggaaaaggaaaatcttcaagtgagagaatgcttcaagtcggaacacaaatgtaaagcccattaagatgtgcatagcacctagtctgcctttggcattattcaggtctgncgcgtttggcattattctgttctgtcacggtaccacaactccaatatctgagattaggacctcaaccgatccgaaccagcctccttaaccttttccct

SEQ ID NO: 41562 - DNA, 238 bp, Glycine max
  Clone ID: PAT_MRT3847_137532C.1
atcttgttgtgtgtctccgtgatgctctagaggctgacaagtcacggtcgaattcgacaacggaatgcccaagcagcagccctttctgtgagcggacgagaccgctgagcgcgttgttgaaaaagtggaggggaacgctgacgtagaactcgtaactaccatatggacaggttgtttgtacacatgtactgcttctaaacagctagacgacgtcgattgatgatgctgagatacagat

SEQ ID NO: 41563 - DNA, 373 bp, Glycine max
  Clone ID: PAT_MRT3847_137533C.1
ggccaaattcaaatttttttaaatcttatttttaaaaattcacggcccggttatccttacaggggggctatataaagggggggggccagttttttattgggggtagggcccctggatagaaaagaaaaaaaaaactttactaggggttttactaggtacaaacccttaagcctttacaaacagggaaacattgggaactttattttaacatttgggggacttaaagcgaaaaaggggggggccctagcagggaatatccaaaaaaataaaccatttacttgggaaaactttaaagcatttgcattgggaacacgggcaaagattgggggttttccaaaaagactaaagggggaagggatccccgttttaaaaa

SEQ ID NO: 41564 - DNA, 2723 bp, Glycine max
  Clone ID: PAT_MRT3847_137534C.1
gaagagcgtccgcccacgcgtccggaaagagagagaagaacaaattcaacactcagacacacacaaagtgactcttccgatgatgttaatcggcgacggtgccggttgccggaaagtcctcgtcggcgttaaattagatcctcgcagccgcgaattgctgacgtgggctctcgtcaaggtcgccgagcccggcgacctcgtcattgcgcttcacgtcctcgactccatcactgagggaacggcatcgctgttatctcttgtgaagacgttcgattccgttctcggcgtctacgaaggcttctgcaacctgaaacaggttggtctgaggcttaaagtgtgtcgcggaggttcggtaaggaaggcgttggtgcaagaggcaaaggcgtttggcgtttccaccgtgattttgggaacttcgaaatcttatcatactattcgttcttccgcgtgggttgcaaaatactgcgcaaagaaattgccgaagtgtatctctgttttctccgttgataatggcaaaatcgcgttccggagagaagctaatggaaattgcagtgatcgagagaaattgtgtgaagggtcaagtttgtcgtcaaaatcgttggtggtttacacaaataagaatatgaagagttgtggaagttgtgcattgcaagagggttctggaactgagtttgagcaagggttgtgtgaggatgttgagaaggagaatccgcttgctttggttccgtttaagaagcttgaagatgctccttgtttttcggttgtggtggataattcgaagcctaaacctggttggtcactgcttcgccatgtgtttcatcacaagaagcataaccataagtcttcttctatgaagaatacatttgtttttcaacgggcgttgcggcagccgaattgtcattcttctgctgtggtccatccagatcataaacaaattagttttaagcagattgatgattcccctcttgatggggtgagtggtgccattgtgccatttgaatctgctacaactactctctttactcttccctccatttgcagtggtttgagtagccttcccgaagaattgttggtattacaagaaaagtacacgtcctcgtgccgattatatagtttgcaggaacttttatctgcgacctccaactttgtatctgataatttgattggcaaaggtggctgtagttatgtttacagaggatgtcttccagatggcgaggaattggcggtgaaaattttgaagccatctgaaaacgtgataaaggagtttgttcaggaaattgagatcattacaactttgcgccacaagaacataatatctatatctggcttttgtttagagggcaaccatttgctactagtgtatgattttttatcaagaggaagcctggaagaaaaccttcatggcaacaaggtggactgtagtgcatttggttggcaagaaaggtacaaggtggccgtgggtgtagctgaggcactggattatctgcataatggctgtgctcaggctgtgatccatagggatgtgaaatcttctaatatccttctttcagatgattttgagcctcagctttcagattttggactggctagttggggttcatcttcttcccatattacttgtactgatgtggccggaacttttggatacctcgcacctgagtactttatgcacggtagagtgactgataaaattgacgtatatgcttttggtgttgtactccttgagcttctctcaaataggaagcccattaacaatgaatgcccaaagggccaggggagccttgttatgtgggcaataccaattttggaaggtgggaagttttcccagttgcttgatccaagcctaggcagtgaatatgacgattgccagatcaggagaatgattttggccgctactctctgcattagacgggttcctaggttgcgacctcaaatcagccttatattgaaacttctgcatggtgatgaagaggtgataagatgggcagaacaagaagttaatgctccacaggaacttgatggatgtgatgaggaaccagttccaactaacattcagtcccacctgaaccttgctttactagacttggaggatgatacggtttctatcagtagcactgagcagagtgtctctctggaggactatttgcaaggaagatggagtcgctcttcaagttttgactaaccagttcatgttgaagccacaatggaatcaaatgtttgtttcataattgtttttgtttctcttaggttagattttcaaattctgcagtagtgcagattgggtcttggaagagaggtccaacggcaaaaagttcagccccccctccttgactttgtagcttgtctcaatctgtattctggaaagcttttagctgtagaaaactcatgttggtgagcgtttgggctttttggagcaaattctaacggggctaattgtgtaaaatttgaccaaacaatgaagagtacatatattccactttgagagaacgacctcttgcttattagttgcctggtgtcacatccaaagtccacatacataaagtgtggtctcgtcgtcattaagactatatatctttttttcctttttcttttcttaactaaaactattttctatgctttcttcttgtgatgtgaaattgtgaataaactgatctgtaaagtttgagtttaaggtaactttcactggattttcatgctattaatatagatgcaaatatataagt

SEQ ID NO: 41565 - DNA, 1039 bp, Glycine max
  Clone ID: PAT_MRT3847_137535C.1
tcactgctcggtggccgcccttttttttttttttttttttttttttttttttacggatcactacccaaatgaaggaaactggagcataccctaaaatagttcaaacaacttgattgcttctaacggttccctatcacctttaaaatgtgagtatgtgaccaactagtttgagttggaacacaagcagttacaatttcattaaccgaccataaggatgtgaatcaatgaaggacggcaacgccgtactcaaaactcaaggcaaattacaagattgttcctggcttcctgcttgaaatatcatccgccaaacaatggcaactctgcttaaatgaaaaatatcaataagactctctaatacattcttttaaacacactctattattgattaaaatttattgaaaattacaattttttttctcacttctttcttctcactatttgatgaagtcatctcactctttgtaatttcccatatattttaaccaataataaaatgtgttaaaaaaagtatcttagaaaatgttttgttagcacttctaactaaatacataatatgcctagaaacataaaagcatatatgcttcaatcttcaggatcacaactgcgaactactttctccttttgagatagcaagttttcagccttcctctttttgagctcacgaactaatttattgacatatgcaatgtatttatcgacatcaaattttcttttgcagcctgcatagttcatgtatcgaattttcccaaaaatgggccgctctttccaaccctgatcatgaaccccacatattgaccacatgcagccaacataaccatttggatctctcccatctaattcatacttgtcatttaaatacaaagatatctcaagggcttcttcaggtcctcgtgtccactcaagtatcttctttgcccaatacattctcataaaaccatgcattttcccatagtgaaccatctccagctgagaagcattccagagaggatcagctgtctgtgccttctccaactgctccttcctgcaaatatgttctcgc

SEQ ID NO: 41566 - DNA, 349 bp, Glycine max
  unsure (1)..(349): unsure at all n locations
  Clone ID: PAT_MRT3847_137536C.1
tagccggggccgacctggttttttgttttttaaacgaaagcctatgttaatatatttgaaagnccaacgaccagacggaggaaagggagaaatttaaaagcgcgaaagagggcgcacccacagacccagggcggcaggcaaaccacggcaaaccaccacgagcccgaagcagccaagaggagccaagcgccgggaaggaggcgcccccacactaacccagcaagacccaaaagggccacgggcgcggaacacgccaatccggagaaacaaaagcccagagcccatagggaaaacacgacacgggaacggaggcgaatacatggacaccttaatggcattggggggttac

SEQ ID NO: 41567 - DNA, 498 bp, Glycine max
  Clone ID: PAT_MRT3847_137537C.1
catttttcttcagcatttatatataaagtgaataatctcccatcccttttagccacgcccacttgaatttcctcatcgcatcagcatggaacacagcacatccttcaacgactcaaataacagcctctcttcacaacgaagcctcgtttcagttccttccctcaactcacactctcaattcctcactccttccaccacctaccacacgtgcctcaccactctcaaattcctcacctcatcctccgtatacatctcctccctcacccttgccggcaagttcctctacgcaggctcctccgacagagaaatcagatcctggaaccacacccatttcatccaaaaccaaaaaccaaccaccaccaccaccaccaccaccaccaacaacaacaacaacagcgttgtgattgccggaaaaggtgctgtcaagtccatagtagttcactccgacaaactcttcaccgtccaccaagacaacaaaatccgcgtctggaaagtcac

SEQ ID NO: 41568 - DNA, 271 bp, Glycine max
  Clone ID: PAT_MRT3847_137538C.1
gagagaaacaacaaacaggaaaaaaaaacctcaacaatgtacacaattcaaacaaggctatagacctaggtccgtgtcctccaaaaaaagtaagaatagccctgaaagaaaatttgggggggggggactttagccacataactataatttattcaaattgctttgggggaagcacttcaaaacaacttggtctcattacccaaatagcagaactggaacaattttgcatcaaagatgtaggccatgcgggggagggtgacacaatggcccc

SEQ ID NO: 41569 - DNA, 405 bp, Glycine max
  Clone ID: PAT_MRT3847_137539C.1
gcctggtacgaggtcgccgccagcctcgcccccggtgcgccggagcctcaggaggagccgcagcataagcaggatgaatctcaggtggaaaaggatccttttgccgcgagtgatgcaattaacaaaccacaagagcttgttgaagggttcaagaaaacaaaggatccttctagtactgatttaacctcagctttggaggggcttgatgtgaccacattgccccctcctgaggctactcaatccacgcaaataaatgtggagggttttgaagggaactacggcggagttgagtttgggcatgaacaagcttctattggagaagcttttgaaggtttcaatgatgcttggggtggtggacttgatccttctgagtttgtgggtccaaccaagcctaataagccccat

SEQ ID NO: 41570 - DNA, 182 bp, Glycine max
  Clone ID: PAT_MRT3847_13753C.1
tcgggtattcataaacttttgtgtggattgctaaacgttttacctatactgaaaaactaatataaagacagttttcgctacagaagcttggttatttgactttcttgtgttgaatatttacatttcttgctttcctgttctgtagtgttttactgagtcatctttgatctattgattttctt

SEQ ID NO: 41571 - DNA, 1319 bp, Glycine max
  Clone ID: PAT_MRT3847_137540C.1
ccacgcgtccgcttgaggtgaaaggcttgtcatgcttgaaaagcttaatacatactctagatatacatcatccctagaaagctatggatcatttgataaacttcaactggttattaacttaattgggttgacttgtctttcaagtttaccagagtatcaaagctgtatcatagagagcaaagggataaaagcaattgttcttcttgtgaaacgatgcttaagtaatgatattcatgtagaaaggcgaaacttcactcctcatttgcacacaacattccaggaaaggtcttgttgctgtatggataaagaagattgggaaggttccaatgttctcttattttatagtttgttgggattgtctgaaattcttcgtcagtgtgaccttctacaagataattctcagcaatattctagagaggtgacaaatattagagctcagttagttagcaaacttcatgagatctgtagtggcaactctttcagtcctggagtgagatggtatgttttgtatattctaacttattttggattttacggtttcccaaatgagttagccaaaaggattgggaaatctctcaataaggaagaatactcagatatgcggctcgttgtatcttctcatgttgaatatgaagcattggtgttattgttgaaatatgaatacttgggatgtttacatgcaggagaagaaacagtgaagaagctgaaaattcttgctaagcgctgcaaactacagcatctcctgcaaatgctttatagacaacgtccaaagtggggcacacctttccccagctttaatcttactccatctcttggttcagccggaagttgtttttcggatgctatattggaagctaaatcaaataaacttgttgggtggacatgcaacatttgttctgacacagtgccccatatgcatgttcacaaagttatattgcagtctggttgtgattatttacaaggtttattccggtcaggaatgcgagaaagtcattcacaagtcataaaagttgatattagctgggaagcattgatcaaactagtgcagtggttttattctgatgagctgcctaatcctccttctggatgcatgtgggataatatggatgatgaagaaaagctattcaatctacaccatatgtggagctttgttgacttgctgagttctggattttggaaaatattcaggaagcctgctggaatgtgattatgtcttgtcttgataatgaacagttttttattcaaattcatactataaactctggatgctattatcgcttagagaattaagggttttgatgctattattgattgaattt

SEQ ID NO: 41572 - DNA, 744 bp, Glycine max
  Clone ID: PAT_MRT3847_137541C.1
ctctctcatggtgtaggtatagcagacattattctaaactcagtgttataaattcctcttgagaataagtccctcaacctctcacagacaaacacacacactgatctcctgatggaacattctctgaatccttctatgggaaaagcagtgtctggcagtgccaatgaggaaagcggctggacttcttactttgaagaattctctaagggcatggagcagcaaagttactgttccagtttaggtggctcctcttggtctcagatgctgcttcttgtgctgcatggaaactctcacatcacaatcaccttgtttcatacccttctaataatgttgtctctaagaaacttcgtttcaagaaaacaagaacccaacagatatcagatgatgaccctttggacgacactgctagctccccagtcaatagtcccaaggtaggagacttgaaagtatccggcaagaatgatgatcaactgaatggttttacttctaggggtaaggggtttaactcacagcattatccaaagctgcaggctgatgaatgtgacataaattttaatggaaacaatgttgagtgcaacacaaacttgaagaaaaagggtctctgcttagttcctttgtccatgttggttaattattatgggtgaatggcacttttgtttatagccttttccttgtcttgtaaccttctctttgtattcttctatatatgtagcttgactgctcaggttaattacgttgctgtac

SEQ ID NO: 41573 - DNA, 426 bp, Glycine max
  Clone ID: PAT_MRT3847_137542C.1
ttcggttttgggagtcctccgatctggtggagggtgcttgcttttaggggcacgaccccaagatattccctatgtctattgattgacccacgtcatctttgttgctgttaggtggatatactatagggccaagaaatggcattactatctactggatggctgctgttatgccaatacaatatgtttgatggagcttcttttttactcatcaaatgagaagctgtccatgaggtgcttgtttcttgcggaggggccattagcatgggctatgattgttcggcgctgctactagattgagagttatgttgacaaaagtgaagaaaaagaaagtctgggaaattgaaagcttttgctacgataattactgacttctacctgcaataaggaaatcactgagtgacggtcctgctttttatctagacaaca

SEQ ID NO: 41574 - DNA, 290 bp, Glycine max
  Clone ID: PAT_MRT3847_137543C.1
tactcaaacatggtctaggcggactatgatcaccatccagagtccaaagcatacgccggtgcctacaaatcctaacctaagcaagcccggaccatgtcggagaacggctacctcgtgctgataagacagcccctacaaagctgtggaattttcgacttccataactgcaaagcacgatcacgccgagtgccactttgttggaattgatattgtcactgccaagaaactagaagctattgagccctattctgacaactgtgatgttcctcatgagaatcccactgattacc

SEQ ID NO: 41575 - DNA, 420 bp, Glycine max
  Clone ID: PAT_MRT3847_137544C.1
ctagatattgcctacttgacatatataattattgtttcgttgtatcttgaatggtaatttctatgcaggtacactacatcgtcagagtagtggaattgaaaattccagcaatcctccaaagctccgtaggaatgcctctactgcatgtgatacaattagcactccccaatatggtccttcagatccagctcctttgaagtgcacaagcggcttctgttttgatgaaaagctcttcgtgcagtcactttataaggtcttggtttctctctcagaaaccagttctgttattttatatatcaaggatgttgagaagctctttgttcgatcaacaaggctacacaatttgttccaaaagttaattaagaaactttcaggatcagtgttaatactcggttcccagatctttgattctgaagatga

SEQ ID NO: 41576 - DNA, 191 bp, Glycine max
  Clone ID: PAT_MRT3847_137545C.1
cttcttcattgctttttccgattgcttctccttcaggtgcgttctattttttctggagaagatccacctcgattttcccggaaaaaaaaaagaaagaagaaaatgctgaacgcaggcttgaactctctcctaaattttccttccatggtttctgcaagtcattgccatcgttcccttgttcctattgctgc

SEQ ID NO: 41577 - DNA, 337 bp, Glycine max
  Clone ID: PAT_MRT3847_137546C.1
caacatctgcggctgccacttcaaccccgccgtcaccttcggcgccttcgtcggcgggaacatcaccttcctccgaggcatcatctacgtgatcacccagctgctcaggtccatcgtcgtcttcatcctactgggcttcttaaccgcctgcactgttccagcattcggactctccgctggagttggagttggcaacgccttgatgttggagatcgcgatgaccttcggactggtgtacacagtctacgcaactgccattgaccccaagaaggggaatacgggaataattgctcccatcgccattggtttcattgtcagcgctaacatattagctggg

SEQ ID NO: 41578 - DNA, 1545 bp, Glycine max
  Clone ID: PAT_MRT3847_137547C.1
aaaagataatttccacgcgtccgcgaggagcggtgcgttatggaggaatgatcggagtagcagccatgcccagtggatgtagcatcagagcaatatggattctcaacaaccttgacggcgtcgttttttcccggaggtttccggtggtagagaagcgttggcgagctgcttgcaactcaaacgcccacaatgatacccatcaaatcttctcttccttacccactgactccgacctcgctgatgcttttctcgaccgaaagcatagggagggatctgcacgaggatttggcatacgaaagagtaactcaactctgggatcggattcttgggtggatgatcccattactcgccatatcatcggtctttacattagcagagaaggggaggaaaataagaatctattgtggcctttaatcttgcacacaaagggcctttacagtattcttattctgccattggttgagcctatccatttaaatgcatatgcaaggttgtgtaaaagacctgattgtggagctgctcttggtatggatgacggcctgtcttccctcttactggatcttccatcagtaacaggggcatttatgatagcgcatgccattggtgacataattactggcgacacagtagaacctgaagtgattgtaagtgcagctccctctgttggagggctgtttgattcactcactggtagtataggcatctcttccagggcaaaacctgtggccccacctgttgcttcttcctccccttctagtgcagctgtaccaggatcagttacagcagatgctccaaaaatggggtctaggttattggataaagatgcactcagaacatttatcagtagttcaatgccctttggcacacccttggaccttaattattccaatattattaccataaagaccaacggcttttcggcaacagatttgcctcctgcggaccagaagcagccagcttggaaaccatatttatacaaaggaaagcagagaatgttgtttacaattcatgagattattcatgctgctctgaataatagagatgagattccggatactatatcagtttctggtcaaataaattgtcgagctgacttggaagggttgccagatgtgtcatttcacttggctggattgaacacagcaaaccttgaagttttatcgtatcatccttgtgctcaagtttcagatcaaggtttggataagcaaggagtgatgttttctccgccattaggtaattttgtgttgatgcgttatcaggcagcttatgcccttggaccccccataaagggattctatcagttgtcaatggtttctgaggataaaggtgcatttctattcaagttgcatttaatggaaggatataaggctcctttgacaatggaattctgtactgtgactatgccctttcctaggaggaggattgtatctttggatgggactccttctgtgggaacagtttcaacttcagagcactctgttgaatggaaaattgtgacaagtggccgagggcttactggaaaaagtattgaagtgactctccctg

SEQ ID NO: 41579 - DNA, 329 bp, Glycine max
  Clone ID: PAT_MRT3847_137548C.1
gaggtgcaccctcagttggcgccaaaactgtttaaattgcatggcgctgacgttggtgctactagagggcccatgtctgatgggagaggtgcttcaatctaaaaatgctcttcccatgaactcatcaagaggagctattttgaggagggcactattggcaggatttctgacagagggacgttttagagcaagtggtgccttcgtgcagagtcctggcattaacggaatgacatacggggaggccactgatgacattcctgataatgcgggtatatcatagaccttggctcagaatggatctattcaggggcgagctctattggaatttt

SEQ ID NO: 41580 - DNA, 429 bp, Glycine max
  Clone ID: PAT_MRT3847_137549C.1
atgggtggttatggctcccaggggcacgtgatgggaccctgcacatgtggtatgtttcacagccaaaccaccagctccttcgccacgtttttctccatgcccaaccacaaaccaccaccctacatgattccgacaacatttatgactattcttccttcactccctcttccttttcttccgttgactgcaacctctccctcggtaccccttccacctgcgtctccgaagacgaagaaaaacgaagccgccacgaatgccattccgtctctaacttctgctgggacttactacaatccaaacacaacaaccctcaatcccattccaagtcctccggaaccaccaacaccaccgaccctctcctcgctcgccgctgcgccaattgtgataccacttctactcctctctggagaaatgcccccgtggccctaa

SEQ ID NO: 41581 - DNA, 381 bp, Glycine max
  Clone ID: PAT_MRT3847_13754C.1
ggctcgagcaaacttgaacggatccatcatacacagagcccaatcgtctctcgagccctgattgaccctcagatacatggccacagaagagcccactggcggggagggacccgatcccgagcctgactgagtccatccttccccggacgagaaggaggagaccaaacctagaagccaaggctaagaaaaccaaggagcccaaacccaacaaggctctcagacctggccaccctcccactcaacctatctacgaaaagatcgttaaagatgcaaatacctcgctgaaggagaaaaccggtgcgagccaatacacgattgcaaagttcatccaaggaaagcacatgcatgatacacctgacttaatgaagcaaaaactctacc

SEQ ID NO: 41582 - DNA, 298 bp, Glycine max
  Clone ID: PAT_MRT3847_137550C.1
ggttgacggccacgcacgcgtactcaaacttcgaattcagctcgagaacaaagtcacaaacgagagatattatttttagatagatgctcctctccgttcgctccgaggctccttgaccttccctaacctcccactctagcctccagaatagaccaaacacttctaaccctcaagtttgaagcctcggacctccattcccaatcttaaaactcccaccctaaaatggcagcaaacaacaagcgtggcatcttgactgagatctgcggtccaacaagcccccgggggtcggcaccaaaaa

SEQ ID NO: 41583 - DNA, 206 bp, Glycine max
  Clone ID: PAT_MRT3847_137551C.1
aggagttgtagtttgaattgaatggaagggaattgcattagtacaaaactgttaggagttagatggaagggaaaggaaaattagttactgacagttattgtaaattagtcagttatagcaattagttagattagatataaataggggtaattaagagcaaggactcaaaggaggattctatcttgttttgtatcatctgtaggttg

SEQ ID NO: 41584 - DNA, 378 bp, Glycine max
  Clone ID: PAT_MRT3847_137552C.1
tatacacgtgcacatgcaccgcgtacgataagcttgatatccctataaagcggcgcccccttttatttttttttatttttttttttttttttttgagcagagagggtggccccttttctagtcaaggattctaacaaacaagagggtagaatcacagtacgctctcccaagtgggggcatgagttccatttctcgctaaaagttttagcttaattaaagcaatcttacaaacccaatttacccaaaagaaaatacctctattcatgccttttgtttttacaacattcgttagaaaagataagctttttttttcaaaacccgctagccttgtatgaaattcccaaacaagacctaaattttctaattgtctcatgcttt

SEQ ID NO: 41585 - DNA, 383 bp, Glycine max
  Clone ID: PAT_MRT3847_137553C.1
agcaaaagaattttttttattaaaaaaagggccttatttgtttacataggggtgccaaacaggggaacaaaagaagggatttaactccagttgctccaacaataaaactaaaactgggggggggttgacattctggacataaaaaaattaaggaatgcgttgcaatgtttttttttcaaaaaaagttcctttctggaagaaaaccctgggggaaacccttagtgtccgggcaaaaattggaaaaaatgtattttttttggacccactttaacctctgatgcccgggggcgcccaattcctgggaaagccatgaacccctgccactggggggggaaaaagatattttaacccaaaaaaatgctccaaaaaaccatttgcaagcc

SEQ ID NO: 41586 - DNA, 137 bp, Glycine max
  Clone ID: PAT_MRT3847_137554C.1
ctcaagggtggctgtttttttcctcgggacatgattggatttccaccttcactcaagtttcaatggggaatctgatgtaggcttgggaggttcttctacttccaaggatgctttcaattaatcaattttcccacacc

SEQ ID NO: 41587 - DNA, 208 bp, Glycine max
  Clone ID: PAT_MRT3847_137555C.1
cttaactgggatcggggtattttggggacccaaattcttaataaataaaaatataacggtagtgagacagagaaatgtgctacacaggtgcagcgacattagagaaaatggagtcaaacacacgggaactgcaaaagggaaccgaagatcgcattgcaagtcggcatgctaatagcccagggacaaagtaaggggcattagcccaagc

SEQ ID NO: 41588 - DNA, 169 bp, Glycine max
  Clone ID: PAT_MRT3847_137556C.1
ccacaatacacctcttcagaaacagacccattctcaacagataaccattttcaaggggctctttaacaagaggagaggacaaccgaccacccatattataaccaataaccagcagttaactcctcacccttaatggaaaagctattttatctatacaacacaaacccta

SEQ ID NO: 41589 - DNA, 369 bp, Glycine max
  Clone ID: PAT_MRT3847_137557C.1
aaaatgcactgttgatcatggttcagctatgctgaaattatggagttctgcttgaatcggtgattgtgagatttggatttgacagtgctggggtcaagcttttgtgtgtgaagcttttttttcttttcttgttattatcaaacttttccattacgtttaatcattcaactttctttttcccctattggaagaaagggggggattcactgaataagggtggctaggtgtctcaattgccttttttttctttaatgggaagagtggactgcaattttcagcttttttctgtggaacctgttctggttatggtctgtacatgaagaaagaaggcattgatacctttccctccaaagaaatcttatattgctt

SEQ ID NO: 41590 - DNA, 517 bp, Glycine max
  Clone ID: PAT_MRT3847_137558C.1
ccacgcgtccgccaaatcagacaagcaaggaatcccccgatggctcatcgcgttctcctcctcctctctctcgcggctgccgccgcggtagccgccgccgtcgacgcggaggacccgctgatccggcaggtggttcccggtggagatgacaacgatctggagctgaacgcggagtcccacttcctgagcttcgtgcagcggttcggcaagtcctacaaggacgccgacgagcacgcgtaccggctatccgttttcaaggccaacctgcgccgcgcgcgccggcaccagctgctggacccgtcggcggagcacggcatcactaagttctccgacctcacgccggcagagttccgccggacctacctcggcctccgcaagtcccggcgcgctctcctcagagaactcggggagtcggcgcacgaggcgcccgtgctccccaccgatggtctccccgacgatttcgactggagggatcacggcgccgtcggccccgtcaagaccagggttcgtgcgggtc

SEQ ID NO: 41591 - DNA, 564 bp, Glycine max
  Clone ID: PAT_MRT3847_137559C.1
gattgatgaccttgtgcatgcatgtgtccccaataccagaagaaaaggcttttgggtgtgagattctgttccttccaattttgtatcaatctcttcaagttccgaaatttcaggattctactctattcttcaaagttcaaacgttttggaccttccttcaaatcacaatctttagtactactaaggtggggtagggtggcgtgggagagagagggtggggcggacgggcggcacggcgacttggatctggatggggtggaatgggtgatgcggcgcaacccaaaggagaggctggggtggggtggcgcgggagagaagtctgaggggaaggtgtgtagggatttgggcaaaagaaggatttcacaaggaatggtagtgtgaatagcactattggtagtgagaatagtagttccctactactaatgttctgtcagcccagcccatgactctggcccaatatttccttcactttcctgtccagcgtgctggttcaatttttttttttatctgcatgctggtccaattatgattgatcaataattactacttcagcataatatactg

SEQ ID NO: 41592 - DNA, 510 bp, Glycine max
  unsure (1)..(510): unsure at all n locations
  Clone ID: PAT_MRT3847_13755C.1
aaaggacaaacaaatctcttaaatatcgtttaaacatttaatagattacaattttgattaaagaagactacaatatatttttcattttcatattcataaatatgaaaatatgaaaattttcacctcacgataaagaaacacatatctcctgcatgtcatttaaacatttaacagcattacaattttgattaaagaagactacaatatatttttcattttcatatttatcatattcataaatatgagaatatgaaaattttcgcgtcacaataaataaacacaaatctcctgcatatcatttaaacatttaacagcattacaattttgaataaagaagactacaatatatttnttcgttttcatattcataaatatgagaatatgaaaattttcgcgtcacaataaataaacacaaatctcctacgtatcatttaaatatttaaaagcattacaattttgattaaaaaatattaaaaaatattttacattttcatatttatgaatatgaaa

SEQ ID NO: 41593 - DNA, 531 bp, Glycine max
  unsure (1)..(531): unsure at all n locations
  Clone ID: PAT_MRT3847_137560C.1
ggaaagctgaatgtcaaaagatggtcccagtcattggtagtggaaaatttattacaacacccctcattgatgatgaaggccagccaatagatccttctatggtaggcgtccagacttcagataagaaagttgtgcagtggatgcaattattacatcagattggtatgtatatgcttctgcataaatactggatgctttttcctttctgtttgataagaaagttttgcttcttgggcttcactgaaccaaaaagctagtgccataaatttgtggattcatgaaaagtgagaactctttttgtacttacagattgacattgaagcagggttgtgttcttttgcgggtgtaaggtcatgattctatcagcacttttcactcaattgattagcaagtaaattttctctgcaaagaggacaaatattctaaacatatagtttaagcttcaaataaatttaagaagttcttttanagtaatggatgtaatgtgtaatagcaaatgcaccatccttgcttacataccatatagattat

SEQ ID NO: 41594 - DNA, 246 bp, Glycine max
  Clone ID: PAT_MRT3847_137561C.1
cttatttccccattttcaaatatttttttcccattttggatatctgagctatggttacatcgattctatataagattttcttactcagttatgtattccctcttcagctattagatacttgatattgaaatctgatagatgatttcaagcataaatatagccatgtcatgtcttatatataatttctaaaaattttcatatcctgatatatgttaccaactataaatgattaaagaaatagtgtag

SEQ ID NO: 41595 - DNA, 1839 bp, Glycine max
  Clone ID: PAT_MRT3847_137562C.1
tacgaatgcccaaaaagtaaggccaccgcagaatgaaacttgcaaaaagtgaggccaccccaaaaacaaagtgagattataggaaacaaaaatttctttgcttaatactagttcctcctttctcctagcctggtagtcttttgaaaattctttatcttgatcacataattttcattttgaacttgaagaaagttttagtgtatttttttttccttaaagaaacagaacatatcctgttctttctttctctgtttgcatttttgttcacttctttctttctttcttattatctagttaagcatgacaacatttatggacatgtacaacactactagtagcatcatgacaccggatttcttagaccagtgtagtgatcaagagctgatgaaagcacttgagccttttatgaaaagtgattcatctagcactacttcctcatcaataacaacatacccttcattctcttctttttcttcttctcccaacttgtcctcaacaacatggagcacccaattttgctcctcaagctaccaccaaaagggtccaactccaacccaagctagttccttcaaactgaaccaactcaccccatcacaaatatttcaaattcaagcccaaatccaggttccacgaggccagtttctgagcccaaagcccattcccatgaagcacgtgcgggcttctccttcttcaaagcccacgaagctttaccgtggggtgaggcagagacactggggcaagtgggtcgctgagatcagactccccaagaaccgaacacgtctctggctaggtacatttgacaccgcagaggaagcagcgttggcttacgacaacgcagcgtttaagctaagaggagaaaacgcgaggctcaacttccctcacctacgtcaccatggagcacgtgcgtacggtgagtttgggaactacaagcctctcccctctgcggtcgatgcgaagctccaagccatttgtcaaagcttagggaccaaattgcagaaactcaaaactcaaaaccctattgttctagatacacacaaggcagagacagagacatcggagtttcaggattttaataaggttgagaattaccaaacatcatcatcctcggcgttgtcggatgaatattcttcttcttcttcttcttcttcgcccgaatccgatattactctcttggatttctcggattcttgtgaaacaatagacaatcttgggttggacttggagaagtacccttccgtggagattgattgggcagctttatctgactcatgaataatcagtggttaacggtttagatttgatgtgttttaggttttttttgcatgtttttttcttgttaatcagtgttttagatattgttttggaagttcttctaaatcacagcgcattataatgtcactgtgactgataaattattaagccattaatcgaataaaattttacacaatcacttgctatgctgagtcaggttgctaactttagtgtactgctgtagatggatgggtcacagcggtttggttattatggttttcttggtctgctggtattttttattcctgcatgaccaagctagcttcaactcttttttttctttttaaattgatagaaaacaaggtagcttcaactacttgtttgcagttcgaatgtaatttaagtgccttaatgcaagttttggaagttcttgtaaaaaacagggcatgtgacagtcttttattcataaggaaaataatttaattgaaatttgaaatataatgatcgtgtaatgattttttacacaatcaattaatcattgttatattttttaaaatattgattttattaataatttttaaaaaaaaa

SEQ ID NO: 41596 - DNA, 414 bp, Glycine max
  Clone ID: PAT_MRT3847_137563C.1
acggctgcgagaagacgacagaaggggtatgcttaaaacatgatagctataagatgcatttcatctgtcttctttaaggatttcagatgtttgctatttgttgggtactccatcttcattatcccaaaagaaccatccctatttattgacttcatatttggcgttttgcctaaagaaaaaatagcaagtagaaggattaggtaggtagagaaaagccactagcaagagagagaggaaaattgggttcataacgttaaatctgatattgtaaaattgggcacacatgttttggataattggttatagataatattactttacacagagacaatcatggctcaagattttcaataaagtcttgtgttatatagatagtgctcaaaaagccacaactttttagtaaaaaacaagttt

SEQ ID NO: 41597 - DNA, 470 bp, Glycine max
  Clone ID: PAT_MRT3847_137564C.1
tacggctgcgagaagacgacagaagggtcccccttgcgagctaacaaagcacaatcccccagtatccaattacaacatattatttatggtaagttttataccattacccaaagggccaatgaagctgcaaagagctaattgatcaaggcactagtcctcacctaccaacatgtccaaacccaacaaccacttcataatatgttgtggacccactttgtgtgatggagataatacagccaccatgtcatcatccctacctaacctatattaatattaaagggcacaaattagcacaacacatgtcagcattatattatagaagcaaatgacaggatataggtcattatggtctcgtatgcaataaaaaaatgctagattttatataaaaagataagaacagaagcatcaagtgtattatttatacaacgaggactaaagaatcccatatttaaaattttcatccactttta

SEQ ID NO: 41598 - DNA, 306 bp, Glycine max
  Clone ID: PAT_MRT3847_137565C.1
ctgaagccggatcctgttggctaccgtgaacagcaggcggtgtacggaagcatggcttgcctcgaaagcgggtgtactaactgcgactgtggttctggggccggctcattcaaagggatatagtggcggcgatgggatgcactactcgtttccccataatgctgcttgtgctcatgcgtcctacgatcccgcgcgtgggagacaggtgcactattctgatcaaagaggaacagtgcacgcgcctgctgatttcctgagggatgctgactaggatgatcggacggcctgtgttccggcgacgcatga

SEQ ID NO: 41599 - DNA, 473 bp, Glycine max
  Clone ID: PAT_MRT3847_137566C.1
ttacaaagtttgcaaatgtcaggacaaaaaatttcgaatacaggatagggaaaagtaaatattctttctatggaaatttcttattggtaatttggattaggatgtgattctattaattttgataacatcagaacattcagaagacataaaaaaatacaagaaaatctaattcatttaattaaacatatctaaattgttgtaaactttttactgtacgttttttattcttaaaagttaaaaatatatacaatataaaatataatatttatgcattgtaagtataattttttttctcttataaatatattattattattattaatataattatttctcacgacatagtattatcatcactttacttactggaatatgaaagatataactcagatagttggacagaacattcgagttgctatagggattaaaaaaaattagttaccgacttaccgtagaaagatcctgaatataaa

SEQ ID NO: 41600 - DNA, 327 bp, Glycine max
  unsure (1)..(327): unsure at all n locations
  Clone ID: PAT_MRT3847_137567C.1
aggctaaaagctacttcttataaatgntaatcatcttttacaagtttgtgaacactttggataagcttaatttgacagaaaaattgattaatatcaaacataattaattaaacaactgaaggggacactctgtaatttgtaagagcacttttatataagattaacataaaacttacatttcgaaaaaaagagagcttgcttaaagttaccgccaaaaaaaaaggcaaaggaactaaattatttattaatttgttacaacatttcaaggaccattgtttctcctatgttgaggcaggatagcaatggttaaaaggaccatattggatt

SEQ ID NO: 41601 - DNA, 698 bp, Glycine max
  Clone ID: PAT_MRT3847_137568C.1
gatatattttcgttattgaatattaacgtgttcaaattgtcccaaccaggaaggtgtgaagaatatgaattcttttccaacatgtgtcaatgaattgattggaaaacaacttgctctaaggttcaagtatcgccttcaatatcgttagtgctctgttgtggatgttagtgagaataaagacatcatcactgcaatcaaagcaaaactttcaccaccgcataatgtacgactcaccatgtgaagcatgctggaagatttttagtttttttgcaacatggacgtaaaccagcaattgagcgtttatactttcatttggaagatgaacatcctgtctattttaaagggcaaacaatatattgatgcagtgatgtctaagaaaactgtcaaagaatctatgttcacaacatggatggaagcaaacaagatttacccacatgatagaaaactaacataccctcaatatgtgtctagctttgtgtatgtggctcgcaatagatgttggaagccaagaaaacaaggatatacaattgggcgtctaatatgggtaccaccatctactggtgagctattcttcgtgagaatgattcttttttgttgcaaaaggaccaaccagttatgatgaaatcagaaaaattgatggtgttcgatatccaacattcagagctgcatgttttgcattggatttcttggaaatgatg

SEQ ID NO: 41602 - DNA, 557 bp, Glycine max
  unsure (1)..(557): unsure at all n locations
  Clone ID: PAT_MRT3847_137569C.1
ggctcgagtgttttcggacggtataatgagttttttttttatccttgagagctttggtatagtaccctgtcagtgtttcatagatatgtaagaacctggttgcactacacgaacatgagtgaattgcaaaagaagtctctctaggcgtttcagtgaagactggtggcttacagttaatttgtaagagctggttatgagttttgtaaatttatttttgctcatggactgatttaatgcactgtttaattcatttagcatcacctcaagcactgtgattctctgcatctgcactcaatttcttctttgtgttggacaggaacccctcactaaaatttcagaaactagaaatgaagacattagggatgataaatttattagtcctgcaattgatgcacaagatgatgtctctcctaatcgttcaagttctgagactcgagatggaaagcatgctcaagctcgtacagatggtgtgggcaatggttatttggatcctaaatcttccaaaggggataagtggcagaatggggaacttggacattntaaaggtaatgagaaac

SEQ ID NO: 41603 - DNA, 315 bp, Glycine max
  unsure (1)..(315): unsure at all n locations
  Clone ID: PAT_MRT3847_13756C.1
cactggaacccccttcgtaagcgtcttcacatcatggcggctctacagagagacgatgttgaactcgttgttcctaangattctttcattaccaccgattacatgacatacatgtttaaatacgacagtgttcacgggcactggaagcatcacgatgtcaccgttaaggatgagaagacccttctcttcggtgacaagccagtcactgtttttggacacaggaacctgaagagatccatggaagtcgactggagctgacatcattgttgagtccaccggagtatcacgataaggataaggctgccgcacatttga

SEQ ID NO: 41604 - DNA, 358 bp, Glycine max
  Clone ID: PAT_MRT3847_137570C.1
ttttctttatttagaagttaaactagtttactggcaggggatgtttgtcttttccagagatgtatctgtaagtaatcataggaggggaaagttttgctctcacaatttgagttggctcactctattgtcttatcaacaattaaattcgttgttaaccacttgtgtttcgataccattgcggatcagcagtgtttgatctatgtacattagattcacctacttcaggcatttgtttctagctgacttatatgcatacctctagggatgttcaacattcggaaactttggcccattattttgtggtgaggactgaagccattcctgaagtgtggtcttacttttggaagagaaacaacag

SEQ ID NO: 41605 - DNA, 245 bp, Glycine max
  Clone ID: PAT_MRT3847_137571C.1
tcagttgcgatgcagacaacacaacggtagggtgaggctcgatgacgtgatgtcatggatgccataccactacccattggtagtgcttctactcgcaaagtgttaggagtggatggctgcatttctcgtactcatttcaccgtgttgcaatgattttccggttcccaggttaaatatttaccatatcgagtgctgtacatcttttgcttccaagtttcccttcaatgtccatctcgttagttgcg

SEQ ID NO: 41606 - DNA, 107 bp, Glycine max
  Clone ID: PAT_MRT3847_137572C.1
gcgattgccatgccacataaagtacaaattcaaaatgcattcttgttttaaaatttcgcaaagcagctctgatttctagaagaataaggtggaaacttaattggggt

SEQ ID NO: 41607 - DNA, 1733 bp, Glycine max
  Clone ID: PAT_MRT3847_137573C.1
gtgctaacatagatgctctaatttcctgcaacaaaagtaagcctccccttgcatggcacaacccgagctttgtacggctgcgagaagacgacagaaggggactccacaaaattcatgattcatcaacgacacgacacccaaaatgaagctagaagaatcggtgtccaactccaacatcactgccccgctccttccaccggaagatccgagtccgagtccgcaaaatggatcaatctccggagcggtgttcaacataacaaccaccatgatcggtgccggaatcatgtccattccggcgaccatgaaggttttaggcatagttccggggttggtggtgatcgtgttggtggcactgataacagatgtgactgtggagtttatgctaaggtacacaagttccggtaaatcctccacttacgcgggcatgatggccgagtcctttggctccataggatccctcgcagttaagatttgcgtcatcataaccaatttgggggttcttatcatctatttcattattcttggagacgtgctctgtggaaatgagtcgaacggtatcacacacttgggtattctacaagaatggtttggcatcaactggttgacctctcgtgcttttgctcttctttttgttgcactcttcataatgcttccacttgttatgttacgtcgtgttgattcactgaggtatagttctgcaatatcaatcctactagcattggtgtttgttgtaatatgctcatcaatggcggttagtgcattgttgtctggaaaaagtcagacaccgagaatagtgcctgatttctctcaagtcactgtccttgaccttttcaccactataccagtgtttgtcacgggtttcggtttccatgtcaatgttcatcctatcagagcagagcttataaaagttgaacacatgggtttggctgcacggatttcgttgataatttgcgtggctatttactttgctattggtttctttgggtaccttttatttggggactccatcatgccagatgtgctggtgaactttgaccaaaactcccatacaagtactggtcgattactcaatgccattgttcggttaagttatgcactccatcttgcacttgtgttcccaatcatgaactattccctgagggccaacatagatgaactaattttctcaaacaaaaataagcctccccttgcatcagacaccccaagatttgtgtcactcactttgactttgctagccctcacatacttggtcgctgtgaccatcccaaacatatggtatttttttcagttcttgggatccacaaccattgtttccacctcattcatcttccctgctgcaattgttctcagggacatgcatgggatatcaaagacaaaagatcaagtgatggcaatagtggtgattgttttggctgtagggacaagcggaattgctatatggacgaatttgaatggttcaggggatgatcaatgattaaccatgatgatgttatataatacccagtcttctcaaacttggtgattttttttagtaattattatcatataaaaaatcaatctatcttttcggttttctttgttttcgatctcattttcggttctccacataccaagtagtacacgtcaaatgacgcataagcccctcaagtgacggtcaaagtatgatcagatcaattatttgtctcttctcttttttctatttaaatgattggttgtttttgtctaaaaaaaaa

SEQ ID NO: 41608 - DNA, 664 bp, Glycine max
  Clone ID: PAT_MRT3847_137574C.1
gattactcaataccattggtcggttaagttatgcactccatcttgcacttgtgttcccaatcatgaactattccttgagggccaacatagatgaactaattttctcaaacaaaaataagccccccttgcatcagataccccaagatttgtgtcactcactttgactttgctagccctcacatactttgtggctgtggccatcccaaatatatggtttttttttcagttcttgggatccacaaccattgtttgcacctcattcatcttccctgccgcaattgttttaagggacatgcatggcatatcaaagacaaaagatcaagtgatggcaatagtggtgattgttttggctgtaggaacaagcggaattgctatatggaccaacttgaatggttcaggggctgctcaatgattaaccatgatgctatataacacccagtcttttcaagttttagggaagcctagtgaacagctgcatcaatttggtccttaatttgattaatttatcttatagaaattaatttaataacatttaaaggtgagattgagaattgcacatcttgtattttgaaactatagacgatcctactttgattcaaacacgagtctgccttgttagcttttattggagttagaacaccaggtttaggcagggtttcccccc

SEQ ID NO: 41609 - DNA, 706 bp, Glycine max
  Clone ID: PAT_MRT3847_137575C.1
acccacccccccccccccccccccttgccaaaacctgatgtactaactccaataaaagctaacaaggcagactcgtgtttgaatcaaagtaggatcgtctatagtttcaaaatacaagatgtgcaattctcaatctcacctttaaatgttattaaattaatttctataagataaattaatcaaattaaggaccaaattgatgcagctgttcactaggcttccctaaaacttgaaaagactgggtgttatatagcatcatggttaatcattgagcagcccctgaaccattcaagttggtccatatagcaattccgcttgttcctacagccaaaacaatcaccactattgccatcacttgatcttttgtctttgatatgccatgcatgtccctgtgctcaaaagagaaggggattgtggtatatatgaattattaatttatataaattaagcataattgtatattataaaaagcagggaaattgggtagtagtataccttagaacaattgcggcagggaagatgaatgaggtgcaaacaatggttgtggatcccaagaactgaaaaaaaaaccatatatttgggatggccacagccacaaagtatgtgagggctagcaaagtcaaagtgagtgacacaaatcttggggtatctgatgcaagggaaggcttatttttgtttgagaaaattagttcatctatgtgttccc

SEQ ID NO: 41610 - DNA, 639 bp, Glycine max
  Clone ID: PAT_MRT3847_137576C.1
gcaccagggtcatcggcgacaatggccatcgcagcgtctccggtggtgaacgtcgccgcgtctccatcggcaccgacatcatccacaaccccatcgtgctcttcctcgacgaaccaacctccaacctcgactccaccagcgccttcatggtcgtcaaagtcttacagcgaatcgctcagagcggaaacatcttcatcatgtccattcactaacctagctacagaatctctcttagaccacttgatcttcctctcccacggcaacaccgtcttcagcgaggaggcggttgcacggggaatcgacgacgaggccgaggaaggcgacatttgcgggaaggtcggtgtctgagatgaaggtttccacgacccccacatccaagagggcggcgataatgcgctggcgaagggatccaaggaggaagtgctgcggtggtgatggtgtgggtggtgtcagagaaagaagggtgatcggagaccagtgcgagaagctcggaggagagagaaaaaagaaaaataatctcatattttttattttatctgatgtaaaaaatttcatcatatcttaatcaattttgaccgtttgattttctaattttaaaattgaacggatgcgatgcattttaaaattcaaaaaatacaa

SEQ ID NO: 41611 - DNA, 497 bp, Glycine max
  Clone ID: PAT_MRT3847_137577C.1
accgggaatggactgggccggacccacgcgacggctcttcatttcattaaactacattttttgttacaacatgaaacgttttgtgttttctctagcatgggtttttgctcttttgctagcttcttccttggctcatgctgcggttgtggaacacacttttaatgtggaggacattactgtgcagcgtttgtgtcgtcaacaattgatcactgccgttaatggaaccctaccaggaccaacaattaacgctcgagagggtgatactattgtcgtccacgtattcaacaagtcaccctataatcttactcttcattggcacggtattattcaatttttaacaccttggtcagacggtcctgaatttgcaactcaatgcccaatagcttctggtagcagttacacatacagatttaacctaacgggacaagaagggactctttggtggcatgcacactcatcttttctacgtgctacggtctatggtgctcttctaattc

SEQ ID NO: 41612 - DNA, 395 bp, Glycine max
  unsure (1)..(395): unsure at all n locations
  Clone ID: PAT_MRT3847_137578C.1
attccccggtcaccccccctcccgagaaaaccaagcccaaaaaaacttaggagcggtggcggcggagaaccaacaaacccaccttcaaatctccccatattcaccattcccatcctcagattccatctgggactccctcattacaccaccaatcgggaccaccacacccttccaaaaccttacaaaacacatctacatccccttcttcaagggggggggggtcacttacttcatcatctgttcaacaccttccttcaangagagagacggtacctacatctcccaccgcgaggggctccaanaaaaaacccctccaanacctcaaaaacaaacgggcgtcttattattcttccacccctaccatntaaaaccggggggggggggaacaacaacaa

SEQ ID NO: 41613 - DNA, 307 bp, Glycine max
  Clone ID: PAT_MRT3847_137579C.1
ggctcgagggaaaacccatagtgctcctctcctctgtctaattctctctcttgatctccttttgggtactgggactgatgcaagagctgctcccagacaccctttcccaccccactatgtttccacatttaacagtaccctttttgcttctcctattctgtgatgaattgggtcttctgcttacacaggcagaatgagcacccagtgttcatggcataggtccaagcatatgggacacctactctaaacaacatactgcacaagattggggatcatcgacccggttacatgagaactgatctttatc

SEQ ID NO: 41614 - DNA, 278 bp, Glycine max
  Clone ID: PAT_MRT3847_13757C.1
cgctgatccagattgtatttccaacagaactagactacctccaccggcatggccaggccgcttccgccgaggccgtcaaccaactttgtgtcgtctttgtccgttacaaacttgttggaggcggcctcaaccatcttcttgcaaacaaggcaccaccgcagcctttgatgaggttgaggttggggtcgacctcgtcggcgtcgtcgatggtgagaccgaggacgaagagggggatgccgaggaagaggactttatcctctgtgcgcttggaggtaggg

SEQ ID NO: 41615 - DNA, 548 bp, Glycine max
  unsure (1)..(548): unsure at all n locations
  Clone ID: PAT_MRT3847_137580C.1
tgtttgcttttgctgctgtatatatggactacgccttcttttgtttgaattatgcaatgtaaagttgcaaaaaactcttgctgtgtatcgattttgtagtttgttgattgtttttggatgaatattgacagctttttctcaccacaggggaaccatgacgctattctgcacttcgttttcgtgttcaccaatgactgccgtgcatattcttgatcatacggaaagcacaataaagaagacagaaaaaatgcatgcatattttgcagacccaacaagagtaatcatctacctctgcaatattaatatataaagcctaaggatgagaggaagaaggtggtactgggaaccatttggggtgatggaaaaagtgctttggaggaagtttgggaagaggtgcaagtggcttgagtggaggcaacttagggagtggaggccaccaccataaccaccaccatgctctcctcttgcaccaccaccatcaccagctcctccnccncttccatatccnccnccatgtgctcctccttcnccatncccnccagctcctc

SEQ ID NO: 41616 - DNA, 193 bp, Glycine max
  unsure (1)..(193): unsure at all n locations
  Clone ID: PAT_MRT3847_137581C.1
cacttttgattttattcaatcaacaatcatntcngaggaaggacaccatttatagtccaagggccacnccctatccttcaaaacctaccctcatcaaaccaaaaccatcctcaagaacggatacatcgtcatcaaatgccgcccctttaatgttgttgaattttttaaccacaaaactttttagcacaaaaat

SEQ ID NO: 41617 - DNA, 614 bp, Glycine max
  unsure (1)..(614): unsure at all n locations
  Clone ID: PAT_MRT3847_137582C.1
tacggctgcgagaagacgacagaagggtaatggcggaaggccaaaattccgccatataaacacgccagtgcaccttatggggccaccatggcgggcttcccttcataaatagcctatggcggttggcaaaacatctgccatgccatggccgctatttaataacactgtatacaactatgcatggatggtcatgattaatagtttgtaatcacatgatcatttagaagtcaagtgcatttaacttttaatcttgaccattgaaataaaatccaattgtgtaaattttctcattttttacaataaccaagtctaggaatattgtctgatatgtatgaatttctcttagaacttgaatggctgttgaatttttgctagatgttgttggataatttgtaaatattatcttaaataggcagttaaggttgttggccaaaaccatctcaatctttaagatttaatattgttcgcaaggtctttggtttgattcttactagtaaacttttagtggaaagttatttacttatatgttggtagccattgtaaacccttgctaaagcttttcctctcctaaacctatctgtgcgaaaaaannnnnnnnnnnnnnnnnncccnna

SEQ ID NO: 41618 - DNA, 269 bp, Glycine max
  unsure (1)..(269): unsure at all n locations
  Clone ID: PAT_MRT3847_137583C.1
ttgtacnnatcatcnaagttttttaccttnntctgctctttgcccttctctgacacatttgnncgccttgtagagcgtgttttggcaggaaggtggtatggcgaaggacgttgaggttgctgagcgtggctccttntctgggaaggactaccaggaccctccaccagcaccactcattgatnctgaaggnccnnanaangtngttnannaggctcntcatggtcnnnatnncantgncantttggtctnccannagcatacgncacacc

SEQ ID NO: 41619 - DNA, 197 bp, Glycine max
  Clone ID: PAT_MRT3847_137584C.1
tcgtgccgtaaacaataatctcataatttagagaatatatattaacagtagtacaattgtaggtgagcacctggcacggtttggtaaggtgtgggcatttgctagtgatgggaggcaactaattcaaagaagcaatatattaatgtacaaaaaaaaaaaaaacacaaatagtgtttatcaaccagcacagtcaaata

SEQ ID NO: 41620 - DNA, 331 bp, Glycine max
  unsure (1)..(331): unsure at all n locations
  Clone ID: PAT_MRT3847_137586C.1
gaatnttgnataaccgcgatcacaggttgccgcaccttagaacctgttacaaaagcaatcgtggcttgatctcaagaatctgtcaatttcttcctactgatctgtgtacgatttcttagggggaagacaatcactctctgagctgggcacagacttcctgaatcattatcttttccactcttacaatattggctgaacactctcctatttgatataagatttcgtgacagatttaaacttcttctggatctttttcagtgctctgcagaattccaagatcaagctggtgaaatctaggattagtgctcccactctcctatctggtatagga

SEQ ID NO: 41621 - DNA, 472 bp, Glycine max
  Clone ID: PAT_MRT3847_137587C.1
cccacgcgtccgtacggctgcgagaagacgacagaaggggatgtgggtcaagttgcacaaataaaatgtggtaacataaaggtatattatatgcttcaaattaagtgaccccaagtttttaatgttattccttcttttttgaatatgttgttctagcggacgtttcttccttcgaccacgtttcctcgtgatttttagtttgtgggtttcagttgtccttttattaaaaaaataaataaataaattcaagtgaccccattatgttgattcaggagtattgtgtttttggggaattgtagggggcctaagattcgatgttggggttgtttgtgcaggtgatggagggtgtgaaggagataacaagaaatggtgccaaatttatggatggaaaagaaaaggaattcgatgctataatcttggcaacaggatacaagagcaacgtgcctacttggctcagagtagaaattttgat

SEQ ID NO: 41622 - DNA, 221 bp, Glycine max
  Clone ID: PAT_MRT3847_137588C.1
tataacgcccggccacccccccacacgcaaaggggagacacaaacagacaagcggggtgcaaaaccagcccgaagcaaagacagggaacgagaacaggcgagggagcgggagggccacccgactgcccaacccagccagggaacccgaaggaggaaacgaccagcagcagccgcagccccaccaagacaagggccagacgaacgcccccacagaggcaacc

SEQ ID NO: 41623 - DNA, 324 bp, Glycine max
  unsure (1)..(324): unsure at all n locations
  Clone ID: PAT_MRT3847_137589C.1
ctcccttccccgaagaggaggagccncaggccggagggcaggcgaggagaaaacgaaggcccaccggacaacccagaaagttacagagacaggcccagaccaaacagcggggagccgaggacggaaagcgcaaggccggcacgcacaaggaggacccaacaagacgggagacacggacacggcacagaggcgcacagggacgacagcacggagaaaccgcaacaaggacacaaagcggcccagagggaaagacacgagggcaggcacgcagagaggcacgcacacgcagcacgaagaaaccgcggaaacggagcacaacacaac

SEQ ID NO: 41624 - DNA, 323 bp, Glycine max
  Clone ID: PAT_MRT3847_13758C.1
gtttttatggatatttttgatctggtttgatcgatgttttgttattttctggttgttcatttttttaaaatttgggggcaaataacaacatggctatgtatgataaaagaaacccccctgcgggattaaaagattttgcaaaccctgttttctgttgaagggttccacaaaaatggggttattttatcttaggctgaaaaacaaattttggctggggcccccggatttttttaggggtccctttccccaaaaatgctcccggcattgtgggtataaaaaaaaaagggcccccagggattgggcttgcttggggggcgggtttt

SEQ ID NO: 41625 - DNA, 701 bp, Glycine max
  Clone ID: PAT_MRT3847_137590C.1
ggctagaaaatgaagatcagatatgttaatcgttgagattggtaatgaaatgataggggtcatggggggttgttttgtttgaccccatgggaatgatggatgtgacagaggggtggtgtttgcatgggaaaagaagggttgaaagagaaggcaatgctagtaggaggacaattcattgcatcaactttgtttcctagactttccagtgccttcacctgtgacctgagaaacttgaggtagtttgcagcctcatcaagcattgatgctgtgtccatcttgcttcccccaggcacaagcttctgcaaaaccctaatcttctcatttattctctcccttctgtgccttgcagccacagtttgtggatcagttgatatcttcacattcttcctcttcggcttttcagccacctccaacccaaagttcactggcctaaaagctgcagccctatatatcatttccttcatttgtgcaattgcctctggatcaggctcttcaatggaagaagaaatggatgaatttggttgctggaaattgatattatttgaggaggaactcatatcccatcttgatttcttgcattctggttgataagtatctgagataagcctgaaaccaccttcttcaataggagaagaattctgaacaatactgaagcaggaatcaccaactttgatcattttagattgatcatgggcatgact

SEQ ID NO: 41626 - DNA, 250 bp, Glycine max
  Clone ID: PAT_MRT3847_137591C.1
cgactccacaaagtcttgattgataatattttaatgacagggacacgtcgaatgttttaaatattaaacaaaccttcattactgattttttacaagggatactttacattggttgaacccaaaccccataagatataacttaacgattaaccaatatactctttaattctttaaccactatacttacattgtacaattgaaaccccttcaaacattcttcacatattttttttctctgtactcctaaaaa

SEQ ID NO: 41627 - DNA, 160 bp, Glycine max
  Clone ID: PAT_MRT3847_137592C.1
gagccagatcggtcttaagctctgtatgctctgctcccactgagagttcaggcgtcgtctcaacaccacctctcgcatacgctgctgctgcagcatgtgaaatcgaccgggtgacctttctaatctcagctgctgtctgtgtactagggtcattccgatc

SEQ ID NO: 41628 - DNA, 447 bp, Glycine max
  Clone ID: PAT_MRT3847_137593C.1
ctaatccttactttaatgaacctggatatgcacacattagtgtttcagcaaatggtgaaaagaggggctaggtgatattatgaggacacagttattctatcattggggtcgatgacgtatattgttcgtaggacgggtagctatttcatggtcgttatgctaggtgtcatattgtgcaacgcgtgctatctatatgtttggtggtttgttactgcttacatggaaggttgctaagttgggtgtttggtcaaaggaggggctcaggacgtagatgagggagacagatagctgttacaggagtgcaagggttctttatccggatttatgaacatgcttggcaaagaatttgcttaaggtggtgcaatagacattgataaattgctgtcttcagcatcatcttcagtggcgtcaaaccattaggtgttagtattgcctgtggctacaaac

SEQ ID NO: 41629 - DNA, 489 bp, Glycine max
  Clone ID: PAT_MRT3847_137594C.1
tcgggtcagcacacacagccgaaaagcgcttcttctcatcgccttcgccttcaaaacttagaagcaccaatcccaaccagaaaaaatgtgcgacgaagaagttgctgctctcgtggtggacaatgggtccggaatgtgcaaggccggtttcgcgggcgatgacgcgccccgcgcggtgtttccgtccattgtgggccgcccccgtcatcaaggcgtcatggtcggcatgggacagaaggactcgtacgtgggagacgaggcgcagtccaagcgtggtattctgacgctgaagtacccgattgagcacggcatcgtcaccaactgggacgacatggagaagatctggcaccacaccttctacaacgagctgcgtgtcgcccccgaggagcatccggtgttgctcacagaggctccgctgaacccgaaggcttacagagagaagatgacccaaattatgttcgagacgttcaacacgccgggcatgtacgt

SEQ ID NO: 41630 - DNA, 496 bp, Glycine max
  Clone ID: PAT_MRT3847_137595C.1
cccatgctccaggtgcgcctgtgcctgttcgtccaactccgtggatctcgccgtcgcggaggctactgtgtcctttccgactctgcatcattttcaggaatttgaaggtctgcaatctcctcaaagccttcgagaaacaccctgcacccgtggacccttgctgaaatcttccttgctggaactgcattttatatcataatgcctaggaaaaataacctaaggaaaaataatgcaaggtttgttgatgaagaacatcatgatgaagtggaacattgtgatgaagaacatcgtgatgaagatgtgcatcattatatacagcaattaataaattcactgaataaatctcaatctgaatcacatggtactgagtctaatcatttgaacaattcagctagcactaatgctgaacaaggttcgttgaaaaccagaaatgttcgtgggcctaccttattaagagatatatggaccatgcctccagggaagacaattgatgtgc

SEQ ID NO: 41631 - DNA, 391 bp, Glycine max
  Clone ID: PAT_MRT3847_137596C.1
aaataaaatgaagttgttggttaattaaggcgcataatacaagaaggtttgtgtcaagcacatgtagttcttggctttcattgacacaccgaaaccggacaatgtaggacttgggattgattaagcggagagacaagtaaaaacaacgttgtcggcgacaagaccaaagccactagagaggtaggaagcattgggtggatgagtggtcgacgaggaaaccctgttgtgagtagattcattgttcttcctatgcgaatgtgattttgacatttttccagaggctgaagctgaagctgctgcctttttctcaagccttcgcttgataacatactcttctggaataacccacgcgtccgcccacgcgtccgcccacgcgtccgcggacgcgtgg

SEQ ID NO: 41632 - DNA, 611 bp, Glycine max
  Clone ID: PAT_MRT3847_137597C.1
attttataagtgatttttttatcacaaatttgcatataatccaatacattgtacatccaataagatagaagattcaatttgatgggataatctttcacccaaagcatgctttgctaatccgctactatgttcccagcacttttaataaaagttacttgactatctacaaaaaaaattgacattgagctttgcaatcttccagcaagcatttgaagtatataagtgcagcactcccaactccttgtttccattcattgaacacttgcaaattatcaattccaaaaatgacatattgaaagcacatctagaccgtcactctcttttgcttctgaacaacaacactttcgtggagcaaagcctggagctaggtcatgatgagaaatgagataggtcatgaaatgagggctttcaatgttcagcgataacgaggacgataatctctgaaatttagagggaaatgcgaatgaatttgaaatcaaattttctctggttcccagcaccgtcgccgcagccagagacattggctggcatgtccaccagcgttggaagctttgcaggagcacctccacttgaagccaaggatgaggacgaggatgaccattatcccggaa

SEQ ID NO: 41633 - DNA, 846 bp, Glycine max
  Clone ID: PAT_MRT3847_137598C.1
agagccaccaaaggaaacgatatcctctgggagacacatcagccaacatgtcgaaaatctctgtcgccggcgttcgcacgaacgttcaacagctcctcgagtactccaacgagaccaagaagaggaacttcctcgagaccgtcgagctccagatcggtctcaagaactacgacccccagcgtgacaagcgtttctctggaaccatcaagctccctacccttccccgtcctcgcatgagcctttgcgttcttggtgaccagcacgacattgaccgtgccaagcaccatggcgtcgacgccatgagcaccgacgacttgaagaagctcaacaagaacaagaagctcatcaagaagctcgccaagaagtacgatgccttcatcgcctccgacgccctcatcaagcagattccccgtctcctcggacccggtctctccaaggctggaaagttccccactcccgtctcccacgctgaggacctcgccaacaagatgaacgaagtcaagtcccccatcaagttccagttgaagaaggttctctgcatgggtgtcgctattggcaacgttggcatgactgaggacgagttgatcggtaacatcatgttggccatcaactacctcgtctctttttttaagaagggatggcagaacgtgggctccttgaccatcaaggcccccatgagcccccccaagcgcctctactagagggtcggtcgttacttctgctgggttatgtcgtagctggctgtcgaaaaacgactcgctacggattacgatcttacggaatctcgatggaatgaataccccccgatgggtctagctagcttgaatgcatgcatgaacccgtttt

SEQ ID NO: 41634 - DNA, 480 bp, Glycine max
  Clone ID: PAT_MRT3847_137599C.1
tgtagcagtgccgcctgcttggggggggggggggggggggggggggggggggggggggggggggggggggggggggggggaaggaagggaggggctgggctttccccggggctggcccccaacgcccagtttgcccaccaaagggctaaaaagcctgtgtagcaaacggcccctgccgaggtgcatgcagaacccaccccaaatgctgccccggggcaggccccctacttatgggggtacggacccggtagccattggccgggaaatagggcatgcagaattgcccagagagggctgattgatagctcgaagaagtagaagaaggaggaggaggaaggtttttagggcgataggccacgcgcgaaaaggccaactgcccgagtggacccggcgacaaaaagcataggcgggccacaaggttcactggatcgatttcgctaggttatcctagactggggggagacccctattgaaaggtaa

SEQ ID NO: 41635 - DNA, 173 bp, Glycine max
  Clone ID: PAT_MRT3847_13759C.1
atagctggtttttgtgatggaattacttgtttacagaaagaaagagttttcccgttccggtggcacacagggtacaccccggaattccaaacgggaaacccgggggggaccaattagggatataccgggggttaataaagaggggcgaaatgcgggctataaagggggcaaac

SEQ ID NO: 41636 - DNA, 165 bp, Glycine max
  Clone ID: PAT_MRT3847_1375C.1
caaaaataaaaaattgtgagtctgacatatctccactgaggcttgaaattaaaaagttgatggttagattaaaaactgcaaatgcgtaggctcaagcatatatacaatgatgttttggttatttaccagtcgattaaccatgttaaggtgaatctcttcacaccg

SEQ ID NO: 41637 - DNA, 258 bp, Glycine max
  Clone ID: PAT_MRT3847_137600C.1
cgcataaaaagagggaccatatgatgtggtggttctaccacgaggtaatctgggcgcacagaatttatctgagtctgctgctgtgaaggagatactgaaggagcaggaaaaccggaagggcctgatagccgccatctgtgcaggtcctactggactgttggctcatgaaataggttttggaagtaaagttacaacacaccctcttgctaaagacaaaatgatgactggaggtcattacacctactctgagaatcgtgt

SEQ ID NO: 41638 - DNA, 430 bp, Glycine max
  Clone ID: PAT_MRT3847_137601C.1
cccacgcgtacgtccacatctccccaattccttgtccaactattatgtaatctgctttatgtttcaatcatttcttcgtattccttcaacacccatcagattaatggcaaaagctatcctcttgagcaacaaatggtacggatatgagcaattctgggtcacacgttcttaccccacaatacagaaattcagccacgggaaaatggatctcaaggtgaaggcagcaacttccttgaattcaaatgccaaacagaaggcaaatttgtttgctgaaaaaaaggagagaatccggctgccaacatataatgatgatcttggaggcaagaaatatcacatcagtgaatttctgagccaacctagcggaattgcagccgtgttgaatacgaaggccttgcaatcatttgaatctcttgatgctaacacatacagg

SEQ ID NO: 41639 - DNA, 3927 bp, Glycine max
  Clone ID: PAT_MRT3847_137602C.1
gtttgtttgtcatttttgtcaacttgaccatttaattaaggaaaaaagatttcggcagtttaccaaattctctaattaatatttagttaaaattgtaaatttgatcttccagcttatctttagtaagcatgttgaccgccatgtgttattgaaagaattgaaaaatatccattaaagtactaagcaatttcattgaagtttcatccatcaagccactggaaactcaaaggaagaagccaagaagaactaactcggcgaaaaaaaacccaaataaaaaggagacagacatgagcgattatctcaaagagaaaggattcacactcccgggttttttacgaaaagcgaaaaaaagacatacagcctctcaaagagaaaggaggtcccaggttggttatcatgggagagaccaaacaacttgttacccttttgacacaatctcaagaggcaatgaggatgatcaaggatatagtggaaaaaagcagatcgagtaaaacgagcaaacgattactaaggaaaaccctcaagaatatgactcctctactgcaggaaatcaatcaatacaatgaacacttggacccacccagagaagaaatcgacactcttatcaaagaaaaagacgccgtagaagagattgtgtgctgctatttctgctccaggagcattcggtggaccaaattattctcttggctctcacatcacaggctacactgattgtttttgtttctataaagttgacaaggatatatttcaagttcaattgtcgcattgagaaaggaggtcctaggttggttatcatgggagagaccatacaacttgttacccttttgacacaatttcaagagacaatgaggatggtcaaggatatagtggaaagaagcagtttgtgtaaaaggagcagacgatttataaggaacacccacaagaatgttattcctctacctaactgaagaaataactaggcttaaaaaaaaaaatttaagagagagagacaattaagactttattaacaacattatgaagctccatggttgtttaagataggatgcaatcaacaaattgaaacgctttccaattgaatttcgaaagagactgataaatgacaaagaagatagtggaatgaagcagctcggcatgaaagcgcagtcaatttcaaaatatctcacatacaattatgattagactcgccaaaaagaccccgcccgaaaattgattgtttcaactgatcaaacaaacaattaagaccattcccaaataaaaagatccaatggtggagctcgagtgctattcctgccccatgagtattaggtggaccaaattttctctcttggcttgcgctctacggagatggactttggcataacaataataatccccttgctgcagatgacaaccaagttaagtatatcaaaaacacactgtatgaggtgaaagagtttcttgagcttctagacatagagaattttcagcagaaacttaaaggaattggatcaccaatcaagtgtcattttggtgttcctgaaaaccctggattcactattgggttgaatccactgttgagcaagttgaagatggaggttctcagggacgttaagtcctcccattttttgactggattggctagatctagtagtacaacttcggctacaaagctgcgtagggatgaataattgacagataattagaaggatactataaaattttggaaagtttttcaaactggaaatcctgaaactatgttacaacaactatttgaacaagatacatacctcttttctgaaattttctaagatgaagattcaagtactcgcatactgctttaggctgtggaaaattgaaggaagtcaatgtttgtctatgcaatatcatgaatctcaatattaaaaggtgtgcaaggtgtgaattgacttactgagttatgattatagagtattgaaaacttctggtatgggatgtagagacatctgctacatggtaagcatttgaagctattgcttccaaagttgcaagtaagcaagtttcatctcagttgcggttaacttaaactggcttcattatttttgccataaaaacatgtcatgcttctttgagatcttttgaagctatgctttctgaatttcaagtttgaggttgatcaagtagatgttaacttaatgagatttcattcaagttgctggaatgacctttatctattaatttgatagaccaatgaaagtaactgttaccatgataaatacaatagctcttgcatgttttggaagataatcccaacaacaaggagtgcttcatggacttggggttatttcctgaagaccaaagaattcctcttcctgttcttattgatatatgggcagtgttatatggatttgatgatgacggcatagaagcaatggacatcataaataaattagactccatgaatctggttaatgtcttagtagcaaggaaaaattcaagtgactcagacaattactactacaataaccactacgtcatcctccatgatcttctaagagagcttgcaatctatcaaaacaacctggaaccaattgaaaagagaaaaagactgattaatgacataaatgaatccgaggagaagcaacaaggcatgatagcccgcttattgtcaaaattttgcagatgcagtgttaaacagacactccaacaggtccccgcccgcacattgtctatatcagctgatgaaacaaacacttcatatcagtcccacatacaaccatccctagctgaagttctggttttaaatcttcaaactaagaagtattcctttccagagtacatagagaaaatgagtgaactaaaagttcttatcatgacaaattatggttttcatccgtgtgaactagacaatttcaaactactcagctctgtatcaaacctgagaagaatcagactagagcggatttctgttcctcacttaggggcattgaaaaatcttggaaagttatccctctacatgtgtagtaacataagtcaggcttttgaaaatggtaccatcacagttttggattcatttccaaaactatcagatttgaacattgactattgcaaggatatggtgaaattgcctactgggatctgtgatattgtctcactaaagaagctcagtattactaattgtcacaagcttagttctctgccccaagaaattggacagttgttgaatttggaactcctgaacataagttcctgtactgatttggaagagataccagattctattgtaaaactttctaagctaagacttcttgacctctcaaactgcataagcctttcaagtttaccagaggacattggtgatctatgtaatctcaggaatctcaatatgacaagctgtgcaaggtgtgaattgccatactcagtaaccaatcttgagaatttgaaggtggtggtatgtgatgaagagacagctgcttcatgggaagcattcgaagctatgcttccaaatctgaagttagaggttcctcgagtcgaggttaacttaaactggcttcattctattagctcctaagacatgacctggttcatgggaagcatttgaaactatgattccaaatctaaagtttgaggttcctcgagttgatgttaactgaagctggtttcgttcaatttgctcctatgacctctttctataaatgttagaccaatggccgtgactgtttcatgtgtaataatcttgtttaaaatatggataataatgtgtattcaagttgctgtagtagtatttgcatgtttagtgtaaacagtactatgttacttgaaagaagttggcgattttatttgttgtatgtgttgtcatgagtgaacatcttagcatgatgatgtccacaaaataattgaactatggtaagttaaaaagtttgtttttataaagtatgttttcttatcttcaaatttaaaaaaaaaaaaaaa

SEQ ID NO: 41640 - DNA, 574 bp, Glycine max
  Clone ID: PAT_MRT3847_137603C.1
cccatgcttccgaaaatttgaaaaggaaggatttttcattgtatcgttgattctgtgagactctttgtatctattctctgtttaagaaaataagagaaaggaggtcctaggttggttatcatgggagagaccaaacaacttgttacccttttgacacaatttcaagaggcaatgaggatggtcaaggatatagtggaaaaaagcagatcgagtaaaacgagcaaacgattactaaggaaaaccctcaagaatatgactcctctactgcaggaaatcaatcaatacaatgaacacttggacccacccagagaagaaatcgacactcttatcaaagaaaaagacgccgtagaagagattgtgtgctgctattcctgctccaggagcatttggtggaccaaattattctcttggcttccactctacggggataaattttggaataacaagaattattcccttgctgcagatgacaaccaagttaagtatatcaaaaacacactgtacaaggtgaaagaggttcttgagcgtctagacatatagaattttcagctgacactcaaaggtgttggatcac

SEQ ID NO: 41641 - DNA, 316 bp, Glycine max
  Clone ID: PAT_MRT3847_137604C.1
gggcaccgtcacttctgcaccagttcctattccctcattcagtgtcctcaatgcaagcgcaagtaaagtgagcgtcgcctaagataaaggctcatctccccaagccataagcctctgcaccattaaagcttccctcaaatacaatggagtcgatgttgagtgcactggtgctagcgtaatacaagctaacaacgccatggacattgaagagctactgggaactgatgactggaatctggtaatctctaccaactcttactccgtggaccctgtggaaaatatccagcccgacaacaaccaaagtttcacccacaac

SEQ ID NO: 41642 - DNA, 952 bp, Glycine max
  Clone ID: PAT_MRT3847_137605C.1
cacgcgtccgttctcctccttttgtgcttccaactcttttctttgttatattattctctttcactttctcccaacccttggaatcgacatgactatcctcattgagcaatctgatcactttggtaatattttgtgtttttgtttgtaatctttaactttttttagcaaaatatataattaatattattattattattattattctttgagaattatagagaagattctaatattggcaatagaggttggcgggttttcctgaatttacaagggacatgtctttctttaatctaaactttttttcaaaaaaagaaaagtgcaatatttgtaattatccgtctaatgaccggaagaaaataagagatttcattcctataacttatagtttaagataaaatggctttatctgtttatttttccatgaattttgtaccattgtgttgtgatagtaattggtgcaaaatctgtcttttttcggcctgaagcacactttttttgatttggaagtgcaaaaaggttctcccaattgtgtggcttttcagttactaggtttttaaaattgcaggggctgaagtagaggcaaagactgaaccaataaatgagagggaactggtgttggatggtggatttctgataccacagaccaactcatttgggcacatgtttaggtttcaatctccataacctattcacacccattaatattctcgttcaatttttcttatccaaatccaaatatatatagaacaaagcgactcgccaattttaactttttcaataattttgtcaacgttaatttgggtgttactgacttattatcatgataaatgatgacgaatggagtatcttctcttggtataatgcgcgatgtgttttacgcttttagctaaaccgaagaaaaatatttcgtattaaagtagaaaaacaaaatataaatattaagtactccttc

SEQ ID NO: 41643 - DNA, 362 bp, Glycine max
  Clone ID: PAT_MRT3847_137606C.1
gcgattgacactgcgcactatgatggacgattgacacatggcgatctgtcccgtaatgcacgacacaaagatgttaaagcgatgacatgaagagacgtgaacacaatccaacgcgcaacagtcgtgaaggcctgcaaaatctgtgagtacggcgaagagaaatgcctttttacaatgttggacctgtaacaactgatcttgaccacgattatgatcacataccctctcgaatagcggctgccaatattgcggcaattattgctgactttatgcgttttgagacttctaaggttcatgttgttttgcctcaccatgacgacatcaaggccttgaatgtagcctactacatagaactgcatgct

SEQ ID NO: 41644 - DNA, 392 bp, Glycine max
  Clone ID: PAT_MRT3847_137607C.1
ggctcgagcacaaacgtcccctctgcaacgactttgattatcttcttcttctacaactccgattgggttcccgctggcagaaaaacacccttttcttcacattcatctaaggtttaactctaaccgagatctccatgcttagttcgacgaattcttttctcttcaagtactcatttccgtcgcgtataaattcactgatcccctgaattgaagaaagaacttccaatcaagctactttcagtcttgtagctggtaattgatttgagactaaaagtccattatgaagtttacctctgaggtgaaaactgtaaaaaagtacctacaccatctgtatattaatgtgttctctgttgttgatagagcatacaaaaaaatggggacaaagattttct

SEQ ID NO: 41645 - DNA, 881 bp, Glycine max
  Clone ID: PAT_MRT3847_137608C.1
gttgggtttctatcaacctgaactcctaatccaacaaacttttttttatttagaaaccaaccaagttgtgttatttctatttggtttggctatatctctatggcactagtcaaagacctatgctaaccttttcttctccctctaaatacaaattctgagattcatattcatccgtctgtgtacaaaatggcaggataggaagactgcttcttggtttctaatttcacagtggattttgctgcccggagattctgccagctaaagacaaataaagatataggtgctatcgaaagggttctgcgcatggttgtcacttttatccaagaaatcaaactgaattggaacctagttgtttcacaagtctcttaataacatcttatttagtatttgcagatgtaatttctggctacaagagttcttcattttctcgttttgcaaataaggtttaaacatttaagttgaatgtctgaagaatcataaatcaatttttttttcgggagcatttaatttgatttcaagagtgcatttgttatgtcgattggattttttttacttttccgattacagcagaggccactatgtcaggtattggtctttgctatggtaaggtggaattttaactgccaggtcaactcatgtttgactgaatccaataactaacttttacttttaagaaaaaagtttgaaattcattctggtggttggtcaagtgagatgggatcatattcggtacttgaacaatttcaaccacggtggctcgtctaagaatcaaatagaactaaattctcttccactgattatgattagttcaattttatagatgggaaaagatacttgcacaaattatgtgagagatgtgcataatctggaccattaccttt

SEQ ID NO: 41646 - DNA, 753 bp, Glycine max
  Clone ID: PAT_MRT3847_137609C.1
agaaaaaacaatgtttagattaaagtaaatggtccacaagaaaatagaatactagcaaatattacagcaaatcgtaacgtttaattttgagaatatagacagaacatggaaatcaaccaagcttgacagtaagaggcattatcatattgaattgacggtgacaatgaactcaaaattgaagcagttaataaatgtgtacaaaacaatgaaatgtttgtatttgtaataatgaccttgttcctataatttacctaggcctagttctataccacctgaagaaacaaattatgatttcctttttcctttcttctgtgtatatcacttaccatcaatccccaaaaaaaaaaaaaatcaacctcaagaattgccatgtttatagtttttatcctatacacacctttcacccccctaacaagaagttaaacatcagcacaattcatcggtgcatatccaatccttgatttcttcacatcatacaagatgtgaaaattctgctgctggtagtttccaattattgaaagtgcagacataggagtccccaaaacagccaagcaaacaacatcttcaggttcaatctggatgaagtaattctccacaggaaaattccacacagctccatcagcaaacaagattgcaaactcaggaagctccattttctcaacaccagacacattatagcatggctttagagggggaaaggtttccactagtggaaaacctttaattttcctcatgaatgcctccttgataatc

SEQ ID NO: 41647 - DNA, 334 bp, Glycine max
  Clone ID: PAT_MRT3847_13760C.1
cccacgcgtccggaagaaatggttttattgacaaaaaaaaaaaacataaaaaaaaaaaaaaaacaaaagaaaaaaaaataagaaaaaaaaaaaaaaaaaatatatataaaaaaaaacccttaaaaaaaaaagaaatgataataaaaaaaaaaggggccgcctttttaaaggatcaaatttaacatcccccggcttcaaatataaaactttttttatagtgcacctaaaattaaattcagggcccgagatttaaaaactgttgaactgaaaaaaccttgggttaccaaaattaaaatgcttaaaaaaaaatccacttttaccaagtgggagaaaa

SEQ ID NO: 41648 - DNA, 167 bp, Glycine max
  Clone ID: PAT_MRT3847_137610C.1
aatcttcttctattcttatactgatcactgacacacactcaccctgaaatgttgaaaatgctgggacacgctataaacttcgtggagaccgcaaggtcacaccgcatctgcttgtactgctgactcctttaagaacatgcttattttttccaaatggacaactacac

SEQ ID NO: 41649 - DNA, 561 bp, Glycine max
  Clone ID: PAT_MRT3847_137611C.1
gaaggtttcccgtcatcactgtatgacgtcctccttctgtctcagtgaccaatgacggtttgagcggcagaggggtgaggaagccgataacgcgtggtcatgccggatgtgcgggtgatacaacactccccccatcttccccacacactacggcgcgccagtccccgctttctggttggttggttcttgttttgggcgtgtatgggggcaacgccattcccgccgtttggttgtgcccccctttggccttccgaggtttttttggttttttttcctctgtggtcttttggcccgttgtttccctttttttggggggtcctttttctttggttggggttttctccttttcccgtttttttccccgccttttatttgccccccgggtttatgggggtttttggggtttttgggcctgtggggcctttgcctttggtgtttttccccgtttttttttgggttttttttttgccccgtgttcttttgtttttttgggcccctttttttgggtttgtttccggggtgccccctgttctttttgcccctttttttttgccccccttt

SEQ ID NO: 41650 - DNA, 259 bp, Glycine max
  Clone ID: PAT_MRT3847_137612C.1
gaaaagacaggagacagtctgttgtaaacaattagaccctaagaagtaacacacctgccctcgcctgtgcgcgcctagctctgcatttgcactcgactgaccagacagatagtccactaccggactcctagaatgatccgattctgaccttgctatgtgacgctgtcaatacctgcaaaaggaatgccttcttagcctaccaaatctccaactccaccctgggagacatctacttaagtgctcagtattgagaactttt

SEQ ID NO: 41651 - DNA, 689 bp, Glycine max
  Clone ID: PAT_MRT3847_137613C.1
acgacccacgcgtccgtttttctttcttttctcctcattttgtcccccattgttaactacttcatagaaatactagctagcttcttgttacatgagcatccatgtgatgtgaaaatatgtaaaatatgtatagtgcatgcttttttggtctatatatatataccaaaaaaacatgcacatatattatcaatcatggctatacatattttcacatcacatggatcctagctcatatatatatatatatatggccccatctcctggcttacttaatctaattagtcactctaataaattccatatttagagttcttgcaactgtgtccgttttttgttgaataaatgttctatgttctatgttggttttctctcttgcattcatctttaaaaccaaggagttgctgttgtaaacttgtatatcctgctggctatgatgttactatcatctatatgtttctggacatactatatttatttatttgtttgcatagtgttattgttatttttatgttaaaatgttattaattaaactgtttctgttggtgattttttccccgtggaaacttctgaaaagggattcgaacaggtgagatttccttggagaccagagaagtttatatgtttcgccaaaattttagtaggggtcctctcaaaatattgacgaggtggctcatattccttactatctt

SEQ ID NO: 41652 - DNA, 392 bp, Glycine max
  unsure (1)..(392): unsure at all n locations
  Clone ID: PAT_MRT3847_137614C.1
gggaaggatgnnaggattgattttgaagatgtgggagatagtgattgtgntatagaaatgatggggaggggggggattgngaaggttganatttnaatttttttagttaaagttagtgatagtttggtagaagttagagaaatanatggntgttggnaataaagtnttntggatttgttgtaaagattttgaaatttatgatggtattgatgatagtggttattgaatttggnntggagtattatggataaaagaagtatggtagnantttatgaaagaggaagttgaggtagagangaagtttgagtaggtttgttaattgattgattagttgaatgggggatgaaagtggtgatagaatttaaagaatgttgggtgtgtgtgggattgaa

SEQ ID NO: 41653 - DNA, 137 bp, Glycine max
  Clone ID: PAT_MRT3847_137615C.1
caactttgacagctacatcatgtgagacatttcgcttacgaagcgcatgacgtaccgcggggagggggtattactcgaaatgggcctacacgtcaaatcatcaatacgatcacggtataatctcgcgctcgtgcatc

SEQ ID NO: 41654 - DNA, 509 bp, Glycine max
  unsure (1)..(509): unsure at all n locations
  Clone ID: PAT_MRT3847_137616C.1
gaaaaaatctatgtttaatttgatagtaatttatcatgtctacagtcggaacagggaagttaactcgtgcacaacgaagggctgcggcccgtaagaacaagcggaacactcgtgtggtccaacctgttattgtagaacccatcgcttcaggccaaggcaaggctattaaagcatgggccggttacagcgtatcgaagtggactgcctcgtgcgcggctgccgaagctaaggcaacctcggctataactatctctctccctaacgagctgtcatccgaaaggaataaacagctgaaagtaggtagagttttattatggcttgggttgcttcccagtgtcagtggcacagtgaaatcctgtgttacagagacgcagactactgctgctgcctcttttcaggtggcattagctgtggccgacaactcgaaagatgttgtcgctgctatgtaccccgaggcgtntaagggcataacccttgaacaactcgctgcggatttaacgatctactta

SEQ ID NO: 41655 - DNA, 574 bp, Glycine max
  Clone ID: PAT_MRT3847_137617C.1
gacacatcttcttgctgttgacatcacttcagggagtggcttgcatttgcttcgccaaggcttaaattacctgagagaagggtccaaagaagctcgcataggttttctgtttagtgccaatcagagtacagattcatttagcctcctttttgtgaaggtttttgaaatcacttcatcttcatatagccataagaataacgtgttagacttcttggaacagttgtgctcactctatcagcagaaatacttgctttcatcagctgtggaagctgacagcatccaagcatttattgataaggtctgtgagcttgctgaggctaatgggttaccatctgatggctatagatctgccctcccagaattttctgcggatgaagtgagaaggcatttgagcaaggttgagaacttttttcatagggtacttgggtctgaatctagtgctaatgctgtcttcactaatggaagggtaacctatcctattgatgaaagcacatttttgagccctgatctgcttcttcttgaatcaatagagtttaagcagaggacaaagcacattttggaaattattgaagaa

SEQ ID NO: 41656 - DNA, 358 bp, Glycine max
  Clone ID: PAT_MRT3847_137618C.1
gaaaaacccgccttttttaaaaaataattcaaaaaggggctactatgaaaccctttaaaaattttttttggcaatgggaaaaatttaaaagggacattcacggaaaccttccaaggggaaacgggaccacatgattttccccccaaatttgaaaaggcgggggaaaaaaaactttaaacaacccacaattaagctaatgggaagggaccccgggttttggaacaaaaaaaaattataaggtttggggacttgaaaacctcacccaccaaagaatttaagggccctaacaattaggggttaaaaaattacaggggtttaaataccgtttatttaaaaagatataccatttttaaggacc

SEQ ID NO: 41657 - DNA, 334 bp, Glycine max
  unsure (1)..(334): unsure at all n locations
  Clone ID: PAT_MRT3847_137619C.1
ctttttcttcttctcaaaaaccctttgaaaaaaaaagatcttctancgctgtcaacccccaaaaccacaccacccatgcttgctcacagtttttaccccgttgccatttcagcaacctgggatcactacaccccaaatttcatacacacctgtcaaatactctgcagccatctgataaacttttcccgcatcatggatcatagacttcatcttttttctgatgcatagctatctcttctcagcttctatattataattttgagttaattctcacttacattgaaagtntcatcaattgtatctcctggacttgataatgagctgcatgctattt

SEQ ID NO: 41658 - DNA, 686 bp, Glycine max
  Clone ID: PAT_MRT3847_13761C.1
atttcccctaaaccttcttcaataagaataataatattctctctttgttcctctctctaaaattaatggctgaagcacaaagtggccaagctagtgaagggattaaactgtttggaacaacgattacgttgcatggaagagaaagaaaagaagatagaaatgatagtgaagatgggacagaggagataaagagacctgataagatcataccatgcccaagatgcaagagcatggaaaccaagttttgctacttcaataactacaacgttaatcagcccagacatttctgcaagggatgccagagatactggacggctggtggggcccttcgcaacgtgccagtaggagctggcaggcgaaaggtcaaaccgcagtttggtcaggaggagaggttggctttggatgaatggcatgttgccgccgtggctcatggtgatttccggcagctttttccatctaaaagacggaggatgagctcaggtggtcaacgtcaaccttgttaagccttcacttctttcattcctttctctccccccccccctttttcttgtattgacatagatctccctttgaggttttttaagtaattcttcttaaaaacttaggtatcaattatcattttaaatgtagttttgttgttgtttctcaataaataaaaaaacacaaggtataacagataattgatc

SEQ ID NO: 41659 - DNA, 2143 bp, Glycine max
  Clone ID: PAT_MRT3847_137620C.1
gcacgcccccagggggccttccggcctctgcgacgtcttctcctccgccctccatgggggcccctggttggggtcctcctggttcgcaggcctcagctcttcctgggccgaaccctctctcggcttctgcctttcccccgttggcttttgccttcgtcacagggcccccggctgggtgttcggcaccttctccctcagcctccggcgaaacgcctgaattgtggcccaaattatcaggttccaaagacaccctttttggactctggtcaagagctgttacttcggaggcagcaacagcagctccaactgcttcctcaccatctgctgcagaggccatccatgttggctgcaccaaagcagaaaatggtgaactccggcagcgaagacttggcgacccatcagcttcaacaggctataactgaacagcttttcaaagctgcagagctgatcgatgccggtaatctggaactcgcgcatgggatattggcgcggctcaatcaccaactttctcccattgggaagccttttcagagggctgctttttatttcaaagaggccttgcaattacttctccatccaaatgccaacaacagttctttcaccttctcacccactggccttttgctcaagattggtgcttacaagtcattctcagaaatctcaccagttctgcagttcgccaatttcacttgtaaccaagcactgcttgaagctgtggaagggtttgatcgcattcacataatagattttgatattgggcttggtggacagtggtcttctttcatgcaagagttagcactcaggaatggcagtgcacctgaactcaagatcactgcatttgtgtcaccctcccaccatgatgaaattgagctcagtttctctcaggagagtttgaagcaatatgctggggagttacacatgtcctttgagcttgagattctgagccttgaatctttaaattctgcttcctggccccagccacttcgtgactgtgaagctgtagtggttaacatgcctattggctctttctcaaattacccatcatatctacctttggtccttcgctttgtgaagcagctcatgccaaaaattgtggttacattggatagaagttgtgatcgaactgatgcaccatttcctcagcatctgatttttgcacttcagtcttattcagggctgcttgagtcacttgatgcggttaatgttcacccagatgtccttcagatgattgagaagtattatcttcagccatcaatggagaagcttgtcttgggtcgacatggtttgcaggaaagagcacttccttggaaaaaccttctcttgtcatctgggttttcaccattgacctttagtaactttacagaatcccaggcagagtgtttggtgcagaggactcctagtaaggggttccatgttgagaagaggcagtcttcccttgttctttgctggcaaaggaaggatctcatctcagtttcaacttggagatgctaagcagagccattttgcacctttgaactaccaatttaattttaaattctaaagtgctacataacttacagcttctattgatctttcttgcttgaatttgccttgtctatggttctatgctaattgtctgtttttaggatttattattttcagttaaggaagggaagtgaacatattaattagcaactgaatgacgatttatgagcgtgatatgcagtgtattattataaataggggcattctatatatgcattttgtcctgttttaattgcctaaatttatgggcttttcttgtatgttttacaagaaagtaacactaattaccctgtaaagttgaggctttgtttgatgtctttgatcctgataagtagtctctctctagcacatgtgctctatgaaaactattcatgtagttgttgaaggtaacactttaacagttccccatactattcagtgtggaatggaatgggaattattcagttagtttggtagtttgcagaaattgcattacatatacactttatctgcacacttttcacctagagatatggagccaggttttttaggaatatttattgtggttgctcaatgctgatcagcacttgctgccttgtatgatattttaagcagaaaggaggaaataagtaatctgcac

SEQ ID NO: 41660 - DNA, 491 bp, Glycine max
  Clone ID: PAT_MRT3847_137621C.1
cgcccttaaatttgggggggggcggggaaatatggacaagttgttaggcgagagaatattctacagaaatttattgattcaaagctcttaaatagggtacgttataaattaattcatccataaatagaaatgaattgagttagattgaagctttattactaccttttatgaaataacgggggagggggaacatattaaaattctaaaaaattgattttttttatctggggggggcaccccttcatttaacaggagatttatattgctttacaacaaaaaaaaagaaaagttcttttatgcttcacaatacgacaggtgctataaaaaatattgaattatataaaatttggaatgaaccagttctttagaacaaaataatcccaagcaatgcgcgggttattagttctttttaaattcatttatacaaaaaaccggttaataaatttgttaaattgaaaccgttctaaaaaactaacgagccccacactaag

SEQ ID NO: 41661 - DNA, 479 bp, Glycine max
  Clone ID: PAT_MRT3847_137622C.1
acgagggtacttctgctggaaaagcaaaagatgtccagattgatgagtacccaacagaagcaagaatgttcagtggactccctttcaccaaatcatggcaatgaattgaaaaatatggattcctcttcgcatgtggattttcaaaaggtggggaatcctcccttcgacgagaatgctgcttttgatttccacggaccaacttttagccctcttccaatggtgtctggaactgaatatcagaatcagcctcaccctttcaaacttccagcagcaagcccctatgataactttatgaaagctgctggttgttgatcctgtagttatactgaattacatactatacaaggtaattgaaaaatcataatgaaatgactagaggatcacagggggaaggcttctaagcattgtaacttcactagtgcacaaggccaagatatatatatatatatatatatatatgtgtgtggaaatattagtgt

SEQ ID NO: 41662 - DNA, 434 bp, Glycine max
  Clone ID: PAT_MRT3847_137623C.1
caaacgcataatctgaaccacacctactgatctacactgaggaagacaggcccaacatttcagcttttgggggaagagcaaacggaaaccctcataagagaggcaatgtgagagagagaaagttgctctttttttttttctcaggaggtttcggaaatggtggctgccatttcggaagacccattgacctcttctaatggcaccatccccagaagaccaaagggtaggcaagtttcttcaaggtacatgtctcactcaccttcaccttcttcaaccacaactacaacaacaactacttcaacttcaacttcaacatctacaacaagttcttcttctcgtcgattcccttcccctcttctctcgcattccaccaattcctccacccctttgctcccaaagcgttcccaatcggtggaccgccgccgcccgcgccc

SEQ ID NO: 41663 - DNA, 493 bp, Glycine max
  Clone ID: PAT_MRT3847_137624C.1
aattcggctcgaggaagacgacagaagggggatattggttctattctctatatctgtttgttcactaactatatattgatttgttatctagcgtaagataccattttcatcattcattgcataatataaatggcttcccgtaagtatttctctattgttatctatgcttttatacttggagcttttgcaaatacggcattctcatcattgtctcgtgattactatgactactcgtgccctaatgctttgagcaccattagaagtgttgtggaggctgcggtgcagaaagagcgccgtatgggcgcatccttgctacgcacacacttccgtgattgttttgttaatgtaagactttatgtttttttactcaatatatgatagtttgatgttagtttgtttaattttgttaaaaatatcaaaatgagatattcaaacggataatttttctatcttccttttctctttactcttaaagtttcattttcaaattacc

SEQ ID NO: 41664 - DNA, 271 bp, Glycine max
  Clone ID: PAT_MRT3847_137625C.1
ctcctccccttccgcgaagggtttaacccaacctcctccaaaattaaaggataaaggttaagagaaagggtacacacctatagtggggatagtccaaatttacactgggaaatctccaatcacagggcacaccatatataaacttttaggcgcttacaaacgtgttatagtgagatatttgaaagaaactgctcagataaaaactacgtctctcaaatatacccttgtgcgttaaaaaccttaagcgcaacctgtaataagaaacacaaat

SEQ ID NO: 41665 - DNA, 342 bp, Glycine max
  unsure (1)..(342): unsure at all n locations
  Clone ID: PAT_MRT3847_137626C.1
acgaattccnaattcgagccgcgcgcccggctatccaaacacacacttacaaataactactagttctataagactgaccaaaaaagctgtctccgggtataatttggaaaaagcagcccatgctacaacacgacaatgcacaaccttagctgaacatcatatagacaatcctctcatctgttattccattggacaactctataaactataactgcatgatatccttattgtggaattgctatttctgcagcatacctacatatgaaaaatgttgacacagagtccattgccctacaggactcaaatgaatctcaagtacactcatcttcataaagaagtgca

SEQ ID NO: 41666 - DNA, 391 bp, Glycine max
  Clone ID: PAT_MRT3847_137627C.1
ctggaccaagcctccggttatgtggataagacgagagcatagggtgacggaccgtacaaccgaaaccgctcgcaagcgcacctggggaacgggatttagtaagcagcttgctactctggtgtgcacgtaagtctgaacgaactgctgatggctctatgagctgccctcagacccggtgagtcaccgtcgttctcattgtgagtagaaaagatgaacactgtactatgctatataggacgaagcgtcacattcagacgctgtctggtgatattgcagatgtctgcaagactgcacgtggatgctggagccacgccgggctagcgctgccagtctcttatgtggcatacgacgttgggctctgacgggacaataacctgtgtgtcattcactc

SEQ ID NO: 41667 - DNA, 1144 bp, Glycine max
  Clone ID: PAT_MRT3847_137628C.1
ggacgagcgccaggagacgacgtcggggtagtaaaaaatttatggaaaatagctaaagggagaaaaagacgatcccgtgttgactgaggcttctctggaagagaagagaaccaactcaactcaaaactcaaattatttggtttctgctctgtaaattccctcctgatgcttaacaacatccatcttctccaaaacaaaaacaaagaaatatctaaaatctggaacttacgctgatccataatttgttgcttttcttccttcgtacaatgtcagaactttagcatcacctttttgcctttccttcttactaaatgaaaacataacaaacaaaacagcatacaggaagatagcattctatccaacgacaaggctgaaaaaattgaatctcccaaatatgaggaagtgagtgaaaaactggaggaaaatgagagcaaagaaaaggaggggagcaaagcaaaggatgattcagtagaagttgagtataaaatgtgggagagctgcaagatagagaaaaaggagttctcgccggagagagaagcagagcctgaatcatttgaagaggaagttaactcaaagatagaaaaaggtggtgagagctttgataagataaatggaaatgctgtaacagagaacattgatgagagtgggagtccaccatcaaaacaagaacaattgaagaagaagaagaagcctttgcttggcaagttcggaagcctgctcaagaagaagggtgctagcaaccagaaatagaacaattgtatgagaggtaaattgaacattcaattgtttgcacgtgtttacttttgtgatttttgcttctcagaataggatttttatggtatcacgaggcttgtaatattgtttaggatttttcgctagtgcttcttttggattgtggttctccatgttagtggcaaattgtatgtgatgcagatgcagattccctccttttttctcccatctttgttcgtcccttgccctcctatctagatttgacgacagaagtggcaagttggattgtatttttcgtcatcccaaattcaaatgaaagttcagaaagtttgatgtttcagttctgaggcttacttgacatttttgacataatgataatttaatgtaccgcgttgctgttagaggacgttac

SEQ ID NO: 41668 - DNA, 193 bp, Glycine max
  Clone ID: PAT_MRT3847_137629C.1
agatgacttaacgggtcaactttattacattatacagaggctcagtggtacgctgcaagtaggtcaacatcttgctgaggtgactcgctttctctcggttaccagctttcttttctctgcaagcatcattcgatgtggccgaagaatatgcgaagggcactcctcctcaaaacggcgtagctgtcatgaccct

SEQ ID NO: 41669 - DNA, 508 bp, Glycine max
  Clone ID: PAT_MRT3847_13762C.1
attccgttccaaggaaggtttcccgtcatcactgtatgacgtcctcctatctttgggggggggggggggaaagaaggaaatgcacagcgtattagcggagggttaccgtgtaagggcaccacactgagactgaaaaaggaatggaagaggagtggcgcaagctagaaagacacacgtgttagcaacggcaagtcgtagtggaaagaacacaaaagcaaaattagtgaggcagtaaagcagaaatggttggcccgggaaagcgtgcccttatagcgttactctttggtatcagtatagagcggaacgacgccagtggtgggtcgggctccgatggtgcgcgagttagttatggcattcgtaataaattagcgtatattagggcgtatcgacgtgtcgcggcaagcaaggcagttaagaggcgcgatttacgcgccgataggtagagtaacagtactatacgaaatcacaactggtacaggcctaggacgcacaggttcagaaaaggtga

SEQ ID NO: 41670 - DNA, 1095 bp, Glycine max
  Clone ID: PAT_MRT3847_137630C.1
agctctgcggcacgacgcgcgaagggggtcgcgaaattctcccatctgcttctcactgatctccattcccattccatggcttccactgaatcatcccctttcaagaaaattcagattcaaagggatgacactacatttgacgcatatgtggttggaaaagaggatgctcctggaattgttgtgattcaggagtggtggggtgtggattacgaaattaagaaccatgccgtgaagatttctcagcttggtagtgggtttaaagctcttattccagatttatacagaggaaaggttggtctggatgttgctgaagctcagcatttgatggatggtcttgattggcaaggtgctgtgaaggatattgctgcttcggttaactggcttaaagcaaatggctcaaagaaggctggtgtaactggattttgtatgggaggtgctctctctattgccagttctgtcttggttcaagaggttgacgcttctgtagcattctatggagttcctgcttctcaacttgctgaccctgcacaagccaaggctcctgttcaggctcattttggagagctggacaattttgttggcttttcagatgttacagcggccaaggcattggaagagaagctgaaggcatccggaattccacatgaggtacatatctatcctggcaatgcacatgcattcatgaacaggtcaactgaaggaatccagaggaggaagaacatgggaatgcctgatgaagatgaagctgcagttcagcttgcttggtctcgctttgagacatggatgacccgttatctgtctagttagataatttcctagctagctcaattccgaagtcacatgctgcatgtgtattccaccttttaagtggttatattgaacccgttttaatggccccacaaactgtggagaccctgctgcttgctacacttcatttatttcctgaagtttggatgcatgtgtgaaatttgagttggaaataatattgaaatatttgtggcttttcttcaattaagtaaattatttgtgctaaaaaaaaaaaaaaaaaaaaaaaaaaaaaaaaaaaaaaaaaaaaacgtgaatgcgacgtcatag

SEQ ID NO: 41671 - DNA, 2701 bp, Glycine max
  Clone ID: PAT_MRT3847_137631C.1
aacagtacttgcaaggaacagaatgaaaagtattaatggtgctgcagttgtcatacaatcatttattcgtggttggttagtcagatgatgctcaggagatataggactatcaaaacctcggggcattaagactaatgagtcagatgaggttctggtgaagtcatctttcctggctgaattacagcgccgggtacttaaggcagaagcttccctgagagagaaagaagaggaaaatgacattcttcaccaacgccttcaacagtatgagaacagatggtctgaatatgaattaaagatgaaatccatggaagaagtatggcagaaacaaatgaggtctctacagtatcctccccttccggcaacaatgaatgacaactactccgcgttaaggtagcaggatcatttcccatatccttctttttcaactgttatatttaagctctcatgttcccatccgtctgtttccaaatgaaggcctgaaatgatttgagtagcctgaaggagtctctttttcggaacttggctggcgagattgctttaggaaaatcgttgtcgttttgaatctagggtcaattgtttcaataaatttaacatttagagattgctacatgacattttatacgcagattaatgcgcaagactgcccgatatccttgttaatatgagtaaactcataatcttgggcagctcagatgatgaaaagtaattgaaaggggtcggatatcaagaacctgtatatgtattaatttgtctcatcaaaagtttactagaatatgtagtttttttcttaatgtgaatgttgtctctcaacatacacttgcggtttacctttttgatatttagcaacaggaggaaatatccataatgtatgaagatggcaaaaagttgaatttgaagacaatcaagattgccttaatctttttgaaaagaagccactggggttactatccctgttagatgaagagtcaactttccctaatggcacagatttaacctttgctaacaagcttaagcagcatttgaattctaactcatgcttcaaaggagaacgagaaaaagcctttactgtacgtcattatgcaggggaggtaacttatgatacatctggattcctggaaaagaacagggacctattgcacttggattccatccaacttctatcctcaagcaaatgtcatcttcctaagttatttgcatcccatatgcttactcaatctgagaagcctgtagtaggtcccttacacaagtcaggtggggcagattcccaaaagctaagcgttgccacaaaattcaagggacaattgttccaattgatgcaacgtttagagagtactacaccacattttatccgatgcatcaagcccaataatctccaatcacctggatcatatgagcaaagccttgtactgcagcagttgagatgttgtggggtcctggaagtggttcggatatcaagatcgggctttcctactagagtatctcaccaaatttgccagaagagccttgctatggatgattctgaaagaaattcagatgcttctgttaatgcaagtgatacagggatttcagctgggatgtaggaaccaatcaccggcgccaagaaagcaatggggcaaaatcaatgagtgctggtttgagtgttataagtcggttggctgaagaatttgagcaaaggagtcaagtgtttggtgatgattctaaattcttggtagaggtaaaatctggtcaagttgaagcaagtttgaacccagatagagagcttagaaggttaaaacaaatgtttgaagcttggaaaaaggattatggtgcaagactacgtgaaacaaaggtcattttacataaacttgggagtgaagatggatcgattgagaaagtgaagaaaagttggtggggaagaaggaatagtacaagaataagttgatttatttattttatcttattggggtttggctttggtctatgcactgttttaagggcattgccaactatatatcggaaaatgaggaaaatacaataggaaagatacgataggagtagggcgaataaattactgttcttctccttgaaaatgttgcctctcaggatccacttagtgtttcagttgctattcttcatcagttcaacattttgcctgagatgtatcaagttggctacacaaaactattcttccgaacagggcagattggagtgcttgaagataccagaaatcgtaccctgcatggagttttgcgtgtgcaaagttgcttcaggggttaccgagctcgttgttatcgcaaggagctttggagaggaatcactactctccaatcatttattagaggagagaaaagcagaaaggaatatgcagcttcgcttcagagacatagggctgctgttattatacaaaagcggatgaaaacagtattttcaaggaacagaatgaaaaatattaatgatgctgcagttgtcatacaatcatttattcgtggttggttagtcagaagatgctcaggagatataggactatcaaaatctcaaggcattaagactaatgagtcagatgaggttctggtgaaggcatctttcctggctgaattacagcgccgggtacttaaggcagaagctgccctgagagagaaagaagaggaaaatgacattcttcaccaacgccttcaacagtatgagaacagatggtctgaatatgaattaaagatgaaatcca

SEQ ID NO: 41672 - DNA, 593 bp, Glycine max
  Clone ID: PAT_MRT3847_137632C.1
agcatgactttgcctactcttttgcatgatagaactggtccttgtatttaagccggtccttgttgtgttcaatataattttgcgttatgtatttaagtcgttgaaatagttttattcccaaggcctaagtttaaactttatttactcttcttttgcattgtgtctttaataggatgcgttaactgtgattgcagattggagtgcttgaagataccagaaatcgtaccctgcatggagttttacgtgtgcaaagttgcttcaggggttaccgagctcgttgttatcgcaaggagctttggagaggaatcactactctccaatcatgtatttccctcttctcacctaattctttcagcctaacactttccttgagaactctaaccgactgactattttttacccgtttatgtagttattagaggagagaaaagcagaaaggaatatgcagctttgcttcagagacatagggctgctgttattatacaaaagcggatgaaaccagtacttgcaaggaacagaatgaaaagtattaatggtgctgcagttgtcatacaatcatgtaagaacccttctgtcgtcttctcgcagccgta

SEQ ID NO: 41673 - DNA, 754 bp, Glycine max
  Clone ID: PAT_MRT3847_137633C.1
tctagcctctctattgcaaaaaagagccttgctatggatgattctgaaagaaatttcagatgcttctgtttatgcaagtgatgacagggatttcagctgggatgtaggaaccaatcaccggcgccaagaaagcaatggggcaagatcaaatgagtgctggtttgagtgttataagtcggttggctgaagaatttgagcagaggagtcaagtgtttggtgatgatgcaaagttcttggtagaggtaaaatctggtcaagttgaagcaagtttgaacccagacagagagcttagaaggttaaaacaaatgtttgaggcttggaaaaaggattatggtgcaagactacgtgaaacaaaggtcattttgcataaacttggaagtgaagatggatcaattgagaaagtgaagaaaagttggtggggaagaaggaatagtacaagaataagttgatttatttatttatttattcttatttggggtttggctttggtctatgcactgttttaagggcattgcctactatatatccgaaaatgaagaaaatataataggaaagataagataggagtaggacgaatgaattactggttactgtaattaggttagctgttgctagccactcttattttatgagaaatttctgcacgagttgtggagttagatactcaatacgaaccgtgtgagtcatgtaaatcatcaccccacgccttggtatgtgaattgcatgtaaaaaaaatagcgagtttttcagcatt

SEQ ID NO: 41674 - DNA, 393 bp, Glycine max
  Clone ID: PAT_MRT3847_137634C.1
tcaccttctactacaatcccccctcttgaagcatatccccctcctgtctctcttacatctggggtctcttctttctctgattcattatccaaccgggtctctgatctgcacacaacttcagagtctctgatccacctaccaccgagccaaaacatatactgtgctcaccaaccccatcgctgaagtagcctctgcaaccaagcagcaacatcttcaccatgggtgtcgacgaaacccaccacgacgagggcgctcgcaaccactcggtcgccctccagacggccgacaacatcgaccagatcgaggctcctgtcacctggaaggcctacctcatgtgcgcctttgcctccttcggtggcatcttcttcgggtacgactctgggtacatcaacg

SEQ ID NO: 41675 - DNA, 495 bp, Glycine max
  Clone ID: PAT_MRT3847_137635C.1
ttttttttttttttttttttttttttttttttttttttttttttttttttttttttgttttttttgggggcaaaatttggggggctttgttaatttttttgggctcaaagaccaatagcctctttccggaagaaggtgtatcccccaccaaaaaggggcggggggctttcattattttttaaaaataaaaggaagtgttttttcttttccccttaaagggcaataaaattaacctatgaaaatgtttaaaaaaactttcctcgctaattaattccttgggggaaggggaatttataaccccagcgggtttttctacaaatccaccttttgcccatggttacccccccccccaaaaccctcccctggttttattttacaaaaagggggggcaaaaaaatgaaaaaataaaaccccgggaaatttttcatttttttccctccggggattcattttggacgcaggaaaaccatgggtatctcctttctttcccccccc

SEQ ID NO: 41676 - DNA, 522 bp, Glycine max
  Clone ID: PAT_MRT3847_137636C.1
tcccggcgtcgacctcacgctgtccgaaaaaaaaaaaaaaaaaaaaaaaaaaaaaaagaaaaaaaaaaaaaaaaaaaaaaaaaaaaaaaaaaaaaaaggaaaaaaaaaaaaaaaaataaaatatagaggaaaggtaaaaaaaattaaaggaaacggggtttttggttttttggttctggggatttccttgtcgtttctctgggttgttggctgtttgggttcatggctgtggcgcccgtttttcgttttccttttttttgcccgtttcttttcggtggttatttgcagttgcgcccccttcctttcccattggtcctcccctctgtttttgcccatttggcgctttgttggtggcgttttcgcgcagttgcttttgctgcttttgccagggttgtatacccctatccttaccgtttttttgctccctttcttgcccgttttccggtttttttcgtccatttcttagccggttcctccctttgggtttccggggtggtgctttatggggggcttctttttggg

SEQ ID NO: 41677 - DNA, 597 bp, Glycine max
  Clone ID: PAT_MRT3847_137637C.1
cagaaatgaaaagaaaaaccatatctttaacctgagtccattataagcagaaaaggaaactggattcaaggaatacaagaagtccagccaaaacccagaaaaaaaaagggcatcaattttccttacaacaacaacaactgggtttgcatcaatcagcgtttgatgcacccaaaaggaaaagaaaacatagggtctatacaaattgcggaatttcacagaagaaaagaaaataaataagagatattcttcaactcaacggaggtagccatagaaaggaagaggtgtacttgcgcgattcaacgttccaagaggctcagcggttctctgttgaactatgaccactgtttccgcgacgctcacgacgaactctatggctagtcgaaccatggttatgcacaattcgagtctgtgaatcaccatggttgttgctctgttctgatctgtttttggtgtttatttttgttactttttttttctcacttgagtgaatgcaatggcttatctcatgaatgaatatatgcgtccccttctgtcgtcttctcgcagccgtacccttctgtcgtctcgcagccgtacccttctgtcttctcgcagccg

SEQ ID NO: 41678 - DNA, 416 bp, Glycine max
  Clone ID: PAT_MRT3847_137638C.1
tatttttttactgaaatggaatcaacatttaatttgcaaattttggcacacaatcaaataaaaatgttgagagctggattttccacccaaaaataattttaaaaaccagaaacaaaacgagttagatgaagatctaattgaaatgattttcacaacagaacagggtaatctactaaaagcaagtttcactagaaataacaggtcaaactgctgaaggccccctggcaagaacgaacactcctattacagcaagcactcaggaacttaatgtgcacaagttctactactttgtgactttctaactggatggaagttataatgggccatagctttttttgctgggaaacgctgttggtgatgatatcgaaaacacttgttaacaaagtctaccacctctggaacagccatgtgatgat

SEQ ID NO: 41679 - DNA, 387 bp, Glycine max
  Clone ID: PAT_MRT3847_137639C.1
aaaaaaaaatttcttggtcttttttctccaggggggttattttcaccttttgcttcacacaacatgggatttccaaatcccccgcaaaacccccgggccgaccttttcaagccatcatgaaagaaccggaaaaaaaaaaaatttgagatataacaatttttccttgttaagcaggatcccgggcccggaatatattagggggcccaactaaaggcaggggccaagttgcccctgggcttaggggcttgaaaccgggcccttacctagagggggacagctttttttattttgaagggctttaaaggggtccaaaccttttccggggagggcttacacccccggggcctactgggaaatgggggagggccctttggggaaggaatcatt

SEQ ID NO: 41680 - DNA, 407 bp, Glycine max
  Clone ID: PAT_MRT3847_13763C.1
gctactcaacgagtataaaaagatatgaaatcagaatattagatataccgaaacagaggtcaccctatctcacatacgaggaacaatcccaatcacaacagagttgttaactacatcaagaatttacatttgatcacgacacaaaccaaagcaacggatttagcgtgattttccagtccaaatctgctaattagctcatgtttgaagccatgtcaaggatcccatgatcaaatacttgctaggaagatcttcaggagagggagcaagatatgtaaacttttttgtctgaacgaaaacgtatagttacataaagtaacccagcatcattgctggaaatgatctcatgatgttccttcgaaaatgaaacagctaggactaaatggagcaaataacgatttatatttaca

SEQ ID NO: 41681 - DNA, 235 bp, Glycine max
  Clone ID: PAT_MRT3847_137640C.1
gttcaatatcctagtacagcggattaaagcatttaagatatactatgatgcgagcgcggttcccattactgttactgggagtggttttcctggcatcagtggctgtctcatttggcattgcgtattgggatacgcagaaccccagtcacaacaagtgcctccgaagttgctatagcgagacagactcctacaggcaccaagcatgccacgctcgttggcacctccttagggtgga

SEQ ID NO: 41682 - DNA, 1051 bp, Glycine max
  unsure (1)..(1051): unsure at all n locations
  Clone ID: PAT_MRT3847_137641C.1
aagcaacacttgaagaagaaaacccactgatacactttattttttgtttcgatgctctctctcgcgaaacggcttcaggttcagcccctgacgacgccgtttctcctcgggcagctccggtgggcccgaacgcggccgaagtcaccgccggtggcgctgaagagggcggaggagcggtcggagtggtgggcggtggacggcgaagtgcacgagatcggcgatctcgtgccgctacgtgagcgcttcgtgattccccgagagaacatccccaacaagcgccgcaagcagctcagagaacagttcatgcgccgaacgcgcctcgttcttaaggaatccgagcatgatccttggtgcaaaaagtatatggagctgtataatgaactaagagaaaactgggagaggctttattgggatgagggttacactaaaaagcttgctcaggatcatgcaaactatgagtctgctgaagatgatgatggagatttctccccatacaggagtagaaggcctcagtctcaaatggagcatagtaaggaccaaaattttgggagaaacaggcaatctgataactgggagaaagttaaccttcttcgggataaatttgagtatgacagagagagaagaatgagagagaaagcatttgcgcccatgcatggaggatctgtgcctgactctcatgattcagaccgttggaaccaaccgctaaataccgaccgatatttcagccaaacagaacggcattgagaggaaaataaactaaaccttcctgccattgtggaaagtgataggatagttttccttcccactagctcaatgctatatatgctctgccaatatgactagttgcagttaattctggcatattgttaaggaagtgtttacagctagcgaaattgatgtttttggttgtgttctgaactgaaatatgataatgtattaatacactgacattttattacttctttgtctttttctctttctctctttattgnacacaatggtataaataacatgtttcaaaataaaatcgagtgctggagttctcaactct

SEQ ID NO: 41683 - DNA, 547 bp, Glycine max
  Clone ID: PAT_MRT3847_137642C.1
aaaaccaaaaccttgcaaaattcattcaccattttaactagaaagggcatgccattaaaaaaatttgcaaaaaattgtttaaacctcatacaaattgacaatccgtaagcccaatacggattgaccaatccgtattccgcttacatatgaggcctaaatgatgccatacggataggggaatccgtaagcatgcctcatccgtattggggaatctgtatgaaacttacaaattcgtcaatccgtattagctttacaaaggggcaaagatggaattttactgttttgctggatgtaccaacaattgggctaggggagcataacaacaaccccaaattcaagggctcaaaatagggcttcttttgattttgattcaagggatcgaaaaaaaaagtcaatattggtccaagaaacccaagttggctcagtaaccggggtgttgcgcctgagttccggagactgacccattagcagcacacgcctggcagagtcacaaaacgacacatgtgggcacgttatagggttttggacttcaaaaccttctaggtta

SEQ ID NO: 41684 - DNA, 562 bp, Glycine max
  Clone ID: PAT_MRT3847_137643C.1
tattcatgcaaatcactgaagtatcgtcgaccgtcgcacatgagcaattagatgtcccacttcacattctcccactctctcactttttctattctttcttttttcctcctctttttcgtttgtagttacgatacatgcaatattgtaactactcactttaatttttttttttcgtgcattttttttaatattttttctgagtttttgtttaattggtctgcagaaacatggaggcaatctttgtaaagctcttaaaggctttcttgaagagggttcgatcgacatcccaagtgaagaagagctagatcttgcaattaacaccccacaagatgatagccctggcgcaagtaatcaaaaccctttatctcaatcaagcgcctcacctgtttccccaaggagaaagtcactggggcaaaggatgaaggaagcttataaagcatggaaaaagaagaatgcgggagcttcttcgtcgcagcaaaaggatgttcccaaaattcctctaagtcctactcagaaagaacaaggacctaatttgggccggcatccaactttctcgtccttg

SEQ ID NO: 41685 - DNA, 491 bp, Glycine max
  Clone ID: PAT_MRT3847_137644C.1
aaaaacaaaataaaatccttactcatttaccaaaatggggattttcagaggatattacaatttaatcacaatatcagctgaactaggatacaaacaaaaatccaagcatcaacgcagcccaactggtaaacaaaaggggcattatagactattacgggtacaaggtaaaaattctcccccccaagaggggaaaagaggaaacttaggggtctatcatggtaaaaaaaacttttcattcctcctcaaagccggaactttttggagctttaccatgtttattcacagggccattggcaggggggggcttattttttggggtcggaacatcctcttcatcttcacgggactcactctcggaggcataaacaaactcttcatcctcgggggcctaatcctcctaaactccatcctccatgaaagggccttcatcagccaaaacagcacccctggggccagcccgagcccgtttcaaaactttggagcttaaaatt

SEQ ID NO: 41686 - DNA, 325 bp, Glycine max
  Clone ID: PAT_MRT3847_137645C.1
tcttcctcatacacatctatcgagaacaagactgcattttatctcaccatcccatatactgggactagatatatcatcagaggagaacatcttcaattcaccaagaattatcccaaaatcaatcttcttttcctcatcccatatatatccaagcatcagactaattttaaaagaactaaaattataaaacattcaaatcatcaaaacccgtcattattccataaacttatcaactcttaacattcaacttcacaatttaaaacaactttcattctcaacgtacatacaatcttttaacctgtaaactcaaattcgttgactccta

SEQ ID NO: 41687 - DNA, 255 bp, Glycine max
  Clone ID: PAT_MRT3847_137646C.1
atgattctatcctacagatactatcaaaatgactgggataaacatgggagtctaattattgaatgtgagtactgaaacaatagaattggatagcccgaatggtattaaaaatatggcgtactaactcacattagtcatttatgataccatttaccgaacagctagcgtcgctatggaacataactttatggtttcaaaaagaagccggaaaaaagttgcttctattgagatatgcgaaatagtcgctatacttct

SEQ ID NO: 41688 - DNA, 374 bp, Glycine max
  Clone ID: PAT_MRT3847_137647C.1
ggcacattaaaaacaatagatcctttaaaaaatgcaatagatttttatctggagatattattgaattctacacaaaaaggggagcttccactaggggaatggaactatcaaattgaatatgggtcataaccgggataataatctgatatagatgggggggaccttcactttttccatgggacactatttacaggaccttttttggttttccacgggatcaatctcacttttttttttaactggttccggtatgaactactaatgcaaaaatttgttttgttacaacttacaaataataatcaagggatttatttacccctttggaaagcattcaggggcaacagaagctaatcttaagcataggttttgtcacc

SEQ ID NO: 41689 - DNA, 1252 bp, Glycine max
  unsure (1)..(1252): unsure at all n locations
  Clone ID: PAT_MRT3847_137648C.1
aattcggctgtccagctaattaacaaaacaaattaagtaataaattacttatcatagaaacatggcagccctcaaacaagtttcatccctcttgctattccctttgtttctcattttttccctattcaaatcctctcatgctggtgggattgcagtctattggggtcaaaacggcaatgaaggctccttggaagaagcttgcaacactgacaactaccaatatgtgaacataggtttcttgaacgtttttggcaacaaccaaatcccacaactaaaccttgcaggccattgtaatccaagcaccaacgagtgcaccggattaagcaatgacatcaatgtatgccaaagcaaaggaatcaaagtgtttctctcccttggaggcgccgttggaagctactctctcaactcggcttctgaagccacagaccttgcagcgtacctatgggataacttccttggaggacaatcaaattcacgtccatttggtgatgctgtgttggatggcatagactttgacatcgaagatggttcaggccaatactatggtgaccttgcaagagaacttgatgcttatagccaacaaagaaaagtgtacttggctgctgcaccacaatgtccataccctgatgctcacttggattcggctattgcaactggcctttttgattatgtgtgggttcagttctacaacaatcctcaatgccattatacttcagggaacattgataacctagttagtgcatggaaccagtggacctcaagtgaagctaaacaagtgtttttggggctacctgcatctgaggcagctgctccaagtggtggttatattcctcctgatgtgctaatttctgatgttcttcctgctatcagcggctctcccaagtacggtggagtcatgatttgggacagattcaatgacggccaaagcggatacagtgatgctattaaggccagtgtttaattagtttgattatatgttaagtaatgcaattagttaatcttcggaataagtagcacgtttggtaggctttgttcctgcatgttgagtgctatgtgatcagataagatatttttagttagtttttaatttttttaaaataatttttaatgtttttttagtcactgcttgaaatagcattataatgttatcttagatttatgggtctctacacttaattatatatgttgttcaaatttatagtttttaccttcacattgaactccaactgtaagtanngaatattgcctgatt

SEQ ID NO: 41690 - DNA, 332 bp, Glycine max
  Clone ID: PAT_MRT3847_137649C.1
gtactaggcctgcggctggatggggaacgcgcttcacggggctgtgtgggtattatgcgcctgaagcgggtcaccaacggaacccgcctttgggaacgcgttgacaggcactgctgttacgccgaccacctgtgaaggcacgcctagcttgcagcgcccaccgttcatgggttgcgacctacgccatttgaacacagacgagatactcgccgctgggttcaaagacaatcaggaccaccaagtgaggaaccgatctggtgctatgggaccccgttgcaagaccatatccaccctcaacccaagcggcgacatctacactgagaatacgggga

SEQ ID NO: 41691 - DNA, 316 bp, Glycine max
  Clone ID: PAT_MRT3847_13764C.1
cccacgcgttcggggagagaaagttgggtttctctctctcgtatctggaaaaagtttcgactcttgaggcggggtttgagggatttccggtttgggttggcgcgtcgtgagcaccatcagctcctatgaatctgaggcgacacgctgcagagcatcgcttccgggaggacttacattcctgcagctcctggaggggagtctatctcagaaagggccaagtttgtaccagagcctcgaggcaaggccgtggtgaaaacacctaccattgagacactctgcacagatcaggatctacctactcacacatcaaaagaaa

SEQ ID NO: 41692 - DNA, 224 bp, Glycine max
  Clone ID: PAT_MRT3847_137650C.1
ataagattgtagacttccactggaattcgtcagatccttgtacaattgtcagtgtctctgatgatggcgagagcactggtggaggtggaacactgcagatttggcgcatgagtgatttgatctaccgcccagaggatgaagttcttgcagagctggagaatttcaaggctcatttggccagctgtgcaccgaagaattgagtcatgtgggtcacctgctgaatg

SEQ ID NO: 41693 - DNA, 369 bp, Glycine max
  Clone ID: PAT_MRT3847_137651C.1
aaacaggtcagtaaataaaataaaatataggaattccataaaaatcactcgtggggaaggttataataatgcgtgtcatacataaccttatatcatcaagcaaaactattttgtaaacgatgatcttgtatctaccctttccatccacaaccctaataactacattaatgatcatgagtgcggctgctcttcatcatctatgcctatttcaatgataaattatgagcttataaaaacttaaactatcgaagtggataagaaaactatcttattaatagttagcaaggattgttttcaattgcacgtatatttactggaaataattctaatcttaccaagcataggatcattcccccaagactattttcc

SEQ ID NO: 41694 - DNA, 269 bp, Glycine max
  unsure (1)..(269): unsure at all n locations
  Clone ID: PAT_MRT3847_137652C.1
cgaatgctgccatccagaataagcaagaggaattacccacatctgagtctacaactgcagcaggcaacatctgcacccatcagttcagctacaaacgactccagcattaattcacatggnaaaatcaccagtcttgtctggtgagccaactgtagagacacttaagaattctggcaaagagcctattctgaatcatcaagcagtagccctgcaccaggatattaataatgctgatgctactaatgtgcataacaatgtcccctcaaagc

SEQ ID NO: 41695 - DNA, 1454 bp, Glycine max
  Clone ID: PAT_MRT3847_137653C.1
gcgttgccccgtggcgcctccgagggggccactcacggtgtctctggtccttcgacgtggtggttcgtgagcgacgcggcgccttctctggctcctgctatcctttcctcgcgtcgccattgctacgttttttggtgaagtcaccggattcagcgtcctgttgggaatgtccggggcattggaaactttatgtgggcaaacctatggtgcggaagcatataggaagtttggaaactacacttggtgtgcgattgtgactctgacattggtttgtctcccgagatttctgttgtggatattcactgataaaatactgttgctgttttggcatgtccctgtgtgttgggatctcgttcgtgagtagtgactgtgactcgttcgagctctattagctcttgctgtcccgtaaccgctgaatctggcctgcctggcacatagtatgatctaccccccggtttgcagctcaatcaccactctctgtttgcgtattccttttcgttgcagtccagtgttcttgaaattagctatcccttctggactaatgttttggttcgcatgcttgtccgatgaccagcttactttgcttccgtcacctttgacttatccttaacttgttcctgctgttctctttttctgccttaacactacctcattgcgcttcttgattccttatgccgtgggagcctctgcaagcactcgggtttcaaatgaactaggggcagggaatccaaagacagcaaaaggtgcagttcgtgtggtagtgattctcggggtggcagaggcagctattgtgagcactgtgttcattagttgccgacatgtattaggatacgcgtacagcaatgataaggaggtaatcgattacgttgcagagatggctccactcttgtgtgtgtctgttactgccgatagtctaattggagcactatcagggattgcgagagggggaggatttcaggaaataggggcttatgtgaacctgggagcctattatcttgtgggaattccaatgggtttgttattgggttttcatctgcaactaagagccaagggcctttggatgggaactctatcaggctctcttacacaagtcattattcttgctattgtaacagcactaatagattggcaaaaagaggcaactaaagccagggagagagtagttgagaactcaattaaagctcacatttgatgtattcctatcaagtttaagaaaactgaaaaataaatgactgcaagtgctcacaatcgaagtctttttggtttctgcattgactgtgatcagcagtggagtggaaagatagtgagtgtgtgtcaggtttcattaattatgtttttggttcattttttgtgtgtttgtgaagagatttaatcatgttaacatagacaacttggtgtgaatatgtgatgggatttttgtactggatttaatcatgttaacatagacagccttc

SEQ ID NO: 41696 - DNA, 1074 bp, Glycine max
  unsure (1)..(1074): unsure at all n locations
  Clone ID: PAT_MRT3847_137654C.1
caaatgatggattggntctaagccaggtagcttgagatgtgtttggtagcgagacacaaagttatgttatgagagtgtgagtggctatataagctgtcgtcgcatgcttcgctcttaaacacaacggctgctcatcctatattctcttcttggatcatcttggttaagctgcagatcagaatagaataataataaataaagataagatggagactcatttggttttcttgcttggtttgatcttcactctagttgccggcgttggagcccaagcccaaggcccatccacctctcctgcgcctcccacaccccaagcatctccacctcccgtccagtcttctccgccacctgttccctcttcacctccaccctctcagtctccaccaccagcttccactccccctccatccccactcagctctcctcctccttcctctcctccaccctcctcccctcctccttcttctccaccccccgcctctcctcctccttcttctccaccccccgcctctcctcctccttcttcccctcccccttcctctccccctcctttttcaccacctcctgccactcctccccccgccactcctccccccgcagttccaccaccctcattgaccccaacagttacacctctttcttctccacctgtctcttctccagctccgtctccttccaaggtgtttgctcctgcactctctccttcccttgctcccggtcccagcctctccaccatctctccctccggcgatgacagtggggctcaaaacttgtggtcctttcagaagatgattgggagcttagtattcggatgtgctttgctgtccatgttgttctagacatcgatctctgtcttcggactcgcagatttttctgccaattcatgttattttgctatttaccctataccttacctttatatattattttgtggatgtgatcgtgggagtttattactgtatttgaactatataaattgcttgcattcttgggaaaaatgaggggaggttttgtattcgagggcagttattttgtatgacattactattagtttatcgatcgttgcattcgagt

SEQ ID NO: 41697 - DNA, 494 bp, Glycine max
  Clone ID: PAT_MRT3847_137655C.1
gtctgacggagtcgcgtaatatattgagacactcgaaattgattatcgaagctctgagcaaattcaaacaacagtaactttttattcggatgtctgattgagtcccgtagtatatcgagacgctcgaaatggaataccgaagctctgagataattcaaacgacaataactttttactcggttgtctgactgaatcgcgtaatataataagacactcgaaattgattatcgaagctctgagaaaattcaaacgacagtaactttttactcggatgtctgactgagtcccgtaatatatggagacgctcgaaatggaataccgaagctctgagataattcaaacgacatcaactttttactctgatgtccgattcagttccgtaatatatcgaaacgctcgatattgaatgttgaagctccgagcaacttcaaactacagtatctttttactcggatgtctggttcagtccccttctgtcgtctctcgcagccgta

SEQ ID NO: 41698 - DNA, 477 bp, Glycine max
  Clone ID: PAT_MRT3847_137656C.1
ccacgcgtccgcccacgcgtccggcgcgccctctccctgctcaagctcgcccttggcgctcgcccgtgatacctgcgctcggctctgcccatcttcctctgccgcgcgccgtacgcccagccgagcgtctccaccgcacgctcctccttcctccgaaccgagctcctctcccatggccgaccgtcgtgtgcccctgcagcgcggatcccttcctccctgccctctgcacgcgtgctgctccagctcgcctgggcgcggtctcaccttgctgccacaaccgcgcctactgccgcggccggcctgctcccttgtgcgcgctctgtttcctcgccgagctcgtccctgcgcgccgaggtcgcgtgcagctcgcccagctcggagtttccctgtccatctcaccacgctcggtctctagctccctgtgcgtgtctctgttcatggtcgtggtgatgctgtggcgtggcgaacgtcgtgcga

SEQ ID NO: 41699 - DNA, 193 bp, Glycine max
  Clone ID: PAT_MRT3847_137657C.1
aaaaaaaaaaacggccgctctaaaggatacaggccgatctacacgatccagccacatctaagctcgcctacgacgtcacctatcttcaattcagtggccgacattcatattcactggccatcggtaaaaacgtcgtgtaagggaaaaaactgccgtgaaccaaattaatcttctctgcagcagagctcctttc

SEQ ID NO: 41700 - DNA, 231 bp, Glycine max
  Clone ID: PAT_MRT3847_137658C.1
ggctcgaggtatgtcatgattcacaacagagcatctatggtaagtgacatgatatagaatgtatgtcatgacatacatgctatgacatacattctatatcatagcatgtatgcatgattcacaacagagaatctatggtaagtggtaacaatagttgatattctaaatcaccaagaacccaataagcatagattctctgttgtgaatcatgacatacacgctatgatatag

SEQ ID NO: 41701 - DNA, 277 bp, Glycine max
  Clone ID: PAT_MRT3847_137659C.1
ctttgacttcgatttatgaagtcaaatttctcataaggaaacagtagcaatttgaagttttcctctctttaaattttaattctgttagacataatttaaacatgttctcacatgatacaatctattggtctctatacttaaaggaataatcaatctcaacagttcaaattttcttcacacggtttcttatttcaaacaaaacccaatgagtcattttggtttaatttttttctcccccccccacaattttccatgttttgcacaatatggaggaatc

SEQ ID NO: 41702 - DNA, 1279 bp, Glycine max
  Clone ID: PAT_MRT3847_13765C.1
agcaaacacaaacacttgacttgaagtactaagttagtgtgtttgagcaaattaactatggcttcgttttgttctagattgacaatttgtttggctctgtttgtcctcatattggggagtgccaatgcccaactttctacaaacttttactaccattcatgtccaaacctcttctccactgtgaaatccacagtgcaatctgccatatctaaggagacccgcatgggtgcttctctccttcgcctgttcttccacgattgctttgtcaatggatgtgatggttcaattctattggatgacacatcaagcttcaccggagagaagaacgcaaaccccaacaggaactctgctcgtggattcgaggttattgacaacattaaatcagccgtggagaaagtgtgtccaggagttgtttcctgcgcagatatccttgccatcgctgccagagactctgttcagattcttggaggccctacatggaatgttaaacttggaagaagagacgctagaactgctagccaatctgctgctaacaatggcatccctgcacccacttcaaaccttaaccaactcatctcaagatttagcgctcttggactttccaccaaggacttggtcgccttgtccggtggtcacacaattggacaagcaaggtgcacaaacttcagagcccgcatctacaacgagaccaacatagaaaccgcatttgcaaggacaaggcagcaaagctgccctagaacatcagggtcaggggacaaaaatctggcatcacttgatcttcaaactccaaccagctttgacaactactacttcaagaacctcgttcagaagaagggtctcctccactctgatcagcaactgttcaacggtgggtccaccgactccattgtgcgtggctacagcaccaacccgggcaccttctcctctgatttcgccgccgccatgatcaagatgggagacattagtcctctcactggctccaatggagaaatcaggaagaattgtagaaggattaactaatttaattcagtcttgaatattaagggtcctacacatacgcaagcaatttaattgtgtttaataagttgttaaaacatgttttggttgtattttggattcctagtgtagtttcggtgatcaatgccgtctactttagtgtgttctacttccctttatttttgtttcttttttactttttccttaactatattgtagggaaaaaaaaaatcctttatcaagcatttatcaagaacggagtttgctttttcctgctcccttc

SEQ ID NO: 41703 - DNA, 246 bp, Glycine max
  Clone ID: PAT_MRT3847_137660C.1
gatcattagaggttgttgatattgagtattgtcagggggatttgcaaatagcatatttctttgcaatcaacagaattacttggcctagaagttcactgaaagtaagtggaaatcattagaggttgttgatattgagtactgtcaggggggtttgcaataaaccattgaacaaaatgctgcatgctcaacttatattcaattgtaacagttttcagccaaaagggcaagcaccaattagttgaacct

SEQ ID NO: 41704 - DNA, 1202 bp, Glycine max
  Clone ID: PAT_MRT3847_137661C.1
ccacgcgtccgcttgaggttgaagttggtggtgggaggaagctatccaaattcagctcggtacgctggttgtatataataggaattcagggtatttcctggaaatttgagctgtatcgtgggggtcagaagttaattattcctattttgctgacaagacatctgaaccctgtgtttgctactggagcatttgtcgttcctgcatctctttactttgttctaaagaaactttttattaaaccttattaccttagaaggaataaacagaaggctctggaggagaaggagaaaacttctgctcaggttaaggaagcacgagctacagcagagaaagctcagaatttacaacaaaatgtggctaataggaaaagaaacaagcaattagaaacaggtggactggttattatgagagcactatatggaaatcagagaattttgaacaacttaaagtcatcaagtgaaacaagttttgaattaacttcagaagtcattgatgttacaatacctttgaattttctagttaatgattctggccaactcaagcttcatgaaggtgtaaaaaaatcaggcatcatgggtttctgtgatccatatcctggaagtcctaaagacttgtatgtagagtacgtttatgctggcaatcaatacagggtttgggctggtgattatgaagaattacagatccctcagggcagccacaggatataaaggattattattaacacatcaatatatcattgtaacctcttgcagttttgcctgatttatatacgcttgaggtactactgcattttatcctgtcagatggaattagaggaggtaccttttacgatttttgggccagtggtaccgtcacttattttttaaatcttttatttttcccataatttattacaccccgaaaatgtatgaaataaggatattttaggaggcggttttagtattttgtcaagttgcgtctctctctctaaactattaactctgctgctggatcccaattttggttagtcatactccttttattgttgattcgttgcccgttcacataaattctttctcgagacaacagccaacagctgttggaggtttgatttgatgtttgtattatcaagttttcatttgggtttgtacttaatatatgataccctatttatgacaataacatcggtgaatcaaattgagcgccgaaacatgtttttgttt

SEQ ID NO: 41705 - DNA, 257 bp, Glycine max
  Clone ID: PAT_MRT3847_137662C.1
aagaaagggtcctttgttcccctcctctttctgtggatgctcagcctcagcagaaagaggaggggaacaagggaagaaagggtcctttgtcttcaattttgagggctttttactgaataagtatgtagtactaaaatgtatgctgtaatagctcatagtgagcgaggaaagtatcgggctatttaactatgacttgagctccatctatgaataaacaaatcagcatatgatgcttttgttttgtgtaaaaaaactat

SEQ ID NO: 41706 - DNA, 712 bp, Glycine max
  Clone ID: PAT_MRT3847_137663C.1
ggccccctttgtgtaattttttgacacaaaacaaaagcatcatatgctgtcgatttatttattcatagttgaagctctagtcatagttacatagcccgatactttcctcgctcactatgagctattacagcatacattttagtacatacttattcagtaaaaagccctcaaaattgaagacaaaggaccctttcttcccttattcccctcctactttgtggatgctcagcctcagcagaaagaggaggggaacaagggaagaaagggtcctttgttcccctcctctttttgttgaggcggagcatccacaaagtaggactcactttggctctttattaggttctcaatatcttttgcagacccagggaacgcaagctccttgcaggttcgaaagacaatgtgataagccagatacctagtcaagtgcaggagcttgcgttccctgggtctgcaaaagatattgagaacctaataaagagccaaagtgagtcctactttgtggatgctcagcctcagcagaaagaggaggggaacaagggaagaaagggtcctttgtcttcaattttgagggctttttactgaataagtatgtagtactaaaatgtatgctgtaatagctcatagtgagcgaggaaagtatcgggctatttaactatgacttgagctccatctatgaataaataaatcagcatatgatgcttttgttttgtgt

SEQ ID NO: 41707 - DNA, 387 bp, Glycine max
  Clone ID: PAT_MRT3847_137664C.1
ttttttttttttttttttttttttttttttttttttttttttttttttttttttttttttttttttgggaaaaagcaagtaacattaagttgggttgggatccccaagaaaattcacattttttgaaggacattggaataacatattcttcaccaaacacaaatttaaaaacttttaaaagtccacaagtcatccttttttttcatgcccacttgccggggacaaaattggggggctaggcccacgcctttttgttgactgggtccccaaggggatcaaaaagggtttccaatggacccttaccggggacaatggcccgtacaaaaaaccccaaccccgggaaactggccaatcttccgctcttggggtccttccccttaagcccac

SEQ ID NO: 41708 - DNA, 385 bp, Glycine max
  unsure (1)..(385): unsure at all n locations
  Clone ID: PAT_MRT3847_137665C.1
cccacgcgtccggcggaccgcatgtcccaaccatcccgtgcgattctcatattttacaaagtgaatggaatagattttgaggatgtcaaagtcgatttatccaaacatcaccagctatctccccaattccgagccattaaccctttaatgaaagtccctgctgttgttgatggaaggttcaagctatttgagagacatagattttgtgcaatggctgaagagagacaagtcatcggcgtccacaccggtgatgcgtggaagggcaactccagaatgcaaaagactccaaaaaactgcactggcagaggaaagacttttgatatgagaaacgatagagagagaacaacagggtgtggaggtgggagtggctcangaaaggacaaaa

SEQ ID NO: 41709 - DNA, 318 bp, Glycine max
  Clone ID: PAT_MRT3847_137666C.1
tcgttgacgcctgggcggacgcgtgggcgggcgcgcgggtacacatatgagataattggggctgtggcacattctgcagaagattatggctgcaaagaggatcaagaaatacctcaacagatatgatgcctgattgagacacacaatagatccttcaatacctcgaggtcgaggctcagacggaaacaaatttgtttgaaaagtctcttgaagatgttgaaactcctaaaggttacatgttggaacgtaaagatttctagtgtgacattgctctttccaaaaacacatgctggtggaacccattctgcgtagtgatcc

SEQ ID NO: 41710 - DNA, 391 bp, Glycine max
  Clone ID: PAT_MRT3847_137667C.1
cctatgtgtccggctggtcgctccgaggtgtatgctgaccttgctggaaaattgggcgcacagcaaaaggctaatgtgattttatccatggacacatacaagaggtctgcccttaacgagccgattggggtccaagctataataacatcttgtaataatactgtgttgacggctcctatggaggttggtactgctatggcggtcgtgtgtgctagagtattgtagccctactggctgtcatccgggacactctcggagctggctgaaaaatgccaagaagtataggcttctgcggtggtgcagaacatgctcactggatgaagacccgaagcgctggctcctatatgagctcataccgaggtggacaagattgcctttactggaatctatg

SEQ ID NO: 41711 - DNA, 128 bp, Glycine max
  unsure (1)..(128): unsure at all n locations
  Clone ID: PAT_MRT3847_137668C.1
cngnagtgntcaggagaatggggaggtcnanaagaangtacaatcaatcgagaaccaaggttccgtgtnggactccctaanaagaancctangcttttcaaaccctctttctccgttccacacaanat

SEQ ID NO: 41712 - DNA, 978 bp, Glycine max
  Clone ID: PAT_MRT3847_137669C.1
cacgcgtccgcaacggacaggtgtcagtcacattctcctgactctgaacctgaaacggcatgacaacaatctgattaattttgtgttgactgtgtatggccggtggcgaatcagtgccaagagccaccatgcaccccttccttcagtttcattcgctaaactctatttattcccttcgtcttccacattttccaagaaaaaattccacgcgaccgaaaacatttcacacactgtgagatttaataaacagattcctcatcaatatgaatgcatgcactttgttttcttctttttagttccattttcatttctactataccctttttattttttatgcttcagacttgtgttttttgacttcttgcatgcataagtttttaggaaatgcttaatttaggtatatggacaaaagtgttttcacgtttggaatggtgatgagtgctttcaccgcttacaagaactagtttttagttattgaggtataaaaattgtaacagcgagagacgtggggttttgctcccttattgtgtgcacttcggtcaaaatcacctattgtttatgtgcaagaatttggcgggaacagtgcatcatcaacattggcaggtggtttttgatttggcgaaaggtaaagcaagcaaataagggctcaatgaacaacaactggctttcgttccctctttctcctactcattcttccttaccagctcatgatcttcaagcaactcaatatcatcaattttctcttgggttagtgaacgagaacatggaaaaccctttccaaaatcatgattggagtcttattaacactcatagtaccatcgaagttccaaaagctgctgattgtcttggagtgagcaagtctgaacatgagtcagaccttgctgccagcttgaacgaaattcagtcagatgatacagattatctattcacaaaacacagtctggctgcctatgcaaaaccctgccgcggacacaccct

SEQ ID NO: 41713 - DNA, 515 bp, Glycine max
  Clone ID: PAT_MRT3847_13766C.1
agagtagactggtctatagtcaaactgcctggcaggcacgtaagactatcatatattgatcattgttattatattattgacacgtaagaaaaggaattaaggaggagtagatatatgtttgtgtttgttttgttgtggttggtggtgatatgaatatgatggagggtgctgtgttgccgaatcccatagagtgtctgggtaaagggtttgatctgacaagtgattttcgattgaagtttgcaaagggatctgggagaagattggtggtggttgatgaaaggaacaaaaaggacattacggttcctggtactggaagaagaggaggagctaccattccaaatgtttctgaggatattcgctgtgacaagggcgatcgcctacgcttcaagtctgatgtccttcaattcaaccagatgtctgagttgcttaatcaaaaatcagctatacaaggaaaaattccttccggctatttcaatgctctttttggtttgagtggtgattggtttcgtgatgct

SEQ ID NO: 41714 - DNA, 423 bp, Glycine max
  unsure (1)..(423): unsure at all n locations
  Clone ID: PAT_MRT3847_137670C.1
tttcttaacaaatgttttttggttttcacanaccgaaatacttcgcgccggcccgcacaattcaaacgcgctcataactcaactanattaaaatctccacataagcatcttgcaaccaattctgcacgtaattctgcaccaacaactgatggtgtgaacaatccttatctatatctccctgtaacttttgctcttcttgagattattaaataccacaagagcactgatctcctaatcaccaatcttcctttccacacgtttcttcctcaaattgcccaaaattttaagactgatcttcttttccaaatccatgctatactttcattgcaatacgcttcttaagcatatcttgttttcctcttttatgacactaactttgtttccattcaccccaaacgttttactattattcccaatgatatt

SEQ ID NO: 41715 - DNA, 494 bp, Glycine max
  Clone ID: PAT_MRT3847_137671C.1
gccaacttcaacctacttgttcagagcttattgtaataaaaaatataaaaccaaactttctacacaagggggccattggccagatcttaaaaacaaagacgtatgaatcctcccttacctataaacctgctgtggaagttgaaaggattattgctccctgaacggacccattgaaagaaaaacacctaaggatgtttgtgcataacatatcaccgatttgttccaaatccataaggggatgaaacttaaaggcccaaattacacctgaaagcaattaaagtttctcataggtgatggctgtcagctgttcaatgcttgctgtactaacccttagttccaatgagagggttgttctcaaacagcaaagtacaggttttaaaaaattccttgaagaaataacactggttttaggaccttttattcacatctggctaggtgctcttgccattaccatagtgttgatccactatgaacaagcgcttgttaagcaatgt

SEQ ID NO: 41716 - DNA, 671 bp, Glycine max
  Clone ID: PAT_MRT3847_137672C.1
aggccacgcgttcgtagcacgcggaccgagactatggtaacctgtaacacattaaccatcacaacacaagttagagactaccaaggtatatgtttagataaacaggtcccaacaaacctatccgtttggtgaagtatctaagcatattgatcagttacacatatcttagacttatatctgaaggaaaggaaatgcacatatccatgcttcatagatgatgataaacttgaatattaattcacaaatgtaaaataaaataatttcaatttggcagtggaagttgttatttagtcatcatacttgcataaaatatattttgagatgaaataatcaatatgcttaacaaatattttgacaagatagatataaatgagagctatattaggaggcaacctcaaggaactgcctgttctttagatatcacaaaagaactcactaaaatttatgtgcttttccttgagcctacaactttctttaattatccactattattaacttgttgctatttccttaaaatataaagctacgcactaggcattatgactttaaaatacaaattccattaataaatagaataagtgaataactacacaaacaattaacaaaaattaagtaaacggtttaacaaaattttagggataaatttaacaatgggtaaatagataaagaaa

SEQ ID NO: 41717 - DNA, 153 bp, Glycine max
  Clone ID: PAT_MRT3847_137673C.1
cagagaagtctgagtgtacaatgtttctcttcttgacctctgaaacagaagagaaacattgtacactcagagaagtctgatgttgttcagctggctcaaagaaattccagtgaacttgaggacacccatttgaaagagccgtctgcacaatta

SEQ ID NO: 41718 - DNA, 394 bp, Glycine max
  Clone ID: PAT_MRT3847_137674C.1
aattcccgggtcgacacacgcgtcagggctgcacgacagaagggtggatgtagcattgatcaaggtgaaccacataattttgtgtgttctttctctcctttcttctctttcaattctgctacaattttgtgtgtatgacatttatggtctattgcattttctgctactttcttgtttgttcttcatcacttccataacacttataatgtgtgcatgtgacagaagaatttccacttggccgacccttggcttgcggcaacatgaaacaacaaaaatgtaacttgagttacatttcatgggaccatagctgaatcaccccctggaaatagactcctttaaccattcagctaaatgaaaatgaaaaccactgctcaaggtacagtcacaccaatca

SEQ ID NO: 41719 - DNA, 509 bp, Glycine max
  Clone ID: PAT_MRT3847_137675C.1
taggctgaactcgagacttctataagacacccgtgaatacgcctacaaaataaaacttttgaagaccgctggaactataacaacgaatgaaacaagatgttgttcgtactgaatataagggtctacctgtgcgtatgtactctgcagtataagcctggttgtatgcgatacgggtagcatgactcttacttgatgatactaaacctgagaatcaaacccatgacagaccccatctcctacatcaggggcaccgctcgagcagaccctcttcccaatgggagaaaagatcgattgacacacatccactcacgctccaaaacatcagcactcgataaataggagcagcctggctaaccatatgaaggcactccatcgataacatcttatctcacatagaaatggctcatgcagggaaagcatgttgagaatgattaccgatccgcaatctctgcctcctcatccatcattacatactatgagcgaagcctatcataacgcgacaatgttga

SEQ ID NO: 41720 - DNA, 136 bp, Glycine max
  unsure (1)..(136): unsure at all n locations
  Clone ID: PAT_MRT3847_137676C.1
gcgttaatntggnataatcggcgannatanangttcgtggctctgaantttggctnnatngcgtcgaanttcctcntanaacgtctggttggatngncttcaacacctttcccaacgaagccantttctcgacttt

SEQ ID NO: 41721 - DNA, 544 bp, Glycine max
  Clone ID: PAT_MRT3847_137677C.1
gccagcccagcgttctaaaacgggaaaacaataataccaaacgtgaaaacaaaaacgcctaaccgtcattggattcatgctactcctgtttcttttattattattattattatcaacagcacttgatcgggacttaatcactgatcgtgaaaatcaaatttaagttatttttcacttaatcgggacttagttatacttaagatggtctttaattgtgcgtgggtgagctaaacccattgagttgctattcttgtttctattgccatctagttatgagatggaacctccaaaatactatctcatagtaacgtttttaatcattgctgtttgttcaataataattttaaatttagttctatactaatctcttttggctcatattattatttttaactaaaaaagtatcagaattttatattatataattataggtactgcattaaacagtgtgaacatgattttaagggtaattgcatttttattgtgaccaagtccccccccccccacacacacacaaaggctctggtgcatgttcttttctcgt

SEQ ID NO: 41722 - DNA, 277 bp, Glycine max
  unsure (1)..(277): unsure at all n locations
  Clone ID: PAT_MRT3847_137678C.1
acgtcgcatgcacgcgtacgtaagctcggaattcggctcgagaaaaaaagggttgtaatgttaatgtctcttcactttctgccaaaaaaaaaaaaaaaangggnggccgcngannagtganctcgtngnccngggantnantncnggncgggnacctgnnggggtacnagtttncccnanngngagncgtntnanngntnggngnaatcanggncanagcngttcccngngnnaantngtnancngctnanatttccacacaacaagnnnnnnccgn

SEQ ID NO: 41723 - DNA, 300 bp, Glycine max
  Clone ID: PAT_MRT3847_137679C.1
ggctcctttagaggccgcttcggcttgcacacagggtacgcggcagatcttcttaacctgcttattccggtccatgatctcgaaataaggcaacctttgccaggtacaattcgcatagtgcaaaaaggaagaggtatctcacgccatcgatgagggacctgcacacattgacatgcaagaccatcttctgaagactgccacatgacgaggtaagtgatggttgttgaatagaacgatgggaacggaagcagggaatgggttatcgacgtcgtgatagctttggtacccactaattaattc

SEQ ID NO: 41724 - DNA, 508 bp, Glycine max
  Clone ID: PAT_MRT3847_13767C.1
aaaataaatttttttttttccgcccaaaaacacagaaaaaacgttatttataaaaaattaagccccatcccaaagggggaaaccttccaaacaaaaacccctgggaggtggaaaaaacttaaaccccatccgaaggggaaaaagcaaaactttttaagccacaaaaaaagggtgggcccttcacccaaaaatccacaactgcttcggggggctgtttaaaactaaaaccaaatgggttacaggagggggtaacccaaacccaagaaaaagccttggggggggctgaacctgaaaaaatgctaactaactttttcttgttcgccgggctggacaaaaacggggggtatgccggtccctggccccattcataggggggaagcacaggagtcctaggcccaaaaaaaaatgtgggggcccccttggttttctcaaaagggggggggggtgggccaggaaaccatagccccaggaggaaaagggggggccccccaaggggccccagaaaaac

SEQ ID NO: 41725 - DNA, 436 bp, Glycine max
  Clone ID: PAT_MRT3847_137680C.1
atggaaaagcatgttacgctatcccacatcaaaagaccattgatttgtatgtaaacggaagatttgagaaccacaagtgcacatcacactatggtttgaagtacacgtgggtggagacagagagacagtccaagaggatgtgagaaccgggcttctagaagtaactctcttagcgtatcagaaaaacgaagcatcatttatctatttagcagaagactgggcccaaagtgagggtggacaccgagaataatcgaaatagtgtgacttgataagcaggtgcgcacgaagctcagctcgaggagtgggagccccttcccacgaccgaggtgaggttctgcctgtgcaaatatacgcatatgcagaacctgacctcagtgcttatgaaggggatctcaccgtttgaaacagggtgggtgccgaccagattgataagtga

SEQ ID NO: 41726 - DNA, 242 bp, Glycine max
  Clone ID: PAT_MRT3847_137681C.1
atcttcgtctactcctggcttcggctgtcactctgtttctcccagcggctacaaacaaaacaaaggtgagctgcttactgtgttggactagatggcaacgaacaaacaaacaaacaccggtggtgtggtgtgtgtaagatgtatatgtgtatggttgtgatgctatctctagggtggggagggggggcgccgtgactagggagaagcggtctgggccgtagtggtaggggaggagggggtgt

SEQ ID NO: 41727 - DNA, 321 bp, Glycine max
  Clone ID: PAT_MRT3847_137682C.1
ggctcgagttgcaaaattatcctaacaaaagcatttatcaaactaaccacggtctagaacacggggtgggttgaacttgcacttgctttattgggattggctctgttgcagcacttgcgatccacacccactgcaaattcaatagcccttcgccatttgccaaacccgccaatcccaaagtattgtcttttcttcatacgacaccttcatgtttttcttgacacacttatccactacccactccttgacctctctaaaaaacacggacctttattttatgtctactttctctccatgccaaaccgttgtttccgacacacc

SEQ ID NO: 41728 - DNA, 669 bp, Glycine max
  Clone ID: PAT_MRT3847_137683C.1
gaagataaatgacagggcatgaaatatttcacataattataaactattaatagtttttatcttataaaacatataatttagtcatgtaaactaatttataattgttttagatcctaattttttaattatatattatcttattacttaaaagattatataacattaaaaaaatataaaaccggttcaacaatggttgaaccattgagccttgaaccagttctttcatcagttcaatcaccagtctggttttaaaaacattggttacaacccatgacttggcagtttatttcctaattggcaatgctgccatgtaaaaagtcaggtaccattattaaaagctacaaaacattgaggaaaaaggattggcattctaaagtaaatgtaaatgacaaataagtgcagcaaaggttatactgtcatagtggagagggaatgaattaagagaaagtaggatataccaggtactaagaatattgtaaaaacttgcttaaggtgatttggccatgtagggagaacaaacaaaggctgtaatgagaaaagtggaataaatatgaagatatttcaattaacaaagagagggaaaactgcaaaataacctggtgaggatgttccacattaattaagaacaaagacttgaagaatccggcctcctttgatcttattggggga

SEQ ID NO: 41729 - DNA, 324 bp, Glycine max
  Clone ID: PAT_MRT3847_137684C.1
aaatgacacatttgatgtaggcttgtagatcaagaatggcaaattgatagaaagatgttaggagagttgaatgtggaatcccttatggatttccgcaaacagttattagctatatacattattaagaagatgctcaattaaatatagttattaaaaaatttctggaccaggttaaaagctccaagtatgattttacaatcctttcaaaaattttgtttctttttgagcgtatggtgatgataacacatataaggttcatgaaaaatgaaaggcttactttagtgggttctaaaattgaaaagctttctagctggtcataatatt

SEQ ID NO: 41730 - DNA, 803 bp, Glycine max
  Clone ID: PAT_MRT3847_137685C.1
tctcactctctctctctcctcagtctgacccaaatggaacatctctagagagagaaactaagggttggatttttttggttcagttgccaccacagcctctgactgtctagagggacattggctccccacggatgtgcccagagcaagattgttgcacctactgtaagcacaaatcaaatgccatccctaaaaatgaagagcaaagtaagcgtgagctgtttaacagaaacaaaggatcttcatgtgtgtccgaaatcaaaaataatttccaaaagcccgtgttctaaaatcatgatttctacacaaaaggctgaaatagacaccactgttcaaaattgcctagatgtttcctcaaggacgcagcccaaagacattgcatgtgatcaatctattgataacaaagaatttctggataaagaaaactctgaatctgagcaccaattttctgtttgttcctctgtcctgggaaaaatggaactaaccaacacctgcacagcaaatttagaaacaattttttctcctgcttttgaacctattgaagtccattcacaacattatactgaaaaagatgcagtgagcatttgtgatacaaacatggcaggagtgggagctgatgagggaagaagcatatgtggttatgaaacatgcgatgtatcagacttctacatttctgacatgatcattacaaacttaccctttgggggaaattcctttgatgatgatatcagcgaaaccaactgcctatctgattatggatctactgagccatctatgtttactgcatctgaacagtacatgatcct

SEQ ID NO: 41731 - DNA, 474 bp, Glycine max
  Clone ID: PAT_MRT3847_137686C.1
gctcctgcgcgtgccggtaccggatcgcaagtttcggcccagacccacgcttccgtttacacgagggcggtcgcgtgggtgcgcaatgatacacttctaccgagtgaaagttctgatacagttcgaggatttcaccacacatagtgcatccgatccgtcggaaaaatacacaatcatctcatggagaataaaaggatgatatacagcgtacatgcatgtgtggtattagccagattgatggcatccatgaacttagttggcggctcattagtcgaccatacgttcttattgctgggtagctggaacaggtgcaactgagatacctgaactaatagctcttgaaacatcaaagcacaattaagctccagaggatgaaaccctgaggaagatctggctggtggactgaaaggtagaaatgatggcctgattctatcagtgcttgacctgctatagctattcttaacgtaacctaca

SEQ ID NO: 41732 - DNA, 307 bp, Glycine max
  Clone ID: PAT_MRT3847_137687C.1
cctgccactccgatctcaaatgcaaaccatgccactccaatctcaaatgcaaacccaataccagttccgcacccccaccacgatgctccagcaaataatcacaagatcaacttagaaggaccacgaatcgacggcacagcactacactttcaggaagagaagcttttggaatgtcattcgcggactccgtctccgccaccacctccatcgccggctccgccaccactgccaccgccacctccgtcagcaccgggtgccgtcacctccactggtcgcactcatacagccgctccccacaaccttgccg

SEQ ID NO: 41733 - DNA, 267 bp, Glycine max
  Clone ID: PAT_MRT3847_137688C.1
aacaaaattcaaaaaatacgggctgttactattatgacacacactcaaatatcagcttcaacttatgccagaaactatatatatcatatctacacactcacacctccctttaacagggaaaccatcaacctcgccatttaaaaacatactaatctcaatgctcctaaccatctagcgcgaatacgcggaccacttactgctttctccactgcatactaacaggaccattcaaaattacatacttttccggacacacataaaaattat

SEQ ID NO: 41734 - DNA, 415 bp, Glycine max
  Clone ID: PAT_MRT3847_137689C.1
ggctcgagcgtactggaaggtcctgcactccctttcaatgtgtgtcatccgcgtgacaaccactgctcaggctcctggagcggacgcccctgcgctgggctttgcaaggacacggctaccctccatgcgcatggaagaggagttacgggcttggcagtgagatcatgcgagcggatactattcacgacgcaggccatcagctacagagcgctgcagaagaacactgtcccctgctctagaacgcggagcctgctactacaagagtcagcctggggcccagtgcaacccctacagtcgtgggtgagggccatcaccaggtgcaggagctgaacacagtactaagtattgctttcggacacggacatatgcgcgtttcattgcttgcacgaccaacattcaatgtcaatgtcttatt

SEQ ID NO: 41735 - DNA, 255 bp, Glycine max
  Clone ID: PAT_MRT3847_13768C.1
cttcctctattcctctcaaaccgaaggcaaaaaaaaaccttgaatattttatttaaggaaaagaattcctcccacccaaacatttatttaatccccccacccctgggccccacccacccccaaaaaagccaaaattttttttggccaaggaatctttaacaaatttttgaaacccaacccccaaccgtttgttctaaaacacccccaaacaccccggcccctcctcatgaccaaaccctaatcccaatatccccc

SEQ ID NO: 41736 - DNA, 894 bp, Glycine max
  unsure (1)..(894): unsure at all n locations
  Clone ID: PAT_MRT3847_137690C.1
ttttttttnttagaaacagaaaaatgcaattaaattacattaaaatatgctctgttttagtttctgtttgttttagttttatcaaccaaatcaaatgggccgggacaagtttcccccaaggaaagcatcgagtatgtagagaactgcattcgaggaggaagggcatacaaagagactgtaaatcttttggtcaggagctatccaaatttcatttctgacaaagtgcaatatcccaggtacagttaaatggttgagccgggaattgtaaacatcataattctaatcaacacccaaaatcaggagttcaactccagcgtgttcttacctgcaatgtctggctccaagaattgcgatttactgcagaagttgtagtccgcgtgctgaatgttgatagaagcagagtggtttctcaatcatacaaaatttaatcttcatattctgcttccataaccgggagaatgcttaaagctgaagcgcctaaatgcatgcccctaataacacctccatacccgatcttaattttatggcacagaagcaagatggaatcccaaagtgccgttcttccctgaagagaaaactgcagtttcttatcccagtacaaggcaaaaattgggggaccctgctttccaactgctagtatacatgctcctgggtgcagcacagaagggacagcagacactacagcaatgtatttctctggaaacctttcctttgggggaaggactcccaagaataatgggtttttgccagattgagctccagcatatgacatggcatccacatgtaacatccattttggatgttctaggaaagcgcagaacagatacaacagcaagtgagaatccgaaggtagctcaagtgtccactttttattcgttttatcgtaaacctccc

SEQ ID NO: 41737 - DNA, 2290 bp, Glycine max
  Clone ID: PAT_MRT3847_137691C.1
aattcggctcgagcgaaaagaaaaggggaaaagaaaaatgaaaaatagcacaaggccaaaaatatcacctgatctgaaacttggacacgaaagaaaggctcgtatgcgcgacttctctctcttgcattgattcaacgttgtccattctccgaaacatcacaaagaaacccaactgagagagtgaagaataagaagaataaaaagaagaagaagggacgacaacaatggggggtttcgcaatgggttctgccttcgattccaaatctgggctgattattatggctgctttgcttttgatgattatgtccttctatgctggcaacctttttggcaacaatgctcccctttacgtctctcagcttgtttctcattcttctcccaacaatgtctcctccaacggtgctaccaaatttactaacaaagttgctctgacttactggaaaaccccgcttgtaattccagaaactgggatggatgtgtgccctttgacgttcaatgagtatattccctgtcatgatgcttcctatgtggcaacattgaagtcttttgatttttcttgataagaagaattaaagcgcttatgtatctgcttggttcattcctccaatgctccacgatcattttgtgtaaatgtctagtacctatcaaatggcctcttagcagggattatgtttggcgaagtaatgtgaatcacacgcatcttgcagaagtcaaaggaggccaaaattgggtacatgagaaggatcagctctggtggtttcctggtggtggtacccatttcaaacatggggcttctgagtacatagagaggttaggacatatgattaccaatgaggctgctggtgatctgcgatctgctggggtagttcaagttctggatgttggctgtggtgtggccagtttttcagcatatcttcttcccttgggtatacgaacaatgtcctttgcccccaaggatgttcatgaaaatcagattcaatttgcattagaacgagggattagtgcaatgatctctgccttgtccacaaaacaactaccgtatcctagtgagtcatttgaaatgattcactgttcacgatgccgaatagactttcatgaaaacgatgggattttactgaaggagttgaatcgccttcttcgctttaatgggtactttgtttattcagccccccctgcttatagaaaagataaagattatcctgtcatttgggataagttgatgaatttgactacagcaatgtgctggagacttattgctcgacaagttcagacggcaatatggattaaagaaaataaccagtcatgccttttgcacaatgtagaacaaaaacacataaacctctgtgatgctgctgatgattttaaaccttcatggaatatccaactaaagaattgtgttctagttagaaattctaaaacagattcttacaagcttcctcctagtcacgaacgccattcagtgttttctgagaaccttaacacgataggtataaatcggaatgaatttacttcagatactgtcttctggcaagaacaaattggtcattactggagactgatgaatattggggagacagaaatacgcaatgtgatggatatgaatgcctattgtggtggatttgctgttgcgctcaataagtttcctgtttggatattgaatgtagttcctgcaagcatgaagaacaccttatctggaatttatgcccggggattgattggaatttatcatgattggtgtgaaccattttcaagttaccctcggacatatgatcttttgcatgccaactacctcttttcccactacaaaacaaaaggggaaggttgtttattggaggacatcatgctggagatggatcgacttatacggccattgggatttattatcattagggacgagaatgatatcacctcaagaatcctagaggtagccccaaaattcctatgggatgtggaatcacaaatgttagagaacaaagagaagaaaatggaaactgttttaatttgtagaaaaaagttttgggctatcgtctaaagtgacttgacctaaaagttttctcctagaaattgtttttaagcatacgggtaatttgtaatgttaggtttttatgtatccgatttgttcattgctccaacgctccacgatcattttgtgtagatgtccagtgagctcattttgtatatgacttcactcagttcagcaattatgatttatgaatagaaagtaggttcttcgttgtctattcttatgtgtgcttgaatattagaaataaatataacatacatcttaggt

SEQ ID NO: 41738 - DNA, 292 bp, Glycine max
  Clone ID: PAT_MRT3847_137692C.1
gcaagatcgtaaaacgtaggatcataagatcctaccaaaatgtaaagttatatatttatactaatatatatgtaaatatatacagagaaagtatggagaaaaaaaaaccatgagtgataaacattgaagcaaacttaaaactgaaatttcataaacataagtccataacatccactactagtctactagcactcatgctcacagcagagagagggtcgaggcttgagagattcagaaatcagagtgcaagacagacagtgtgctcacagtcacagcaagtctgaatgcacac

SEQ ID NO: 41739 - DNA, 354 bp, Glycine max
  Clone ID: PAT_MRT3847_137693C.1
aacgtcactattttttttgggaaacccgaatcttttatgactatataaaaaaatccgataattaccctttaaaatgccttttttactcacaaagcaaggagatttaaaaaggtaggtccttacctttcacctagttgtatgcatggaatcatataattaaccaagttcgggaaaaatcagaaggcgttgtttcaactattccgcttgaaaaaaaggttaccaatcatatgctgtggggctttccccttggaaagctttgaacagtttctgcccctctaccaggggggggaacactactgttagaagagacacgagcctcccctgttgcatttctaatgaattttaaaacctctt

SEQ ID NO: 41740 - DNA, 1662 bp, Glycine max
  Clone ID: PAT_MRT3847_137694C.1
ccacgcggcccgaggaagtgaggaaaaagcaaagcagcaaaaaagaagcaaacaccaccacgcattcagcttcagaagaaagtgaacctatttggtgttttcctaaccgaatcaatctttattctttggttattcttcgtcttctacatgggtcgccttcttctctttctcattattcccagccttgtcgcattgtctttcctctcagaggtacaatcagcgtcgttcaagattgtgaacaagtgccgccacacgatatggccgggattactctccggtgccacctcgccgccgcttcccaccaccggattcaccctcgagagcggcaaatcgaggaccataaaaattccaaagtcttggtcgggtcggatatgggcacggacactctgcggtcaagactctgacggaaagttctcctgcgccaccgccgattgcggctccgggaaagtagagtgcgtcggcggagccaaaccgccggcgacattggcggagttcactctcaacggcgccgacggtttggacttctacgacgtgagtttggtcgacggttacaaccttccgatgctgatcgtcgccaaggacggcatcaggggagggtgcagcgccaccggttgcctcgtcgacctcaacggcgggtgtccagcggagctgagggtggcgcgatcaaacggcagccgcgggagcgtggcgtgccggagcgcgtgcgaggccttcggggatcctcgtttttgctgcagtgaagcgtactcgacgcctgacacgtgtggcccttctccttattcactgttcttcaagcacgcttgtccacgcgcgtatagctacgcgtatgatgacaagaccagcacctacacatgtgccaacgctaactatttgatcattttctgccccttcccctataccagccaaaaactgttgggagcacgaaaagatggggcacagcttcctctggtaaataaaactatgatgtacttatcaaggctacaatcaggtggttcctcaccatcaggtctgattcaaacgcagagtataatagcttatgttgcctctgtttttttggtgcctttcttcctgttctgccctctttagcatcctttatgaaatacgtttgcttggacacttcagggtagacacttacgccaaaaatagctgcttctcaatataaccgtgtaagctcttcatgctgtttccctttgatcttactatttacattaacctatcaaatcgatgctgtgctgattctactcatcatgcaggagttgaaagatatcatataggaaacaacactgtaaatcctttttcctttttgtgtatatcgtctatttctgtttcccacgtctacactgcaatagttgatctctggcatccttcagttcttattttaattaacagagaggcgttcccaatttgcaaattattgtgtagtcaagattttgctagttatgagagacagattgtaatgagtacaatagtgtataaatgagataggtttatgaagtgatgcttcgtgcacaatttttggttttgatgtgttcaactgtatgtgtggcaccatactaaattcatctcattttatatgcttaaaagttaaaagcagttttaagaactgattgtaacaaaaatgttaaatttatggtcttgttaggactaaggtttacatgcaaa

SEQ ID NO: 41741 - DNA, 296 bp, Glycine max
  Clone ID: PAT_MRT3847_137695C.1
ccacgcgtccggtcaccaactgcggtcatttgctcctggcttataagatgaagtagcaactttcggagtttggaacacatttgggttaagcaaaataatgaataatcacttgaccattttttgtcaagtgcataattatatagaacaatgaaaaatgtatggtagttttatcatttttaattatttccccgtgttagacaatcgcatatttgacgtaaggaagttttacaaactataagtgccctaaaatattcataaatatttcatgaaatcatatttagtaatcttttaatgtt

SEQ ID NO: 41742 - DNA, 291 bp, Glycine max
  Clone ID: PAT_MRT3847_137696C.1
tgaggggtaccaatttttccttttggggggcgttttaaaacttggcgaaaacatgggcataactttttcctggggaaaaattttttcccctcacaattccccacaaaattccagccggaaaattaaaaggtaaaacctggggggccttatggggggcccaacccccatttattgggttggccccactgccccctttccaaggggaaaacctttcgtgcccccttttttaattaatccgcccaccccccgggaaaggcgttttttttttttgcccccacggggttttttttt

SEQ ID NO: 41743 - DNA, 735 bp, Glycine max
  Clone ID: PAT_MRT3847_137697C.1
tggggtctgggaagatcagttcagtgtgttttgagcaatgaagaggtggttaggatagtatcttcagcgccaactcgatcatcagcagcgaggattttggtggattccgcagcccttgagtggaaactcaaatatcctacttcaaaaatggatgactgtgcagttgtgtgcctatttttggatggaaaaatggactcagaatctgattgtgatgagcaatgctccttttttgcaaccatccagaagaaccattggggtaatccggttgagtcagatgacagtcaaaagcctgagccatctttgcgaaggaactttactgtgagatcctcagaagaaaatgaaacctatggaggaggaggagttgaagaggtatctgttggtgttgaagatagaacatcagcggctgaagatcaacactggtctggtctggagggtgtcacgcgagtaaactcactggttcaacttcctagattttctgaggaaaggccaaactcttgagttttgttggttcagtgggattgtaatacctgttgctacacagtcaattcaacaaagaaaatcttcctatggtttacgtgtgtagtatattatgcttaattaaggtcaccaaaaaaatggattctgcgtccagtgtcgctaaatatcaaacatgaataccacaacccacaacacaagccagcaagtcatggttgaaagtggcattatctagtgaaatttgaagacagtgtttggtgc

SEQ ID NO: 41744 - DNA, 210 bp, Glycine max
  Clone ID: PAT_MRT3847_137698C.1
cacgagaatttcaaatagtcaataaacagaatgtgaacatatccggggacagggggctcaaaagaaccaggggcatacacaatagttgtctaaaaaattggtcattgctgactgtactcataaaaaactgccaccccacctcccaaccaaacctagtatgagtgggccttaccatgaagggcactaactttctagatggaatctttaact

SEQ ID NO: 41745 - DNA, 440 bp, Glycine max
  Clone ID: PAT_MRT3847_137699C.1
gctttggttataaactgtcacatgatgcttcattacatccccgatgaaaccctatctgatacaacaggcttgacctcttttctctacgattcttcttctcttgctgcttcttctgctgttagcgttactcccacttcctcactgcgatcattgttccttaagtccctgcgaggtttagacccaacggtcgtaatcttggtcgacgaagatgcggatttgacttcgaacaacttggtatgcagactaagatccgcgtttaactacctatggatcccttacgacacagtggacacgttcttgccgcgagggagcaagcagaggcagtggtacgaggcagacatatgctggaagattgagaatgtgattgcacacgaaggggttcagagagttgagcgggttgagcctaagaacaggtgggagcagcgaatgaagaatgcgag

SEQ ID NO: 41746 - DNA, 654 bp, Glycine max
  Clone ID: PAT_MRT3847_13769C.1
aaggtcagctataaaattaaacaaatagaaattcatgagaaataataagtactctttcaaattaatcttaaatattagttttcaacaatttttttaataaaaaaagacaaaaataatgaagagatgaaatgcattttaaaaaaataaatctctatattaatatggtttaattacctatttaatctttatattttttaaattcatctcttttaatttctatagttaatgattaaattttttaattatattttaatgttaattctcaaaaggtcttgttaattttttttaactaaaaaatttaaaaaattttaaagacaaaaacgagaattaaaatataaattttaataactaaaacttcacttaacactaaaacatccatttataaattataaaaactaaaatatataaatttagaaacgatacggaaacctattaataatttatattgatagttttggaaaatggggatccgaagagccacgtggcaagcatgtcactgccaccactccgtgcgtttcctcaccatcatggatcatacggtgtgacaacacgcagggtagtatccgatccagtggcattttcgtaatctcacttaactgcatagcaccgctctcgttcgttcatcctcatggtatttacaccgagctctcttac

SEQ ID NO: 41747 - DNA, 310 bp, Glycine max
  Clone ID: PAT_MRT3847_1376C.1
ttttatttttttttttcatttttttttttttttttttttttttggttttaagacaaaacacgtttttatttcttttcaaaacaaaaatttagtggttccccctcttttttttaaattaataattggcggagggggtttcccaacatttcccaaggcccacaatttttttgggaacggaggaataaacaaactctctggttcccttggagggcccccccttttttccacccgttatttgatttctcccccccccccaaagggcggacaatttaggggaaagggtttattttttcaggggtgggcccaaaag

SEQ ID NO: 41748 - DNA, 460 bp, Glycine max
  Clone ID: PAT_MRT3847_137700C.1
acgagcacacattcattatttctagcgatttctagtgacagaaagaacactacagtgagagataatgattgataatcctaacatagcaaccaccacaatcaatctttcagcccatttaaaacagaggaaaatattgatactgtatttaactaaactctctttaagatgcatgaaagcaacagttaccaacattggaaagtatacacaacataaatgaaaagagggacaccccttgtcaacagaataaaagcaacttttgacttgattggtgagtgaaatgaaatggaattggaaggaacagcatacgataaagttaccataatatcattcggatatttttacagtggaacaaaaagagtggaataaaaataagattattatcatcctatatttcccagattgaaagggaagaaagggagggatactggattaaatggaacagagtgcattccatcacact

SEQ ID NO: 41749 - DNA, 426 bp, Glycine max
  Clone ID: PAT_MRT3847_137701C.1
gtgcacaacactaaaaaaaatctctcgtggagactaatagaggacttaaaccccataagttcgaaacttggagcatgtctagctcagggaatataactgctaattgattactgattacataataacctgcacacagtagattttggttgacaagaatcacaagataggcatgtagcctggttaagagtagcctgtcactctatttttcagagatatataaatcaatgatgcaatttcttgttctgataattgcaatccggttgggttctgataatgcatgcaggggacacaatcgcagaagaagaaaactgaagcattttctattgaaagttattgatgaagttgccagcatgtaatttgaagttgaagcactagcatatttggcgttttgaaaaggataaaaatgtgccccttgattaatatatg

SEQ ID NO: 41750 - DNA, 1049 bp, Glycine max
  unsure (1)..(1049): unsure at all n locations
  Clone ID: PAT_MRT3847_137702C.1
acgagagggtcccggcccgacgggttgttgaaggtttatcaagaacgcagagcattagcacatgccttgagtgacaccaaaacagctgtaaaacaactaaacaagctcgtgaccgtactcctagtagtggtgaccataatcgtgtggcttctactgatggagattgcgacaacaaaagtacttgtattcctctcatcgcagctagtacttgcagctttcatgtttggaaacacatgcaagaacatatttgaagctatcatctttgtgtttgtaatgcatccatttgatgttggtgatcggtgtgttattgatnggtgttgagctattggttgaagaaatgaatatattgacaacagtcttcttgaagcttaataatgaaaaggtgtactatccaaactctgtcctggccacaaaaccaattagcaattattacagaagcccagatatgggtgaccgcgtagatttctccattgattttatgacaccagcagagaagattggggcactgaaagaaaaaataaaaaggtacgtggagagaaatccacaatactggcaccccaatcatggcttagtagtgaaggagcttgaagatgtaaacaagattaagatggctctcaatgttacccacacaatgaactttcaagagtttggggagaaaaccaagcgaagaactgaactggtgatggaattaaagaaaatatttgaagagctcaatatcagatacaaccttcttcctcaaggcattcatcttagacatattgaatcaaactcaagtttgctcaatatatgattcagctgcatgcatgtgtgcctcctatgtttcatttcatctgtcaaataccaccagaccttttctttggttgatttaattcatgatagttgggagtggtgctttagtaaagtatatatatagggccttgattaacagacagtattaacaatttttttttccctagatatgattgtgaaattatgaattcaggactcttatgcttgactatacgaaccataaagtggatccaatgtaaaagtaaaatttcgtcccacaa

SEQ ID NO: 41751 - DNA, 460 bp, Glycine max
  unsure (1)..(460): unsure at all n locations
  Clone ID: PAT_MRT3847_137703C.1
gtttangcaaagatgcaaagacgacaaaagatgcagaatattctaaagttttgagttctacattgacttcaatattggggtgggctgagaaaaggctccttgcttatcatgaaacttttgaccggggaaatgttgaaaccatgcagggcattgtctctttaggggtagcagcagctaagattttggttgaggatatctccaatgagtatcgccggaggagaagaaatgaagtcaatgtggcacgtgagagaattgaaacttacatcaggtcgtcactacgtactgcttttgcccagataatggagaaagccgactccagcaggagggcatccaaaaaccagccaaatgctcttcctggccttgtcatccttgcaaaggatgtaggtagcctggcagtcaatgaaaagcaagtgttcagtccaatacttaagagatggcatccttggcagctggtcttgct

SEQ ID NO: 41752 - DNA, 372 bp, Glycine max
  Clone ID: PAT_MRT3847_137704C.1
cggaccgacccacgcgttcgcatgtgctatacttctacttaaactactagttgacttcaacaaccgggatcacgaatttcttggcgacttacgaggctaaactacatatgatcgtatcgatatcttccaattgcgcctgctgatcttcccgaacgaaatcatctttcctttcacgaaccttgaattcatttgagactcatcttcaacagtatatattccatcgcatagtacaacatgctattacgggtaatccattattgacaatccgatgcatcatggcaaacggtataactgattttcaactgtgaactgattgaactaccttgtaccgcagactacaagaaaagcctgtcccggttcaacgaactatgc

SEQ ID NO: 41753 - DNA, 461 bp, Glycine max
  Clone ID: PAT_MRT3847_137705C.1
tcttttttttttttttttttttttttttttttttttttttttttttttttttttttttttttttttttttgggaaaaaaaaagggataaaccccccttaacataaattaaaaaaaagggggggaaaaattaaaaattaccctcaataaaggggttgtgcccctccttgggacccccggccaattttttgaaaaaaccaacaagcgtttacacattttttgggggaaaaccaatttttttaaaaggttaaccaacaactttttccccccgggattttaaagcaaacctatgggttgaaaattaaccagggggcccattgcaacacccccaaccctttaaatttttttttagggggaaccatttagggatctttttaacgggccccaaaaaaaagaccccccccgttcttggggggtttaacccccaaatttttgaacttggggggctaaggggcaggggaac

SEQ ID NO: 41754 - DNA, 393 bp, Glycine max
  unsure (1)..(393): unsure at all n locations
  Clone ID: PAT_MRT3847_137706C.1
ggcctcgcctacagcctcaccgattcgcgcacggtgtacatcggcagcgcggtcgactggctggccaaccccatcgcgctgggcatcgcgccgtcgttcctgattgcgattgccatcacggtggttggccaaatcgtgctggtgcgcacggtgtttggccgctacctcgtggccatcggcaccaatgaagaatccgtgcggctggcgggcgtgaatccgcgcccctacaagattgcggtgttcgcgctgatggggctgctctcgggnctggctgcgctgttccangtgtcgcgcctggaagcggccgatccgaacgcccgcgtgggcaatggagctgaggtgatcgccgccgcgttgatctgcgcgcacagcctgaagagcgcaagcgcgtct

SEQ ID NO: 41755 - DNA, 233 bp, Glycine max
  Clone ID: PAT_MRT3847_137707C.1
cacacaacaaagatgcattatgatactagaaatatctcattgattaatatctaatctaatagtgtgtgtttctcaagtcggtgggtcgtacacattatacacacgcttatagctattggcaattgcaattgtcttatctcgattctcatatctcgatattctagtcttgataacttattagtaattgtccaatcgccgtccttaactggactcatcttctccgtagtcatttc

SEQ ID NO: 41756 - DNA, 503 bp, Glycine max
  Clone ID: PAT_MRT3847_137708C.1
gaaaaggtttacaccagaggaagatgagaaaattaagttggctgtttttgattatatagagtctcatggtttgggagatgaaggtctagatatggttctccattgcaaatctcatcctgaaattagagattgttggaaggaaattggagcagccttacctcagaggccttatgttagtgtgtatactcgtgctcatattttgtttgaaaggggtgaggatcgtaagtggacacctgaagagtatgaatttttacggaaggtcaaggagcaacatggatctgattggaaatcagtagctgaagcattgggcaaacatcgatttcatgtaaaggatgcatggcgtagaataaaattaaccaacacaaaccaaggacgatggacccaagaggagtatcaaaatttatttgatttagtaaacctggatctacgtgtgagagcttcacaggattatagaaaatcaaaacatggtatgctgcgagataatattggttgggaggcaattg

SEQ ID NO: 41757 - DNA, 228 bp, Glycine max
  Clone ID: PAT_MRT3847_137709C.1
atgtgcttttcgctcactacaatgatgaattcatggagtctattgaatcgtccgataggaagagaaaatatatgaaatgggatgacgctgggtatggagcatagcaggtggggaaataggacgatgatgtaatagtaggcactgaggatcagctgggtgtgactaactaaatgaacaacgaagacacgaacagtcgttactacggatgtgaatggtaaagctgataga

SEQ ID NO: 41758 - DNA, 505 bp, Glycine max
  Clone ID: PAT_MRT3847_13770C.1
aaaaaccaaaggccttcattcaaaactgggctcaaaacagggcccaaaagggtcatggattgggggcctttttttaaaaaaaaccttagggaaaacaaaaaaaacctataaccccagaaaaacggaaattaaaccccaagatttccttatttaccaaacaaaaaacttaggcaaactttgccccacattggcggaaaacctccagcagggctcagtatttctcaaaagcctaaagaaaccgttcccacgggtggcaaaaaaattggcaaaacaattaccctttatccaacgattattaccctttatcggcaccaaccttggaagggggttcatcattttaaacagcggcggattctgaggggccatcatcttcagggggctttgaaaattcaccagggggagaaaattctgaggggccaacaggggattcgggttcagttacgggaacggtctttggtacgggcccaacttttacaaactggcccaaaaattgggatccccaggc

SEQ ID NO: 41759 - DNA, 199 bp, Glycine max
  unsure (1)..(199): unsure at all n locations
  Clone ID: PAT_MRT3847_137710C.1
gggcgcacnngagcaacaanggngcacccaanagcagaggcaaacgaggaaagnccgngcgggaaaccaacgccggaagagnncnacgcgcancacncagngagncacggngccgagngcgngacgaaccccagaggncacaagcacnncacacagagatggaccccacacattccttaaaccatcattggaaccttcg

SEQ ID NO: 41760 - DNA, 340 bp, Glycine max
  Clone ID: PAT_MRT3847_137711C.1
ccgtccggtctactacatccgggagacggcgctgcctgtacgacgcagttcagagtcttatacgataccgcgatgcggtgcgcagtgtagaatagatcctaagtattagcgtacagcgtagacatgcaaatcgacttgacctgcttgcttatagcagaccgaccgtagaactggagataaacctgtgccggtgactctacaacaatcggattgagaaaactcctgctgtacccaacttaattgtattgaagagatcccacttatcgcgcttgcgaaatatcgacaaggctgaatgccgaacggcattcccaactgtagcgcagcattgaatgcggaatgg

SEQ ID NO: 41761 - DNA, 193 bp, Glycine max
  Clone ID: PAT_MRT3847_137712C.1
cgcccctgggggggccgcgatggccaaggaggcccttcccaagaccgagtttcggaggccagagtgtgcgaatcccttctggcatcccgctcacagtgatttgcgattgcgctcgtaatgaccagcccattagatatctcttttgaaaaattactgcgccaggctgagggggggggcttgtagatacaaccct

SEQ ID NO: 41762 - DNA, 124 bp, Glycine max
  Clone ID: PAT_MRT3847_137713C.1
ctttacgtttgtcagaaattaccatctaacggttgcacacacacatgtgatgtggaatgccttgattgcattgctaaggcggattcctctctggaggcttctttaactgcaatacttaatggtg

SEQ ID NO: 41763 - DNA, 244 bp, Glycine max
  Clone ID: PAT_MRT3847_137714C.1
taactcacttgcacttacctcactctatatgctttgttcgtcttcaatggaataagagcacaaagaaatgaacacatctttgggcagagtggacggtggagaatttcatttctagcccaggtaatagctcggaaacgataaaaaaaaaggctgggacaagaaccactttccgtgtgcatgctgagtctaccttgattcatgtgttcagttatggagaaaagggatccaattgtgcacaaccata

SEQ ID NO: 41764 - DNA, 504 bp, Glycine max
  Clone ID: PAT_MRT3847_137715C.1
ctaacccttctttcttacatttgcttccaatacattgtgcttatactcattgtgaaaagtagcacagctgaatcaaatttgtaatcaagttttaatcattcgcctttcttttctttttttttttaaccgctccattagtaaaaaatggggccgcacagtatttttgcaaaaggcccaaagtgtgccattacaactcactagcatatatggtgtgcgacattgagaacaatgatttcatggcccatagagaacaatgatttcagtagcttctacctatgacgatctcatctcattacaggaaacaatagttttttttcggcctccatttaagcattacttccttctggtaatgtaatcaatcttgtttttgaatcatacaccattttagtttcacagttttcacatttgactttgttggtggaatcgccacttgaaaccgacagtatagtcccaaagaaagaggtattttcagtaccacagttgggacaagggccctttaaaatc

SEQ ID NO: 41765 - DNA, 1622 bp, Glycine max
  Clone ID: PAT_MRT3847_137716C.1
ggctcaacagcgccaccaccattatactctctgttgctaatcatggctagcaaattggccttcacactgacatacccgcttccacttacaccaatctcttccttgtcctcctcttctgcttctcgactccaccttcttcaattcaatggccgccacatatgccttcgccctcggctatttctgttttctcccatggccacagccgatcaagacaaggttgaggaagatgctgccgttgttgatagtaaaatcctacaatattgtagcatagacaaaaaagagaagaaatcagttggtgaaatggagcaagaatttctacaggcactgcaagcattctattatgaggggaaggctattatgtcaaatgaggaatttgataatcttaaggaagaactcatgtgggaagggagcaccgttgtgatgctaagttctgatgagcaaaaatttctggaagcgtctatggcttatgtgtctggaaaaccaatcttgagcgacaaagagtttgatgagttgaaactcaggctaaagatggaagggagtgaaattgtggctgaaggtccacggtgtagtcttcgtagtagaaaggtttacagtgacctgtctgttgactatttaaagatgttcttgctgaatgtcccagcaactgtggttgcactaggattgttcttcttccttgatgatgtgactggattttgagatctcatatctgataaagattccagagccttttagtttcatcttaacttggtttgccgctattccctttattttgtggctggctcaatcgatcactagggcaattgtacaagattttctgattttaaagggcccttgtcccaactgtggtactgaaaatacctctttctttgggactatactgtcggtttcaagtggcgattccaccaacaaagtcaaatgtgaaaactgtgaaactaaaatggtgtatgattcaaaaacaagattgattacattaccagaaggaagtaatgcttaaatggaggcacgcttgatactattgtttcctgtaatgagatgagatcgtcataggtagaagctactgaaatcattgttctctatgggccatgaaatcattgttctcaatgtcgcacaccatatatgctagtgagttgtaatggtatgaactttgtatagcatacgtaggatcgtctaccagaagagatgaattatatgaggatattcttaacatcaagatttttaatttgtaggcacactttgggccttttgccaaaatgctgtgcggcccccttttttactaatggagcggttaaaaaaaaaaaagaaaagaaagccgaatgattaaaccttgattccaaatttgattcagctgggctacttttcccaatgagtataagcccaatgtattggaagcaaatgtaaaaaaaaagggttagaatctctcttcattcaattttagctttccccaaattaggaagtagtccaaaatttactaaattatttttaattttataagggggggtctaacatcccctaagtagaaatggaattaaataacccaatctagatggcctaataaaattagaacaaatgtattatggattgagcccattttttaagttctttttaaacccaaatttttgcct

SEQ ID NO: 41766 - DNA, 524 bp, Glycine max
  Clone ID: PAT_MRT3847_137717C.1
aaaaggggtttctgtaactccattaccatcaatatccaaggaaatttcgcgacggtaatacaacagtcaacctgagagagcatagaacactgaatactaaagatcataaaatcattacaggtgatgtcaatgcgcctcaagctttcattcaatttcctttgtataaatcagggctcaaatgcataaaaaatgagacattcgcttccaacgtggtaacacaaacaacccataccactgtaaaaaagtgaaaccaaaggcaaatttgcttgttttctgttacttctaattcggcgagactatttaacaggcactgtgttatattgtatgcaagattacaagaacaaactgagataagcacacattcctaactattgcttcaaaaaggaaaggatacttctcatgaggatgcatggccaattaaactatgggaagaacaaaatagcctcataaaatattgaacatgggtgggcgagcccaaataattactctctctaactataggcgagccaggggcattcattatc

SEQ ID NO: 41767 - DNA, 1543 bp, Glycine max
  Clone ID: PAT_MRT3847_137718C.1
tagaagtaaaattctacatgctcttcttcttcttcttcttcaacattcaactattggtttgcacgtaaagaacaggaaacagtttagtccggtaaccagaaatgaacgccctcccttcatcttcctcttccaccttcactttcttaactcagtccaagaaccccaatcatctcttcaagttgacacataaagtacccattttacccctacactcaccttctccatgttgctccctcagtgactcgtcctcctcgtcgaccacggtgctggacaaaaatgccctttcacccgaacagaattcccgcattgcagtttcgccggatgactcgagcttcgaggaagccctcgtgattcgccggccggtgacggatttttccgccgaatactccggcgaggaggaggaagaagagaaggagacaaaagaagaagaagatgacccgaaggcttcggcgatcgacgaggggctcgcgagatttgcgaagaagatgccgatgtttgagccagagagggtcgaatccaaagagaggccactcgcaattaatttggacttggcgttatacagggcgaagcttttggctcgcagaacctttcagtatgaaaaggcagagtcattacttcgaatccaagtcaccatcctgtttggtttgcttggggttggatggaatggaaggaacgaaacttgaataaagccagacaattataccaaaaaactttatcaattgatcaaaacagtgaaactgctgccagatgtctccaggcttggggtgttctggggctgttctagaaatgcaaatgggaaatatcaggagagcaagagagttgtttgatgctgccacagttgctgacaagaggcatgttgctgcttggcatggatgggcaaatctagaattaaagcagggaaatctaaagaaggcaaggattctacttggtaaaggtcttcaatattgtggacagaatgagtacatataccaaacacttgcacggcttgaagctagagcaaatagatatctgcaggctcgatatttattcaatcaggccactaagtgtaatcctaatagttgtgctagttggcttagttgggcgcaaatggaggtggagcatgaaaactaccgtgctgctaggaaattgtttgagaaagcagtacaggctagtcctaaaaataggtatgcttggcatgtatggggcgtttttgaagctaacatgggcaacattgacatgggaagaaaacttttaaagataggtcataatctaaacccaagggatgctggtctacttcaatctcttgctttattagaataccaatactcaactgcatacggtgcccggggtggggtcttgagctatatatatacatattggtgtcttgtaaaaattgttttgaatagtatgaccgtggcatgagaggtgtaattgccttgagttgaacacggcattataagaaatatttttttaatgaaaagaaaatatactaaattgctgacaacattgcttttgagtctgaggaaaaaaaaaaaaaaaaaactcgagactagttctctctctc

SEQ ID NO: 41768 - DNA, 1224 bp, Glycine max
  Clone ID: PAT_MRT3847_137719C.1
ggctcgaggtaaaggtcttcaatattgtggacagaatgagtacatataccaaacacttgcacggcttgaagctagagcaaatagatatctgcaggctcgatatttattcaatcaggccactaagtgtaatcctaatagttgtgctagttggcttagttgggcgcaaatggaggtggagcaggaaaactaccgtgctgctaggaaattgtttgagaaagcagtacaggctagtcctaaaaataggtatgcttggcatgtatggggcgtttttgaagctaacatgggcaacattgacatgggaagaaaacttttaaagataggagagcatctgaattgaatccaaggcaccaacctgtttggtttgcttggggttggatggaatggaaggaacggaacttgaataaagccagaaaattataccaaaaaactttatcgattgatcaaaacagtgaaactgctgccagatgtctccaggcttggggtgttctggagcatagggttggcaatctttcagctgctcgtagattatttaaatcatcgttgaatataaattctcagagttacgtgacatggatgacttgggcatccatggaggaagatcaaggaaattctgttcgtgctgaagagattcgtaacctctatttccaacagcgcacagaagttgtagatgatgcttcatgggttatgggattcctaggtattttagacccggctattgacagtttaaagagaatcctcaagctgaacccaaattcgtacaacatgccactggattctttgaggaacattgcgggaacaaataaaaacagagttgattcttctagtgaagacgaggatgatgatgatgcaaatggaaaaagtgactttgatttggatgctttcattaagcaaaagctaacattagatttgtccaatctagaaattcagttggaagaaccaaaattttattctgtgaagagaagtacgtctcctagaaggatatggcgacgatcaattaatgaaattgctgaagtgcaagtcacacagtaatttagtttagggtgtggggtcttcagctatatatatacatattggtgtcttgtaaaaattgttttgaatagtatgaccgtggcatgagaggtgtaattgccttgagttgaacacggcattataagaaatatttttttaatgaaaagaaaatatactaaattgctgacatgacgaaacatgcttttgagtcaaagg

SEQ ID NO: 41769 - DNA, 384 bp, Glycine max
  Clone ID: PAT_MRT3847_13771C.1
gggttcgggtcgagaaacacaatagcttatattggctttttattatgtgccaactcctaaaggttggatggttgctctgaaaatgtgtcagactcaaattgcacttcccaagaacacaattggaggaactattctgtgtatggctctatagccgaatattatgacaaagggcacttttagagcaagtggggattggcagcgcactcatcggattgaaggaatgattaaaatggtggccacacatggtattcctgacaatccaagactatcattggcctgggctatgaataggactacttaggggcgtgccagatctgatattaacaccatctgttctcaagactgaggattatggcattctgcttgcacaaaagccatgactat

SEQ ID NO: 41770 - DNA, 789 bp, Glycine max
  unsure (1)..(789): unsure at all n locations
  Clone ID: PAT_MRT3847_137720C.1
acttttatggactaaaccacttgggcacagaagactattccttcaatctagggttttgccagtctaaccaatttctaaatatgaattgttctaaggattaattggttaagtaattgacgcattagattaaattattagaaacactttcatggactaaaccactttcagacattattgtacactttcatctacttgagatttattgtatgtcacgacaaaccttatttaataaaagatatctaaaacacttaagactatacctatgtctcttagaaaaaaggtggagatttttccactaaggttgatatccccgacatacaacaatgtgcaaaaggactaaggatcgcctaggtcaccaaggagaaatgagtttattgaaaggtttgcaaaaaatgtgtttttacaaaatatttttcaaagagaaagttatgattccaagaaagagaagacattaggcaactctagagaatttgtgagatagagctaaaaggcccctagaggtgagcgaaggcaccatcacccaaacacccatgaacaaaaacaaccttcttcatagggaaggaaaactcaatcattcttgggtaagggaagaatattttagaggaactccttcgataacaaaaggtagttcaaccacttttgaccggtggtagtaagaagtcatagtgagagagatgcctctcttggctagagcttaaccagagatgacaggtagctggattatgactaatnaaaaagatatacaaaccacacatctttagaaaccattgggaaatgtctntatgcatg

SEQ ID NO: 41771 - DNA, 802 bp, Glycine max
  Clone ID: PAT_MRT3847_137721C.1
aagatcgggagatggagctgtaggagcggcagttgaggtgggcccggagggggctggagaagaggcttaggttggagagggagcttgacgcggagcggcggtggcgaaagcgcgtggagcagaagatggaggaggaggagatggagtggaggcagaggatggtggcaatgcaggtcgagcacgagaagcagatgatgcagatgcacgtagaggcgtgccagaatcaaatgcaggttctagggatcatggctagactcctttgccagttcttcgggtccggaactgatggattgagtaatggtttgggggcattgcctcctcaggttttgcatcatggaggtggattgggtaatgtaaaaccagatgccaattcgccttccgaatttatatagttcaggtgatcttctcaacagatgataattgaaaacatggaatgtgcaattacctgtcctttgcaattgtatcatattatcttgaagggaatgcgaaactttggggagggaaagaaggggaaacagttgagcatgcttgtttgacgtgtttctaagatttaagaatactgttggattggatattttgctttcagagatgtaaatagtaatctcttagtacttgtaatttgaaaagataagtagttgttttaaaatttcaaagatttatttagctatttcagcagccgaaggtgttggttattgtctaggtggatttatgttatccttttattctcggtgattattaggggtatgtagactttgtgttgaaggatatgttagaaaggaataaaataatgaggatattgagc

SEQ ID NO: 41772 - DNA, 242 bp, Glycine max
  Clone ID: PAT_MRT3847_137722C.1
tgggacagcaaaaacaattaataaagatgagtttgaagaacaacatggtggtgccaaaggtgtgtttgttgcatcttttccttgtgggggttagagctgcacgcatggaactgagcgtcttcaaccgtgatcagtcatcgacttacgatcatgatcagtattcaaagccatcctgtgatttctccatgtccagacgcccaatcccctcttcattgcatctatgaacacactaggcttacttc

SEQ ID NO: 41773 - DNA, 315 bp, Glycine max
  Clone ID: PAT_MRT3847_137723C.1
gcttacgctaatctctgtttctggggtgccgcttcagataccttagagggacttgactgaccgactgccttatggatcatggctattggtatagggcattctcttcttggcgacggaggctcacttcaaggtaatgggatgctttatgttaacgaagctcgcttgagtgaagacttgaaccattgctgtgaggtgcttgctgaaccaattcatactgttatgcgtaaatatggcgttcctgagcctcatgagaagttaattgaactaaccagaggaagatcagtgtccatagagagcattagagatttcatttgt

SEQ ID NO: 41774 - DNA, 150 bp, Glycine max
  Clone ID: PAT_MRT3847_137724C.1
gttgttttggcctactagccagtttgggccattggaacaggaaaggttgctacttctgcggagggggaagtggtccatgctgggttgaggatattagatcatgacaatgtgagtgcctgcagttgctgcatctcgtaagcaattatcata

SEQ ID NO: 41775 - DNA, 132 bp, Glycine max
  Clone ID: PAT_MRT3847_137725C.1
aattcggctcgaggtccgttggtggtcaatctaacaaacctttttatattggttaccttttcaacacggcctacacaactcttttatgggaccctttcatataaatatcatgcttccagaggtgggttccgg

SEQ ID NO: 41776 - DNA, 381 bp, Glycine max
  Clone ID: PAT_MRT3847_137726C.1
cgacgatgagttctgctgaaaattaaaaatcgaaataaatccgttaggaagttgttgaagtgggtgggacccaacgaagcagagatggaggctatgctgcattcgcaccgatgcagagctccgtcgatgtgggtttctggcaccgattgtcttctttgaagctcaacaagcatgccattgacgattctccaattcccttattcggtttttatgcaccgtgctctcagtctcatttaactgttttagctgagtctttgccttctgttccagggatactttacaacactaatactgtggataagaatgacctgttgaatacagagaccattcttgatagctgttctgcataattaaatcagagaaggcaactcagatgtttct

SEQ ID NO: 41777 - DNA, 195 bp, Glycine max
  Clone ID: PAT_MRT3847_137727C.1
tataccttaccctttctttcgcataacctatgcaacatataacaatcgcgccccattcaaagaacaatctccactccaaccaaccaaacgaatcaatatcaaactatttcttaactctctatctccacttccacttagcttcttttcatcctaacacaattactatccatcaactcatgacctcactctactcaa

SEQ ID NO: 41778 - DNA, 190 bp, Glycine max
  Clone ID: PAT_MRT3847_137728C.1
ggaaacaagctgctgaagatatgcgcagaatgtgataacatgtcaccaataatagatttgaatatctgtaatctgacaaatttccctaaatactaacaacgaatcaattttctgaggttgtgtccgcggattttatgtcaatggttgctgatctatatatgtgtggcattttagccatggagcttatatt

SEQ ID NO: 41779 - DNA, 176 bp, Glycine max
  unsure (1)..(176): unsure at all n locations
  Clone ID: PAT_MRT3847_137729C.1
ntaagcncnanatcgcangcncgcgnacgnnagcncggnattcggcncgagnnttcctnaagcncctnagngctgctccnngcngctctaattntatccnctcangnncnngcnnnnnnatgagaatncccccngtgtacaagcctcccactgagaaancaccagtttatnagccc

SEQ ID NO: 41780 - DNA, 232 bp, Glycine max
  Clone ID: PAT_MRT3847_13772C.1
ggccgacgagacactggatgccagcgacaccgccgccctgctcgatcgcaccaatgccctgatggaggccaggctggccagcatcagccgcgcggccccggccttcgctgccgtgctgcgggcctaccgccaggcgctggcctaaggggacatgcacatcgccgactggctgatcgcctggctggccggccagcccaatgtggccgccagcgtgaagcgccgtgccggcatc

SEQ ID NO: 41781 - DNA, 318 bp, Glycine max
  Clone ID: PAT_MRT3847_137730C.1
tgttgccgtacctcaagagggatgctgctgagctgaccgccccttctctccgccgagacgatgagaattgaagggattcgctctcgactcaatctgatccggtgacaggcctgtacacagagcgaggaggggttccatccaaaccaggatcgactattctgatcggaagcgactcaacgacgtgcttaccaacatgtcgtccacacctagactgagacatcctgtagacctcgtcaccaacggtacggacggctcccactctttccttttaaccgtcgccaaggactccctatccgtctaggttacctgccttatctc

SEQ ID NO: 41782 - DNA, 388 bp, Glycine max
  Clone ID: PAT_MRT3847_137731C.1
ctttttcttcgggtaagctgactaattcctcacaccagtttctacttgttcgtcttcacttgtcacactcaggcattcttattattcctatccacaccctttattgccgtttagtttgggtctgatgggttgaacttgacccccttgcctctgggaggccgtttccgttcattggagggggacagcaattgcgatctcaaagaagacgacgccgttgggtatggactaaacggccacgatgatgacgccggggggcccctccccttgggcgtgctccaaacggtgccgtgcgggttcgtcctcaccgacgcgctagacccccaccaccccatgatatacttcaatggcggcttcgagacggacaccggataccgcgccgtggaagtgc

SEQ ID NO: 41783 - DNA, 1189 bp, Glycine max
  unsure (1)..(1189): unsure at all n locations
  Clone ID: PAT_MRT3847_137732C.1
gaagataaaagctaaaaaatcattcattacccaccagtcagtcactctgtgggcaaaactctctctctcaatctccttaccttgcaagcaccccacccacacactgtccaacgttaaccgatcaaaaacccatctctgtctacctttgtttgatctcaaagttggctctcacaaaaacgtgaaaaaatttcattcccgtgagattctcctccaccgatgcagattgaatttcaggaatcctgggtgtctacgatacgtaatcacccttttccatgtttttattcattcgatctgtgatgatcataatgtcactcatcggaaacttgttgatcatatgattttgttcttccttcccctgaatcccctgttttttcttttacctttttttttttctggttgcgtattcagcaagtgtacttgatgaattggattaaactgataattctacgatctgggaaagtcatacccaaaatacaaaaatcaaaatatattataaaaaaatgtttttttttcacctatccttgaataattggttgcaaaagcggttccatttacaagcccctgtttctgggtgtttggccatggaagatgattttgctgggtcgattattccttttcattggggtgatctcactttgatgaattacgatgacttcacgtgaatagagatttttaacttggattaaaaaattggcaaaattcctttcttttttgttttggaatatcccaccgtttgggggaatgaataccatacttcccctcaaagtttttatctttggattcaccttcaaatattctgtttgttttctctttttgcatgtttttttcttcatctgggtcatctaacatctaaatcaagcgttttatacaacgatcggtgtggatttccttctctgattctgatttttttttctatctcgtatttgttattttatttttatttttttggtcttgttgttcctcctctttcataggagattcatgattttgtgggtctaaaatctaaatgcgtgccttgtgatgattgtagctcgtaaatcataattggttatgccacantaaatggagacagttggtcatataattcagtttttttcccttttttgggtgggtcacatattgggtttttgtaagtttgtttttgtttggnggtttgggacctgggttttgtttgtcgttttttttttgg

SEQ ID NO: 41784 - DNA, 460 bp, Glycine max
  unsure (1)..(460): unsure at all n locations
  Clone ID: PAT_MRT3847_137733C.1
gaagagaagaaaataaaagctaataccattcattccatttccttgattcattctctcaacaaacaaaactctctctctctctctcaatctccttctcttgcaagcaccctcccacacactgtccaacgttaaccgatcaaaaacccatctctgtctacctttatttgatccaaagtgggctcacaaaaacgtgaaaaatttcattcccgtgagactttcctccaccgatgcagattgaatttcaggaatcctgggtgtctgcgatacgtttgagacctgagatttgctagtcagttatatttttgagaacagtttagatcttttcttctgcaaagttagggcactgcataaggtttggcagtgcccatggatgccacaaccagcggaaccccaactgtccaataccataacatccctgaccaccaattactgccattatngccactccacttncaacatt

SEQ ID NO: 41785 - DNA, 537 bp, Glycine max
  Clone ID: PAT_MRT3847_137734C.1
tcgttttttcgtccgattcattctctcaacaaacaaaactctctctctctctcaatcggcttctcttgcaagcaccctcccacacactgtccaacgttaaccgatcaaaaacccatctctgtctacctttatttgatccaaagttggctcacaaaaacgtgaaaaatttcattcccgtgagattttcctccaccgatgcagattgaatttcaggaatcctgggtgtctgcgatacgtaatcaccctttccatgtttttattcattcgatctatgatgatcataatgccactcatcggaaacttgttgatcgtgtgattttgttcttccttcccctgaatcccccgttttttttttccttttttcctttttcttttacccttttttttttccgggtgcgtattcagccagtgtccctggtgaattggattaaactgataattctcgatctgggaaagtcccacccaaaaaacaaaagcaaattttatttttcaaatggtttttttcccctaccttcgatcatatggtgcaaagcggtt

SEQ ID NO: 41786 - DNA, 699 bp, Glycine max
  unsure (1)..(699): unsure at all n locations
  Clone ID: PAT_MRT3847_137735C.1
cctttgaccttgtttggtctttggatatctctttccaaagatccactggtttggctgctactcagtttgtttgatatgcccccttttctttaccttcattacaacattcggctcctttattcttcccgttttttgctgccttcactgcagcatggtggtccttttttacagcctttattgcagcattttgcaccttcattatacccctattttgctaccttcattgtgccattttttgcactgccttttttgcagcatttggcaccttcatagactggctgccttcattatagccacttagcagtagtcttgattgctgctgcacctttgatcaatcaaaaccactgccagaagattcaggaaatcattttccattgagagcttaccctattcaccaagggccttttatcagtgaacttttatgatcttgcttgcgggagtgatgcatatcaattcactagtttgaggggaagtgttgaaatgtaattaggaaaatttaatttattcctataattaggctgatttgatttgtataattttcattcttttttattttcttagttgagatgaagaaatctataaatgccatttgtaatctctttttttattttttatttttttatttgnaggaattgaaatttgtaatctctctttgaacacaagttagaaatacaattcanatttattcctttaaaaaaa

SEQ ID NO: 41787 - DNA, 475 bp, Glycine max
  Clone ID: PAT_MRT3847_137736C.1
aattcggctcgagctcgagccgaatcggctcgagcggctcgagacggctcgagaagacgacagaaggggagatactggagaagcgggaagcagctgtttttgctaaggagcaagattcgttgcagaggcttcaagagaaaagagatgctgcttcatttgccattgtaaatgctcgagaaaagcagaggaagatttcatcacgtgaattggctactttctctaatggtggtaaaggagggatgccaggagtggaggagaaaccagtggatactttgtccactgcagctgaaggtaatgtggaagatgtaaaacttcctgataatggaaatgtggagttggtatcttatccagagttggtaaaactatgcaaagagatggatgctgctggacttcacaaattcatatctgataaccgtaagaaccttgctgctgtaagggatgaaataccaaatgctttaagagctgctcctaatgc

SEQ ID NO: 41788 - DNA, 922 bp, Glycine max
  Clone ID: PAT_MRT3847_137737C.1
acgtaagctcggttttcggctcgagctgagactaatttaggacaaaatttgaaaaagaaaacagaaggagaaagaatagtgaagaagaagtgagagagacacagacacagtgcggtttgcgactctagtactattaattaaacaaatacttctaccacacattcttttcttcttctctctctcccagggtttcacgttttcatgtgaaaatggattgagaatctctttctatttttatattttctttcgggtcaattagggttttttctggcgtgattctgaaagcttggatctggatatcttctttgcttctttgctatggaagactcggattcagttgctacattgatagattctactacttctaagatacaacagctgcagaaggcatttgctgaacttgaaagttatcgggctgttactcttaacttgaaatggaaagaactagaggaacatttccatggtcttgagaaatccttgaagaggcgctttgatgaattggaagaccaagaaaaagagtttgaaagcaaaacgaggaaggctcatgagatactggagaagcgggaagcagctgtttttgccaaggagcaagattcattccagaggcttcaggaaaaaagagatgctgcttcatttgccattgtaaatgctcgagacaagcagaggaagatttcatcacgtgaattggctactgtctcaaacggtggtaaaggagggattccaggagtggaggagaaacctgtggatactgtgtccactgcagctgaaggtaatgtggaagatataaaaattcctgacaatggaaatggggagttggtatcttatccagagttggtaaaactatgcaaagagatggatgctgctggacttcacaaattcatatctgataacccgtaggaatcttgctactggaagggatgaa

SEQ ID NO: 41789 - DNA, 1118 bp, Glycine max
  Clone ID: PAT_MRT3847_137738C.1
tcagcagaagcaaaaaaagcagaacaacgttagtgaaccaacccaacacacaaagcaagagaaaaaagtatctcaatcaatcaacaaaagctcactttcataaagacacgcacaccatattcttgttacacaaaatggaccaacaagagggtaacacgtggacaatgccaccgttctgggcggtggagcagcgaaaccgccgccgtcttcgccgctcttactctctgttgctcacctccacctccctcctcgtactcttcctcgtactcgtgctggtgttctcgctcatcgtggttccgacgttgcactcgttcgcttccaacatcttcaaacctcgtacagttaagaacagctgggactccctcaacctcgtactcgttctcttcgccattttttgcggcttcctcagcagaaacaacaacacctccgaaaccctaactccgcgctctcgcagaacgttctcgaacccttcaacgccaccatcagcatggtaccaaaacgattactctcagattcataatcgatcgtttaataggttgaggagctttaattcctaccccgatctgcggcaacagatcgccgccgatgaaaggttccggttttatgatgatacttaccttctccggcaccggaacatgagaactgagactgaagaagaagaagaaaaggaaataggaattgataatgttgccactgcgccgccgcaatcgccgccgcaacagggaatggaagctgttggaagaaatgtcaagcgagcatatcaagtggaaaccgtcgaggagcataaaaaggaagatttagatgcgcagatttcaccgccgccgccggcgacgagatcaaaaggtgttcgacggaatgtcaagcgaacatatcaagcggaagccgttgagaaacatgaaacaaatgattttcctgtgatggattcacgaccgccgccggtgacaataaccaaaggtgttcgacgaaatgcaaagcgaacatatcagccagaaaccatggagaaacgcgaaacaaacgattttgatgagcagaattcacaaacgctgccgtcacctccgccgccgccggtgacacgaacgagaggagttcgacgaaatgccaagccggaagaaatgatt

SEQ ID NO: 41790 - DNA, 479 bp, Glycine max
  Clone ID: PAT_MRT3847_137739C.1
accaaataggtatttagttagcctttttagttccagacagtttgtcttgatgaggtatccttgttttgtttgtgttgtgtaaattgctgacaaatttcaggtgatgccactgtctggatttctcataagcacactcttaaatcttgcaccacattttgcagcaggtttaatattaattgggtgcagtccaggaggcacagctagtaacattataacatatctttcacgtggaaatgtggcgctatctgtaataatgacaactgcaagtaccctaactgccacggttgatcatgactccttttctgacagcaacacttgctggtaaatatgtagcagtggacgcgtctggcttattgatttcaacactgcaaggtgtgctttttccttgtgtggctggtgcattttctgaaccagtttttcaaacctttttgtaaacttgtctcttcattgatgccacccattgcagtaacaactgtggc

SEQ ID NO: 41791 - DNA, 298 bp, Glycine max
  Clone ID: PAT_MRT3847_13773C.1
tttattatttctccattttggcccaaaaggatattggaataacttaaaaggaaacttcggggtccataaaccatccaaccaaggatcaagggccaccgttccaccgggaaggaaacccacagggagggtaacccttccccggaaaaggattccggggggatcaaatataccccattttttttttaataattcaatcttcccccttaagaattaagggctggaaacttgttctgggttggggtctgataaaaccacccttttaaataatcccatccttccctccttcttggagggggcg

SEQ ID NO: 41792 - DNA, 330 bp, Glycine max
  Clone ID: PAT_MRT3847_137740C.1
aatactgcagggggaactagagcacctttgcttcaaagttgactgaacattttcttggaaaaccagtacatatggaatgggctcaaagcacctaaagagaaaactgatactggatgtggttggaacaacacttaagacagcttgatctagagcctgatctattcttatgtagcctggcctgaagacactacacggctggccaaactctcatttatgagggttagggagccattgccgactcttataagaatatagtctggttctagggcaactactaggtgttgctatggctcatactacctctatatggcccctcccaaaggagaaact

SEQ ID NO: 41793 - DNA, 544 bp, Glycine max
  Clone ID: PAT_MRT3847_137741C.1
gactacttgatcttcgctgcatgtccaggtccgtcaccggatatcacaaaaaagttatccagtattcagtattcagttagtggggggcgtatgtctatatatttgggtgggttcggtgtaaatgtatgtatatgtgtgtgatgctgacaggtcatcaggtttcaacgcttggttgttgttgttgttggtggttttgtgaagtccagttaaagttaaagttaaagttacggtaaacaacagctaagataacaattgcccctcagtgccttgcaaccgcacttactgtgttgatcctctcgcccgcactggtcccaattactgccatcgcaaccacctcaacctttgttgatacgctgcttctcattatcctcgtaatggtggtcataatcttcaccgtgatcttaatccttctcttcaccaaagtagcccttagcttagttcccactgtcctgccaactctgttcatagtcgtcgtgttattaacagtggtgcccctccctacccttttaatcatacccttgtgtctttactatcgtcggcaccc

SEQ ID NO: 41794 - DNA, 363 bp, Glycine max
  Clone ID: PAT_MRT3847_137742C.1
gctaactgaaggtctggaattaggtcagcattctgcggaagaagttgacgacggcaacgttcaaggagatcaagaaaacctctgaacactcacaataccatcccgttaataaaaacaagtctctctctttctctcttcttcgttgcccgacggttgatgtttgatatagaagtgcacctaaacacatggggacaagcagttttctatggaactgtactaaaaagtttatctcagccgggattgtcactgtgactgtgactgatctttttgtgacagttattccagttcgaggtggatctatgtctccacatttaatcctaaagccggttctctgatgggaggtgtttttgatgactatgtttt

SEQ ID NO: 41795 - DNA, 386 bp, Glycine max
  Clone ID: PAT_MRT3847_137743C.1
ggggggaaccaaacttaaccacctgcttttattgttttggaggtttttggattaacttttttttaaattacattttcttaaaaccatgttggtcttcaatttatttttcaaacccttattcaaacccacccttaaagaaagggggggggggatttcacattcaattcacgggtggaaccaatgagggtattttttttttccctttttaccaattggcctttaactattaaaaccttgcttggcattaattggttagatttggaattaaaattttaaaggggttggttgggccggacttggattttatattgcaaaaaggctttattaaaggtcattttttatggacaagagggcgattcttagggtaccacatattggctttggca

SEQ ID NO: 41796 - DNA, 1071 bp, Glycine max
  Clone ID: PAT_MRT3847_137744C.1
attttcaattagagataatcttcctagctagttccatattcaaacaaagatgatagcctttctactctttctactaactagtcttggtctagtaatcaatgcatcaacctttagtgcttgttcgaattgtggagactttgtagtcccatacccactcagcactaacgaggactgtggagacaataggtacaaagtctactgcaacgatggaaatttagagttcttgtcagcaacagggacttactataagatccttagaattgacccaagtgctaacaagcttgtcattagcccacctcctatactgaaaaacacttgttattcttctgatctctatatgggaggcttgttgcttgatgaaagcttgcccttcaatatatctacacaaaacacggtcatgttgtttaattgctcttataatatccttcagtctccattgaattgttcttcaaatagtatttgcaggcaatttgaggaaaaggtggaagaaggaactgggtgtatggacaccctttgttgccattacttaaaggactcagccatgaattcccacaagattagggtaaaggttgggagttgcactgcttatacttgtttggttggtttcaagcctaatgaccaacttgaaacttggaattatgggattgagctacaatggttgtctcccaattgactaattagatgcatggtgttgtattgaaacaacaacgtcccttttgtgtgatgctttggttgcctataaccaagagaaacttgcaatagtagtgtgagtttgttgcttttgaagcttttttgtatgttagaagagcaagtcacattgtcaagtgtatgctcttattgcaaatcaccgttcattttgtggtaagttatcttgttatgctccttagttttgcctttggttttaaatctcaaatttgcttgtttgctttgttcgggttctcatttgaataaagataggcttccatttcttgctctaactacaacaaaaattgttcatttcattatatttcttgttatgttgattgttgatattgtaacacattttagtaattgatcttttgatcatcagtc

SEQ ID NO: 41797 - DNA, 1318 bp, Glycine max
  Clone ID: PAT_MRT3847_137745C.1
tgccggtggggattgggttgccagatccgtcccgggttctgggttgattgttcgtcctgacttaggtcgatctgagagctggcagccatggggaaagcttgaagcatggcgcgagcgtggcattagagacactgtttgctgcagattccatcttctgtctgaagctcaaggaggtgaatttcttacgtcagaaattcacataagtgctgaaaagggtggagagtttttcatagacactgagaaacatatgcaaacagtagctactgcagcaagtccaatacctagtccacaaagtagcggagactttggtgcgctgagtccattggttggaggttttgtcatgagttgtagagttcaaggtgaagggaagcgaagtaaaccattggtacaattggcaatgcgacacgtgacatgcgtggaggatgctgccatcttcatggcacttgcagcatctgttgacctcagtatcgtggcgtgtaaacctttccggaggaaggtcaggagaggtttttggcattctatgtgatcagcaaggcaaatgtatttataggcactgtcataactgtgaatgctctgcctttgcttttcattgctgcaatgcttaaaaaattgtacagcttaagttagtgtcatacgttgccctcttgtgaattcttcaacatataatgatgtctatggctacatgacaatgtggcctttgttcgattagggtgcacaaaacaatctcaagttaatgaacttttctagaattaacctcattctgaaaagctcctatgtttgatagatgttattgaaaaaatcagtacatctttcaatgcgactcgtgacatgcgtggagggtggtgccatcttcatggcacttgcagcagctgttgacctcagtatcgtggcatgtaaacctttccggaggaaggtcaggagaggtttttggcattcgatgtgatcaacaaggcaaatgtatttataagcactgtcggaactgtcaatgctctgcctttgcttttcattgctgcaatgcttaaaaaaatgtacagcttaagttagtgtcatacattgccctcttgtgaattcttctacatattatgatttctaaggctacatgacaatgtggcctttgtacaattaaggtgcacaaaacaatctcaagttaaagaacttttctagaattaaccttattctgaaaagctcgtatgtttgatagatgttattgtcaaatatcatatatctttcttcccttcaatattgtgagttgggttcaaggtagaccttgtacattgtattatccatttactgaattttacaatatgtgcagattcat

SEQ ID NO: 41798 - DNA, 350 bp, Glycine max
  unsure (1)..(350): unsure at all n locations
  Clone ID: PAT_MRT3847_137746C.1
aganagngnacgatnannnaggnnagagnctgnannanaggagngaganngagganaanncnncnnggaaganagnnnngaanntantaannngagattggaagagatanatgganagagtgnaaantagagagagganaagcaaggagtcagnnnggaggagataacagnanaagnannnanaaggaaaanganngaagangaanaagngaagatgtanaganagaaanagngaaaagaggaagagagngagaanaaatnaagaagagangnaannanntagaagaanganggaaanaaaagaangtggnganaanngatggaaaangangggantnaaagaaagangc

SEQ ID NO: 41799 - DNA, 1563 bp, Glycine max
  Clone ID: PAT_MRT3847_137747C.1
gcgtacgtaagctcggaattcggctcgagcttcctctctctctctgtctctctgtctcctccatggccatctccttcagtcccaaacaccctccttacgatgagatgatatacacagcaatcggagctctgaaggagagggatggttcgagcaagcgagccataggaaagtacatagaacaagtctacaaggaccttccacccactcaccctgctttgttgactcaccatctcaaccgattgaaatcctctgccctcctcgtcctcgtcaagaaatcctacaagcttcctggatctcatcatctgcctgcgctccagccccaaaagacccgtggtcgtcctcccaagcccaagccccaccccgtctggcctgctgcagccctcaccgacagccctgctcttctatccgccaaaagaggccccggtcgtcctaaaaagattggtgtcagcccgccaggcccaaggggtcgtccacccgggactgggagatctaagctgcccaagaggcctggccgtccccccaagcccaaatccgtctcggcgatctccagtggtctcaaacgacgtcctggacgcccacccaaagcccaatccaacgtaaacgtcatccccttcgcagccccagttgctcccggcctgcctactgtgcagcccatccttcctactgcttccgtgcccaatggatctcccaggccccgaggaaggcctaaaaagagttttactgctgcgggggctccggcgctatctgccgttgccggtgcagcgcgtggtcgtggccgcggacgtccacgtggggtcttcccggtggttaggcccggccggcctcagaagctcgccgtaggaaggtccaagaatcctgtaagaaggcccgtgggccgccccaagggatcgacagctgctgcaatcacagcacataaggctgctaatgaagatctaaggaagaagcttgaacactttcaatcaaaagtgaaggagtcccttggcacgcttaagccttattttaaccatgaaagcccagtcactgcaattgcggcaattcaagagttggaagtactgtcaactttggaccttaaagcgccattgagggatgagacccagcaacagccaccgccactgccacagacacagacacaggtgtatgaacagcaatatccccagccacagtcacagcagctgccgcaattttttcaaccacatacatcagccccgagctaggcctgaacatgatgaaggacaacttgtacaagtgttattaacaaggcacaagaggtaaaagatctgtaaagcggttaggaagtagtggtactgatttttctgagggtgaaatgactctgtctattttagtttgttgttgtgcaacatttagtttgacccctgaagtgattagcgggtactcatgattctgttgttctttaagtaatatttatttgacttttacagtttactttagtcacattaatgtgtatgtttgtatcagcctcttttgttgtttaatatttttaattaatggttactgcttgctatttctcatttccccttaaaaaaaaaaaaaaaaaaaaaaaag

SEQ ID NO: 41800 - DNA, 537 bp, Glycine max
  Clone ID: PAT_MRT3847_137748C.1
ggctgctaatgatgatctaagaaggaagcttgaacacttcccaatcaaaagtgaaggagtctcttggcacgcttaagccttattttaaccatgaaagtccagtccctgcaattgcggcaattcaagagttggaagtactgtcaactttggaccttaaagccccattgagggatgagacccatcaacagccacagccacagccacaggtgtatgaacagcaatatccccagccccagccactggtgcagcaattttttcaaccacatacatcagccccaagctaggcctgaacttgatgaaggacaacttgtacaagtgtttttaacaagacccaagagataaaagatttgttaaacggttaggaagtagtggcacttatttttttgcgtgtgaaaagactctgtctattttagtttgttgttgtgcaacatttagtttgacccctgaagtaattagagggatctgttggttctgttgttatttatttgttttttacagtttttaatagttactgcttggtatttgtcatttcccctt

SEQ ID NO: 41801 - DNA, 2205 bp, Glycine max
  Clone ID: PAT_MRT3847_137749C.1
gtttagttaccgacattcccaaaattggatgcatatccgcaacggaggcagagattgagcgtatgatatgagagagaagacggaacaaaatcaagggcggagaatgccccatggctgacatcatgtcggttaacactttattcagacaacactatactcattaatcaaaatcaaatgacctaaccactctctctttttcccaattttcgaatctctctcctccatggacccaacttcgatccctccccctccggccaccaccgtccccttcactgtcgaacccagcaatcacgtgacccccgccgacaacaccaacaccaaccaccctccttacgatgagatgatatacacagcaatcggggctctgaaggagaaagatggttcgagcaagcgagccataggaaagtacatggaacaagtgtacaaggaccttccacccacccactctgctttgttgactcaccatctcaaccgattgaaatccgctggtcttctcatcctcgtcaaaaaatcctacaagctccccggatctgatcctcttcccgtgctccaggcccaaaagccccgcggtcgccccccaaagctcaaatcccagcccaacactgagctcacatggcctgcgctagccctcaacgacaaccctgctcttcaatccgcaaaaagaggcccgggtcgtcccaaaaagattgcaggacccgtaggtgtgagcccgggcccgatggtgccgggcagaaggggtcgtccacctgggaccgggagatctaagctgcccaagaggcctggccgtcctcccaagcccaaatcccgtgtcggcgatctccagtgggctcaaacgacggtccgggccgcccacccaaagccgaatccaacgtaaacgtcatccccttcgcagcccctgttgctcccggcctgcccacagtgcagcccatcgttcctactgcttccgtgcccaatggatctcccaggcccagaggaaggcccaaaaagattgttgccggtgcgggggctccggcgctctcttccgttggtggtgcaccacgtggccgcggacggccccgtggggtcttgccgttggtgaggccgggccgccctcagaagctcgccgttggaaggcccaagaatcctgcaagaaggcccgtggcgccccaagggatcgatgcaatcacagcacataaggctgctaatgatgatctaaggaaggaagcttgaacacttccaatcaaaagtgaaggagtctcttggcacgcttaagccttattttaaccatgaaagtccagtcactgcaattgcggcaattcaagagttggaagtactgtcaactttggaccttaaagcaccattgagggatgagacccatcaacagccacagccacagacacaggtgtatgaacagcaatatccccagccacagtcactgcagcagcaattttttcaaccacatacatcagccccgagctaggcctgaacttgatgaaggacaacttgtacaagtgtttttaacaagacacaagagataaaagatctgtaaagcggttaggaagtagtggtactgatttttctgagggtgaagtgactctgtctattttagtttgttgttgtgcaacatttagtttgacccctgaagtaattagcgggtactgttgattctgttgttatttatttgacttttacagtttactttagtcacattaatgtgtatgtttggttcagcctcctttgttgttttatatttttaatggttactgcttgctatttctcatttcccattaatcattattgagtggttgtgtgaaaaaaaaaaaaaaaaaaaaaaaaaaaaaaaaaaaaaaaaaaaaaaaaaaaaaaaaaagaaaaaaaaaaaaaaaaaaaaaaaaaaaaaaaaaaaaaaaaaaaaaaaaaaaaaaaaaaaaaaaggggggggccctttttaaagaaccaattttttttccccggggtgggaaagatttatttttttttttggggccccaaaattaaatttctgggccctttttttaaaaacttggaaggggaaaaacccggggtttccccaatttataccctttggaaaaaatcccctttttcccggggggggaaaaaaaaaaaaggccccccccattccctttttcaaaaattttcccatccttattgggaaatgggccccccccttttggggcctttttagccggggggtgggggggttttccc

SEQ ID NO: 41802 - DNA, 176 bp, Glycine max
  unsure (1)..(176): unsure at all n locations
  Clone ID: PAT_MRT3847_13774C.1
tanagggctaattaaattataaaaaaaaaactctcactctatatgagtggatttaatccctggcggggtggtcaaattctacttgtaattgtcattatatcactaaaactattcgattctattccttgttttcaatggacacctttttcaattctcaatcttcttcttcttcaata

SEQ ID NO: 41803 - DNA, 445 bp, Glycine max
  Clone ID: PAT_MRT3847_137750C.1
cccacgcgtccgcccacgcgtccgccattgcaccacataaggccaaagctattaaggccactagttcggggtgacgtgaagatgacaatcaattctccttaccttctttcacctggttttattgttgttttgcttttttcctgcatccttgctttcttcctgaattacagtatttttctgaacacaactctcaattcagctctggcacagacaatatgtggtaatcttaaggatctatttactattggctttggctggataatttttggtgggctaccatttgatttttggaatgtagtaggacaacttctgggttttgcgggctctggtttatatgcctactataagctcatcggcagataactcactgcgtttgatgtctttatggatttcggactaccattgcttcggtcatctgaccttcactacatcaaggagaagaatc

SEQ ID NO: 41804 - DNA, 1043 bp, Glycine max
  Clone ID: PAT_MRT3847_137751C.1
ccacgcgtccgggcaaaactagtggccttaatagctttggcctttgtggtgaatggtgtctatgtgggccctttttgcttttctggacattagttcggggtgacttgaagatgacactcaattttccttaccttctttcacctagttttattgttgtcttgcttttttcctgcatccttgctttcttcctgaattacaatatttttctgaacactactctcaattcagctgacacagacaaaatgtggtaatctgaaggatctatttactattggctttggctggataatttttggtgggctaccatttgattttgtgagtactcttgtccctactgacttttatcatttgaggttattttccctgttgatagaagaatgtgttgtgttttggttagtggaatgtagtaggacaacttctgggttttgtgggctctggtttatatgcctactataagctcatcggcagataactcactccagtttctgcggtgatttgggactaccatgtgcttcaatgagttcggtcatctgaacttcactactcatcaaggagaagaatccgaattgaccataccgtctgtcaaacatgtgatcaagctaatctaatttattaggagattttgctgagtcagaatttgacaatctcatggcaaagtatattcaacctgcttttaatctcgcattgagttcacctagtgtatttgatgaattcattgcacccccctcgccgtcttggggaggaaagtttctagagtttccatgtatttattcattttactttttggtggttaaagacgtgagtgacaagggaagggagagggtaaactcaacagtttttgaggttcgattttaggataaagatatccctttctggaccttacatgtgtcagttcattatgttctttggaggtatgaagacgtgataaagggagagtaagctaaacggttgaggttctactataggatcagatatatacccagatagaacttatgctactgctctttggtcatctcaattttatgccccatgtatctcatttt

SEQ ID NO: 41805 - DNA, 1548 bp, Glycine max
  Clone ID: PAT_MRT3847_137752C.1
ccacgcgtccgcggacgcgtgggctcttccaaaagtcgaaagcttccctcttttttcttctctttctgtttgttctctccataaaattccagaatttaaactctcacacaaaaaatcataaacaccccaaagtagcagtacgtgttgcactagtaacatcttttttatgggaatatatgcttttttttcctgttgaataaaattaaacaagaagagggagcagatgcaattcagttaccctgacagttttcagatcaccacttctttttttggctttgtgtctcaaattcttcacaaacattcccagaacactaggattctttttttttttttctaaaaagaacgctgaactgaacctcaagtgcaacaaggacttatgctgctgagaaacagatcaagagctgtgacgaagccaagtttgatgggagatcagagttgcaaaagaacaatcatcccttctctattttcaccaaaattccgagacttcactgtgaagtgtctatcaacaggagctgaggcagccagaagccccacatcgattcttgagaccagagccttatcagccccatttgggagtcctttgtcacatgacaagaagatagaagcagctattacctccccaagaatgccctcagaaaacacacccttttcctcaaaacgcattggccttgctcttgttggtgcactcaaagatgaaacttttcctcataattcaactcaaccaagcagtggaactgttctttttggaactaagcatagagtgaaaattccacctttgccactgccaccaccttcatttgaatccaaaacatgtgcttctgattgtgctgccaaaaccaatgattcgcaaaattttgcaacaggtcttatgactttgagtgagatggagctttccgaggagtacacgtgtgtgatagcacatggacctaatcctagaacaacacacatattcgaaaattgtattgtggaaagttactgttccctgcccaatacccccaactctccttcactcaatttccttagcttctgtcacacttgcaagaagcaccttgagcagactaaggacatttttatttacagaggagagaaagctttctgcagcaaagaatgtcgccaccaagagatggtgcaagatggagcaagaaattcagaatttgacagatactaatgagaatttttaactttcaccacggcctcaaaagtgttgcattctgatgaggataaccagctagtcacaattttccattcttggttaggattttctatataatattttgtcgtgactagcatattatattttacccttttgaagttttgtttttttggcctctcccgtggaaatagagataagagaggatgaggatgtagagttcgtttcaagaaatgagtagtttttagattgcttatggttttctccctttgttttcggctgaagcagatgatgatatatgactgaaaacagtgcctctttttattttcttatctgagtagatgatgatgatgcatataattgtaaatggggaccaattcattatttttctcgagaaa

SEQ ID NO: 41806 - DNA, 553 bp, Glycine max
  unsure (1)..(553): unsure at all n locations
  Clone ID: PAT_MRT3847_137753C.1
tcgcangcacgcgtacgtaagctcggaattcggctcgagcggctcgagtgtaacatttataagtgctgcttacatcactcaacaacaacaaaacatggtaatggagtagctgttgcccttctccggttgtgtgtacagtatgtgtggaataaaaaagggaaactgttttcacaagctgttctttgtttcataattggatcagtccgtggctgcccatattgcactgagcttgccagtggggactgccagggacgtcctcggtcggatccacgtgggtggtggttgttgcagaagactgaactgttggaatatttaacgatcacctaacagtcgagtgtttcccaatgtggttgtccagttcctatggccttgctgtgtacttttcctctttgacagtaaactctcgcctatggcttacagtttgacatttaatttattagcgctgctctgcaccctcccgcagggaggttctgtgtggttgattgcccgttctttgtttacttttcaggtttgtactacaaggtttaataataaaaacaagttttttggaaaa

SEQ ID NO: 41807 - DNA, 394 bp, Glycine max
  unsure (1)..(394): unsure at all n locations
  Clone ID: PAT_MRT3847_137754C.1
gaggcttaaatattataagcananatcagtaattcagattagccgaactttatacagaagcgaccaattaccaaacattaaaaaaaaaaaaagggagcaaccatgagcttaacacccccctcacagggccaaaacacttgaacttgctggagggcaagacatggccactttattttaagggtgtttggttaacacaaaacaccagggtgcgcgaaaaccatcacaggcctaattcataagcttttagctccacattaattggtcatcattattcctaattaagggctatttttgctggaaggttggtgtcccaacaccttatttgcaagtgcaggggttggaggagcagtttggcccacatttgcggtctacggtcttagggggcacacccatt

SEQ ID NO: 41808 - DNA, 490 bp, Glycine max
  Clone ID: PAT_MRT3847_137755C.1
aagaacactatttaaatattttattaataattatagaagtatcattatttttactttattatcttttttctattatttatacaaaaaattgataaaagcagcaaaatgtcatttttaccacttacaaatcattctctgaaaagcaatatttttacaaataataaaaaaattattttctcaagccaagcatctttccacgctttctttggggaaaatttctgaatgcaaaattgtttcttctgccattcataattactctgcaaaagaaacgaaccagataatgcataatgttgtaaccgaacagctccaatgaaaaatgcatcaaaggaatagtccaaattaaactcattcattggcagatatgaagagtgacccttcccttgttttaccatcataaatcaggtaaagacaacaaggcctcagtcgtagtgcagtggacctcttcaggatgccatcatgatgtaagagcaccaagaacttacaaatcaaa

SEQ ID NO: 41809 - DNA, 1231 bp, Glycine max
  Clone ID: PAT_MRT3847_137756C.1
tccacgcggtgcaaaccgtggcagtcctgccttcggcttgccaagtccgttttctaagagagaaagcttgaagtacaaaagaggagtaagaattcggcttgaagaatattccaacagaagtgatctctctgcagtgaaagatagaaagagtcttcatcgccaccaaatccaggaacaggtaaaggtggtaataccaactggcaatcatggtttgccaaatgctgaaagccatggtccctcgtcattacttgatcgactgaggcacggtggaggttgtgactgtggtggctgggacatggcctgtccccttattcttttaggcaatcctactattcaatttgctgaagactgcccactcatggaggaacatcagccattggaactttttgttcagggagcaaaaggaagcagtcctaccttcagcatgacaagaattgaagaggggcattatgctgttgattttcatgcacaattatccacattacaaacattctccatctgtgttgccattttgcatggaacttctgccttcagcagtgcaagtcacgagaaaaaccaacagttatctcagtgcagttcactgaaaatgcttcttgaggaggatgttgatttctttttcaaatcagtcacaactgagaagaagactgtttgcaagaatcaaaaaggaattcctcgatcctatgtgctgaacccgcctttttctcctattgcacgtgtataaagtatagtagacctgaccagccctgctgtagtgattaaatggaaaacacatcgtctatagggagtttggttagacgttgttgacgtagtttctgatgtttctaccgtgattccaaacacacggctagtttcttatctttataccacctttatgccattgctggttggagaagtatggtcttggagatggcctgtgaaaattggtaacaagtgtgtggaggatcttagtgagggtggggattgcaactttgcatcaacataatggttttgttgctagacacaatggcctgcttgcagaatctacgttagaggtgtcagaatcattctttgtataagttcttttgttccagttaagtaggatagaaaccaaaaattgtccatattgtacgggatagttagaagaggggtatactttacacccggtaggaaatagcataacaaccctttctctctgttttttgtatctattaagattctgaaattatataaatgatgggaagtggattggaat

SEQ ID NO: 41810 - DNA, 430 bp, Glycine max
  Clone ID: PAT_MRT3847_137757C.1
acggctgcgagaagacgacagaagggtagccgataacttatagataacgttacagataacattagcttaaagataattgtaccttgtagataatgtgtagtcctgtagataattgaatatatatcaagagataaagggatgacaacatattcaaataataaaagttagagataacttgtggtttggggagttcaactgcgaagggttggacgtctgtgctcctacaccaggattgacatggaggattgacgtatgtcttggagtgtcacatggtatgatacatgtattttgtggattatgaacaacacaattgcttaaagttctactcaatttacttattacttcaggtgatgtcttggtagttcacagatataagtttttgtctgctatctttcatgtggacacacaagtatgtgtaaatagagatttt

SEQ ID NO: 41811 - DNA, 266 bp, Glycine max
  Clone ID: PAT_MRT3847_137758C.1
cgatagtgacctagagtgtgagctagaagcattaccccctgtaagtttggaatgtgcatcagaggctgctgcatgtgtgaaggtaatgattgcttctcgtacactgagtgaatctgcccctagtagctcaacaatcgaggctccattgactataaatgttccagtttgccattcatctagaactcgtattgaaaattcacaaccctctaatttgatgcaagggacaagctttatttttccagttaccgttcagagacagacactgc

SEQ ID NO: 41812 - DNA, 445 bp, Glycine max
  Clone ID: PAT_MRT3847_137759C.1
cttgctaatgggagaaggtatggttttatgttattattctagaaaataataacactgcagtaatggtataaccaatgtataaacgagtagccgaggaatcttactagttaatacaagcaaaaaagctcaaatgtgactccctttattacacaaaaaaccataaatctggggaggaatacaggacatcacacagtagtcaagaaacgccaattcgcgaactacaaaccaaaaaataattcgccaaaataattaagactatccctttgcgcattagcttcccatctccatacccgcggaccttaacaacataaccgtccaaagaaaccttgctgtgaaaatgggggctgagctgtctagactgccactctggggggatgaatacacaactttgaatccgagtctccaacagtaaaacccgggggtccattttctgtggcacggaaaa

SEQ ID NO: 41813 - DNA, 593 bp, Glycine max
  Clone ID: PAT_MRT3847_13775C.1
tttttagatgggctacacgtgttttcttgatatgagatgtatcatccactgcagttagaccttccctttgatagttccttttgggtgtatgctttatcacttaattttttcagattatccacatgtttatttttgctagctaatacttccctggtactgtgaattagtaaaatgcagctgatcaaagactctgtgagctgatcagcgtaagattgcttgcaacttcatcgcataagaattaactaaattatacttaagccttaagagtttggtcagttgaaatatattcatcttctatatcatcaactgttaaccattctttaggatcaacatgtaggtaaagtagaatatgatgagcaaaagcaatgtagatgttgaagatgaagttcactctaacaagggataatctgttctgttactttacaatatttatctttcttgtcacctgttggtcaatgcatggtgttgttcactatactttatttatgtcatcttgttttttatcaagtgtgggcaaggaattaccgatgatgaactaagcccaacttgtgtatcttccatattgggtatccacatagagagagttgctgcag

SEQ ID NO: 41814 - DNA, 1258 bp, Glycine max
  unsure (1)..(1258): unsure at all n locations
  Clone ID: PAT_MRT3847_137760C.1
tcccggggtcgacccacgnncgtccggaaaaccaaaaagtcacaaactcatcacaagagtgcacaggagagaaaaacctcttcaacaaaaacacccctttttattcacaccaatcttcactcaacactttcattcagaatgggtaagtcagagaacaagatccacccagaacaaccatcatcatcatcatcaaagccaatgagaccattatcatggtgaagtgacaacaagaagaagaagtacaagggggtgagaatgagaagctgggggtcatgggtgtcagagattagagcaccaaaccaaaagacaaggatatggttgggatcttattcaactgctgaagcagcagcaagagcctatgatgctgcacttctatgcctcaaaggctcctcagccaatctcaacttcccttcttcaagctcctcctcacaacactatatcatccctcaagacactgccatgatgtccccaaaatcaatccaaagagttgctgctgctgctgccaacaatttcttggacaataatgctattgctattaataatgctaccaccccaccttctcctcctcttgcttcaacctcttcttcatttgtatcgtcaccatcaatgtcatcatcatctcctttagaccaaattgatgatgatgtctctcttctgacaccatttggggcctacactactactactgctactactatctgtgacgaaacaaatgaatcaatggccatgatggaatcttggtatgacttggaggggttgcaatccccaaagtatgttgatcaaatgctaagtggggcattctttgacattgattcaacacagttgcttgatgatctgtatgaagaaagtgatattcgcttgtggagtttctgctgagagtgattcattaatttcaagccaaacccatttttgtttttttttgctcacaaattcatattcgtttgtcaggtggtgttatatgaagatatcaatcactgactgaccaaattataattacatattctagggaagaaattcacaaaagggataagacaatttttggtctatcctttgtggatttctacatatgtattattgatgcaatatttgttatgtcgaatttattaatggttttctatgtattattgtgtagtttataaatgaaagggggaaaaagatggtttccaatgtctcagttgctgataaatgctcaaaagataactatcatccttaattttcatttcttttttataatcaaaccgttatatacagaacgcgg

SEQ ID NO: 41815 - DNA, 271 bp, Glycine max
  Clone ID: PAT_MRT3847_137761C.1
cgaacaaagaagggagaggaaacataggagattatcatttccgccattttgcttggaggaacacataatcgagcatatgtcttctcccttgaaaattagtgaaccaatagcatccactcatacaaatgataatgaggtgaaccaatagcatccactacaagtagaagctaacaatcaagaaaatgaacatgaagaaccagttgtcgggagaaataggacaaaaacttcagttgtttggacatgatttgattgaaatggaaatctcccctgg

SEQ ID NO: 41816 - DNA, 1008 bp, Glycine max
  Clone ID: PAT_MRT3847_137762C.1
gacaaacaagtgtagaagaagtttttcattatagctccttttgtacttaaaatgaaattgtatcattttacggctgcgagaagacgacagaaggggatgaatgctaggaggcactactactgcacagattaatcatgagtcttccacaaactgcaactagccctcctccacatctgtatccacaggaacttcagcttaagctttaccaagccttcatattctcaattccaatactcttctccatcattctcttcctcttgttttacttgttctaccttaagagaagggcttcctctctatcttcctcttctcacttgcttccaaggaccattgccaatccaccaaccaccactccgtatcattcctcaccttgtcgtttggatctgaccctccaattcctggataaacttccaagaattttatttgatgaggatttgctgacaagggattcactatgttgtgtttgtctgggggaatttgagctgaaggaagaggtgctacagataccctattgcaagcacgtgttccacttcgaatgcatacatcgctggctgcaatcaaactccacttgtccactttgtagatgttccatcatccccactaccaagttcctcaacccagcaccccctattaacattatatcaacagacccaccccagcagcatggtgctatcatttcggacttcccattacaaattctatcattgccacctcagccacaagaccatcaagaagttgttggtgcttcctcaaatgctgctaatttgtcaagggaatgatacacattaattaattagcttgattataataatggtcattaattaatttcaagggagtattcagctacacatcaagattatggagtagttgtttacattttatgatatcaaaattttcttttgcccttttattaatttctacattggaatattcagccagtttgtggaatgtactactataacacagcttctcctgtcaattgtcatgacctttctggattggctattc

SEQ ID NO: 41817 - DNA, 643 bp, Glycine max
  Clone ID: PAT_MRT3847_137763C.1
gaacaataatatacatattcctgtatatgtcaacaatcttttctatacatgtgtgatctagaataagagccaaaaaatctcagacccttttaaggatctgatctattggggcttgacatttgatctgataagaatccttgcaaccctcccataaatattacaaaaccaaaaaattctacgaaaaaaaaggaagaaaaaaatggaaaaattgaacaaataggacttctcatgtacttcaattattaggtgttgaatccaccactgcgttatgcctctttgaaggacctgaaggtggcaccggccctttggggaagaagttgaaaaccatgcttttgtatggaaaaccatgttggttattgcgctttcccttgagaatctctcttctttcattcagcttcatagtttggcctattcttattgcatcacaagaaccaataagtagcaagtaaacaaaaaggagaactagagataaggttttgcatggaagatgcaaggatttagaagaatggtaattttccatggaagagaagcctatagggatgtttaattgatggaatttgattgtggagcaggagaaggtttggcttggttgctatgaagggggtaggtttgagttgggttgttgagtttttttctcgagccg

SEQ ID NO: 41818 - DNA, 651 bp, Glycine max
  Clone ID: PAT_MRT3847_137764C.1
agatccctatttcgctagcagacacacaagaggccaatgctattcatagctctagatggctgaagaatagaacgtatttgttccataatcacagctgaagattcgcaacacgcaggaggaatggccgttcgccacgacgctcgacctcgatgctgccatgaacattgtagccactagccgcagactcatttacaacagagctatgcagtacgctaaggagtacgatcaccagttagaaggaattgattcgcatgaatcagcatgcctatctgagaggtggtttctatgtgtatccacaggcttagctgttggttattattcgcatgctacgtactaatgccatggaccccataccttggaagaccctgcgagggtagcgattgagacagatattcaacggtgagtccgtcagattgacaccacctcgtgaacatgctgaacagagatgagccgtatgtgacttactgtacccgctctcaagagtgagagagaccttatttcaagagatggtatctaaagcatctgaagcagacgactgctctaactgacaactgtatcatcgagcaggctctgagcacgtatggaatcatatccactgcagatctgatccatgacatcatgactgttggacctcactttactgaggctaac

SEQ ID NO: 41819 - DNA, 101 bp, Glycine max
  Clone ID: PAT_MRT3847_137765C.1
tccactctttcgacctccattgaacctacctcgtcactgccagagagcaatgatgccctccaacagagcctttcaattgcaaatgggaagctcacgcaccc

SEQ ID NO: 41820 - DNA, 785 bp, Glycine max
  Clone ID: PAT_MRT3847_137766C.1
atagtgtcccatttaagggtataacgccttccgtctaaccagcgaaggaaatcggtggacacaggtctaagttttctgaatttgtttaaagcggcggtgccgccgtgccggctctcactgtgaactgcacgtatctcttctctctcaggcctgcaccttcgtctccgccaacagttgttcaccaccacgcaaccaaagatggcagattcgatttgcagaacactgagggatggagcgttggagggagagcttgcgcctactctcacaatcaaggactccctcgcttcacctttcgcctttcatgtattctctcacattctacttcaactctcgtcacacgtcatagcacaaaaatctcagtcacagggtatagtaattgttgcactttctcggagtccatcgtcttacacttctttgttaaagatgaatggagtggatgttgcttcttctaataaatggattcacattttggattgttatactgatcctcttggttggaaggataaggcaaggaaatctgcgaatgttacggatccttctcagcaaatttcgcttgctactagttcttataaaaccgtgaaggacgtggataagttgtttttggtaattgctgaacttggcagaggattggttggagaaaataaagcccgcttctgtgttgccatagactcgctaagtgaacttttgaggcatgcatctatgcagtcagttgcaggccttctagcaatctgcgtagccatgatcaaatttcaaagtatgtttggattattgcattctgaccttca

SEQ ID NO: 41821 - DNA, 435 bp, Glycine max
  Clone ID: PAT_MRT3847_137767C.1
ttgttttcgctctagcaagcgcaggttgagtcactgttctattgaccttctcagtggcggaattgtagtggacaaaactggagattggatcacacttatacataattctccaatgagagacttggtgagagctgctgcttgtaagaaaggctgtgtaatggttaagattgtgatgtatgggaatgcatgattcaaaaggagtgattgggcctcattggtacaagtatttataacaaacatcaacagtacacatcattttgatgcatgtcagtggacaaaatcggaaccacatttctgggaattgatctttccaatcgaggtgtgtggtcccaataatggttttgaaacgtggagttctgagtgcgcagatcaaacttcatggccttcgagttagcttatcgacaatgccaaacagtctacacgattttgatattc

SEQ ID NO: 41822 - DNA, 660 bp, Glycine max
  Clone ID: PAT_MRT3847_137768C.1
aatttcttctcggattttgtgtttttaatacgtccccagtttggatgggttaacccacgatatgctcccttaaattattttccaggacgagtgaagcctaaattcaagaaatatcagtgcatcttgtgggtcttctccctgatcattctagttgttgggctttctgttgggctggttgcacttctccaaggtgttgatgcaaatgatcactgttcctggtgccattatctgtcttgtgttccaacttcaaaatggagctgccatacagaggcagcatattgtcagtcaaaccaacttggcaaccagttgaatgtaacatgctcaagcaatggtaaatccagtacatacttcatgcaaaatccaaccagttcccagatccagcaattgtgtactcaactttgtagttgagctttgacaaaagtgatgatcgttggaatgagatgttcatttgttcatattagtgtttcaggttctcacgaaaaactgcacactgcagtgctctttcgtttataccttctgccttacattttgcctttgtagatttgttcattttcttgtgtacataatattttgcttgatttaccttttttgggtacctttgtgtgagatcaaagttatacttatagatgattaatgtatcaccctaacttgtgtttgcta

SEQ ID NO: 41823 - DNA, 501 bp, Glycine max
  Clone ID: PAT_MRT3847_137769C.1
atccccaactcttacaaatccacattaccctctctccctcccttcatgtccggagagcacggccgttggagatccacctgagggtcaactccaagagaggcaccaccatggtgcaccccgtggcggcggcggagacggtggaggttccgattcagtaccccagagaggaagaagtgaagcattacggaaagtggttctcttggctgatacctctctttgtggttgccaacattgttatgtttgtgatcactatgtatgtcaataactgcccgcgtaactctgtctcctgcattgcctccttcttgggtcgcttctccttccagcccttcaaagaaaaccccctcttgggcccttcttcgttgacgctgcaaaagatgggggctcttgatgtgagcagagtgcttcacagacaccaggggtggcgcctcatcacttgtatgtggttacatgctgggggtttccatctgatgtaaaatatgctgggtattctagccattggaa

SEQ ID NO: 41824 - DNA, 244 bp, Glycine max
  Clone ID: PAT_MRT3847_13776C.1
gagacccaagttttgttttaacccatagaagaagaagggaagggttagcgagtaactactactactgtcacttgactcaatggaaggtgaagaggtgttggatgtggacattcaggaggagaagctttctggctttattttcatgtgtaatagaattacaaaaccggagtgctactgttaccgagttttcgggcttcctgctgggagaaaggatgttgttgagaagatcaatcctgggacatac

SEQ ID NO: 41825 - DNA, 2704 bp, Glycine max
  Clone ID: PAT_MRT3847_137770C.1
agaagacgacagaagggagagcgctaagttaatgctaagaccctttaaaggcgacgagttaatgctaagaccctttaagggtgaagagttaaagcacaacgagtattgtgatggaaaccactgtgggaacccgacgggtttaatcacaagcgcgacaagataaaactattttgagaacaattgaagaatcgtgtgttttgtacaggacataaatagagtctgggtgctaaaatgttttgggttggacttgaatcggctcgagagcaaatccacattcctctccatgtccggagagccaccacggccgttggagatccacctgagggtcaactccaagagaggcggcaccaccatggtgcaccccgtggccacggcggttccggttcagtaccccagagaggaggagggagtgaagcattacagaaaatggtttgcttggctgatacctctctttgtggttgccaacgtcgctatgtttgcgatcactatgtatgtcaataactgcccgcgtaactctgtctcctgcattgcctccttcttgggtcgcttctccttccagcccttcaaagaaaaccccctcttgggcccttcttcgttgacgctgcaaaagatgggggctcttgatgtgagcagagtggttcacaaacaccaagggtggcgcctcgttacctgtatgtggctacatgctggggttttccatctgttggcaaatatgttgggtattctagtcattggaattcggcttgagcaagaatttgggtttgtgcttattggactgctatttttcatatctggatttggggggagtttgctttctgctctgtttatccagtcacatttctgttggtgcttcctttggtgccacttttcggcttgctgggaggcatgctttcagaacttcagactaacttactaactggtcgataacaagctaacagctctcatcactcctcacccttgtgatcatcattgttatcaatctagcagttggaattctcccacatgtggacaattttgctcatattggaggctttcttactggatttcttctcggatttgtgtttttgatacgtccccagtttggatgggttaaccaacgatatgctcccctaaattattctccaggacgagtgaagcctaaattcaagaaatatcagtgcatcttgtgggtcttctccctgatcattctagttgttgggctttctgttgggctggttgcacttctccatggtgttgatgcaaatgatcactgttcctggtgccattatctgtcttgtgttccaacttcaaaatggagctgccatacagaggcagcatattgcgagtcaaaccaacttggcaaccagctgaacgtaacatgctcaagcactggtaaattcagtacatacttcatggaaaatccaaccagttcccagatccagcaattgtgtagtcaactttgtagttgaattttgacaaaagtgatgatcgttggaatgagatgttcatttgttcatattagtatttcaggttctcacgaaaaactgcacactgcagtgctcttttgtttttaccttttgccttattcaggagacacgatggaaaaaaggagggagaggccctaacgaactctctggagtctaggtcttggaggtaaatacacccaatttaagtgctcctttaaacctatgccgatcccacatggttggagcattcttgcaaaatagtgtgaccctaattggtctccctatgattttacctagtgagagtgacttgacttaccagtgtgtggtatgtcttgtcatgtactcttgaaaatgaagacccttgatgaagcaatggacttaattgaaagcatggctgctagtgacattgccattctaagagatcgagcccacattcctaccaagaagagcttattagagctaacctcacaggacgctctgttggcacaaaacaagttactattcaagcaactagaggcattaacagaaacactcagtaagtcgccaactcagcttcattccacacaaacttcacattcttctattttgtaggttgcaggatgtataatttgtggtggagctcatgattctggatgttgtatccctaatgaagagcaaattgcacatgaagttaattatatggggaatcagtccagaggaaatttcaatacaagaggatttccaggatttcaaaacaaccagtagtatcaacaacagagacagtggcaaaatcaccctggagaattataagcaattgggcttggatccggaattgacctacaccggcttggacttgaagagagcagacaattttattttatttcgtctagttttattttatttcgtttttgggcttggacttaaaagagatttgtaagctttggggatgaggacctatataacagcaccagggttttagtagaaggcagactgttgagataggagaaaatttttagggttttgcattttcagtttcgtgttactgttcacgcgcactgttcaagtagcaatcaaatttcgttttctgcttcaaattgcaattttgttttctgcttttgcctttgtagagtttgtttcatgttttctgggtgtagtagtaagtagttggattgtgtgtttctcagaggtgggagggtggtggtgtgtgggtgggtgtgtaggagtgggcgggccggccttctaagaaggagtcccaaagactttagcggttacggcggtgg

SEQ ID NO: 41826 - DNA, 250 bp, Glycine max
  Clone ID: PAT_MRT3847_137771C.1
gtgtatgctattattagaattgctcttgttggttgtgtagtttgagctcatcatatatttacagttggtatagatttagattcgcgagcttattttactagagcaactataattattgcggttcccactgctgtaaagatttttagttgattaagaacattatttggtaacaaatttattaatcaatctgttttatactgggttttaggttttatttttttatttactgttgggggtttaactggagtaa

SEQ ID NO: 41827 - DNA, 339 bp, Glycine max
  Clone ID: PAT_MRT3847_137772C.1
gctaaagcaaacacatgatggctatgccacatgaacattgcaatttcagggcgtgttttcactggaaagtgaggattcttattctaagccaacttttattgtcacaaaggcacaatgtcgttatgatgtcaaacaacaaatacaaatgcactgcgcttgaagttgatgcgaagctagcatatgattttgagaaacacatagctcctgaaaccatcaagatcatagtctttttgtgtacagggcaacctgttctaatggtcattattcttgcaagctcatttaccttacacaaacgggttgaagttcatattaaactacttagcagattgaaactgtatc

SEQ ID NO: 41828 - DNA, 401 bp, Glycine max
  Clone ID: PAT_MRT3847_137773C.1
gaattgcatttactgatctttgttttttctttatatcctattctgtttccaacaaggaataacacacacaggcagaacgagggggaaaaacctgggacgacatttaagacggcacctgaaaatttggatatccacaccaaaagttttaaaaaaacggccaactaaccactataggatcgaaacatgggggccctagccttaaaccggggggccaaggggtccagaaattcacccaacacccaggggaagaaactctaaaccaaacaggtgacgatcttacggggatgttcccctgaagcccttttttagatatagaaaggctttgtgcaaaaaccgggggcccttgtgttctgggccaactttttttagcccccaaaaattcggtggggaggccccctttt

SEQ ID NO: 41829 - DNA, 1247 bp, Glycine max
  Clone ID: PAT_MRT3847_137774C.1
tacggctcaagctaaaatatcgactgggacggatccaaaaactagtttaacttatttaatatgatatctctcaaaggcaaagtaaaaccatctcctccgtgtctctcccacactgattgcaaacacgaacaagtaattgaaactcctacagttgaatcagaaacactccacgcctacgctattgccttataatctttgttccacgcttttccctctcctcttcgcacacagccttccttcctagggtttcatccaattatgaactgtgaagtgtgccagctcaaggaactggaactggagcattttgagatacgcgaggtcttgcgatgcatattgcacacgatcgtctttcaccgtgccttgggtctcgtgcgccctaaagacgttgacttggagctatttgacgtcacttatgtgcaatgtggagaggcagagcttgaaaagaaaatagatgagaagattgagcagtttgtttgttgggtggagaagcacccaaacaagaagagtcagatatgtttatctttctatgaggtgaagaacaaacaggcgtcttggttcagtaacaagattgaacgtttgtattgggagcagtggtatattaatctgaatgtggcccagcatccgaaggcacattctagcaagtatcatcattccaaagttgttgatcctggagagggagcattggaggatagaaatgctcgaagtgcagcactggaggcatcgcttcgtgaggttttatttcagataattaaatttgttaatgagaagaaggatcatgttccacctataccaaatcttgagggtgctgtttcatttccctatgaaattacaatccctagttcatcagattctgcatttgggatggacatgatcaagagaatgctacagacaggacatccaacaatgctaagttgattgtcaaagttcgcagagcggtctataaggttaaaatggattcttgttcatatgaataggctggtaatatgatgctgaagaaaagctaaggaaggcaaagttcaatctctctgtaaacaaagcagaatctataggtgcaaaataacttgtatatattttcaaatgaaaccccttttttaatctgtcgttgatatcttttatttcttttatttatcttctctcaagagtttacggtgttatgtagtggctatgtccaatgtcacatgaacatcttagaccatttactgttacgattgcgtcaatatgatgggttgcatgttatatttgaagat

SEQ ID NO: 41830 - DNA, 439 bp, Glycine max
  unsure (1)..(439): unsure at all n locations
  Clone ID: PAT_MRT3847_137775C.1
gctcggaancggctcgagctcngnnctaacgcggggagcgggaggcccgagacgaggaagcacgagnnncgaaggggnncngcgngcggcgaggagaacnagggcncacgcgcgngccaagcgcnngannggaangcccggcacaaagcggagggcgcccccgnggagcganggcncgacgaggacggcgaagaagncggnaacgacgacggcgacggagagggcgaggggcgnnanggcagaaagnnagacaangnggacaacagnaacggcaacggaaggcgcgnnggacggaaaangaancganngcnaggcgaagagaacacacnncgncgngaaagacncgccgncacaaaaagggagagagaacanggcnngcccccgnncaccacccggaaagggggaaaanncgcccgaaaaaaaaaaaagacgaggggag

SEQ ID NO: 41831 - DNA, 450 bp, Glycine max
  Clone ID: PAT_MRT3847_137776C.1
ccatgttccccttcagtctcactctcactcaacaacaataagatccttttccctctctttcttcacaaaacaaacctaaccaaacaatcgaatttcaatttcaatttgatcgctccgataacttccatctatggcggcggcgaaaccccaacgcactccgcaggaagtggaggacatcgtcatccgcaaaatctttcttgtctcgatcaccgaaatcgccaccactacggattcgagaatcgtgtatttagaactgaccgcggccgagattctcagcgaggacaaggagctccgcctctcgcgcgattgcatggagagggttttaatcgaccgtctctccggcgaattcgccggagccgtagacgagtctccgttccagtacctcgttggctggtaccaccgagcgcacgaggaaggcaagaaatcgcgaacatgaaggacaaaacccta

SEQ ID NO: 41832 - DNA, 1607 bp, Glycine max
  Clone ID: PAT_MRT3847_137777C.1
tggtgggtgttctataagtgaactttgttctagaaattcaactgccatgttttgatttgaaaaattacactagtgctagtcctgttgcaaagtgattggctccagaaatttctgcatatttgttgattaggttctttgaattttttgattgaaatttctgttgtcttttacatgctttagttttgtaagaatggactttgctggttgaatgcttgtgcttatgcatatacatcttgtatgtgtgtgtcacatatcttaaaattattaacttcaagtctatgttccttaatattttattgcattaaatgcataagatgtttccaaattccagttgtaattataccttgattgtttcaatttcctcacctacgcgtacattcttctctacattgctctctccagcggccaaatcttcttcaacaagtgggttttgtcctctaaggaaattaacttcccttatccttctgccttggctctacctattggggccatgtctgcagttacgtgttttgtgggaactacgatcttgaaggttattactgttgaggatggacaaatgcctgaaatatttactacttcagtagtgccaattggggccatgtttgcaatgagcaattatgcctgtagctgtttttgtgcttggggtagctgcaggacttgaggtaatgagcacaaaatgctatcaatcatgtctgtgattagttttggcggagttgtcaaggattgggtggttgtcttactgtctgctgtctgtttgttgatacaaagttagcacttatcaatttgtttggttatgcaattgccattgctggggtagcggcatataataattgcaagttgaaaaaagaaacctctcgtgacacctcggatgattccgaccctgaatcttccccaaaggcaagagtctcagcctttaacgagtagatagttgcagtctttgagttactcaagttgtccatgccttattcagaagttgatgagactatatagtagttttcatttttcacataatgtcactagagggcatcaaaattcatgtagtatataaaagtataagcaagcattttggttcaatcttagaaacagtttctgctaaatttagatcggggaaagcaatgtgctgatccaatgtagtacatgaagatgtaaaatacaaaattcatcctttaaaaaacaggtgcttggccatggcatttgatttttgaggaatttggagtcattcacattccacaatgattatttgtttgaagcaattaccaatttcaatcttagctagttgaatgatcaaagataaaagcccctgcacccactatttattataattggacagtgggccagtaaccaggggtatatagagcagtttctttgaaataatttgtttatttgaaatgtattgatagtatttgatattctgagacagattgtttcagttttaggagtctttgctcctttgtaatttattttttatgtggatgctttcattgtattttgtgaatctatctcgttggttctcactagtccctagtccattagatataggggaagccaaaaaaaaaatgtattttcctcaaaaataagatatatgtcgtgtatttgaagtaaatctc

SEQ ID NO: 41833 - DNA, 333 bp, Glycine max
  Clone ID: PAT_MRT3847_137778C.1
gagagagagagagagagagagagagagagagagagagagagagagagagagagagagagagagagagagagactgagtgtgtgcgtttgcctcctcgatcttctctggtctctttagtttctctcaggtctttttagattcccaattttattttcagagactaaatggtggctttgaagatgaagcttttctttgttgttctggccttgttgatcttggctgcctcagctgcagattcaccagctccaagtccttcttcggatgctcccaccttgttcgtgcccacacccgttgcttcgctcgtcgctcttgcttttgcgcttctcttctgag

SEQ ID NO: 41834 - DNA, 380 bp, Glycine max
  Clone ID: PAT_MRT3847_137779C.1
ggccgcgttccggaccgtgctgtgtcggctccccccacttcttttcgctcgggggcctgtcacgtatgtgaggccaggacctttcgagatttaaaggcacaaaatccgtgcgtgctcactacgagggtggggaagctgactggcgctcagggcacttccatgggggatagatgacatccattccgtataccgctgggggcggggctaacgactgcttttttgatgaacttgccaaatgctgttctacctatgtggagattttatgttcgaaagctcatatactaactcgctacaatgacttcgacctacattaaacgcgcagtctcactattcatagcatggggaaatatggcgggggacgccataagttttgaggtttt

SEQ ID NO: 41835 - DNA, 574 bp, Glycine max
  Clone ID: PAT_MRT3847_13777C.1
ggctcgagcagcatttaagagaacaatatctaagtttggaaggggtagatatacatttggtaggcttacaagttcaattgaagatcatggtaagcagtgttctgaaaataatgcaattgattcagaaaatacctatattcatcccacttttgatgataatgccatggaagaagatttccccttggaatcagatggtccacgttttttatcattgcctgattggccacaaatagtctatgatgttagttcccaagatatatctgtacacattccattacatagattgctttccatgctgttacagaaggcaatgaaaagatatttttgtgaatctgaagggtcagatgtgactcatgtttcttcagctaattcattgctgactagctacaatgacttcttcgaacaagctttacgaggaagtcatccatatggtttctctgcctatgtaatggagcatccattgcggattagggtcttttgtgctgaagtccacgccggaatgtggcgtaaaaatggagatgctgctttattatcttgtgaattgtatagatcagtacgctggtctgaacaatgt

SEQ ID NO: 41836 - DNA, 867 bp, Glycine max
  Clone ID: PAT_MRT3847_137780C.1
gtttataacatgttcaggaggtcctatcaaagtagcatggcatacgtgttgataacatatgccatttggttcatgtcattgacttggttgtgtgcaccttttctttttaaccctgctgggttcagttggaccaagacagtagatgattggaaagagtggaataaatggatcagacaacagggtggtataggaattcaacaagatagaagttggcattcttggtggcacgatgagcaagctcatcttcggtggtcaggtttcggttctaggttgactgaagtattgctttctctccgttttttcatctatcagtatggtttggtctatcacctagacatctctcagcatagcaaaaactttctggtttatgtcctttcttggattgtgattgttgcaattttcctcttggtgaaggctgttaacatgggaaggcaactactcagtgctaattatcagcttggattcagatttttcaaagcattcctgttcctggctgttcttgccatcatctttactctttctattatatgtgaattgtcattgacggaccttttcgtttgctgtctagcattcatgccaactgcgtggggattgataatgatggcacaagctgcaaggccaaaaatagagcacacagggttgtgggacttcacacgagcacttgctagagaatttgattatggaatggggatagttctttttggacctatagctattttggcatggttaccaattattaaagccttccatgctcgtttccttttcaacgaggcattcaaaaggcacttgcaaatcccaccaattctggcaggaaaaaagaagaggcacagaacttggtcatgattctcgtacctgcttctgtacagt

SEQ ID NO: 41837 - DNA, 270 bp, Glycine max
  Clone ID: PAT_MRT3847_137781C.1
caagagcaaccaagatgagtgccctgggagctgtcattgccctcctgctctggggacagctttttgcagtggactcaggcgatgatgtcacggatatcgcagatgacggctgcccgaagccccccgagattgcacatggctatgtggagcactcggttcgctaccagtgtaagaactactacaaactgcgcacagaaggcgatggagtatacaccttaaatgataagaagcagtggataaataaggctgttggagatacacttcctgaat

SEQ ID NO: 41838 - DNA, 283 bp, Glycine max
  Clone ID: PAT_MRT3847_137782C.1
gagcactgatatgagtgcggtttacaaaggccaaatttaatgaacaagatttgggaacatgaaaagggcacaacttccttacaagttttttcatcccggggaaagaagacaggaccacaggtgcacattggggggggcctgttccttcaccacaatacaaactcattctatacataggcctactatttctggcaccagatcacaaggttccgtacgtgagcctgccgcctgcttgatcttatattgtgatgcccattggaagtcaaccggccatcattttaca

SEQ ID NO: 41839 - DNA, 968 bp, Glycine max
  Clone ID: PAT_MRT3847_137783C.1
ccacgcgtccgacgaaatcagaggacctaggttaaggttgcggtgctggtggtcgagttcacaggaagatgaagagataaaatttgaaagaggaagttgaattgaaggtataatggcgaggcgagagctttcaagcacgttgaagaacttaaagttcatgcaaagggcagctctgagggaggagagaaccaagaaagaagaagaggttaagcctgatgtcagtgttggcacatccactgcggttactagaaagtggtgatccccatcctggagcagctaaaggtcgaatgtcatttcaaagtttcaatcctttagttgataaattaaatgaggaagaagcaagactacatcagccagcagctgaaactaccatgtctagaaatcaaaatgcaaatgccaatatcagagaaaataggtctccagtagaaggtccagaatgtggcaacatggacaaaaagattgtggaggttaacggcaatgctaaaaggaaacaatctgattatgaagcacaatatcctaacaaatcaccgaagaacgatcatgatgataaacattcatcgccaagcaatagtttgggctcttttaaaaaaccgagtggagataagctggactggaaagttcttagaccatctagtgttaaacaaagtagatgatgactttattgattatttgatagcgtaaaaattatgccaggtttggttctgtttcaggccttgggcatttatatcggtagtcgtggttttgttaggctgtttatccattggtataaagaccttcacaatttcttgttaaaattcaggatttaacctgctgatctagattgaatacttttagattaaagggctaaaccaaaagcctcgtgagtgttttttttttatcatcatatattgtactttatgaaactgccggtctttggaaatttgcttttagctattatatacaatttgatattgaaatgtaaaaaaaaa

SEQ ID NO: 41840 - DNA, 387 bp, Glycine max
  Clone ID: PAT_MRT3847_137784C.1
ttttgttccacgcgcgcgatgagatgacgacgacagacgggggggcactactgggcatcatactctggagatttgagtctccctccctggcagcttcatggcttcttcagtgaccagatcaacctcaggcttcagcttttcagagatctggctgttggtggcagccacagcactcatctgtggctttgtggggtacatagcttatgatgcaatcatggccactgcttctgagttgctggaacggttgctggtaattccttcactgttgttgatcatgattgtacactggctctacactgcaagtcaaataagctgcctcatgccaggatctgagcccagtgccatccacagagctggcgggagcccttggggtgcaacatcgggtgt

SEQ ID NO: 41841 - DNA, 299 bp, Glycine max
  Clone ID: PAT_MRT3847_137785C.1
ttttggtggctagttaaagatgggatgattaataacaggacgtcctagacaaacaaaggcgatcgtaatacaggatgaggcatttgccctacagtcgtatccatatattagctgctccccggatctacagacaccattgggaagttcaaaccgattcgaactctatgacaggcaggaaatgaacactttatttgagggatgctcgcataacacagaataacgcactgggcgaactcccatcactatagaacatgtagagaatgggattcagatagaaagtaaacaactgtggccaatta

SEQ ID NO: 41842 - DNA, 478 bp, Glycine max
  Clone ID: PAT_MRT3847_137786C.1
ggctcgaggttgccttctcatgttaatttgtgttgggttgcataaaacataaatgaatcttgtgctttttccgtgggtttgagatggatgaggatgatgatgaaggaaaactatgtgatctttctctctcttcaaggatcaaagggaaattagattaattgtgatgatgatgatcagagaggaaaagggtgtgaagcctgttctactaaaatttggtttggctttggctctttcatttgctggatttatctactcacgcctcagaaccagaagaatcaagccctccaagtcacgcaaggggtgttctttcggggcagcattaagtacttgcaacgccatttcagagggaaattttctatgttctgaaaaacatgcatcaacaaggtgataagtgataaatctcccatttttctctctcctgacagtacaccaaatggagatgaagatgagttcctcctacctgaattgaatgatcttg

SEQ ID NO: 41843 - DNA, 180 bp, Glycine max
  Clone ID: PAT_MRT3847_137787C.1
tacggctgcgagaagacgacagaaggggggaaaaacaaaggaagtctaaagccaattccaaatatgttactgactgctaagaatatggaattaaattcttacgccaactaccttgactaaattttcgaactttcaaattattgactgttttgtaaactagaattacctcaccgtgttaaa

SEQ ID NO: 41844 - DNA, 546 bp, Glycine max
  Clone ID: PAT_MRT3847_137788C.1
atctagagtctgacagaggcgcctcgataattgtgctatctcgtggacccactgtccctagtaataattttatttttctttttggcaaaccacttgcatacggttcgacctccttaagcgtccttcatcggggcactctgttcattcatttttcggcaatcgccgccgccgccaccacatgcattatacttgtttgtcttttgtatctatccctaattctccaagtgaagcattgtctcacctggcgtggcggcaagcaatgattgatgagaggtgtgcacttcagtgtagtggcacatgggaactagtctctcttccgccttggaaattcgttgtttggtggccctgatggaaccattgatcgtttcaaggcacatttggtggcaaaaggttacactcaagggtataggactacacaaataatttctctccaatagccaaaatggcttctattcgtcttcttttgtctatggctgccatctggcattggcctctctttcaacttgacataaagaatgctttcttacatggcgatcttgagaaaaa

SEQ ID NO: 41845 - DNA, 376 bp, Glycine max
  Clone ID: PAT_MRT3847_137789C.1
gttgctacttaatgactatgaatctctcgggaagtttagcaccccagcttggtcagctatctcatcttaagatactgtgagttgtgtaatgtcataaattgttgtctggaagaaggaaaaaaacagtatcagaggagatggcacggggagggcctcacttcatgcaccccagaggaggccaaagtacaagagcggtcctcttggaccccctggtgttgcatatcattctatgtattccctggctgcaccagtgtttgaagtggagaatggggggagttttatggcaggttcttcattttcaggtgatgggttaacaatctgctccggtggccatgggggagctctttcggcgagaacaaaaccttgcatggcattc

SEQ ID NO: 41846 - DNA, 200 bp, Glycine max
  Clone ID: PAT_MRT3847_13778C.1
ccgctcgtaccgtccgaacgatgagacgggtgcgtctagcaccaagctttatacacggctcttccgtcactgctaaacgcgtacactcgcaataagtcatgttgaagctctaaggatctaacatctggtagatccacagactcggcgcaatgttgaaaaccatacgcggcgaggtcttttatattgacactggcaaacat

SEQ ID NO: 41847 - DNA, 1968 bp, Glycine max
  Clone ID: PAT_MRT3847_137790C.1
ggagtatgtggccgaggttggtggtggccaaaaggggctcccttttggggtccaaaaggccccttctttttaaccccaaagacggttaaggaggttgattgccaacgccatagaagttgaggcgtttggggaagctgcgtcatgaggctgttttcgtctgggggtttctgccctggggttgaccgggggtgggccgagggttccgaggccccaatggggacccgatgggcgcgttggtggggagggaaaggagaacaaagcactgtgccgacggcggtgtggcgatgcggctgagggtgctgcccgtttggctttcataagggacttgaggactgaattcaaaggtttggatgatgtctatgtgtggcatgccctttgtggctcgtggggtggtgtgaggccaggagccacacacttgaattccaaaataacaccttgcaaactctcccctggccttgatgggaccatgcaagatcttgctgtggttaaaatagtggaaggttccataggacttgttcatcctgatcaagctaatgacttgtacgattccatgcactcttatcttgcccaatctggtgttaccggagtcaaaattgacgtctttcatagtcttgaatatgtgtgcgaggaatatggaggcagagtcgagcttgcaaaggcttattacgatgggttgacaaactctattgtcaagaattttaatggaagtggaatcatcgctagcatgcagcagtgcaacgactttttcttccttggaaccaagcaaattcccatgggaagagttggggatgacttttggttccaagaccccaatggggacccaatgggagtgttctggttacaaggggtgcacatgattcactgtgcctacaacagtttgtggatggggcagatgattcagcccgattgggacatgttccaatcggatcatgtgtgtgccaaatttcatgcgggttcgagggctatttgtggcggtcctgtctatgtaagtgacagtgtgggctctcatgactttgatctcattaagatgcttgtgttccctgatggtaccgtgcccaaatgcatacattttgcacttccaacaagagattgccttttcaagaaccctctctttgaccaaaaaaccgttctcaaaatttggaacttcaacaagtatggaggagttattggtgctttcaactgtcaaggggctggttgggaccctaagatgaagaagatcaagggtttctctgaatgctacaggccaatttcttgtactgtgcatgtaactgaggttgaatgggaccaaaagaaagaagcagttcacatgggtaaggcagaggagtatgtcgtgtatctcaatcaggctgaggaactgcatttcatgaccccaaagtctgaaccactccaatttactattcaaccttccacttttgagatctacaactttgtcccagttgaaaagctaggtggcagcatcaaatttgcaccaattgggctcacaaacatgttcaacagtggagggacaattcaagaattggagtgtgttgagaagggtgcaaaggttaaggttaagggtgatgggagattccttgcttactcaagtgaatctccaaagaagttccaactgaatggttctgatgttgcttttgagtggctccctgatggaaaactcactctcaaccttgcttggattgaagagaatggcggggtttctgatttggcaattttcttctaggttttgtcctgtggttctaccgttgataggcttgaatgttgtttatagcaaaaactggttgcacttaaaaaattggaaactagctcgttttcttttagtaaagtgaatctgattgttttaatgtaataacgtttgtattgtctatatcatattataaacatgaagtgaaatctcttcgctctctacattaatattatgcacaactcttaaaaactcacgactaaaatacacaatttatggcgtagcttatg

SEQ ID NO: 41848 - DNA, 480 bp, Glycine max
  Clone ID: PAT_MRT3847_137791C.1
gaaaaagagggagagtataataagtactgctcttgttacctctcgtagctctctggatcaaacatggatgctgacagccttcttgcaaggtgaatccatggcacaaagaacccaactagcacccgatcaagtgaatgaaattaaggcagaatacagatttcccctcttgtggagctcattcaaagaacggagcatcttgaaaaaggatttcagacagctcttttccctcttgtagaggactcagaaaggaaatcctggccgataggaaaagcctttcaagtaaggctagctgaacccctcaaggtgtaatcaaactccgatgaacccacgaatgaaatgagctccaagcgcccaggacaaggaggagctgcttcaaggttagcagtgcgagcctcctcgaataagttcatagtaccccgcatgattaggctccttaccgggatgaaaaattccccgaactctcccctgtggaaagaaagc

SEQ ID NO: 41849 - DNA, 288 bp, Glycine max
  Clone ID: PAT_MRT3847_137792C.1
atttactagtcccatacgcatctcagatgcacttaactcatacgtcaccgtgatttcttccggggaagcctcgctcatcacatctaataattcatgcaccaaaatacctgctcggtgttagatcgaaaataccgacacaatttcatatcagccttggactatgtgtcaatataatcactccgaaagacataaccatatcatggatatatgttaaataaccagggacaaccatgcgagctccactggcaaggaaagcaatgcatcatcatatgattgtgagcatgctta

SEQ ID NO: 41850 - DNA, 389 bp, Glycine max
  unsure (1)..(389): unsure at all n locations
  Clone ID: PAT_MRT3847_137793C.1
ggaantttgggctgattgatgtgcttgcatggtcgtgagaagatgatagaaggccgtataaaataaagtcaaacctaattaatagtagagtgtatacccctaccctggacgacattttctcgtgtagaagattctagaaaacaccctgacggtgggaatttcaaactctatgttctttattggcgttggtaggatctcttggttcttgcctaggactctaacctgggtacctatggtgatggtgactgacctttggtgagtggtgagttctcacgaggcgccttggactaagtagaatgtccttgtggcggagacaaagctggtacattcgaattccgtgaaggcgcactatttcgacctggtgtcttgctcgctggaactggatgaat

SEQ ID NO: 41851 - DNA, 309 bp, Glycine max
  Clone ID: PAT_MRT3847_137794C.1
ctaaagccggatttctctctagcactacccgaattgtctccagcgcaacacgtaacgctctttctgacttgtgcatgcatatactctgtggcccggaaagatccttctatcttgtgaacgcagttgataattgagttggggacaggccatgatcttataaggcaaaacaaaaatcaagtgcgtgaaggctgatggccacttatggcaatacaccaccgaagggcatttaggcacgtggccacgaattgaaaaatctcgacgaatgtacttcagcaagcattcaaggagtggaaaaagatgaagaaattt

SEQ ID NO: 41852 - DNA, 340 bp, Glycine max
  Clone ID: PAT_MRT3847_137795C.1
ctccaaacaacttaccaatgaacagatctccgagctcaaccgaacccttcagcttatatcaacaacgactgctaataaagcatcacagccaagggaacttggaacgcttatgccatcattcttccaaaacccatctaacgcaaagctccaaaacatgatcagtcaaaaggatgctgacgacactggtaccatggacttccatggagtacatatatataatggcccaaagaatcaacgacatcgactctaatagaggatcctaaagaggcctctacgctcttcgacgaagacccagaatggattcatctctgctgcttgaactccgacatgagagttacct

SEQ ID NO: 41853 - DNA, 282 bp, Glycine max
  unsure (1)..(282): unsure at all n locations
  Clone ID: PAT_MRT3847_137796C.1
gttcctccgatcctcaacaaggaagatatttatcagacaatatacgcaagggagtgtctagctcgtccacaatgccttgccataacatatacagtgcctcgttgatcagcaacaatattttgaatagagcaggttctaggagaacccgtatcattgattcttttacataaggagaccagncgcccggattcacatgagggatgaaagaaataacctgcgccatgatacgagcacggatgattccctatataagaccaacatatgctgggaagagatcacaaa

SEQ ID NO: 41854 - DNA, 370 bp, Glycine max
  Clone ID: PAT_MRT3847_137797C.1
caaaaaagagggaatttcatttatttcctgaaatgctcaatacatgagggggtatgggatggggattttttttactgagaaacaaacaaaaagctaccttttggacattaacaccaagctgcttccaaaaaacaaggggctaggcacattcccaacataccaaaaaacattaccgcgcgggctaaggcaaaacaaaaacaactgccttcattcctttaaaacattggggtggacaccactctaacatttataactccaacctttgtcagaacccttttatttttccgataacctggctttatcacaacccctacccttataaggggacccacctgccaacttccttttttttggcggttaaaaatccttt

SEQ ID NO: 41855 - DNA, 353 bp, Glycine max
  Clone ID: PAT_MRT3847_137798C.1
ttctctatagcggccgccctgtgttctttttttttgttcacatgctcacataaagaggctggactggtcttagtccccaaacacagttgggggggtgtttgcatgatacgggcgttgatacttcactagttggctaacgaatacgtctaatgctctccagatcttggaaattgctggggggtgcgtgctctgcacccaaggctttgctattcctcattggtaaagagtgttgattgtctgccatgttcccctgcggaacgaacgatttttggggatgagattccctatccgccctactacccgagtaactgtttccaacgcttatgaagggacatggtttcctgtgtctctat

SEQ ID NO: 41856 - DNA, 290 bp, Glycine max
  unsure (1)..(290): unsure at all n locations
  Clone ID: PAT_MRT3847_137799C.1
acagaagaaacactttgattcctttttaattgttggttgagtcggaatccttcctttgttggtgcctacagacttcttcctatcttttccagaagtagaagtagtcaaatttaccttctcactttcttccattatcaatctctcctcttcttgaacacacatggtcatcaattcattaatagaccatttatccttatgtgtgttgtaggagattttaaaagggtgtatactgttgaggtagggtgcacaaaatgaaatcggacgcgtgggtcgacccgggaantccggac

SEQ ID NO: 41857 - DNA, 459 bp, Glycine max
  Clone ID: PAT_MRT3847_13779C.1
tacggtctgcgagtaagacgacagaagggctcaaaaaaaaaaaaaaaaaaaaaaaaaaaaaaaaaaaaaaaaaaaaaaaaaaaaaaaaaaaaaaaaaacgcatgcataaaaaagaacaaaaattttctatcgcgtgccttcaaatgcactttcgctgtgccttcgtgccacctcatttcaattggttggcccctggtgttccccatcttaatcgcgttactccccgtcgttcccctccttagttgccttgcaagacatccccctttcgccgtttggccttttcaccatttgccccgcctggttggcctttgccacccgctctgtagccttactttcaacccgttcgctccgttggttgcccccttaccggccgcttgttttgccggttccctcacggccggctgctttagtttccttccctttattcctcgcctcttttcgttttctttccccgctttc

SEQ ID NO: 41858 - DNA, 464 bp, Glycine max
  Clone ID: PAT_MRT3847_1377C.1
aaaatataaacctaaatttattttatgtttatttaaatataattaaaaagttataaatatctacaaattataattatttcaaaaattgaatactgaaattacaaaagagacaaagttaagatcggaccaataatagagaaattacaaaatgatgaagtgctcagtgtaaccaataacagagaaactccattggtcctgcatgaagcaatattgccataacaacttcactattctccataatggaagacgtgatgccccagataatgtatagcatcccaagtagtataataatccattgaacaatatttggtcatccctgctcaaatttaaaaaaataattcaaaagagcaagttaaatccaacctaattaacgatcagaatataaaatacatctttgattctttttggtgattttacaacatttttcttttaaaaatgaattctttaacgacttgcctaggcaa

SEQ ID NO: 41859 - DNA, 1162 bp, Glycine max
  Clone ID: PAT_MRT3847_137800C.1
acgtaagctcggaattcggctcgagctcagatctgatttcgcacaattttatgcttttgatttctccccttctctcattatcattgttcgcacgatgataactatgccatgataaataatagggcgcgttctgttgatcgtttagcaaagatcattataatttgaatttcagctgggttcatgaagcaatatgaagaaccaacacggttatgtgccacctgcttacatacctttggggccgtcggattcagaggcagtggatgtctctctgcttcagcgttctagtaccaatggatcaaaccaaatgcaggctcagtggtcttctggaatctgtgcttgttgcgatgatatgcagagttgtatgctacttccttaccctgtgacctcattttaatacaaaggttgtattggttgtctttgtccttgctttctctttgggaagaatgcagactttctgggttctggaactttcctgggatcatgtgtgacccattttatattatggagtgtggttaatacagcctgctgcttattaactgatggcttgttttggggattaccgggatgccttgtttcatgttatgcttgtggctaccgcaaggctttaaggtcaaagtataatttgccggaagcaccctgtggggattttgttacccatttttgctgccatccttgtgccatctgtcaagagtaccgtgagatacgtgaaagatctggggattgtgaagccacagacttgaagctagctgtagttacagctccgccaattcagacaatgcattctgattctaagcagtaatactactgctgttctctccctgcacaatgaccgtgtatgatctgaagggttgcaaacttgactgaggcctgtggttcactcaaaattacagtcccaagttaatgtagttatactataatgctgatgatcgcgttttctcagttttacctttttaattttcttagagaaaactagaggaatgtcatatagccagttgtacatgaaaattttagtgcgtttaatgcctagttgcattacttttttttagtgtcacctttaccctttatactcttgaaagaaaagtgaaacaacttatgccatggcattacctaatttgttaaaaaggggatcattctaacttgcaatttcacttagttatttatc

SEQ ID NO: 41860 - DNA, 365 bp, Glycine max
  Clone ID: PAT_MRT3847_137801C.1
acaataccccgggcccagttacaaggcacatggccatcctcaaactcccaataacattctcttgaagacaatttttatattaccttacaccctacttccacctatacaaacaccctttatccttcaaaccctctcataactccaatactgtcaacaataatactcttacacatctaaactatctccatccattaaatcccccattcttaacactgtatttactacgaattaaacacaataaacccaaccttatatgctaaagaactacgtaattatataattcatctcacacatacttctttatactacctatcatctcttatattttattcctgaaatattagctgtttaactcgattaattta

SEQ ID NO: 41861 - DNA, 186 bp, Glycine max
  Clone ID: PAT_MRT3847_137802C.1
gaaaccctcttcatctttttctatctgtgacgagcatcatggcctcaagagcagtgatattgttggctatgtgtgtgcttccggcgatggttgagcgcattcccccaccaaagaacccttcttgcgtgaccgatcttgcctactgtaacccttgccctgctcgatttgacatctcctctaccacct

SEQ ID NO: 41862 - DNA, 859 bp, Glycine max
  Clone ID: PAT_MRT3847_137803C.1
tttcacgctttcgcggggagctagctgcaagttttctcatgatgagcaagcatgccttattcatatacacgcggttctgccatggatgcgtcaccctgtcgacatcactcgctgtccagaactccccgtctgtagtgttcctttgatgaaacgcaggttacagtcggtactggaggagaacatgggaatttccaagctgttccctgttcaggtcgcactttggcaagaaacggttggaccgggtgactttgagcgagacctttgcataaactcgcccaccggaagtggcaaaaccttggcctatgctcttcccatcgttcaaaacttgttcaccaaccccggtggccgcctccgtgctttggttgtagttcccacccgcgaccttgctttgcaggttaagcgcgtcttcgacgcccttgcatcgccgctgggtctccgtattggcttggctgctggtcaatcttcgcttcgccacgagctttctagcctcatttatctacctggagaagacgatggtccagatcctgggtttttgtctccgttgtggttccaaagcaaggtcgacatattggtagcgacccctggaaggctagtggaccatgtcaacaagttgtcattgaagcatcttcgttatctcgtggttgacgaagcagatcgattgctacgtgaggactaccagtcctggttacctactgtgcttaaattaactcagtctaggctggcaaagatagttttatctgctacgttaactcgggacccaggaagacttgctcaacttaatttgcatcaccctttattcctgagtgctgggaaaatgcgttatcggctcccagaatatttggaatgttacaaactgatc

SEQ ID NO: 41863 - DNA, 687 bp, Glycine max
  Clone ID: PAT_MRT3847_137804C.1
cggacgcgtgggggaaacggtagaattatggagagtgaatcagatggagtgcaattctatgactagaggttgagggagaccaagaaaaactataagcaaattaattaagaaggatttagtggttaatgtttgtaggtagatatgattcacaataaaatattatggcgtcccatgatctatgcagtaaaccctgcttcatggaaaaggctttgctgttgtttgtttgttttcttgagtttaaatggtacttaactgtgttacaaggtattttagggatttattctgtgatggtgctttggttttgttgcagcagttgaaaattgatgatgaattaaaaaaatgttattgttgattttatttcttaattcgttgtatggcaagatgtgattttctctggcagtattgcctgccacccgcaatgtgaataatcagggtagagggggctttggccgtggtcgttggcaaaatgatagaggagctggccttcttcctcgtcctggaccatatccccagaggcagaattttgggtacggaaatagggttcagaatggccgccatgatgagcgatttgtctctgagttgaagctttcaaaaagtgaagatactctatcacgaaagtgcattgcttttcatgaggtatgggaatgccattttcctatatttaactgcttctgcatcaagcaattt

SEQ ID NO: 41864 - DNA, 423 bp, Glycine max
  Clone ID: PAT_MRT3847_137805C.1
tatttctaatccaaccctttccaacgttactgtcaccctttctaagaggttgagtcttatgggttttatcacacaacatcatacacactccctcttattcttccttgcatggactaactcatagactaaactataccaaaaaaaacatcatttgttctttatagaatgacatggatcatgctctttttgttgctcctctccaacgtggataactcacctcacctccttcataaagagcgctaacatgaccaaccttttttagttcgagttttcaccatcttacgatcccaactcatggtatgcctcagacaacttttttcaccccttctcgtcacacctgcaaacgcaagctaggggttcctggttcggatgaaaatcacaatttgtttcttctgggattacagaacatttgtaaaagatatt

SEQ ID NO: 41865 - DNA, 320 bp, Glycine max
  Clone ID: PAT_MRT3847_137806C.1
ctcccttttgtttttctttctaatataaccaaagattctatgcgtgcaagattgtgatttttctttgtattttcttctttttgagccttctgttgtgttactgttatgctttacaattcaaattaactgtatgtacctgagatatagagggagagtggttatataattcttttccaatgaattggtgggttgtgaatcaaaaaaaaaaaaaaaaaaaaaaaaaaaaaaaaaaaaataaaaaaaaaaaaaaaaaaaaaaaaaaaaaaaaaaaaaaaacaaaaagataaaataaaaaaaattcgagaaaaaaaactggatta

SEQ ID NO: 41866 - DNA, 362 bp, Glycine max
  Clone ID: PAT_MRT3847_137807C.1
gaagccgggcgcctgccggaccggtcccaattccgggccactcccacgcgtacggtttgtagtgagctacaaactagtttatggagaggagaacttcatggaggaagaggattttggccaaaaagcatttgaggtgacttgggcatgccatgaagccagctacctagggcacactgaaaaagtgacagctgcacatggtgagcaatactgggaggtgaaaagcccaggatagaaactggacaagctggtacaccacagccaaaccaatgatactaaggctgaaaagaaccgggaagcaacagagaacgacaaaagcgggaatcaattgaacagaggcgataaaaggggatacggaccttcac

SEQ ID NO: 41867 - DNA, 249 bp, Glycine max
  Clone ID: PAT_MRT3847_137808C.1
ggccagaccttaaaaggtagaggttgggagggttttattatccttttccagaagcttctggaaaggtttattaaatcccactggccccccccttattgattcattccttcctggtttcattccaaagggttcttaatggatttaaccattattggatttcacccttccttccattcaggtatttggcaaaatttttattttattcctattaacaggcttaaaagcccccttggagaatggcaaaaatgg

SEQ ID NO: 41868 - DNA, 562 bp, Glycine max
  unsure (1)..(562): unsure at all n locations
  Clone ID: PAT_MRT3847_137809C.1
acgctaagcctcggnaattcggctttcgagctacgaacagggctgtctagtattcccgtgcattatatatcaagtaaggccctaagccgtgatagtgccctgtcgtatggctgagactcgcatgatgacctttaacatgaatgccaagtacatgaccacacatgctgaggccatctaggcatgagatgagcagcactggcacctttgtgaagcacgtatcaagctttaacgttgagaacatagaggccgatcatggagctcttggcaagctattgttctcctgtacatatgcactccaatacctatattggtgtcaaactctttagaagaaactctttaacatgacaacctgctctgatgacgacttccagtgccaagtgctaccacaaaacaatgaaatcccatgcatgactgagaacaagggtaggagaagagtagtctgccacaaatggtgaaagcaacactcaaggataacactatctccgttctcggggccaacaatactacgctgctgatgcacgcttcctccagtggcatgcaatactcgaaacatgtccaactg

SEQ ID NO: 41869 - DNA, 396 bp, Glycine max
  Clone ID: PAT_MRT3847_13780C.1
gggtgtggtttttcttttttatcttttttttttttctttttttttttgtggaaaaaacggggaaaagtggtaaaaaacccccccccccaaaaaaaaataaaactttaaggggcccggggagaaagataaaaacccggagttttaaacccccggggggcccccccccccccttgataaggaccaactacttgttcggccctttttacccccaccaccgggggttccttttaattggatccccccttgggggggaaaaaaaagttttttaaaacccccttttggggtgtccccccctgggagtgaagaaaagaccccaccagggtttgaaaaaaggggcccccccccaaattcgcgtgcgcacccatactaggtttgtgggggcccccccctttattt

SEQ ID NO: 41870 - DNA, 232 bp, Glycine max
  Clone ID: PAT_MRT3847_137810C.1
ggactacagcctcactgactccatctgtgctctgaagcactcaaggatagagatcatcaaaaaaggattgatgacactcttgaacaagccccaccctgcctcagacaggtactccccgaatacgcgtgcgatcgtgaaaacgaaaactaacggagaagacgacgacggtgaggtcagcggggtccccgtctattctttgctagaagtcgctgaggaagacagcatggagatc

SEQ ID NO: 41871 - DNA, 295 bp, Glycine max
  Clone ID: PAT_MRT3847_137811C.1
caaacacccacctgtcccaaagccaccatcctcaaagcaagcaagctgtcccaaagacactattaagttcggtgtgtgtgctgatgtgttatgtttgattaatgtgcgacttgggaagccacccaagaccccatgctgcaacctaattcatggtcttgctgatcttgaagctgcagtgtgccatggcactgatcttaatgctaatgtgtcgtgcatgaacctcaatgttgcagtgaacttgagcttgcttctaaactatctgtgaaagggtgttcccaagggattcgtatgttat

SEQ ID NO: 41872 - DNA, 361 bp, Glycine max
  Clone ID: PAT_MRT3847_137812C.1
cccacgcgtcctgcacggtttctataccgttattcaacaggtcacctggatactattacggacgcttctttaccatgtggaagctgcctattttttactgcactgattcttttcacatgttaaagacctttaataagctaagactgcataccccaatggcttcattccttataattggatttgacaacgtttcccaagtgcagtgcatcaccttaatcgcctacaagcccccatgcttttaattcattaaaaaatttgaaaagcatctttatccaccccactttgttggttgcacttaaactacattcccatttgtttttcctttataaaatttaataatcctgtatttttgctttcattt

SEQ ID NO: 41873 - DNA, 379 bp, Glycine max
  Clone ID: PAT_MRT3847_137813C.1
gcgaaatttcatattcagtgcttaatcaaaaaaaaaaaaaaaaaaaaaaaaaaaaaaaaaaaaaaaaaaaaaaaaaaaaaaaaaaaaaaaaaaaaaaaaaaaaaaaaaaaaaaaaaaaaaaagaaagaaaaaaaaaaaaaaaaaaaaaaaaaagaaaaaaagggaaaaaaaaaaaaaaaaaaaaaaaagaggggggccaatataaaagaacccaacgataaaacagctaggcggcgacgcattatctttttaataagggaaacaaaaattaaattgaggggccggatattaaaaaggtcaaaaaagaaaaacctcgggcataaaacaaaaaaatgaataggaaaaaaaaaacattttagaaagtggggtaaattataaa

SEQ ID NO: 41874 - DNA, 856 bp, Glycine max
  Clone ID: PAT_MRT3847_137814C.1
ggaagtttttgagagcttttctaccaaaaatatagaatattttgggtggagaacctctcaatttggaaaagtaaattctaattgaaaacatttcacacctttaattacttataaatttaaataaaaagaacatttttcttaaaataaaaaacagtagtatttaatttggatcatcacagttagtggaaagtgggtctctgaagatcagatcctcatcttctaccatttcaggtgctcactttcttcgcccatttttatttgtttgttgttttaacaaaacccataatcagatccgatcctcttgagattgggatcaacgccgagtccatgagcacgccagcgctttcagggggcacgggcctcttctctgggttcactcggttatgcaagggccttgcggtggtgcttgtttgcggtcacattgcggttcagtttttcccttcagctgttaactaccttgctcttattcccgccaggtatggagggggcttgctaatgctaattatcaaggatgggggcagcagcagcacagcgggccttggcttcatgaggctcgtctatggagacttgcattagctgatggaggatcttgaccatccaatgggctttatggcatcatcaatcacgcaccccaagtttgtaattgaatgggaaagattggtgctaggatatgtaacattaagtcattaaggcaaactaatgttactaagttagtatgggcttgactgcttgagtatatattttagtcctttgtttagcttgtttatgctgctttttcagtgagtacttatgttattacagttactacttgccactaaatgttgattgaagaatgtgaaatcaagggaccttgggg

SEQ ID NO: 41875 - DNA, 682 bp, Glycine max
  Clone ID: PAT_MRT3847_137815C.1
cccgcgtccggctcgttatgagtgatccccaattcttatgtatctccaggtgcaatgaagaatgagagttaagtagttcttgtataggaaatatttgtgtattaatatctttttgagtaaaatatgcttggagtccctataaatttcaaaagtattaatttcatcctcatattaatttggtccctataaaaataaaacatatttttattagtcattagtggtaactataaaaataattaattggatttgaattaagacaacattgattgtaaagtatttccacacaaatctaagggtacacaacattattgatgcatgagaagaaggtttattattagtttgttgacttggtctatcaaacctaattcctcaaccatatttcacatgcttcattattttttgttttttttttacaattttttaatacatcatatgtgggctacactttatttgaatattttaatatagtatccattcaaaagttcatatattaatacattaatacatgatatgactaaaaaacattaatgaatgacaatgattaacgaaatataatgagtcacaaggaaaaatatcggaaggagaattttgggcatttattactattttttattttctaaataattacttatgttataaatcttattttctcattaatttattaacatctaatagaaaaaga

SEQ ID NO: 41876 - DNA, 437 bp, Glycine max
  Clone ID: PAT_MRT3847_137816C.1
ttttttttttttaaacaaaacaaatcattcctcaattgaagttgctcttttctaaggcaatatccatcacctggtggtggaaaaaataaaatgtaatcaagtaacaagatatgagaaatatctcagtcttcattccttgattgcttttcccacttcttcatcatttccaaaagaatctcattccatgtgtctataggtccaggcaagcaccaatgaacacaatcattctgcacactccctgcattcccatttacaaatggaaaaggattcatataaggaccagggtggccatcaggtctcaataatgccaatttggtcacatctaatgcttctaatcttaaccttcttttggcttttgccttggcatattccacttcttcaatctcaatctttctcatctcagcatccatcccttcaagttgcttctcctcatttcc

SEQ ID NO: 41877 - DNA, 232 bp, Glycine max
  Clone ID: PAT_MRT3847_137817C.1
gtttcaccattaccaggtggtcactagggctgtacttacgaaaacatatcagaatgctaagatcttccgaatgaagctctggaccaccaacaaagttcgcgccaagtctaagttctggtattttttgaagaagctgagcaaggtgaataaaagcaatggttacattcttgctgtcaccgagattttagagaatagcctctccaccattcagaactaccggatgtggttgcgc

SEQ ID NO: 41878 - DNA, 1171 bp, Glycine max
  Clone ID: PAT_MRT3847_137818C.1
ccacgcgtccgcaacagggtgacttagttgaattttggtgcctatatggtattctgagatggacctctcatcatactgcaaataaagaaaaaccagacttaatcagaaaaaaaaaaaaaaattggtaaattggcaaaggcaagcactttcttcttcaatcttcacaattgtttctttcactctgtccctatttcttcaaagctaatccactctctttttggtcccttcaaataatattcatatatctgtctctctcattgttgctgagagagaagaacccgtttccctttcttccagatgatccacttctaagaaatctctcacaaccactttgccccgtgacgttttaaccatctccttcctcaccttcttctgctgacctcaattgacttcttttgccttataatctcacctctttttgtttgctgttgcataatcggatcaaagagtttctggggtcagcaaaatagtataaggaaaaaaaatggatttttggaaagtgggtttgcttagtcttctttgtgccgcttctgcttttgcaattggggctgtggagctgggtcgacatcaacctactgagagaatttcaggtagtgctggtgatgtgttagaagatgatccagtgggaaggttgaaggtttttgtttatgaacttccaagcaaatataataagaaaattctgcgaaaagaccctagaagcccatcatatgtttgttgatgagatctttatgcaccattttctcttatctagtcttgtctagacccttaatcctaaagaagcttattggttttatacccttgtctacaccacctgtgacttgacaccaaatggccttcctttacctttaaagtcaccacgaatgatgagaagtgccatacaacttattttttcacactggcctcattggaataggacaacaggggaagctcatttctttgtgacccccatgaatttggggcgtgcttccattatcaagtaagaaatttagtgtaccattttagtttttttatttacatcactattagttatattaagaattcaaacaaattttgtggtgtttggtgatagggaccttggattctactattaaagttgtacatggatattgtaatatgcacttttatcatgtttattgttccaagaagagaaagcaattgaaagaggaactct

SEQ ID NO: 41879 - DNA, 824 bp, Glycine max
  unsure (1)..(824): unsure at all n locations
  Clone ID: PAT_MRT3847_137819C.1
gaaactccctctcaacgatctcacaggaaatgatggtctctacattgttggtggtgttgcaactccagctgacagaaaggaagccaagggtcatgccagattgtttatgaagagtataatatccactctcttatgcaccagtgcaatactagtacttctcacgatccatgtcttgatccgtgctcatgttgctaacaaagcactcaatggaaacaacaatnggntgatacctcgtgcccaaaagtttgagttctctgttgatgacattgtccggaacttgacatcatccaatgtgattggcaccggaagctctggagttgtctacaaggtcacagttccaaatggccaaatactagcagttaaaaagatgtggtcatcagcagagtcaggagcatttacttctgaaattcaagcactaggttcaattaggcacaagaacatcatcaagcttctgggttggggatccagcaagaacatgaagcttctgttttatgagtacctccctaatggaagcctgagctcattaattcatggttcaggaaagggaaaaccagaatgggagaccagatatgatgttatgttgggagtggctcatgcacttgcatatttgcaccatgattgtgtgccttccatattgcatggagatgtcaaagccatgaatgttttgttaggtcctagctatcagccttaccttgctgactttggcctagcaagaattgcaagtgaaaatggtgattatactaattccgagccagttcaaagaccctaccttgctggctcctatggatacatggctccagaacatgcatctatgcaacggatca

SEQ ID NO: 41880 - DNA, 277 bp, Glycine max
  Clone ID: PAT_MRT3847_13781C.1
tcctctatatcggccgcttttgatgtttttttgtttttttttttttttagaagcaaaaggatgagagttctctctttttcttcctttgcatgattgaaaatgtgccctgggtagattttatgatcttatgtttatgcttataagggcatggatgagatgtaaatacccctttttactttaattgctggcctgaattagtgattcatgtttgatgttcccttctgtcgtcttctggcagccgtacagacacctgggcggacgcctggggcgtcccagg

SEQ ID NO: 41881 - DNA, 1476 bp, Glycine max
  unsure (1)..(1476): unsure at all n locations
  Clone ID: PAT_MRT3847_137820C.1
aaaacttgaaagtagggtgtttttttttttaaagtaaggaagaaagaagatgagcagcaactcaggaaaagtggtgtgtgtgactggtgcttctggtttcattgcttcatggatcatcaaactgcttctccaacgtggttacactgtcagggccactgttcgcgacccatctaaacccgaaaaggttgatcacttgctcaaacttgatggtgcaaaggagaggctacatctctttaaggcagatctgctggaagaaggttcctttgactctgcttttgagggttgtgatggtgtctttcatactgcttcacccgttcatttcattgttactgatccacagaatcagttaattgatccagcgattaaaggaacccttaacgttgttaaatcatgtgccaaatcgccatctgtgaaacaagttattttaacttcttctgttgctgccgttttatataatggaaggcctcgtacccccgaggttgtagttgacgagacttggttttcggatccagacttcttaagggaaaatgagaggtggtatgcatttgcaaagacttcggcagaggatgctgccaggaaatttttaagcgaatacgacattaagttggttgttattaacccatcaatgtccatagggcctctcttgcaaccagagctgaatgcaagttcttcttcaattttaaacctaatcaatggttcaccaacgttttcaaataatagttttgggtggatcaatgtgaaagatgttgcaaacgcgcatattcaagcatatgagattgattcagctagtggaagatattgtctggttgaaagagtgatacacttctccgaacttgcaaaaattttacgtgatatgtacccaactttacagattccagacaagtgtgaagacgatgagccttttatgccaacatttcaggtttccaaagaaaaggcaaagagcttgggagttgaatttattcccttggaagtgagcctcagggagacagttgaaagtttaaaagaaaagaagtttgtggacttctagttcgtgatatctcctagaagaataaatattgataacactaactttgtctagtcagtgattttggtttcagaaactccatgcttaaggggaaattattaatgcgaaataaggcttgtattaatcaaaatatacaagtcggattgaatttgttttgaacttatgactttgctttgcatttacaattgtggaaatttctatatctttaaggtagaaaaagaggcatttttagggtggtcccttgaatttgaatggagcttggggattgaatttattcctttggaagtaagtctttgggagactgtggaaagcttgaaagacaagaagtttcccaatttttatttcttcatgtctctccttgatcaggagtgaacgttgataatgggaatggcatttcgtcaatgattaaggttttcatacccctatgctttaaaatnaattaatagaagtat

SEQ ID NO: 41882 - DNA, 255 bp, Glycine max
  Clone ID: PAT_MRT3847_137821C.1
ctcgagccgatgaatttgaatgctaagtctaacacaatcatttggttctctgttgttattagattaggtcatggtagagttatatcagttaaattgactatttagattcatccgtagttaatagttgccattgaagtggtgatttgatttgcttagttactgttcatttctatggcaggggttttcttttgagcagtttgttaaatatggtaaccattgagcattgcttagagattattctttagtcaaagaaac

SEQ ID NO: 41883 - DNA, 518 bp, Glycine max
  Clone ID: PAT_MRT3847_137822C.1
gcacattattaactgataaacctcacaaaaataatcaaatcaaaattttttcgcagggggaatcaaccaaaatatattggtatattttacatcttcccaaaaaaaaaaaaaaaggttttcccaggggggaatttgacaaatactatactatctcacccttaggcatttaaaagatttctgaatcctgctttttgctcttcagggaccctaattgggaacttgaggttaaactttaacctcaaattccccttttttgatggatctttaggaagtggcattcctttttttggaacaaccttttaataagggggatgaaaaaaattgctgattgggaatggaaactttctaccatttaaggtaatgaggggcacttaataaccacttaatgcctctgaaaaaaaaatcttctgggagacaacaagggaatttcctctacaagggaaaaccccttccgctttttctgcaatgataaaaacaaggaactgccggcttcaccttaggctgattatttccctttt

SEQ ID NO: 41884 - DNA, 238 bp, Glycine max
  unsure (1)..(238): unsure at all n locations
  Clone ID: PAT_MRT3847_137823C.1
cttncgtangcagtnaanttcagtttgnaaangcagagcgcggtcgtgagtagaagttgtgcacaaacnntgancgangaagangnaanagtgtacttccccgttgttgnagctcctagtgangnaattgtnanactcttnccatntaatcttgagtttaccacaagtataaaaancgaagctacaatatnactttcngaccgnaagagccgcctngaagaangttngtantgggctt

SEQ ID NO: 41885 - DNA, 901 bp, Glycine max
  Clone ID: PAT_MRT3847_137824C.1
cgtacgctcggaattcggctcgagaagaaagaaaggcttgcgaagccaaccccacatgaagcgtttctgctcctgcgctgtaagacactacaccaagtggtagtagtagtaacagtgacaaagtgaagttctgcggttccactccaccgcattctcgccatggatcgccacagcatccccggcgtctccaatctctgcatcttcctcttccttgtttctcttttcccacaagcattaacgctgcgggtctcttctccgtcgtcaccgacgggtcagattaactcaaattcaatcctcgtggctcttctggactcgcattacacggaactcgcggagctcgttgaaaaagccatgctgttacagaaactagaagacactgtcgccactcacaacataacaatcttcgctccgaccaacgaagccttagaccgcaacctcgaccccgatttcaagcgctttcttctcgaacccgccaatcttcactccctccagacgctcctcctctctcacatcacccccgcgcaaataggatccaaaaccctaacccgccacgtcacctctctttccgaccacaacctcaagctctccgaaaatctcaccaccgtcgacgaagccagagtcacccacccgaatgttgtgacccgacccgacggcgtcatccacggcatcgaccgcctcctcctcccccgttccgtcgaggacgacttcaaccgccgccgcagcctccgctccatctccgccgtcaaacccgaacctgccccggaggtcgacccgagaacccaccgtctcaaaaaaccccccccaccggcgaaacctggttctcttccagaacttccgatctacgacgcgatggctccgggacccttcctggccccggcgccggcgccggggccaggcggtc

SEQ ID NO: 41886 - DNA, 317 bp, Glycine max
  Clone ID: PAT_MRT3847_137825C.1
atggtttggcccttggggttgggccgcctttaaccaaaaagggggattggttgaaaagccgggggcagtagggaaccgaattggacatcaaggagtggtggccaatgataattaaggtccatgtcctgcgtgttgtgtgctcgtggtgatgttgttgctatgttggcgtgattgtgaatatgtttgcaaattgattggtgtggctcaatggtcattcatggctgcgtttaattttggttatttatatttttcggtgaattagtgctttgtttggaggcgggcacaaaaaaaaaaacttagtacaaatgtattgtgcg

SEQ ID NO: 41887 - DNA, 142 bp, Glycine max
  Clone ID: PAT_MRT3847_137826C.1
gtgttgcgttacgattcctaaggatattcgagacaacaagggactccacttcggagaaaacagcaattctgatcatgtgacctcgccatcacctacctaaaaagggtttttagcttttcccataaaccaaacacttcaaaaa

SEQ ID NO: 41888 - DNA, 525 bp, Glycine max
  Clone ID: PAT_MRT3847_137827C.1
accagaagataacgaggttgcagctattgatgttagcattggagacatttacttctcgagccgattcggctcgagggctgttttcgcctatcagaaagcactaacagtgttcaaatccaccaaaggtgaaagccacagttgtgtggcattagtgtacattcgccttgctgacctttactacaggacaggaaaattaagagagtcaaaatcgtattgcgaaaatgccttaagaatatacagcaagcctgtggctggaacaaccgccggggagattgcgagtggtttgaccgaaatctctgccatctatgaagctctaaacgagcctgaagaggcgctgaagctgctacagaaggcggtgaagttgttggaggatatccctggacaatataggacagtagcaggaatagaagcccaaatgggagtgatgttctacatggttgggaagtatatggatgcttggaagtcttttgagaatgctatcaccaagctgagagcaagcggggagaagaaatctgccttttttgg

SEQ ID NO: 41889 - DNA, 336 bp, Glycine max
  Clone ID: PAT_MRT3847_137828C.1
gatagcaaatagcgggcccaaaaggggagctacctacccttcaaacctttcactcttctctcctttaacaatcactgcaataatattgcttaaagatattccgaaaccatggtttacgccaatcctatgattttagccgttgagaatactacgtaaccccgtctacttctgcagcttcttagcaccacgacctacaatctatctacaattgtcataagaaaaccaccgaatgttttccatcacatttcttacgaggctgcacacttcacttcaatgctttagatattacatgcttacctaaagacaggcgaaatacttctcattaccattaacaca

SEQ ID NO: 41890 - DNA, 220 bp, Glycine max
  Clone ID: PAT_MRT3847_137829C.1
aaaattaaatttggaaggagcgggccaggggcacaagaatataagatacaatgctccctaccgccgaaagacgtgaattttttgcacgttttcacaacctaatacccaactgcacgatcgcatacgcgttagagcatccggaaaattttaataggggaccgtttttctgtcatgaaccaaggcgccggtactggttttcgaaacaacaacaacatgaacc

SEQ ID NO: 41891 - DNA, 379 bp, Glycine max
  Clone ID: PAT_MRT3847_13782C.1
ccgagcgagggaactttgcattattttgactagagctaggagcaagcggcagaagttttttattcggatggagcataaccggtcatcttgtcacttgcaggtgatgtatgtactgatgtggagagcgacccatactctaatgccccaggtgttttgcgtaagcgttatggtccttaggcctacgtcatgagaggtggcgtcctcctttacatgttccggagcgtgagtaccccattttgggcgtgcaagatcttatgtattgatgcagacacagtcatcacgaactttttcaatctaaatatgtggaccctgttgagtgagtatgacactttccgcggacactttgtgcagttcatatggttgacgcggtatccaacta

SEQ ID NO: 41892 - DNA, 367 bp, Glycine max
  Clone ID: PAT_MRT3847_137830C.1
gctattcgtacggtctttacgtagcagtgattgtaatagccgcgtagatgattgagctatggaggaggggcctgattctgattttgcagaaccgactctgggatgcactgtctgggttgccgctatgacaaacaaccaactggttgttgcaaatgctggagaatcgagatgggtgatatcttggctgggacttgtattcaattcacctgtagaccaccaacctcatcttgtgattgatatgcacagagttttaaaagcatgtaggtacattcatgcacgactagttgatagaagtttaaatggtgcaagacctattggtgacatgaaatttgcacagaactagtttatttctgatgcaaaaccaatt

SEQ ID NO: 41893 - DNA, 1355 bp, Glycine max
  Clone ID: PAT_MRT3847_137831C.1
gttccacggtggcgggtgggtgagcgggagcaacgattcggttgcgctcgagccgcggcggatcgcgaggctctgtgaggcggtggtggtggcggtggggtaccggctggcgccagagaatcggtacccggcggcgttcgaggacgggatgaaggtgctgaattggctggcgaagcaggcgaatttggcggagtgtagtaagttgatggggggtaggaggttggagggccagcacaagcatattgtgggttcctttggggcatcaatggttgagccttggttggctgctcatggaaatccttcaaggtgtgttcttcttggcgtgagttgcggtgcaaatattgcagaccatgtggctcgaaaagctgtagaagcaggcaaacttctggaccctgtcaaggtggtggcacaggtcctgatgtatccattttttattggaagtgtgcccactcgttctgaaataaagttggcaaattcttacttttacgacaaggccatgtgtatgctagcatggaaactattcctacctgagaaagagtttagcctagatcatccagccgccaatcctctagccccagatcacagtcctcctttaaagaagatgcctccaacattgacagtggtggcagatcatgactggatgagggaccgcgccattgcctattcagaggagctaaggaaggtgaatgttgatgcacctgtttatgagtataaagatgcagtccatgaatttgcaacacttgacgtacttctcaaaagccctcaggcccaggtttgtgccgaggacattgccatctgggtcaagaaatatatttcgcttcgaggtcatgaattctcatattgagcagtatttaagatgatgatggttcagtgagaaaatctttgaaggccatttttctgctaccaccagtatatatacaccttcggggttacgaggtcctgctgttcttgttgttgacctgttccacgttccctccacctgtcagttcttgttgtaagatagttgtttgagagttgagctagagagagatccattcacctccatgcacactgcatttggaagcccctgttccattttttcttgtgtattatgatgtactatttctcatgatataaaatttagtgatatattcttttagcattagggtcatcgttcatgaagtctccagtctattctcttatctatgcaacttttggagtagtagtgggacttcatagttaattaattttgtacaggagaccagttctctgtgtttcgatatcattaagatttcggattaaaaaacaatttcccttaagatacctttagtgattgtctataggctgaagatatgaagtttctttaataataaaaa

SEQ ID NO: 41894 - DNA, 267 bp, Glycine max
  Clone ID: PAT_MRT3847_137832C.1
gggagactagtagatgtagaaagaaagagaaggaggaagacgccaccacctccatttaaaaatagggaaagtgtcacggcgccaacactcatttaacccacacggcccaatggaatctcgccacgttgcaagtgctcctcgcggtcacttacgtgtgatctcacacttgcgctaattagaatagaatctctctttttcaaaattctctctcatcacctttcctcactcgtacgtcgtcgtttccccgatcccggcgaatcgaactcc

SEQ ID NO: 41895 - DNA, 136 bp, Glycine max
  unsure (1)..(136): unsure at all n locations
  Clone ID: PAT_MRT3847_137833C.1
cgcgacgaagccggaaacggccggggagcgtattaaccggaacaaaagcaacgcgcgggtcaagagagggaggcgccccacacacgngtacgatnactaaagggaaagaaaaccacgcccagagcaaggacacaga

SEQ ID NO: 41896 - DNA, 252 bp, Glycine max
  unsure (1)..(252): unsure at all n locations
  Clone ID: PAT_MRT3847_137834C.1
gaaggtgcagaatccagccactggcggcctttactagaggatttgcgacaacancacaggcgggagccancagagaacgctaaacgcgaacaacaacgccggcaacaacaccaaaccaaatgcccgcgcgccaggcaggggcaccacgaccaaacaccgcaaagcataaaaagcgccgacccgacctagaacgaacccggcccctctacgaacagctaaccgacgacacagtcactgacaaacatagccaaa

SEQ ID NO: 41897 - DNA, 526 bp, Glycine max
  Clone ID: PAT_MRT3847_137835C.1
ggctcgtgcaacttgtctcgtgccctccttctatctttctgtgcttcaattctctcttccacagatgggcgttgccgttctttaccctcaagattctctcccacacaaaccatctactcattaccagaccataatccctcactttcccagcatgaaccccaagtctcatcggacttcccgaaaccgtaagaagcggcccgttcccggcccagctcggcccacaacatcctcgaaatcccaagtcaacaacaagccgccgcagcagcttgtcatgggtcaggtcaaaatactcaaacgcggcgaactgctgtcccaaacgacgccggatccacagccgcagacggaatccgtcgagaagaagacggaaaccgttgtaaaaaagggcttaacttcaactgtagagggtttgtatgcaggctattcgatgttggtgatgtctccacctcctagctccgttccggtaccggctttcatcactaagaagttcgcggccctgagtgaggccacaagtgacttacgggaaatg

SEQ ID NO: 41898 - DNA, 274 bp, Glycine max
  Clone ID: PAT_MRT3847_137836C.1
atgattttacacattcacttcagtcagtgtttactgtttaactttgtacctctgctctcacttccttccttccttccttcaatcgttctaactcttatcatccatggctagcaccaaagttcatagggttatgactcaacccattaacttgtattttagtgttcttcatagcaaagcacgcattcatatttggctattttagcaaaatgattttatgattgatttcataatcattgtttttgattaatacattaatttttatcttgtatattct

SEQ ID NO: 41899 - DNA, 385 bp, Glycine max
  Clone ID: PAT_MRT3847_137837C.1
aaaaaaaaaaaaaaaaaaaaaataaaattaaaaaaaaaaaaaaaaaaaaaaaaaaaaaaaaaaaaaaaaaaaaaaaaaaaaaaaaaaaaaaaaaaaaaaaaaaaaaaaaaaaaaaaaaaaaaaaaaaaaaaaaaaaaaaaaaaaaggggaggagtttttaggggtctaaatttaactatatgtatattggaaagttatgattttttttagggtatcctaatttaaattatattgcacggtttttaaaatcttgatatttggaaaaatttgatgtttaccaatttattaagttttttaaaaaatcctcttttaatgatttggtttataagaaaatgggcattctctatagattttttcaaatatttgtagattttaatggatattt

SEQ ID NO: 41900 - DNA, 520 bp, Glycine max
  Clone ID: PAT_MRT3847_137838C.1
ccctaaaaaagaagttttttaaaatagggggagatgaaatgaatccgtagggaaattcaccgggcggcccccaaaaagagacattggtgggtttaccctgcaaagtagggcaccccccccacgatctatggtttttcagttcatgttggtgcaaacaatgaaataaaactaattgaattgaggggggtttaaaattaaaattaccaaccccttttgggccgaggggaagaggaaaaataatattccttttcccaatcgaaaaatttcctcaagccggtttccaaatggaggggggggttgtggccaagctcctttttagccaagctaatttcaccttgggggaaaaaaacatccccattgggcggctttggcaaaagttttttgtgggcgttaaccttgagcaatttttccaatatcctcaccagtttactccccgccacgggagaagtgttgcccaaattgtaaagccgaaactgggccggcccactcccagtgctcctgtgggcggtatccaacgccc

SEQ ID NO: 41901 - DNA, 1237 bp, Glycine max
  Clone ID: PAT_MRT3847_137839C.1
cccgggttcgccccacgcgcccggcttctgaagttccatcaatcttccttatttctttcagggtcactcttcctcggtaaagcacttccccagttttgatcttgtaacactttttcgggtttgttgaatctgcttctttttatttcaatttgggattgactcatatgacaagtatgtatagtggtggttacactgctctagttacaaacttatccccaagagcaacagaggatgatgtgcgcaattttttcacatactgtggtttgattgagcatattgaaatattaagatctggtgaaaatgcgcctactgcatatgtgacttaccgggatgcttatgccctggaaactgcattattgctaaatggatcaatgatattggaccaatgtatattcatttcacgctatgaagcttatgtaaatgactatgataattggagcaatcatgcatcaaatcctgaatacagtattacaacctcacaggatgttcacatggataagtttgttgcttcccctggagaagcactaactatggctcaggtggttgtcaaaacaatggtggctaagggatatgtattgggcaaagatgcatttgtcatggcaaaagctttcgatgaatctcatagtgtatcatctacagcagcaaccaaggttgctgaactcagcaataaaattgggttgactgataccattaattcagggattgaaacttttaagtctgtggatgagaaatatcatgtcacagatttcaccaaatcagctgcaacagtgacaggaacaacagctatagtcgttgcatcagttaccggaaaagctgctgtggcggctggaactgctatagccaacagtagctactttgccaaaggtgctctttgggtttcggatgtgttgacacgtgcagcgaaagcggctgccgatttgggtcagaatgaaaagaaatgaaactccaaaaatgaattactgtataatatgttaagttgttgaacacaaacaaatagcagcatttgtttgttgctattgtattataagacgtgaacttgctttacatatgtggctactcatctggtgcaaatgttcatatcagtagtttttgagaatccatggtaagcagccacttatttgtgttacccttttagaaaatatagcatatggtacaatgtaagtaccaaggttcttcttgtctactttcgcaaaaaaaaaaaaaaaaaaaaaaaaaaaaaagcggccgctctagagga

SEQ ID NO: 41902 - DNA, 130 bp, Glycine max
  Clone ID: PAT_MRT3847_13783C.1
tttttagtctaacaagatgagtttaatggtcaatataatccagaatagaaccaaggccggaaggcatagaggctcattaattacagggaagggataacatgatttatataacaggcacagaagctccaaa

SEQ ID NO: 41903 - DNA, 779 bp, Glycine max
  Clone ID: PAT_MRT3847_137840C.1
cgaattcgagctcgttacccggggatcctctagagtcgacctgcagccacccattcccttgcagacccatcaaatataggaatctgtatgagaattagaaatgacagaaacacataaatttctaatacaaactattggttacaagaactagataaaggggagtggaaaggaggaaagaaaaaatattcatcaatattttccacaaaatactttatctttattatgataaagctgagcaaaggaaaatatccaagaaacataaaataaaccaatactatacaatagattagagggaatccatttcataaccagtatctgcaaactgggacagttagcgagttttcgatgaactaattattctgtttgccactttgccaactatagtagagtgtacatttgttgatataagtcattcaaaatgtagattaaggacctgtttggataaacctttttataaagacttataggagaagaaaataagaaagtaaactcaattgaatttttcccataagttaaaatcagcttatgcactttaaattttatagaagttctttcatctaacttctccaaaagctgaggtgattagttgatttttacttctggaaaaaaaaaactcaaaattcattttatcttcttattctcttctcctacgtgcttatagagaaatttatccaaacggacttaagaatttctagtctaatctaaatattacaggatccaaattttacacttcactttcttaaaagtaatttagtaagctttgttttaacatcaccctt

SEQ ID NO: 41904 - DNA, 262 bp, Glycine max
  Clone ID: PAT_MRT3847_137841C.1
tggtaagagtcccctctcgctcgcttctattcgttccaccattccttcgtcctactcctctattttatttactatcatccattcccaacacacaatacccttctgggtacctcaaaaaacatttattttttcgtttttgtttgggtcccattagattatatttcattgggtcttcgttaattgaaagaccttgttggttcttacttgttttatggatttctaacccttgttcctgtgatataccaattcaagtaaagcagca

SEQ ID NO: 41905 - DNA, 495 bp, Glycine max
  Clone ID: PAT_MRT3847_137842C.1
cggacgcgtgggcggacgcgtgggcggacgcgtgggcggacgcgtgggttattctccaaaatgccgtgctctctcgctacacaatcttctgttctgaagcgcagagcacctgcgtctcctcagcaggcaaaaatgcatgacaaaaagagacactttgacgaatcggcaaacaatggacaagaaaaagcggacaaagtgccatccaaaggggacaaagtgtcaccgacaaatgaggaaaagaagaaaaatgttgcctttgccacattggcaatccatgcgggaaatgaacccgagaaatgggacatgaatcaggtggttccaccaatttcactggcaacaacatataagcagcaatttgctggaatgcccaaaggtcatgattacgcacgaggcggcaatcccacccgtgatgtgctacaacaaagcattgccgcgctggaaaatgctcgtcactgtcgcgtgttcagctccggactttcagccacagcagcaatg

SEQ ID NO: 41906 - DNA, 365 bp, Glycine max
  unsure (1)..(365): unsure at all n locations
  Clone ID: PAT_MRT3847_137843C.1
gcacgagggtggaacttaatttgaagtgcagtgcagcgtacatcgaaggaagtgaaggtcaagctgacgaaactcaacatggaagggtccaccatccattggtttaactcgttgtatgagactgaggaccacttgacatggcttgagctgagacaagccatgattgagaggtacaggggggcctcgtgccgaattcggcacgagctagtctcgagttntttttttttttttttgcatataacagaaccagttgcatataacttgcatgaaacaagaagctagaaaaaaaaaaaaaaaaaaaaaaaaaaaaaaaaaaaaaaaaaaaaaaaaaaaaaaaaaaaaaaaaaaaaaaaaaaaaaaaaaaa

SEQ ID NO: 41907 - DNA, 299 bp, Glycine max
  unsure (1)..(299): unsure at all n locations
  Clone ID: PAT_MRT3847_137844C.1
tncngaggtagagtcgattggtcagaanntgctcacctgataaggnaaagcacnactngatggtccaatatattattannngttcaatagtcttctttactgntngctngttatnccatatttatncggtgggtagntgatatnnccggatgcttgnctaanccanatgccaaggcaagangaaaagttagtganagatgttnganctggtaagttnncgaaatggnantgtgttgnaaggggttgttatggtgaaanctntgcncatgttgaactgggaggcaggcntttgttgaaan

SEQ ID NO: 41908 - DNA, 409 bp, Glycine max
  Clone ID: PAT_MRT3847_137845C.1
ccattattaaaggggggtattgggggggaaggaaaaaattggacagataaaactattaaggccagtcttaaaaaaaactacctttgacccaacaagattttatccttcaaaccgccaaaaaaaaaaaaaaattccattttcaatgcattatatccccaccaatttaaaacatcctcgaccaaaggatcaaactgaaagcgtttaacatggttgctcccaccaaaggaacactttctatttttgaagcaggtactttggaaccacctttcatccgggaagatacattatcaggggccaagtaaacttggccgatgtttttattcaaggcctgccgggtacgtgaggacgcctaacctgcatacaccccggctcttccaattgacccctaccatgaattaaaaacggccta

SEQ ID NO: 41909 - DNA, 148 bp, Glycine max
  unsure (1)..(148): unsure at all n locations
  Clone ID: PAT_MRT3847_137846C.1
gttggtttaccaggacctgcttacaggtgatgagcttntctctgcctccttccgctacaaggaaatcgacattggaatgctgtgggaagttgaggggaagtgccttgtctaaggaccagttgatgtacaccattgtcccaacccctcc

SEQ ID NO: 41910 - DNA, 552 bp, Glycine max
  Clone ID: PAT_MRT3847_137847C.1
gtcactggaaggtctaagcatgtgttacttatgatcacctaaatagcttgctggtttttaacaaaaaaaaaaaaaaaaaaaaggaaacaaaaaaaaaaaaaaaaaaaaaaaaataaaaaaaaaaaaaaaatgggggggcgttataagaaatacaagttggggaacgctttaatggaacgaaatagcttttttagagagtcaccaaaattaatttaactggaggtattataaaaaaaactaaattggaaaaaccttgacggaaccaaaataaaaaaacttggagcaaaaccaattttcgcccgttgtagaaaaaccaaatatacccgctcggacttgctttcaaaaaggttgcccaatctgaatgtcaaatggaaccccccctgcaaaggcaaaaaaaacgcgacggttatgggggttactcacaccgagacagttacatttgaccacgccctaacccccgaactttgcaatttattcaatacctttttcccaacgttcgttgcttttccttgcaaagcattaaaggggggtctccctttaggtttaaaattt

SEQ ID NO: 41911 - DNA, 567 bp, Glycine max
  unsure (1)..(567): unsure at all n locations
  Clone ID: PAT_MRT3847_137848C.1
cactgagcatcgtctagctatgtcgatcgaactgtccaaggtcctgtcaccacctcattacaggagcaaaccggagtgaaagcagccacaccgtgatacaccacaattaggacataaaccagccggccaggctatataccggcatagtccgggataggtcatcagcgatcagcacngcgaggtagtcgaccataccgtgtaaccgaaggcgagtaaagataaacccagggtaacgccgtgttagtggaatggcaacgtttggtggtgtatgtagttgaacagtgtgcacgtgcatgcggcggttaagcaaccgagcaacttctcccacaccgattgcggctagggcgccagtagagtaaagccggagattcatataattcacgagcaaaggaagtacgggagtgttaaatccgcgcgcggggataaaacaagaaattcacgaggtggtaggcacgtaaggtttacggtattcgtacgtaaaagtgcgtctaccgagtgaacactaaacagagtcctaacgcggttaaaacgaaaggaaattaaattagcagcggagcgcggaggaga

SEQ ID NO: 41912 - DNA, 714 bp, Glycine max
  Clone ID: PAT_MRT3847_137849C.1
gccggaattcccgcgtcgacccacgcgtccggttttgcttatgatcagcgacggttacacatggaggagttgctgctttacgagacgcgtcatcacgcctccaatcaccctcctcaacaccaccaaaaccaacatcaacagcaacaacaggaaaacgagagtgccaagggttccttgctgtccctgctttcttctcgaggcgtgagccaactgaaggaaaaatggagcgaatatattcaaccgaagagacttataagattggtttcgctttttgtttccgccacagccaaacacgtcgcagttgccgcgggaaatcggattacgtttctcagtaaagaggatgactatcaaaacccacgcgccattttcaccagttctagctttggaacgtttagtgtaggagcttggtctgaaaatgaggacgttcttggagttgctgatgattctgatacactctattttatcaaattcagtggcgaagttgtggccgaaatctcgaagaaacatttgaaagtctctactccaatcgttgccctattttctgatatcgatttggatacacacgagtcttacttgttctctattgttacatcagatggctcacttcaacgaattgagatcagtcgtggacagagtggctctactttttcccagtccacgagtcgttttagcaacaatattttctgctttgaccgccctagtgaacttaacctt

SEQ ID NO: 41913 - DNA, 453 bp, Glycine max
  Clone ID: PAT_MRT3847_13784C.1
cccttcatcatcagggcccccatccataatctaaatcttagagtccgattacaatgggataatctttctgaaaaaaaaatatttcccaaatcaacattttggggttcatgcaaataaagccctaaaaaataatttttcgggagagcgaaaaggcctatagtttttcatctaaatatccaacacataaaagcattctgggaaaaaaaaaaagcccatgtttaactcctttccaaagttaacacccaaaaaaaatccccaggggctttaaagaccagggaaaaggctgcccctttattttacccaattgacagtaatgtttccaagccatgggaacaaggggaactggcccaaagcaatgaaaagcaagaaataggggggttggcttgaataataactccggacttccgaaaaaagaactcttttcatggtttaaaccaaaaacactgccataca

SEQ ID NO: 41914 - DNA, 202 bp, Glycine max
  Clone ID: PAT_MRT3847_137850C.1
gtgtggaattgcaattgagccttcttatcccgttaagaatggaccaaatccacctagttctggaccatcacccacttcaccagagaaaccaccaaatgtctgtgacaactactacacctgggctgatatagccacttggtgtctgtttttgaagatcggaaatgctagttttgagtggggttgctgtccttttgaaggtgca

SEQ ID NO: 41915 - DNA, 425 bp, Glycine max
  Clone ID: PAT_MRT3847_137851C.1
gttctgggatgccatcgagaatcttccgactgatggatcattcttggaatacaatgatattgcaattgggaatgggagtagatctactgaggctgatcctcctgcgaatgacattctagacgagtatcttacactccctgatgatgatatttacaagtatatatcttttgattctcctcagattcaagagagtgaaaattttattcccaaccaaggatcacctttcactcggcagaatgtggagggagaaactgctgataaatctgtggttagtaatcataattctgaatcacaaaccagaaatgaggcttcttcagtgcagaatacacatgaggcaaagtttgcaccaggaagtacaaatccacttgttaagcaggcctatggtttgttaggccagcatcccctgcttgcgcctggcacaatgc

SEQ ID NO: 41916 - DNA, 478 bp, Glycine max
  Clone ID: PAT_MRT3847_137852C.1
tgaaaaaatggacccttctaaatcattttttacatatactacggcctaattatctcaatggagtcaatagaatcacggcttaaaaaatacccaccatagactaaactccgttgaggaaacgctatcgaaattcatttaatatgtcatatcgaagagataaaacaatacgaggtctggatcactcttggcttaattttctacgaaggggaaaagtggatactatacacaaataccctgccttttggatacgaaggaatgtcagatatcctccaactaatgaagctttatcgctggactatgattactagtaatacatacctttagaaacatgaccgccgactacatatctttacttaaagcctgaataggcatattgacttgctatggtgctgaaggcggcttccctgacgctctacggatcatttttgaccctgctcttgaatataggggagcagatttaaacaacaggttgcccttg

SEQ ID NO: 41917 - DNA, 267 bp, Glycine max
  Clone ID: PAT_MRT3847_137853C.1
tacggctgcgagaagacgacagaagggcatcttcacagcatcttctgatgactttaatgatctctgcagtgcttcacatcttcttaggtaggcataatctttacaatggaccacttctttggcagcttcaacagtagccttgatgttcttcaaatcagccttaaaagccttggaaatagcctttgtcctatctgccacatctttcttcactttctccaacattgacttcatctcctcctccctcttgagaatgttttccctgcttga

SEQ ID NO: 41918 - DNA, 282 bp, Glycine max
  Clone ID: PAT_MRT3847_137854C.1
acttactgtgcaacccaaccacagacgatcacgcgcccattttcccatctatccttcttccaccaacataacataaccctacctacatggccacactccacatcaaccaaacaattcacagtctaacgccgccgtttacattcaatcctactaccgtgcccacactatctcaatctctatacctgaaaatcaccgccgactataccgaatcctattcaatatacatcctgatccacttgcataacactttgtaatatattcgctccaatcacctcgttaaac

SEQ ID NO: 41919 - DNA, 1282 bp, Glycine max
  Clone ID: PAT_MRT3847_137855C.1
cccacgcgtccgcccacggctgtccggcgatgcggatgaggcgccactcgatgtttccatttgcctgcatgcctttggtattgtggggtgtggttcgtttagtggtgtcaagtcttgcgaacgtgagggtgcatgagtggtaatcgggatgtttttgttgcacggctccatgcttgcgcatgcaacgtgtgacatgcatccttttcattgtcaccttagccttcgtggcttaggtgctgacgattggttcctgtgttgcctacctaccaaacggtattcgtgtggctagtcagacccattccatccaggcctctttgttggggacgctggaggatttcaaagtcccacacgtgaaccacgttagtcgtccatcataacggcttcctgtggcacacgtgtggtgattgttctctcggatgcggtgcatgcagtgaacgtgggtggtctagtgcccccacattgttccttaaaatcggttgtctcggatgacgcttgccctggcgcttgctttgttcaacgcgatgctactactcttagttagctagcgctggcaatgctcgtggcaggtgcttggtcattaacggatgctacctggttgatcctgccagtagtcatatgcttgtctcaaagattaagccatgcatgtgtaagtatgaactaaatcagactgtgaaactgcgaatggctcattaaatcagttatagtttgtttgatggtatctactactcggataaccgtagtaattctagagctaatacgtgcaacaaaccccgacttctggaagggatgcatttattagataaaaggtcaacacaggctctgcctgttgctttgatgattcatgataactcgtcggatcgcacggcctttgtgccggcgcacgcatcattcaaatttctgccctatcaactttcgatggtaggatagtggcctaccatggtggtgacgggtgacggagaattagggttcgattccggctgggtcgcctggggcctcaacctcgtcggcgatggcatgcgcggcgccgaagccttcctcgccttcccctcctccgcctccgcctccgccatcaccctcggccgctacaacctcacctcctacaaagccatcgacgaagtcaaagcctttaccttcgactcgtgggacctcgcggccgaagaatccaacggcgccgtaaccatctacggctccgtcaagatccccgattcggcgaggaacgtcagccacgtgtggcaggtgggtcccgtggccgcgggcaagcctggggtccacagcttcgaaa

SEQ ID NO: 41920 - DNA, 261 bp, Glycine max
  Clone ID: PAT_MRT3847_137856C.1
ccaaacaaaaattttattggaaataataaaaatctggggacttacataacaatgggtttttccatgaccatgttttgtctaactagaaactaatccccaattggctggggggccatactggaccatagcagcaccagttgtttgcactacttgaccattctttgacaaaaacataagtcattacatatattaacaagctatccttttttacttccttttgggttacaacccaaaggagctttcaaatttttctttcccttt

SEQ ID NO: 41921 - DNA, 262 bp, Glycine max
  Clone ID: PAT_MRT3847_137857C.1
gggaaagtcttacccaactgtaactactgattaccacaaggccgttgagaaggctaacaagaagctcagaggcatcatcgctgataagagatgcgctcctctaatgctccatttggcatggcactctgctggaacctttgacaaaggcaccaaaactgtagaacccttttaaacgagtgaaggccgtgccgaactggctcacagcgctaacaacggtcttgacatcgctggtaggcttttggagccactcaatgcagaattc

SEQ ID NO: 41922 - DNA, 350 bp, Glycine max
  Clone ID: PAT_MRT3847_137858C.1
gaaatattaaggtggaggacgtgaacaggaattggtaagaacatgttcttgaaacgcgaattgctcctacataaaacattcaaaacatgcctatttaacccaacttggtttcctgtctgaaaaccattctggataagtcctttattacccgggcatccaactctaactatagttctacagcaattgtgaacaaataaaggtagaagttttatcccttccattttacacgtcgatcggcccgaatcaaatagtaggaaaggcatggaagcagacgataatgggaccgactatgaattgtcctatgttgacgttgaaaagaaaacgtgcttctggacctgtcaagagaatag

SEQ ID NO: 41923 - DNA, 175 bp, Glycine max
  Clone ID: PAT_MRT3847_137859C.1
aatatgtaatcttactagagtggatccttctgcagtgacttgactggctgggctctttggcgttaggaatgaaaagctgagttctaacgccactaaccctatgctgacgcgactcctagtgaattgaaagagtgtcagatatctgatggatgaatgtgcttgtgcgtatgtgaac

SEQ ID NO: 41924 - DNA, 115 bp, Glycine max
  Clone ID: PAT_MRT3847_13785C.1
ggatggatgggcctttgtggtagggtgttgcctttgcttacaatgcttgcgccctttggtgtgctcttcgtcttgcgtgattgtttcgcagcactgccacttcctctctgggtgt

SEQ ID NO: 41925 - DNA, 434 bp, Glycine max
  Clone ID: PAT_MRT3847_137860C.1
acgagatccaacgcatcaagtctgtcaatcccgatataactcacagggaagccttcagtgcagctgcaaagaatgtatcaatcctttccccctgttaaataaataaataaacaaatatacagcactatggttcttttacgtactagggtttcagaactttgaacggttaattattatttatattttctctccaaatttcgcatgcaaacttttattaattatctaatctatgccactattcacaaattggtttcacaataatgaaaaaaaagatgcatttctttctagaagataacacgtaagttttttaaaataattttttgaagtacaatattgtggtatttcctcccactatttctataatcaaataaatcaatgataaggtttttctagttcactttggacttcttctgatgtattacgtgctttgtgtg

SEQ ID NO: 41926 - DNA, 724 bp, Glycine max
  Clone ID: PAT_MRT3847_137861C.1
cacataggccctatttattcctaaggtttacagtgaaagttgagtttgaaaggatggtttgctagcataacactgcggggagacatataaaacagtcagttcacagaggactgacttaggctcttcttctctataggtcaacatcgatggaggagccattgccttgggccatcctctgggagcatctggctgcaggattctagtgaccttgctgcacaccctggagagagtgggcgggacccgtggtgttgcagccctgtgcattgggggtgggatgggagtcgcaatgtgtgttcagagagggtgaactgcatgacagccaccaccttggacagttcttgttaaatcagtgcaacactaagcagaaagggaaaccagaggaccaaactgaggacaggaacccaggtggtcagcttgctgtactttaatgtgagacacccaaggctacggcattgcacctgacactgttataaataagagggaaatccaatcagtcatcaagggctccagagtgaacagcattttcataacttccgtgtttatcgtctttgctttctgggtgtaattttatcagatcatcaatccgaaggatggtgattgcagcctctgttgcgaacttcaggctcttcactttaaactatggttggttcaaacacccctgcttgctttgtgtctcggggtttcccatggaccaaatcaagaccaatccactttagatttttac

SEQ ID NO: 41927 - DNA, 585 bp, Glycine max
  Clone ID: PAT_MRT3847_137862C.1
gaatgcggctcgagctttagtactagagtttgcagactgagtggctcggtgagttagtgagcgaaaacgatagatagcattaccatgttggttggataactgaagtgagtgatgatttcaacttcaagcatggctttgctttctttactacccaaaacggcaccgcatgccctttccctcacaaacccttcctcttccactcccctcatcttacctttcagtttccaatgtttgcctcaccctcttccttctcctctctcttccctcaaagctactttttccgacggtggcgacaatttgcgcggcaagcccctggttcctcaggcctttgaagaagaagacgacgacgacgacaacaaatgggttgactgggaggacctgattttggaggacaccgttcctctcgttggcttcgtcagaatgattcttcattctggacaatatgacaatggagataaactaagtccagagcatgagaaaaccattattgagaagctgcttccctttcatccagaatttgagaaaaagatcggaagtggagttgactatatcacgattggatatcatcctgatttcgaacgctct

SEQ ID NO: 41928 - DNA, 538 bp, Glycine max
  Clone ID: PAT_MRT3847_137863C.1
gccgcttgtgtgtgttttccctctttccacttcaaacggctcgagcagaaagaccctctttttttttttactttccattctcctccttttcttcctccaatggctgcacctcgctgcctaacgtgaaattagtctcattttccatctgggtcttgtgaattgcgattggaaccgcgttttctcgcttctgggcttggcttagaagtagtcagaatgatgtctgtcacaggcaaaggcattgattttgctggcaaaaacttggtctctggctgctcttcaaatgcttcgtttgattggtacactgtgaggaactatgccaaggcgaatagtaataattctaatgggtgtggcagaggccatggacgtaaattggtttgttgtaagaggaggagcactcaatgtcgggtttcttctatgaagactgcacaccctactgtgaatggggggactcatgcaattgaaggccttaccacaggattggacttgaaagggttattaaaaaccccccattttccccacttagttttttttgaaacgg

SEQ ID NO: 41929 - DNA, 776 bp, Glycine max
  Clone ID: PAT_MRT3847_137864C.1
acgctcggaattcggctcgagctcaaggagactctcaaggccctccactaccttcaccgccacggccacattcaccgcgacgtcaaggccggcaacattctactcgacacctccggcgctgtcaaactctccgacttcggcgtcgccacttgcttgtacgacgccgtcgacaggcagcgttgcagaaatacttttgttgggaccccttgctggatggctcctgaggtgctgcaaccagctggaagtggctataattccaaggctgatatttggtcttttgggattacggcacttgagttggctcatggccatgcaccattttcaaaataaattcggctcgaggttcttctaatgacaatgcagaatgcccctcctggacttgatgatcgagataaaaagttctctaagtcttttaaggaaatggttgctatgtgcctggtgaaagatcaaacaaaaaggccatcagcagagaagttactgaaacattccttcttcaaacatgctaagcctcccgagctctctgtaaagaaattgtttgctgacttacctcctctttggaactgtgtaaaatccctcaagctcaaagatgcagcacaactagcagtgaagaaaatgccttctgcagatgaagaggcaatatctcagagtcaatatcaacgaggagttagtgcgtggaactttgatattgatgatttgaaagctcaagcttcattggtgatggatgataatgataatgcaaagatgaaggacgatgaaaacaaatttttcactaatta

SEQ ID NO: 41930 - DNA, 586 bp, Glycine max
  Clone ID: PAT_MRT3847_137865C.1
tttttcaaatacccggaaactatataatgaataaacttgtagtcctttacattaaaattacagctgaatttaatggaaattgatccctgactattcctacgcattggcagaaatacctttgtagataccacggaacacctacctgtttcatccaaaatttatacagtggatggaaagattcaaatcaacttcctttctctcaccagaagtagaaagaaagattggggttgcaagaaattccaaaaaaaaaaaaaaaaaaagattcaacagtacaaccaacatttcatcatttgattgggtcaactaatgggaccccaagacagctctatttgacaaatcaagaatagggggcactaccaagcaagggaattctttgactgctgcaattttaagtaataggaattttctatctcctccttgcaggcttttagtaaaggctgtaagaatgacaatctgaaaagcgtaattgcatttccaagcgtagttctattgaattcaccatcaacatcagctcttgaaccttcataattaagctcttctatcagctggaatgttacatacaactcacaatggcaagattcacata

SEQ ID NO: 41931 - DNA, 208 bp, Glycine max
  Clone ID: PAT_MRT3847_137866C.1
ctcttgtcgtcggtgttccaattggcaatgctcatgataaattcattatccatccacagacctcattacatggacatagtccatatccacggaagaccacaattggtagcacatcattacatagtgcagctctcgatggatggctcatggttagtttaatcttcacatgtaaagcaagcactcactttggtggttgacacacttcaag

SEQ ID NO: 41932 - DNA, 235 bp, Glycine max
  Clone ID: PAT_MRT3847_137867C.1
gattcaccacggggctctcactatcttccattgccactcagttttgactctcattttattccctccatgtttcttcactttcttccagagacatgaccatgtcttcacacagtgttggcctcaaaattgcgtaatcatctgtaaggtgtgctggagcagtaaacagggtcatgggaaacatgtacagtgctaagtcagttgacatcgattcaaatgaactcaaggtgagtgtgat

SEQ ID NO: 41933 - DNA, 248 bp, Glycine max
  Clone ID: PAT_MRT3847_137868C.1
aattcggctcgaggttcaagaaaatgtatgaaaaacaatagatggaacaagtataccagtggttttttgctcacaaaaaaaaaggggaggagggccagaaaaaaaaaaaaaaaaagggatcttcagcaaatccgtggtgccaccaccaaaagaaactggaggctgccagcagaaaaaaaaacaggggggggcccccacctaggggactcttctccccgcaaataatttcgaacccggcccctgcgggg

SEQ ID NO: 41934 - DNA, 477 bp, Glycine max
  Clone ID: PAT_MRT3847_137869C.1
ctcgtggccaaaaactcatcttcaaaggaaaggttttggaagaccccatgactttgactgcatccaaattgactaatggatccaaactcatgcttgtggcttcccaatgtttatatcaaggggatggtcctgtcttgaagaaagctcaggttgttcccaaatcgaggaaagatggtcactcaggctctagcaacgacatgaagaaaattcctgttaagaaccggatggaacggtggaaagcaacaggagttgtggcattgtctgaatgcaacttggaggccatacctgatgaagtgtgggtttgtggatcttctgcaagagttctagattgcaacaaaaattcaattaaaaatatccccaacgaaattgcgcgtcttaccagtctagagaaactattcatcaatgcaaatgagatagtggatgaatcaattaggtgggaaggactaacaactctgaagtacctaactgtattatcat

SEQ ID NO: 41935 - DNA, 277 bp, Glycine max
  Clone ID: PAT_MRT3847_13786C.1
aaaccaacaaaatgggtttttagggcagaactgcgacagtctctattcgaagaatgcacatgcatgaacgagagaaccgggatgcttagaatgatattcttgatggttaagatccaatatacttgttcaccacacttatcagaattttatcggcgaatttattactagactagaggattattcttgtacggcgacggacatttactttatggaatcaaaccccaccaactgcattgaataaagacatccatggaatatcaaaagatgcatgcttggc

SEQ ID NO: 41936 - DNA, 215 bp, Glycine max
  Clone ID: PAT_MRT3847_137870C.1
ctagaatgattaatgtttcagttcacaaatttccccatatgaggtcactaaagaatattggtgaccactatgaagtcaaaaggaaaaaaacaatggtgcaatataaaagatcatttgagaactgcggcttgactgaaaaatgtaatgcattaagaatatgaggctgagagataaagagaacggaggccatgagatgaaatattagatgacaccta

SEQ ID NO: 41937 - DNA, 205 bp, Glycine max
  Clone ID: PAT_MRT3847_137871C.1
cccacacgtcctaattcgaacggacgctttctttttttataacataactttttagtggtctggggactgtcatggaagttaatactaatacaaccactgtaccttcatgtccactaatttagaaccatttttacacacaacaccttttacatttaaaaatacttagtcataaccatagccatggccatttcccctccaaaaccat

SEQ ID NO: 41938 - DNA, 1758 bp, Glycine max
  Clone ID: PAT_MRT3847_137872C.1
attcttttatatttttgttttgcagcttatcttagaggtattatttttggtaagatccttctctttgtttccttaaaaacgaattaacatcatataataatattcatgggatttgctgcttgaaccaagtcccacgcgtccggaagaatgttggtgcttcttactcatatggtgaaacatctatgcaggaataggcagcagaataacattcagtacaaaacagttggacaacgcagttggactgcaatatttcgatggaggaatattcgtaggacgaaatgttataccaatttttctggctgccagatatctgattggagttgtacttctatttgtgttattgatctacaaatggcgacggagacatttgtcaatatatgaaaatatcgaaaatttcttgctggatagcaatctaaatcccattagatacggatacaaagaaatcaagaaaatgactggaggtttcaaagtgaaattgggtcaagggggctttggctctgtatacaaaggaaaactccgaagtgggttagatgtagctgtcaagatattgaccaaatccaatgataatggacaagattttatcaatgaagtagctaccattggaacaatacaccatgtaaatgtggtgcgacttattggatattgtgttgaaggaaaaaagcgtggtctagtttatgaattcatgcctaatgggtcattggataaatacattttccctaaagaaggaagagtccctttaagttatgagaaaacatatgaaatatctcttggcattgctcggggtattgcatatttgcatgaaggttgtgatgtgcaaattctacattttgatatcaagccacacaatattcttctagatgagagcttcatcccaaaggtttcagattttggacttgcaaagctacatcctgtgaaagataggtctcttgttttacctgaagcaattggaactttgggctacatagctccagaattatactacaaaaatattggtggagtatcatataaggccgacgtttatagttttggaaagcttttgatggaaatggcaagtagaaggaggaactcagatcctcttccagatcaactttcaagcaatgattactttccgttttggatatatgatgaactcaaggaagaaaaagatattgacttggaagatgcctcagacaaggataagcttttagtgaaaaaaatgttcatggttgcactttggtgtatacaatttaaaccaaatgatcgtccttcaatgaagaaaattgtagaaatgcttgaaggaaatgttgaaagtcttgaaatgcctccaaagcctattatatacccacatgatggtgaaatcaactctaaccaaacatcatggagtgattcaacttgttctagtaggaatctttgcagaagcatatctagtgattgataagagagtagtactttacaaaaacaagtaatctaaccaaattaagtatagtgttgatgagtacggttggaatagtgccaaagcttggtccttggaaaagactgattttgttgtagttattcaatagtgtaggataatgcactatgatctagtggtgtagatgattatggtctcccaaaacttcatcttagtggtaaagtagtctggcatcactacaattcctcaacgagtttttgttttattttgcttcattgtttgttttgttgtcattttttttcctcaattgtaaattgacatatgtttcattttaaaggtacgaatatatatttggatgtaatgtttta

SEQ ID NO: 41939 - DNA, 329 bp, Glycine max
  unsure (1)..(329): unsure at all n locations
  Clone ID: PAT_MRT3847_137873C.1
tcgcangcacgcgtacgtaagctcggaattcggctcgagnnntncggagacaacattgtacanccatancnntanncanntganagannnngaagtcnnntcntcctggangagnctggctagtaanacatatattctgtcgangnaggatattctcatatctataanangganaattngcnnntctgacatntctnntgcttgnttatnaganaactgcgcatgacgnntnggcagtgacnttgcttacatcngnggcagancnttctcgnccggtatggtgangncggtncgtggcnnggntactccattgactatcaccgtgaggt

SEQ ID NO: 41940 - DNA, 1109 bp, Glycine max
  Clone ID: PAT_MRT3847_137874C.1
aattcggctcgagggaccccatctctatcatgtgtgtggtctacactcacccctccattctcattcattaataacaacctcacaaaaacaaaagcacacacacacacctatgctcgctcgatcatcgaatgaaaaaaccaaccaaaaaccctttctttcactttggttgtctcttctacaccactttcccttcaccttccgttctccactcactactactaacataaattaaaaacacgccatgaacaacaacccaacaacaatcatcggttccactacccacggatcagaagaagaagatgaacacatcactgaaataagggaaatccacgcgttaaccccgccgccgccacgtggcagagcctgggagacagtgcatacccacaggtcaagctctctctccgtagcttctgaaggcggcgcctcttccagcgagaacttcagcatgagcagagagttcagcgctctggttctcgcagggtccagcatcgaccacgacaacagcaacaacaacaacagcaacagtcccatgaacgaaaacaacaatagtaacagcttgttggggaggatcagagaagaggacttgatggaagagacgaaccctttggcgatcgtgccggataaccaccctctggacccggttccgtcgtcgtcgtctcagggagtaaggggtggcggcgctgcacgtgaggagcacgtgtcggttcagcgggtgaagaaggaggaggttgatgccaagatatcggcgtggcagaacgctaaggttgcgaagattaacaacagattcaagagagaagacgctgtgatcaatgggtgggagagcgagcaggttcagaaagcttcctcctggatgaagaaagttgagaggaagctggaggagaaaagggcaagaccaatggagtaaatgctaaacgtcatagcaaaagctcatagaaaagcagaggagagaagggcatcggcaaaggccaaaaggggatccaaagtggcgagggtgttggagattgctagtctcatgagagcagaggaaagacctccggccaaaaaatcgttcttgtaataagctgttcaatatttcatatgttcagcttattgtacacatttctacacaa

SEQ ID NO: 41941 - DNA, 177 bp, Glycine max
  Clone ID: PAT_MRT3847_137875C.1
ctggccatctcaggaacatcttagtaactggcgcttcaagtgcattacgtcatgatccgggaacactatcaaaactaggtatcaactataacacaatcacttgatcacctaagcacaatgactcaatacatggctagaaagccgaagatgttatacaatacacgactacacacggag

SEQ ID NO: 41942 - DNA, 165 bp, Glycine max
  Clone ID: PAT_MRT3847_137876C.1
caagatggttctgctagagaatctctggtatgactgattggctgaccctaaaggtgagggagatcttcgcaagctgagaatactcaccattctcaaagctattgatgaaggacacatgtatcaagttgcacaagacgttgtcgataccgtctacacccacaaccc

SEQ ID NO: 41943 - DNA, 1885 bp, Glycine max
  Clone ID: PAT_MRT3847_137877C.1
ggcatgggtcctaaaagagtaaagtgatgatttgcttaggcttggcagtgacgataacaatatccttcctaaaagagttttgaaacaaaaaggccaaggaccgtaatagtagaaaaatatctgggttattgtttttttattgtgcgtgcgtgccaccaaaaccctccacttgtttgctaagtttattttcattataccccttatcctcttctgaatctatcatgtgttgtgaaattctaatgtcctaaaaaaactcttatctatgcctatgtctctgtctctgtcaaccgtgcctgcggtccgattcccgggtcgacccacgcgtccgcactcactcactcactccttcttcttcggaaatgtctatcacttccctcaccatggccgagtcctgcctcctctcttctccctcctcactcttccacaccaaaaccaaaccctctctctttacacccccctccaaacccctcacactccaattttcatgcctcaactcctccgtctctctctccctcgccgcaccaactcaccgttctccccttgtaactttcgtggcccaaacttccgattgggctcaacaagaagaagaacagagcctcgctgaaaccgaagcgggcctggaaagttgggagcccaacggcgaagacgccggcgatgagagcttcgtcgaaccgccggaagaggccaagctcttcgttgggaacttgccttacgacgttgatagccagaaattggccatgcttttcgaacaggccggaaccgttgaaatcgctgaggttatttataacagggaaactgaccagagtcgcgggtttgggtttgtgacgatgagtactgttgaagaagctgaaagcgctgtggagaaattcaaccgctatgatatcgatggaagactgctgactgttaataaggcttctccaagaggaactcggcccgaacgcccgaccacctcgtcactcctttgagccttccttatcaatctatgttggtaatttgccatgggatgttgacaatacccggctgaagcaaattttcagtgaacacggtaatgttgtgaatgctcgggtagtctatgacagggagtcaggtcgatcacgtggctttggctttgtcacaatgtctgatgagacggaaatgaatgatgccgttgctgctcttgatggtcagagtttggacggaagggcaattaaggtgagtgttgccgaggacaggccaaggcgtggttccttttgagcgttagcatatgtagttccccatgtcagctgctggagttatcttgcatttttttaatagctgaggatatactatagtgtcaatttttgtttaaaggaaaatcctttcttggggcgccaatttcagattagatttaagtatttcgttgttattaatttaatgtccagatgaaagttaagttgtaattcctgactccggagattggagataagtaatactttgttgttgcctttaaaaaaaaaaaaaaaaaaaaaaaaaaaaaaaaaaaaaaaaaaaaaaaaaaaaaaaaaaaaaaaaaaaaaaaaaaaaaaaaaaaaaaaaaaaaaaaaaaaaaaaaaaaaaaaaaaaaaaaaaaaaaaaaaagggggggcccttttaaaggaaccaatttttactcccggggcctgggaagtataactttttttttggggcccccaaaattaaattccgggggccgttttttcaaccgggggggggggaaaaacccggggggtcccccaatttaagctctgtaaaaaaacccccttttcccggggggggaaaaagaaaaaggccccccccaaatccccctttctccaagtttccccccctaaatgggaagggcccccccccttgtacggcccttaaaccgcggggggtggggggggttccc

SEQ ID NO: 41944 - DNA, 1328 bp, Glycine max
  Clone ID: PAT_MRT3847_137878C.1
ctcgagccgctcgagccgattcggctcgaggcccatccttgcttctctctctctctctctataagtttaactttgctagctaactcaaaagcgtgtttcaaacctcaaactccaattataagccaccccatatagatctcttttcatgctaaacacacacacacgccatgaagtccaatccaaaatcaaaaacaccaccccacttattatactaccttctaataatcctctccttactgttcttcttcccgtgtgtatcctctacccaacaattcaaagaagcccctcaattctacaactccccaaactgcccctcaattgaacacaacatatgctccgaggaagccgtccacgtggcaatgacactcgacacgacatacatccgaggatccatggcggcgatcctttccgtcctccaacactcttcgtgcccccaaaacaccttcttccacttcgtgtgctcctccaatgacaacaccaacgcgtccctcctacgcgccacaatctccaacacattcccctacctgaatttccaactctaccccttccacgacgccgtcgtttcgggcctcatctccacctccatccgcgccgcactcgattgccccctcaactacgcgcgcagctacttggccaacctcatcccgccctgcgtgaagcgcgtggtgtacctcgactccgacctcgtactcgtcgacgacatcgccaagctcgcgacaacctcgttgggagaaaacaacaacgttttggcggcgccggaatattgcaacgcgaacttcacctcgtacttcactcccacgttctggtcgaacccttctctgtcgctaacgttcgcggacagaaaacagaaagcgtgttactttaacacgggggtgatggtgattgatttggaacggtggcgcgaaggggattacacgagaaaaatcgaggagtggatggagcttcagaagaggatgagaatctacgaacttggttcgttgccgccgtttttgcttgtgtttgcggggaacattgtttcggtggatcataggtggaaccaacatggtttaggaggggacaattttcgaggtttgtgtcggatcctgcaccctggtccggtgagtttgttgcattggagtgggaaagggaaaccgtggatgagattagacgctaatagaccttgtcctttggatgcactttgggcaccttatgatctattgaaaacctcattttctttggactcttgaacaaattttcaaatgtgaatttcggatatttgtttttttttttttatcagtagttacttttgttagtaaagaaaacaaatattacaatcaaaaaaaaaaaaa

SEQ ID NO: 41945 - DNA, 304 bp, Glycine max
  Clone ID: PAT_MRT3847_137879C.1
gatggatcaagttgtgggatcatttcgatctgctgctggatctggatttttctcaaccttgtaggatggcaagattgcaaaaggtctctctggtgatccagatgaaggtcccgtcttatatgttgggtatcacatgttgttggggttggagcttatctcacttacagatggatcattaagtgagaagggtattgcactatatggaataacccatcccgatctgtttatgcctgaaatggagtctaggacttctgagtttgctatgatcgattgggtgaagatatatggtggggtgcctgtttca

SEQ ID NO: 41946 - DNA, 904 bp, Glycine max
  Clone ID: PAT_MRT3847_13787C.1
ctctgatccagaagtgaggcgataagttttgaggttggtaagagggtgaaatccgaacccagcatcccccaacaaagtgaagaaaagagaagtaggctctacggttttcgcgagtcaaaatccgaatcagcaactccaatccaaaaccggttatccgaattgaaatttataaaaaagtatcaaataccccgtgtctgttagttaatcagagagagtagtgagccaaagctgcgaagttaaacttggttgcatgcgaagagcaagacatatgagaccaaactgcttctcatctccattcagattcaaaccttcaagctagacttttggaggatagcagtcccaatagtcctttagattcatccactcctagtaatactcaacagttgtcagaaggaaggcattcagttgacgatgtagctacagcagctgctggtgttccacagaatcagggtgcagttgtttcggaagaaaggattaaaaaacttgtatcaatgggctttgataggacgcaggtggaagtggcgctggctgctgctgatggtgatctcaatgtggcagtggaaatactcatgagccagcagggttgaaaaagaaagcttctcttggattctcaacgcgacctcactgacactgttaattgagtatgtcatggcgctttgttcaatcagtgtctctgtttaatctttggactaccactaacaattcgcacacacctgatagccatgctaacgccaattagcagaattgaacatatgtaaatgatacaagcaatgtttaggaatatgatgttagttgaagaaatagtaaacattttgtttagcttgattttttcccacttgaacttgtttatacatacatatatagagaatgcctctaatgccatacaatttctagatcattactt

SEQ ID NO: 41947 - DNA, 455 bp, Glycine max
  unsure (1)..(455): unsure at all n locations
  Clone ID: PAT_MRT3847_137880C.1
tccangacggtactaagtcggaatcggctcgaggnggannctnncncaccancnctgtacnctctngntnnccnttcncnccactnnnacggncnntnagnnnntnagttcnanagntacannacagcgtgtgtncggntanangacnccgtcnntnacnncgagnanantgaganaatgnctgaaaaaacggttataacccacagatgacncggggttgaaangtgattcgatggccaatacngccngttgnattccccanttcccgantggaggccaagacccctatatagattntctaccggctgtgggattggaggacgtcttacccagtaaacttttgtaccccgaccaaaactttggancccatggcaattttttcgnggnttagctnaaacttnttgagaatnggggtttggngccattttaccntcttggcggatcgngacnaaaag

SEQ ID NO: 41948 - DNA, 460 bp, Glycine max
  unsure (1)..(460): unsure at all n locations
  Clone ID: PAT_MRT3847_137881C.1
aattaatatactccttcattttcaatctgctcatgcccctatccattttcttacgtgtgatttcaggattcttcatattccaaatcatctactattagacttcttgattggtcaaatcctatatttgggtctgttcatattctctcatttcttgttctttctccgtactttacatacccttcataaaacattattaataaaaaacagttacttggtattcttttctggggtggttcttgttgttggttggtctcatattgctagcggttagatgaattctgtttcttccatgtgcgtttgatttccatttgtgaacatgggaaaacattggtctttcttccatattacgggtacccttttccttttgtgcaaagtctgtctagctgggagtcaatattctggacgtgtcttacccggngtattaaatggttctcaaatgaattggattgacagagatggc

SEQ ID NO: 41949 - DNA, 368 bp, Glycine max
  Clone ID: PAT_MRT3847_137882C.1
accacacgtccgaaaaaaaataaaaaaataaaatagaaaaaaaataaagttataattaaaaaaaaaaatttctactcagagttttatcggaaaaaattctgtcatatataaaagtaaatcttcgatttgttataaaaattttaaattcaaaagattatcgtgatataatcaaatgatcctagtgtgggaattgttagttgatacagttatagtgctgtttcatttccaattgatgttccccgcataagtgatcttggtgtcagtgtggtcatcacatttaaatattcatctgatgataaaagtcctaacgtaccttatattatgctcatgtaattgataatcatgttagtcatatgagatattaatgt

SEQ ID NO: 41950 - DNA, 399 bp, Glycine max
  Clone ID: PAT_MRT3847_137883C.1
aggggaaaaaatttttttcaaaaaaattttaaactttacccgtttaccgggaacaatacggggagtctgcctgcaaatggatccactagtctcaatccctttggagaggggaaaaaaaataaaagttttttttaaaagcccagttaagctcccaggggacccccaaaaatggcaaaggttaaggaaaagcccgggtcactttttcgggtttttcggttttttaacatggccagttcctgttgcaactttcttgtttgtttggcaacgggatttttttttttctttaaattttgttaagcaaaagagggttcaaagctttgcgagttttttgatgcgtcattttcaaagcttccttcagggggggggggagagatatatgcccctttcaatttcaacccc

SEQ ID NO: 41951 - DNA, 359 bp, Glycine max
  unsure (1)..(359): unsure at all n locations
  Clone ID: PAT_MRT3847_137884C.1
cggccgggagaacccgcggccgggacccaccgcgncggtccacgcgcccttgaaaacaaaacgcaaagcagaagcaaaaggggaggaagaacaggaaccccaacgagcgaccaagangcgggggcagcaaagaacaagagaacacggggaaggaaaagagccacaggaacacgagggggaatcggacatgccgactgagcaaaggggagaccactggaaaagggaacaacaaagcacggagagggagacccgggagtggaaagagagggcacaagagaacaagcgcggagaaagaaacaagaggaggatagagtcggcgggcagaccaaacacgcccaaggaagggcgcgaaggaagaa

SEQ ID NO: 41952 - DNA, 319 bp, Glycine max
  unsure (1)..(319): unsure at all n locations
  Clone ID: PAT_MRT3847_137885C.1
anganananantcnnatnngcgaggncgngcnctncgnncttcggctcnagggncantattttggggntctnntnnannntnngtnnncctanacagagaanngnntncgccattgnancaatggnggnnttntnngtccggtntgtntccnnnnnannngccnatgttancgggttctaggaanaccgnaatgatncnntnntcaagnntcgntggnttcntcntaggcnccgggnnactnccattttangatatgtgcangancgccnnnancaagaagggnaaancgagnntncntncagancatnaannanggnc

SEQ ID NO: 41953 - DNA, 387 bp, Glycine max
  Clone ID: PAT_MRT3847_137886C.1
ggaatcaagaaacaaataagaacaactaatttttaaaatgactttaaaacgacacaggtgtgaaaacaatacaaaggcatacacaatgaggcacataccagccaaaccaaacttgctaaaatagaagatactcatcacacgacaccacaaacatgtgacacatgaaaaacatgtttattgagccatatgctacaaaaaggcgggctatttatggatgctacacccattctagaggacacaagctggtgcagcgttgtcccctccaagagagcttaaatctaagcaacaatacgcattcacctacgtatctcacaaaagagggacaagggatggtatgcccacatacagactaggcttaattgatgaaaatactctataacaaagatt

SEQ ID NO: 41954 - DNA, 350 bp, Glycine max
  Clone ID: PAT_MRT3847_137887C.1
caagacattactatgttatgcaacacagtacctggtgccacttgaggaagtttttcagactctgaggtgtgattcaaatggactcacaatagcatctgcagaaaggctttcacattccggcaaggataggattctcgcttcaatattcacaaaattgaagttactgtggctctttcatcaaccaatgattggaaactatttgttttttgttattcttatatgacaaataagtcattgattcttactcaatttttgttgctcgagattatgcatttttttattatcacttttgtaaaataaacaacctattcttcgcttatagtaatagcagattatattattggttggtg

SEQ ID NO: 41955 - DNA, 478 bp, Glycine max
  Clone ID: PAT_MRT3847_137888C.1
aacacagagaacacacaaaacatcattacatagatagaaatatatttacatcaagtacctatagggaagatccaacagaggatttagttttccatggtccagaaacctcctttacaacacagagaagaacaagattttttattgcaaaaatacaagtggtgaggatgtctccttcacctctaggatctcacaatcactcataaactcatctcaagttcttagaatggcttcctctttgagctctcgtctctgcaaatcttcacatagcaaaatctctcaaaactctctggaacttggacctttctctctctagaacttcctaaacatgcaaaagcttcaggccaaggctaaaatctcatgcatgctgaggcttcttcaagaaaaatgccaaactcccgcaaaaaatatgatttcaagcttaaataggtgggttggtccgtgctcgcgtgcttaacacaaatctggatcgcttagcacg

SEQ ID NO: 41956 - DNA, 434 bp, Glycine max
  Clone ID: PAT_MRT3847_137889C.1
cagaaaataaaaacttttgaagctaatttgattaaagacattaagaacttttccccattgaagctgttatgaaacggccccatcacttaactaatggcacatcttgttaatacaccacttctcaacccatgttatcacatactaacatttttatttcgggctgcaaaacacgattatttgagcggattacatttagcagggatagactttataaccaaagataattccctgaactaatggcacatcacttccttatttggtggcacatgcctaacgcacatatggttgatgccacaagttaattacccgcctcaggggcagcagctgtcatgttctttctaacaaaggcgccaccaattttagttccatttgtaggtatgttcgcattcactataccacaatctactacttggtggtccacttcacttgaatat

SEQ ID NO: 41957 - DNA, 349 bp, Glycine max
  Clone ID: PAT_MRT3847_13788C.1
tgatgaacctcaaacaaaggttcagacacgcaaacaattccttgcactgtatcaactatcaaaaaatgtatggtcggtaacagaagagccgcgtgatggaaagaaacacataaattccacacctcaagcttgttaactacactttctctctttctttttcatcaataataaattttaatcacaatattagtatttaaggagccaaaataacaatgcgctgcgcgaaccacataagaacaacacgtagtacctaactatatgagtgaacagttgcaaacgatttttctgtctaacttggatgatgcacccgctacacagggtgctcgtgaggcttttaaggatactcaac

SEQ ID NO: 41958 - DNA, 249 bp, Glycine max
  Clone ID: PAT_MRT3847_137890C.1
atccaactctctttctccctatcccaataatctcactcatacctcttcagtctaacaaacttagtttcttttgttttgagtttcttagagaatggatgataagggagcacgaggtagcaacacccttttaagttgtgaggacgagatggaccttcgaagaggtccttggatcgtctatgaacaccgcactcttaacaattacattgcgacgcatggcgagggtcgctggcataggctggcggtctctgc

SEQ ID NO: 41959 - DNA, 334 bp, Glycine max
  Clone ID: PAT_MRT3847_137891C.1
aattccactcctatccaccttctaaacctacttctacatcctcgacaactgataattttcatcatccttacccaccccaaccacactccactcataactctcaacccaatccctctactaaaatccacactacactaatgccaactcaactcaaactcaccatctaatcccaatactcctactcaacctaataccaaaactccataccatcccaaacccaccactaaaccaacaactcctcatccatctacttacaatcccaatcactcacactccaaacccaaacggactaatcccactctcaaacccacacccaaccccacttcttaaacaa

SEQ ID NO: 41960 - DNA, 914 bp, Glycine max
  unsure (1)..(914): unsure at all n locations
  Clone ID: PAT_MRT3847_137892C.1
gaggttaatttttgagnnaagcaacttctttcctcttccttacacattttcttcgctacccagtacccaccatcaaacagaagaaaatatatctacccatttttttttttcttctcattttctctcatccactcctcgcgatctagatttttttttttttttgttccatcaactctacttacattagtaaaactatgcgcatgcgtattcctctaaactctgaaccgcataaaactaacattatcattcaaacagaaatactaaaagcccaagtatcacattgtatagcccccccgacaaacactggcttattctggcagctgctggaaattcttgtttggtacaaagcattagagaagctgccagaagaaacctctatataaatacagaaggacccatcatagcaacggcacaaaaatatcatgacttcgtccggggagaaatggtatacataaaaaaatttcaaccagagctctcatgcgccaaacatgttcctcccactcataagctgttccataaatcattggttactctttagtaacccacctacggcctctaatctggtagccaccaaaaccttgatcactactgctctctcctccactctctgcacttgtatatccagatttccggcggtgcttcttcaccctcaacatcccactatcgctgacactcccattcaagagggggtcatcgattccccgaattactctccttgcaggtgatgatgaggcaatgcaactatcatccttggttcttcttccatttttgtcatgcttcttcatattttcggagattctgtgtagtttttcgttgaatctagtgatacccttttccacaggctccactgcttgatggacagtgaacttcacatcttttacaatatatccaccaccaccaataacaacatcacg

SEQ ID NO: 41961 - DNA, 330 bp, Glycine max
  Clone ID: PAT_MRT3847_137893C.1
gggaaaaactaaccgatttaacgtttactgcattaaaatacccaccacattaaacctatagaatcaaaacggaatgattcttatttcacaatacaaacctattcctttacaaggatctaagtttatttggtggtatagccggggtcggccaatggcaaaggccttggacttcacttttgaaaataggctccctgtctgccctgaacatttacaccaaatgataaatccctcgtcttatgccaatcccttgggaaactcccccttgattaaatcaaccattttggcaggaccttatatgcttcaattgccaatgaagacagaatttccgat

SEQ ID NO: 41962 - DNA, 526 bp, Glycine max
  unsure (1)..(526): unsure at all n locations
  Clone ID: PAT_MRT3847_137894C.1
tcctctagagcggncgcccttggtttttttttttttaagaactaaaacagtaattaagtttatatttataatttatattgttattattactcagacatcaactagtgacaaattagaactttgtggtcactgtaactctccatcggtccatctactcaacttctgaatgggccatgatgatggacggaaacagttgaagcttggcccactaagagtccatcttttatttatagtagacctcacactataaagggaaactttcggcagcaagtggtgtccaatgctgttgcctgcctgttcagaaagggaatctccatatgaaatgaagagggttccccacaaaaaggaaactcacaaccaccattgttggggtttggatttttcagcatgctctcttttgcttcgccattgtcatggctgttacttcctgcacctccaagttgctttctacatcctttctggagtgtttttatttttccttctggattgatcattccagaagtcaaaaaaggagtgcattctggat

SEQ ID NO: 41963 - DNA, 346 bp, Glycine max
  Clone ID: PAT_MRT3847_137895C.1
caatgcttcaaaatatgctatctttaaaattggagattagaacataagcctgcgatagaccataaaatttctgacctttcagcaccatttcatgcaatgctaaaggcgtgttccagggaatcactctctgagactatagatttgtctgaaaacaatctcctctacttcaagcatgatggcaaatccgtatcattagctcgacatggaatttacccgatgtccattccaatctttaggcggaaacattagcaattgctaataaagtattgtagccaaagactaaatcaggctcgaaatagaagacttgcatccttagtatcctccagaaaagacgctctggaactca

SEQ ID NO: 41964 - DNA, 252 bp, Glycine max
  Clone ID: PAT_MRT3847_137896C.1
atttatttatatggattattgatgtcttattacaataattctacgataaaaaataatttagattaaaattataaacaacttatttctcattatcataatctttatcgtaataacaagtttctaatttttaatcaagatcttgtcaaattaacaatttaataaaataaagaacaatttttttttactaaaattaataatatgatgaattgaatcttgaccatacaaaattatccccaacaatataacataatc

SEQ ID NO: 41965 - DNA, 121 bp, Glycine max
  Clone ID: PAT_MRT3847_137897C.1
cggacgcgtgggtacaagtcaatctaccttatgatgggttgtcatctcggatgactttctcattagtttgcatatagttggatacttgttcatgacagtgaccgttcttatacaacctaac

SEQ ID NO: 41966 - DNA, 347 bp, Glycine max
  Clone ID: PAT_MRT3847_137898C.1
cggctcgagggacaggaaacgaagatcacaagaagggtttggtaatttgtttgattagctacgggttgttatgatttccaaccatgtaattccccacaaccaggctcaccgaagttgcaatttcaatccattttcatttgccggtacacaataagtcatgattccctcccgcatttacccttgtttgtgtaaagtactaccagaatgagactaggtatcatcgatgggagggtacatgggcgatgacgagtaagattacctcctcatgctggatctcatcggagattccggtgtcggtaagtcgaacctgctttcgcgcttcacgagggaggagttccacttggggt

SEQ ID NO: 41967 - DNA, 947 bp, Glycine max
  Clone ID: PAT_MRT3847_137899C.1
gaatctcgatcctttggcctacactgtagccttacaggggataagaatcggagaaagaaaactcaacatctcgccggcggtttttcgtgccgatgctggtgggtcgggtcaaaccatgcttgactccggatccgagtttactttccttgttaacgaggcttatgataaagtgcgggctgaagtagttagggctgtgggccccaggatgaagaagggtaacgtgtacggtggtgttgcggacatgtgtttcgatgggaatgcgattgagatcggacggctaataggggacatggtgtttgagttcgagaagggggtgcaagtagtggttcccaaggagagggttctggctaccgtggagggtggggttcactgcatcgggattgcgaactctgataaattgggtgcggccagtaacattattgggaatttccatcagcagaatctgtgggtggagtttgatctggtcaatcgcagaatgggttttggtacggctgattgtaagtagattggctaagtagaatgggggaaacgttagatatgtgttggtgcatgtaacttgcgtgtgtcagctgttggtaactagagatttttttgtaccaagggaatatcaacgtgtcacgtgtgtgatcaggcatatgatcatgatgatgtggttgaaatccaacggtccaagagcgaggaagaaaaagaaagttctacaactgttgccatgatgacgccaactgcttttggaagatgtgtgaaggcacacaagttatatcttgtacactgagagactattgtatataatgaggattaattagaggatgtgtattatttacatatattaattaatatttaatatatatgaaccattgctttgttttttgagatataatataataatgtatacgagaatgtgaatgtccaaaaaaaaaaaaaaaaaaaaaaaaaaaaaaaaaaaaaaa

SEQ ID NO: 41968 - DNA, 3490 bp, Glycine max
  unsure (1)..(3490): unsure at all n locations
  Clone ID: PAT_MRT3847_13789C.1
cgagcatgaatcggtactatgtttgtgttccattgtttgtgtgcttggtattggctattgaacttgttgtgagcggaggatttccagcctacagataagatcttgctgaattgtggtggccctcctagtagtactgatactgatggccgtgaatggaccacggataatggttccaagtttggttcctccaccgcaaaatccgccacctcaccggcggcgacacaggaccctgccgtccctcaggtgccctacatgacggcgcgtgttttccacgcaccgtatacctatacttttcctgtggcttctggctggaagttcctccgactgcacttttactccgcttcttattccagcctcaatgcatcggatgcgctgtttgctgtggcagcgaattcctacacagttcttaggaacttcagtgttgctcagaccaccttggctttgaattatgcctacattatgagggaatttgccatccatgtggaaggggagagcttgaatgtgactttcactccatctaccaatgcctcgaacgcttacgcttttgttaatgggattgagattgtgtccatgcctgagatttatacttccactgatggaactttaatgatggtgggttcaaattctcctttccctattgataacagcactgcacttgagtgtgtttataggttgaatgtgggtgggaatgatatctctccctcccatgatactggtatgtttaggtcatggtctgatgacatgcccttcctctatggggctgcatttggagttaccgagcctgctgatccagatgtgaagtttgagtatcctccgggcacgccaagttatattgctccacttgatgtctacagtacggccagaacaatgggcccaaatcccgagatcaacacgaattacaacttgagttggatcttcaacattgattctggattttcctatctcgtgagactccattttgctgaggtatcatcaaatataaccaaaagtaatcaaagagtatttgatatattcctcaataatcaaaccgctatgcctgaagctgatgttattgcctgggcaggcgaatttgacctttcacattctaatggggttccagtgcataaagattatgttgtatttgttcccaatggagaaccacggcaggacctgtggcttgcattgcatccagatgaaactaataagcccatgtattatgatgcaatcttgaatggagtggagatattcaaaattaatgatactgcaggtaatctggcagggacaaatcctattcctcctcctgtgcaagacataattgacccatcaacggctagagcatctcatcatggtaaatcaaagaatcatacaggcataattgcaggtgttgctggaggagttgttttactacttgtgattgggctatttgcttttgctgcatcacgtcgtcgcaggcaaggaaaggattctggtacaagtgaagggccatctggctggcttccactttctctttatggtaattcacactctgcagcttctgccaagaccaacacaacaggaagctatgcatcctctctaccatcaaacctttgtcgtcatttctcatttgctgaaatcaaggctgccacaaacaactttgacgaggctttgcttcttggtgtgggaggattcggtaaggtttacaaaggagaaattgatggtggaacaaccaaggtagcaattaaacgtgggaatccactatctgagcagggggtgcatgagttccaaactgagattgaaatgctctcaaaacttcgtcaccgccaccttgtttcactgattggctactgtgaagaaaacactgaaatgatccttgtctatgactgtatggcctatggaacactcagggagcatctgtacaagacccagaaacctccacgtccatggaagcagaggcttgagatatgcattggagctgcccggggtttacactatctacacactggtgctaaacacactattatccaccgtgatgtgaagacaacaaacattttactagatgagaattgggtggctaaggtttctgattttggactgtcaaaaacaggtccaactttggataatacccatgtaagtactgtggtaaagggtagttttgggtacttggatccagaatacttcaggaggcagcaactgactgacaaatctgatgtttactcgtttggtgtggttctctttgaggtattatgcgctcgcccagctttgaaccccacccttgctaaggagcaggtgagtctggctgagtgggcagctcattgctacaagaaaggcattcttgactctatcattgatccttatctaaagggcaagatagcttcagaatgcttcaagaagtttgccgagactgcaatgaagtgcgtggctgaccagggcattgataggccatccatgggtgatgtcttgtggaaccttgaatttgctttgcagctgcaagaaagtgccgaggaaagtggcaacggctttggtgacattcactgtgaagtggagccattatacacagattctaaaggaaaggactccaatccgggttatgatggtaatgcgaccgactccagaagcagtggtatttcaatgagcattggaggtagaagcttggctagtgaagactctgatgggctaacccctagtgctgtgttctcccagataatgaatccaaaaggtcgttaaggttatgcagcagtaacaacactttcaatacatacacagtcaacccactcaagttctgtagtacaatctgctttcaccaaatttgaatgttactcgttattcattttcttaatattgctattcctttgtatgttgtttctaattttttatgattatgtaagttgtaatttgtgaccatgttatataaagattgaagagcaaacatgttgttttgctttgcagctgcaagaaagtgcagaggaaagtggcaacggttttggtgacattcactgtgaagagccactgtacacagattctaaaggaaagaaggactctgatccgggttatgatggcaacgtgaccgactccagaagcagtggcatttcaatgagcattggaggtagaagcttggctagtgaagactctgatgggctaacccctagtgctgtgttctcccagatcatgaatccaaaaggtcgttaaggttatgcagtagtaacaacactttcactacatacgcggtcaacccactcaagttctgtagtgcaatctgctttcaccaaatttgaatgttactcgttattcattttcttaatattgctattcctttgtatgttgtttctaatttattatgattatgtaagttgtaatttgtgaccatgttatataaagattgaagagcaaacatgttgtaacgaggttgttatttgaattttttgaaacccctttccatccaagattgataagagacgtgaaaggcaaataataagtgtttctctctctcttttttttaaaaaaaaaaaaaaanaaaaaaaaaaaanaaaaaaaa

SEQ ID NO: 41969 - DNA, 343 bp, Glycine max
  unsure (1)..(343): unsure at all n locations
  Clone ID: PAT_MRT3847_1378C.1
accccaatccaatggactgagaccccaatcctaatctgacccggccaagaacttagctggtgtgcagcccatcacatgaaaggggaagggagcgttgcgagctcaacgtgactacactgcatcatccaatacactaattatggtggcgtgtacaacccagacgctatgcgctggaagggaaggattggatccattacctaacaagacagccactgcacggctaaacctagacgggagggactgaagctagcatactggacaccctactgtgttgactctagcttacaccacaccctgtggagctgatcggcacatcataggattgggggtggggttgnnnctg

SEQ ID NO: 41970 - DNA, 2433 bp, Glycine max
  Clone ID: PAT_MRT3847_137900C.1
acgcgacccatcactgtgtgtttaacacacagcagaaaagaacaaaccgcaggttcttcctaatcgaaacggttccaaagtagtgaataaacaaattctcgtgcctagggttttcccttttcttcgattcacactcccagagcgaagcaaccgtcatgggaggaggcgaggagaagcgacaccagatgatgcagaacctcttcggagatcaatcggaggaggaggaagagctcgacgtcgattccgagcacgaatcgaacccgcaacaaaattacccctccgacgagggggagggggtgggggagcaggagggagagggcgaggtggagggccagggggaggtggagatcgagagcgatggcgacggagatggggagcccgaccgcgagagcgagggcgagagggagcagagctcgcaggaggtggaggtcgtggagagggaagaggagagcgaggggagagactcagatagtgacgtcaaggacggcgggtacagccagcgcggcgtaacgagcaagcggagggacgacttcgtcgagagcggatccgaggagaatcagtatgctcaccatgatgacggggaagaagaggtcgacgaagccagaagccctagtgggtcacccagggatgaaaaagatgagactcgggacttgcattcagccccagaaattcgtgatgtgtttggtgattttgatgatgatgaagaggaggaaatggggtatgcaatccagcaggacattgaacaagattcgaatagatacgctgtggaggaggaagggagttatggaaagaatctgagacctgaagatatacttgctgatgaagatcatcagtatgaatcggaggaggaaaacattgagataaaaactaaggagaagccacttggcccccctttagagttagaggttccgttacgaccacctccagctcttccagaaaagatgcacatgattaaagtttccaatattatgggtgttgatccaaaaccctttgatcctaaaacatatgtggaagaggatacttttgtaactgatgaatctggaaccagaaaacgcatacgtttggagaacaatattgtacgctggaggactactagaaatcctgatggcacaacatcttgtgaaagcaacgctcgctttgtgagatggtctgatggcagcctgcagctattaattgggaatgaagttcttgacatatcagtacaagatgcacagcatgatcaagcacatcttttccttagacatggaaagggaatcctccaatcacaaggaaggttattaaggaaaatgaggtttatgccatcttccttgtcatcaaattctcatcggctgctgactgcccttgttgactcaaggcataagaaggcttttaaggttaaaaactgcattactgacattgatcctgagcgggaaaaaaaaaaaaaaaagtagggtgactcgcgaacttgagcttgtactagccttcttgaccgcaaggaagcggaaatgaatcggaagtatactccagctgtggagaggaggcgtcaactttctcctgggtttttagaggatgctttggatgaggaggatgaagcggattattatgataatcgtcgttctcagcatcgctttgaggatgatttagaagcggaagcccgagcagagaaacgaattatgaatgctaaaaagtcgcagggacctaaagatatccctcgtaagtcttccttcccacctgctaaatcctctcggaacccaatgggttacccagatgatgagagagaggagtctgagtatgaaactgaggaggaagatgagaggcctccttcacgtaagagggatgaggatactgagccagagtatgaggatgaggaagaagaggaagaacactatgaagaagctgaacaagttaatgatgcatcagatgaggaggaagaggaggaaccaaagcagaagaacaaggagtttagaggcagtgccaaaaggaagggatttgaatctgatgaggactctcctccaaggaaaacaaccacccatcggcggatggcggttgtgtacgatagtgatgaggactaaacttccttaagctagattttcatgggaagtgcagctatctgatgcagcaaaggcagagatggctcttagttccccccatatatagctacatttttaatatttcatccttatatacataaagcagagcctgggacactaaagtagtgtttattctcaggtcacaatatatgtttttttgactgtcttgttaatggtgataaaagaaattcagtgtaaataagtttgtttttctgtattttccgatcacaaattttcgtccaaggggcaggtaatggttgacaagtgccggacctaaggaacttgttcaaggtccttcccttttttactttatcaaatgtatgatgtcattactttgcaactttatatgatagtaacattttag

SEQ ID NO: 41971 - DNA, 3794 bp, Glycine max
  Clone ID: PAT_MRT3847_137901C.1
aaacgcgacccatcactgtgtgtttaacacacagcagaaaagaacaaaccgcaggttcttcctaatcgaaacggttccaaagtagtgaataaacaaattctcgtgcctagggttttcccttttcttcgattcacactcccagagcgaagcaaccgtcatgggaggaggcgaggagaagcgacaccagatgatgcagaacctcttcggagatcaatcggaggaggaggaagagctcgccggtccggaattccctcgacccacgcgtccggcaacgtgcttaccccttttgttccgaatttagagagaaagaaaacattggttaaagagaagcggtgcaagaggagaggaagaagagaagaggaggcggtgcgcaccttagcatggattcctctccgtcctcttctctctcctctctcgcttcgtccccacggcaccaacatcctctctccatttgagaaaggcaccgattcccattctcattctcactctgcctcacatattgccaacccttgcttctctctcttccatcctcaccaccgatttcactttcaacaataagaacaataaggccagggtctgcttttgattccgccacgtcaaaatgttgtggctcatgagattctcgggcttcttctccgccgcaatgctcgtcattctcctctccccttcccttcaatccttccaccccgccgaagccatccgctcctcccaccacctcgacggcctcctccgcctccctccgcctcgcctttccttccgccccgcccctcgtttccgcaatgccgccgacgccaacaaatgcgcctcctcctccgtctccacctccgtctgcgacccctccctcgtccacgtcgccatcaccctcgacgtcgagtacctccgcggctccatcgccgccgtccactccatcctccaacactcccagtgcccggagaacatcttcttccacttcctcgtctccgaaaccaacctcgaatccctcgtcaaatccaccttccctcaattgaacttcaaggtctattactttgatcccgagatcgtccgcaacctgatctccacctctgtcagacaagccctcgaacaacccctcaactacgccagaaattatctcgctgacctcctcgaaccctgtgtcgaaagagttatatacctagatttgctaaaattgctatgctatgctaagctaagctggaaagaaaaaaggccctctgagtgagtgagagtgtgtggttaaagaggagaggaagaagagaagaggaggcggtgcgcaccttagcatggattcctctccgtcatcttctctctcctctctcgcttcgtccccacggcaccatcgtcctctctgccaattgagaaaggcaccgattcccattctcattctcactctggctgacataaaggcaacccttgcctctctctcttccatcgatttcaatttctacggcaacaggaaaagcaaagaagaagaaggccaggctctgctttggtttccgccgcgtcaaaatgctgtggctgatgagattttcgaacatcatcaccgatgcaaatctcgacattatccacactacggccaggcattgcttataactcggcgaagtcaacggatcctggcaccaaatagaccccgtcgtcagcatgaccacactgagcctcaatgtcatcgccccgtcccaccggaacaaccacgccgaagaagcaggccaatcctacgatcaccccgacggccacgaccgcgaccaaccacagcgggagaacaaccacgccgtagccagtgtccgcagggccagctgtgacgctcaaaagcacctccttctcaggcaacccccccgtcatcggcgcatcccgtttctagaccccaatgacaagttctaatctagcatcaactagactttcacgcgatggtcatctatctgatgcaacaaagacagagatcgctttcacttccccacctctacctctgcctgacaagcactcgatcatcccctcaataacgccaaaaatttcatcgcagactacttctaatcctgtgttaacaagatttggtacctcgactgcgatctggttctcgttgacaacattgccaagtactggagcaccagtctaggttctagaaccattggcgcccccgagtactgccacgccaacttcaccaagtacttcaccgcagggttctggtcggacatgcgcttcgccagcgcgttcgcggggcggaggccgtgctatttcaacacgggcgtgatggtcatagatctggtgcggtggcggaaaatcgggtacagcaagaggatagagaggtggatggagattcagaagaacgatcggatctacgagctgggttctttgccgccgtttctgttggtgttcgcgggacgcgtggcgccaattgagcacaggtggaaccagcatgggatgcgtgaagaataacttggatcggagtgagcgggaccttcacgctcgggtttcgggtctgtggcacgcgggacatagtggcgccacattgagcacaggtggaaccagcatgggttgggtggcgataacgtgaaggcggagttgccgggacctgcacgctgggcctgtgagtcttttgcattggcccgggtgcgtggcaagccctggactcgattgcactccatcaagccatgtcagcttgattccctctaatctttatttgttcttatacgtttccgccctcttctcttgtctttacgacgacgggacatatcacacatttttctttatgcaatttttttagtcttcgttaccaagcccatttgtattatactgattcttctattttgtgcttcgtgctctgtatataaataagataataaaataagatactaactataactactaaaaagacactgggacataaagataatcatcgtaatgtcttccttcccacctgctaaatcctctcggaacccaatgggttacccagatgatgagagagaggagtctgagtatgaaactgaggaggaggaagatgagaggcctccttcacgtaagagggatgaggatactgagccagagtatgaggatgaggaagaagaggaagaacactatgaagaagccgaacaagttaatgatgcatcagatgatggggaagaggaggaaccaaagcagaagagcaaggagtttagaggcagtgccaaaaggaagggatttgaatctgatgatgactcttctccaaggaaaataaccacccatcggcggatggcggttgtgtatgatagtgatgaggactgaacttccttaagccagattttcatgggaaatcctcctttttattcagaattgtaaggaaggatgtgcgtagggtgcagcaaaggctgagatggctcattcttttttttcctctccttatatttcatccgtatatacatgaagcagcgcctggcacactaatgtagtgtttattctcaggtcacaatatatgtttttgactgtcttattaatggtcataaaaaactatcagtgtaaataagtttgttttctgtattttccgatcataaattttcgtccaagggcaggtaatggttgacaagtggggaacttcttcacggtccatccctttttactttctgaaagaatgatgtcgttactttgcaactttatatgatagtaacattttagatttctttagctaagaataataattaaaaaaacctacaaatttcaggttttaaaagaaaaaaaaaaaccaatgttttgccgtgttttaaaaaacagccctgtccgcttgatgcactctgggctccttatgatttgtacggccacgctcactgatttgg

SEQ ID NO: 41972 - DNA, 1174 bp, Glycine max
  Clone ID: PAT_MRT3847_137902C.1
tcttttacattgttgatgcatatagtatttatttaattcaaatatgacatttttttagtacacattgttttcaatgcccccatgctgactggttttactctcattttttgttgggctgggaacctactcacgcccctcaggattggggtgcataggggcattctaatcatggatggtgtgtgtttgcaaaatacatggagggtggatctgttcatgacttgatgatgaagaacaagaagcttcagactaaggatgttgtgaggattgctgttgatgttgctgaagggatcaagtttatgaatgaccatggtgtagcatatagagaccttaatacacgggggattctgttggataagcatgggaatgcttgcttgggagatatgggtatagtcactgcctgcaagagtgttggagaagcaatggagtatgaaactgatggttataggtggctagctccagagataattgcaggggatccagagaatgtgacagagacatggatgagtaacgtttatagttttgggatggtaatttgggagatggtaactggtgaagcagcttattcttcattttcacctgtacaagcagcagttggcattgctgcatgtggccttcgacctgaaatcccaaaagactgccaacaaactctaaaacacattatgacaaagtgctggaacaacaccccttcaaaacgtcctcacttctctgaaattttagccatattgctgcgaccaaacaacaacaatagataaatttctattctatatataacaagttcatggataaggaaatgataacaagtccatggaaaaacatgaatccccgccatatgcttttatggcagtaatgaagatgtaaattttctgcttttcacaatcttgtatttactatcatctcttcccattatcataaaaaatcgaaatgcctgtcatcatcaagcaactacaataggtaaacttcttttgtgttgatagtgatttgataccaaagaaagatcccattctcaagggatcttcatatcatagtttatacgtaaaacatgagtcccccatgcttttataacagtaatgaaaggtgtaaagttttcctttttctttttctttttctttttgacaatttgtaccatcatgaatctactattttttctcttattatgatgtcaacttgaatgatg

SEQ ID NO: 41973 - DNA, 233 bp, Glycine max
  Clone ID: PAT_MRT3847_137903C.1
cgcaccatctattattccccatctgaataagctcacacgtacatatatcactccccccaaacccacaccggtttattctctcaaatgggtggggagcgggattcctatagctcaagccttcactaattctcatgctttatttgactgctactgttaaggaaacctctccatccaccaaaccctattatcatcatttatgtgttatcaaaccaactgcaactaaaccttatact

SEQ ID NO: 41974 - DNA, 159 bp, Glycine max
  Clone ID: PAT_MRT3847_137904C.1
ggcgcgcgtccgatgacaacttgtatttttccgttctacgattcagtaggatcgcatgatcttgagataacagagctagttgtacctaatcgtacttgacaaaggagatcaaaccttgttatcaagatgaaccacacttattcaattagtgcataatac

SEQ ID NO: 41975 - DNA, 374 bp, Glycine max
  Clone ID: PAT_MRT3847_137905C.1
gacttatgaacccagtttttggacaaattggatgggattatattaatgggaacactatcctagaaaatccctacccaattacattaggaggtatctgtataccttgtttttataaattcacccatctatttttcactgcttaaatataaatattagctgaatatgaataatattcatataaccggtttatttaacgacggctgatacaaattctggactaaacacgagaaaaatcttgtcttgacagaagaggaaaagatggaagtgaatagaaacaaatgcttttcctgctgatgtccttgcaaagcgagctcattaatttgaaaaacatgttgctcacgaaagtcttatagataaaatccctgtttatgaca

SEQ ID NO: 41976 - DNA, 1412 bp, Glycine max
  Clone ID: PAT_MRT3847_137906C.1
gtgctaatcaagttgttaaagcagcctcaagggtgtctttgacaaatggtgttgtctctagttcccagacatttggaaatgtagctgtatcgttcctgttgtaccaagagcagaacaagggatgtggtttctttatccatgtcagatgtgatttagtgtccttctcatttcaaatatatttatttttaaccccttatggtgatctatcttagattgggaaaagaattaatttctccatttttatccttggttaaacctatatgtcttctcatgctcatcaagtaagaaggattttaatcagtagtgtccccattattgctctctaattgattattgagttgtgggaaccaaatgtgtaaatcagttgctcaagattaacacttagtgttgtgacttcaggaggcggtcacattacaccagaggtgcagagattagttgtccatttgtgttcttcaaattttcaactgacaccaacagcagtcaattgtcgttgaattctatggccagggagtttgacatgcacttttggaaaccctactggcagtgtaaatcgaccgggtaagaatttttgatgagtactttgtagtatgacctttgtacttgtgtcgctgtctattataaggggatgaaaatagaagaaaaaatattaaacatactgtataatgaggtcgatagtgtaaagatgcttcatacacaaacacaatattatcctaagcactagttttgtttgtgtcgatgtggatggtagtaaatagtaattatctgtgcctaactattgtgtaactacccagtttgtaattgttaaaataataacaagaaatgggtaaggatcatcaattccacaaaagaagtaggtcatggatggaagttgcatcatattcatatttgttctgtatgatgcttacatttaatttcatgtttatgaaatgacaggaacatttctttcaagttgtctttgttgaagtcattcttcattctgtctgtgaaactaaatgtaacagaaacttgtacctctgtcattgacattttttatgaatttaatttaaatgcactaacactaattaaaaaaaaattatattatcatccaatcatatttcattatggcaatgaaaatctttacatcgatagtgtatgaaaattaaactgttttatttgtttactcaccctgctggctttctttgtttcacattagattttagagctgttgatgcgtgggttggttgggtttaattgttttaggaagctttcggtcatattctctgcctctgcaatcattcgatgatggttttttgccagaaaatcaacgattggttttgtggattgtcttattgagtattctattatagacttctattaatgagttagactacgtgtacttaactacttataataatgaagcattacgtttcttt

SEQ ID NO: 41977 - DNA, 231 bp, Glycine max
  Clone ID: PAT_MRT3847_137907C.1
gcaagcacaatggacaaaacaagatatgagaatgccattaaagtttgtgctttagataaagatattgaagactttagccatggtgatcttacagaaataggtcagcgagggattaacatgagtggaggacaaaagcaaaggattcaactagctcgtgcagtctacaatgacgctgacatctatctcctcgatgaccctttcagcgcagttgatgctcacactgctgctatt

SEQ ID NO: 41978 - DNA, 423 bp, Glycine max
  Clone ID: PAT_MRT3847_137908C.1
cagaaagcgacaggtcacggacataatgacgggatcaacaccgagaccatctgtttggcgctaccagcacccattttttggtcgcaacaccagagtatgggtacacgcggataccaccacaggtcgcgaaacatattgtaaaacggccaggtcctctgacaggcttaaacgccgtcggtgacatgactagacagtacacccgtggcataacaacaacaggaagcagcatatgaagaggcgagttccatgcgatggggaacaaaccgaagagagccggatgaagaagcattaccaaaagaaggttctagaacatgaacacacaacaacaccagcaacgcagatgccgaaggagcgggagcaagagctaggatcaacaacaattcagcggtccaatgacgcgcgctacacccgccacgctcgcga

SEQ ID NO: 41979 - DNA, 517 bp, Glycine max
  Clone ID: PAT_MRT3847_137909C.1
cctaacaaagaaaccgtattgctttccaattaagatgcaataattaattcaattccaatgcagatgagaaaggcatattgtgttgaaacttttgatgcaatggcatgttaacctatctttacgaaaatgaatttaaattgtcagttatgtttgtcaataagatattgcattcgtgtgataatgggtttgctgcacatttttgatacagcagtatggagggattatcccgatgtaaaattgcttgaaaataactccatgagagtatcagcattcagcatgttcaaaaaatcgacctactagctcaatgcatgcgcagttacaaaactaagatagcgatcaaatagttagtcgtactatacgggagtcctatccaagctttttccattccatgaatcatttccttcagaaaaatatagacgtgattaggggattctcttttcaatagattttctataaatctatggtcgatctttttaccgccatcttcgaatattcttatggtccatttgtatgattt

SEQ ID NO: 41980 - DNA, 599 bp, Glycine max
  Clone ID: PAT_MRT3847_13790C.1
gcacttggtggcaatcgtgatgtggcaggaagccagaacagccttgagatcgatggtttagctcgctttgctgttgaagaacacaacaaaaaacaggtttttctttcttttttcccttaaaaaagatgaaagaaaatgttaattatgtgttgtattgcattgtttgcttctcgagaaattcctatgatttgttttgagttgttaatttgtattgggtcaggccgatgatcggttttggccatgttaacgtttcttcggaaatgcacatcttgaattggattctctctctcttttcttttgtcttatgaacaattattggcttttggaattttagtaatgggatagtagatagttgggtaagtctattattagaataattatgagtaaattgcactgatatctattgtggtttattgagatcgcacatactctttttttaaaaaaaaaatttacagccttcctgcaccatagtaaaatgtgttagagatgccaatcttttcaaacaattcagggagatagtgtatgggtacaaaaagaaagattgttgaaagaaattcgacaaaactacaagagtgttagtgtaatttacttatatatat

SEQ ID NO: 41981 - DNA, 447 bp, Glycine max
  Clone ID: PAT_MRT3847_137910C.1
tcctgtcataatattaccattactgaggggggggactaatctagtgcagctgtgccattaacaacgttagccgattgtgattctctcaagagaaactttaagcctatgtctaatgttttgtgggtggctcctgaggacaaggccatgtttatggtcacaacttcattatgtttcatgccataatctggaaacgcaagaagctaatcttgtcaatctcgtaaatgtgttacgagaatcgtatttgcacagtccataggaagctcgccaatcgagaaggaaagctctcctctcgtattgaatggctgcaaaaagctggtgtgcctaccatagcacaaattgaaaaagttccactcgatccataggatgatgaatgcttctgattcaaatgataatattgatccactggtgagccttgatttgtggggtttacaaggagcacgtaaagct

SEQ ID NO: 41982 - DNA, 1025 bp, Glycine max
  unsure (1)..(1025): unsure at all n locations
  Clone ID: PAT_MRT3847_137911C.1
ggctcgagcagctctcacttcactgcttcaccattcatcgtccatagccaaaaactcaacgcagaaaccctaaatccccaaaatgcgagtctttgcctctcgaacctccaatctcttcaagctcaatgtcgagcactttctactaatccacaaccctaatttcaactccgtcagagaattctcgcaatccaccgcaatccccaaaagcaacttagggttcgcgaccatggctatgacaactacatggaagtcgagaagaaaacgcgcaaggtcctaaaattccagaacctcatcctctcggaaccttcccaatcgctcccaatctcgcgccttgagacgcttgcgcggcgcttcggcttcacgcgccacgagtccggcgcgttcgtcctcaagttcccgcacgtgttcgaaatcttcgagcaccctgtgcagcgcatccttttctgccgcctcacccgcaaggccatcctccagatcgagcaggagcgtcgtgcactagccgcggagctcccacgcgctgtcacgcgcctccggaagctcctcatgatgtcgaaccatggccgcttccgcctcgagcacgtgcgcatcgcacgcgccgcgtatgggctcccggacgactttgaaaactcggtggtgctgaggtaccctcagtttttccgtttgattgatgctaaggaaactaggaacaagtacattgaggttgtggagagagaccctgggttaggaacttgtgcaattgaggaagctagggaaagggtttatagagagagaggaagtgatgctgaggatattaggttttcttttgtgattgattttccacctggttttaagattggtaagtattttaggattgcaatgtggaagtggcagaggcttccttattggtccccttatgaggatgtttccgggtatgatttgaggtccattgaggcccanaagaggatggagaagagggctgttgccaccattcacgagttgttgtccttgactgtggagaagaagattacgctggagaggattgcgca

SEQ ID NO: 41983 - DNA, 329 bp, Glycine max
  Clone ID: PAT_MRT3847_137912C.1
caaatgggaaggcttagattgattattactggcggtctatctacaaggccaagcttacttacccgttcatacgtagcattatcggtgatacattgtcatctaaagctagtatactgagcacgtcgatatgcatcatccggactagtaaaaccctggactgacgaacacaaatcgccatgctgaacacatacctttttgcaaatggcgcaatcccaaacagggctagagcaaccgacattgcaaacatttacgcattctatatggctaatgaaacgcggcttgatactgatcattaagctcagctgatgtcacaactacccgcagtcaga

SEQ ID NO: 41984 - DNA, 418 bp, Glycine max
  Clone ID: PAT_MRT3847_137913C.1
cttggtcttccttttttttttttttttttaaaacacatttggcccgtatacagaagaaaattatatattaaccccacaagagtgataacaaaccgtacccacatttatgggccaatataataaacaaaaatcacaccacttattttccaaggatagttcagacctctcacacataacattggtagataaaatgtgggggaaaatccaacgttgaacatcccacagaaagtggctcctgctgtaaaaccccccacgaaaacacaacaccaagggcaaagctggctccttctggatgttcaaacaaccgagggcccttccatactcataatggttgccaccaaaaataagcctctgttggtgcggggggattccttccttgacctgaaacttcaccttcacattgtcaatggggtaagag

SEQ ID NO: 41985 - DNA, 473 bp, Glycine max
  Clone ID: PAT_MRT3847_137914C.1
gtaccttgttgatctacattctcccatcttttctcactgctgggattaaatatcagcggcatttgcgtaatattcatatatcccgctaaatatacggctgcggctgcaaatgctgggctggacacgagaaaaatcatgctcatacagaataggaaaagatggaggtgatctgaaatataggcataacatgctgattatcttgcgacgcgagctcatgaatctgaaaaacatcgttgctcatgaaagccttgagtgatcaaattcgctgatgacatgaagcctactactaaggttgataggtgatgcaaagattatgaatgttagacaaagtgttgatggtgatcttaaactctgttactgatgggaagtcgtgtgagggatagcacattcatgtacctaatattagagcaggggaaaatcatgtatttcaaataccgctaatggcacatgaggaaattatgtattatagtgca

SEQ ID NO: 41986 - DNA, 240 bp, Glycine max
  Clone ID: PAT_MRT3847_137915C.1
catacattgacctttcactttagtctcggaatttgctcttctgagttatggcaagcttaaaggttgcacgtgtggttctgatgtgcatggctgtgatgagtgcaccaatgatggtgcaagccgtgtcatgcaatgatctctctgagaacctacctccttgcctatcttacctgatgcatggtggaaatctaccaaacatatgctgcttcagggtgtgcaacatgttgagactgccagccc

SEQ ID NO: 41987 - DNA, 240 bp, Glycine max
  Clone ID: PAT_MRT3847_137916C.1
aaaaaaaaaaatactaagtagcataagtaaattttacatttaatgaaaacacaatactatacggacatagattaaataataatagtgcataacaatgtaaaaagaaaaagcaaaaaggggctgccaatttataggcctaaactttacgtacacgtcctggcgacggtcataactctactaaagggtgaccaaattacaattacctggccttctgttaacaacgtcatcactgtaaaaacc

SEQ ID NO: 41988 - DNA, 124 bp, Glycine max
  Clone ID: PAT_MRT3847_137917C.1
tgttcgtaaaggctcggatcttgttaatgtccacaaggttctggggccacgtgcaaagaatattcaattaatgtgaaaagttaataatcagaaaggagtcctaaattttaacaaaatcctacga

SEQ ID NO: 41989 - DNA, 295 bp, Glycine max
  Clone ID: PAT_MRT3847_137918C.1
gtccggtggcaaaagaacaccgaaagggtcaatcccaccagtcttattaaaatggacccaccattttggcaaaaaattcttgggcccgtttaaatggcatttgggcctatcggtttggtcaaggcatcttccatttgacatgtcttggaatcgggggtgaaagggctaccatcatacctgaattttccgtaaactcaacttgaaggaggttaagcctcattttctaaaagattggaccccccattggacaagtaatgggggccatcattgaatttttgaatctcttgagcctttt

SEQ ID NO: 41990 - DNA, 248 bp, Glycine max
  unsure (1)..(248): unsure at all n locations
  Clone ID: PAT_MRT3847_137919C.1
ttcgatctttctnttactctataatctctatgtttttaactccccgatctataaatcgttctcttactctgtaatctctctctctcgctctctctatctgtctatctctctcactcttacaaagcactgtctggcaattgtatgcatggaatgaaacttcgtcagtacttcttcttaagaactgagaaacatgtactcttatgaagaagcgcttgtttattcaaaatacaagttgttcatatgaaaac

SEQ ID NO: 41991 - DNA, 387 bp, Glycine max
  Clone ID: PAT_MRT3847_13791C.1
gggggaaaaggtggtttaaaaaccaagcctggaaaacattacccttttaatttgggggcccaaagaatccaaaaacctccatgggggggttaaaaaaaaatttgggccattataaagtggaaaccccaccttaccccaaccattttaggacccaacggtttttttttttaataaaagcccggccaatacgggggtaaaaaagggggcaaaaaccatggaaaaaagttttttccgggaaataaacatggccctaactccggttcaaacaaagggaaagaagggttaatgctttgccccaaaaattttccctttgggggttaagagggacggggttcaaaaaaaatttccgcaaaaagcctcggggtaaattcggggcccattttaaaa

SEQ ID NO: 41992 - DNA, 633 bp, Glycine max
  Clone ID: PAT_MRT3847_137920C.1
tctgaccaagttttggcgaagtctcattgtgcagaattcatcacctgacatctacaacccccaagctggtagcatcacaaccgccaccagccttgacttcccagccctctggccttctcaacctcagtgcccagtatggatctctccgcaagaatgcctatgttcgtgccacacctacacccctgaccgccgaccgcataatatacccattgattggccgggcattggtaccagtggtgaattgcaatggtgagagaatgtttgatggagaacctgcaagagggaggggtcctgatcgttccacaaacctttgcggtgggcttgcaaaatcccagagccgataaccttgagtattgtgtctttcaagacccatggatagacccttcatcggaaacctttgcaggggcaaacctcatttgttgaaaccgcctttgcccagaagggaaagtgattcagcacaccttttaacctaaaagagcccagcaagccaagcaggtgaagaaccacaaccctttcaacttcccttggttccccctcaagaagtctcaaaagaaaagctgtggcttaaaaaagcccttttgcatgtgctaccacacttttgtccttttgggctcaactagtgctggtagcagt

SEQ ID NO: 41993 - DNA, 269 bp, Glycine max
  Clone ID: PAT_MRT3847_137921C.1
tacggctgcgagaagacgacagaagggcagatctggttagtcctactggaattgaacgggtcctaaccgaaaaggaccttctggctgactcatattcagacctagaggcttctatccttgatgaaaaagaatttctcctattgaaggttatctctacctttccggagttatcttgcttaatatgctctatggttggagcgggtcggggaatagacggtgtctcgttatccataacccatctttcgggaagagttacttcatcccatttt

SEQ ID NO: 41994 - DNA, 680 bp, Glycine max
  Clone ID: PAT_MRT3847_137922C.1
ggttgaggagtgttaaactcaacaaaagatgaacttgaaatatcttgtttaccagtaaacacaaattcctccctcttgccaactccagcaggctgaaagaacacagaagcagaagccgaagccgaagcagcaacttgagcgccaccacttgcaactcttgggtggattccctccacaaaaggattacacaagttcggttcaacacaatcctccttctctttaactaggtttaacatctccaatttcctcaacaaatctgctgcttccgtttcacgatttcgaaacgttgtcacattttccaaactaggtttaacatcaactgcactcttgtggacattactaccaatagcgtcattcacattcagattcttcaattgatatataacttcgtgtgctgagttctcagcaactgcagcattactacctcctccttctttaatgcttaatttcttcatcagctcattccgtaggtccgattcgttcgattcgttatcggttacaatcttcaagttgttgatctgttcagagaccgagttttcatcaacacgtgaagaagcattagtggcaaaggcgaactcacctttggcgtcgaaaccctcaccgattttgagatccctgaacggatcgccgattagtgaagcgaaatcggtggtggcgaatgcggcattggtggcggcagc

SEQ ID NO: 41995 - DNA, 1304 bp, Glycine max
  Clone ID: PAT_MRT3847_137923C.1
acggctgcgagaagacgacagaagggtacggccgcgagaagacgacagaagggggtacaaagtcctttaactttttgggttttattttccggtttggtcaggcccgagacactcctctgtagcattttcttgaagaaaggaaaggaaacggcatcagttcagagagatcagagatgtgtgggagagcacgttgtactctgagagcggatgatgtcccaagggcttgtcaccgcagcacttcccctactcgcactcttcatatcgaccggtataggccagcgtataatgtgtcaccgggattcgacgtgccagtggttcgtagagatgacgcgtctggcggtgaaggctatgttcttcaatgcatgaaatggggtttaatccccagttttacaaagaagacagagaagcctgatcactacaggatgtttaatgctcgatctgaatctatagatgaaaaggcatcatttcgccgtctgcttcctaaaagcaggtgccttgtggcagtagaaggattttatgagtggaaaaaggatggttcaaagaaacagccttactatattcacttcaaagatggacgaccacttgtctttgctgctctttatgactcatggcaaaattctgaaggtgaaacactatatacattcactattgttacaacctcttcatcttcagcacttcagtggcttcatgacaggatgcctgttattttgggcagcaaggaatcaactgatatttggctaagcagttctgcttccggttttaagagtgtgatgaagccatatgaagaatctgattcggtgtggtacccagtgccatctgttatgggcaaggcatcctttgatggacctgagtgcatataggagattcaagtaaaagcgcaagggagcactgcaatctctatgttcttttccaaaaaagcagttgaaagtaaagacgcaaagccagaacagagagtatcatgtctgacagttgtcaattccgtacatacagaaatcctgactgagagtaaagtctcacagccagagcagaagacatcaagtcgtgactttgctcgggtgaacccacagaagatttgagagaaagagctataactgaggagggaggcaatgacttaaatttcccgagttcttcccattctcaaaatgtttttatgctcccgattaagcgtgagtatgagacattttcgggtggtgattcaaaaccagcattggcggttcgtgatcagataagaacggacccagcaaaaaaaaaaggacggccggtccgctgtatacgagcctaggtacgggtggagtgcacgtcat

SEQ ID NO: 41996 - DNA, 825 bp, Glycine max
  Clone ID: PAT_MRT3847_137924C.1
aattcggcaccaggtaaaataatttctttaactaaatatatttttaaaaataaatgtaagttatatgataattttatagatatatagaaaataaaaataaaaatgagtgatattataaatttatgaataaaaatatatggatgtatataagttggtttgaataagattagattgatttttaaactcaaatccgatctcaaccaataaaaaaagtcaattttttaatcttttgatcgttcaattttttatttatccagttatcggttttctacattgctttttttggttcacattattagataggatatgtttacgaacacctttgactgcagctcttctcgctcagtctttttactggttgctcattccttttatatgttaagtgtttttggcaatgtttattttaaccctcacattattattttagaattatacttaaagatatttatatggacttagtatcacaatatacatatgcaatagtattcaaaagtatacaatgataccatattaatcaacaatgaaaggtaagttgtctattgaagtgtgctatttttatttattaatgaaatagaatttatataaaaatattatatatgtttatttttgtcaatatacatttatgttactttatttgattattttattaagtatttatgattcaataaatgaacttgataatagctctcagttttcacctaataactttcagatgccggctaaatttccagttttgggctaacttattacttactgttgtcaaatatttaaatgtttattcaagctatttatctcaatgcatcttaaataacgagtgtatgcata

SEQ ID NO: 41997 - DNA, 367 bp, Glycine max
  unsure (1)..(367): unsure at all n locations
  Clone ID: PAT_MRT3847_137925C.1
gtgcggcgctcaggncgccggtttcgaagtcatcttgtagaataatggctactagaatcatcggtctaagcttttttctaggatttctatgcattgctcttctttttgcttcaggatcagcacaaatagtatgccaacagaagggaatttgtccaaatactatagcttgctacaactattgtctaggtttgggctttcaaggatatggtcgttgcgatgataatggcctgtgttgctgcaaaaagggatgatgaagacccttgcctttgttggatactttcaaaataattgttttatcattgtgtttgtagcacaagttttcattaaaaaaaaatgaaaatatgaataaaatgtttaaatttcaagt

SEQ ID NO: 41998 - DNA, 141 bp, Glycine max
  Clone ID: PAT_MRT3847_137926C.1
attcgctaaacccaaaacactattttattatcttctgtcgatctgttactttgcattcgaagaaaattgtcctttgaaattgaaggaaaaccttgaaattcggattggtggaacacgaaaattaaaccacaagggaatttt

SEQ ID NO: 41999 - DNA, 525 bp, Glycine max
  unsure (1)..(525): unsure at all n locations
  Clone ID: PAT_MRT3847_137927C.1
cgtcatcactgtatgacgtcctccttctttgggggggggggggggacataaccaaactaggggggggaatgtaggagcaatataaaaaggataatattaaataaccaaaataaaaaacgcaaaaaaaggccgttgataacaagtttgtaaagtgaaccgagcgaagtaggggtaaggcggccgtggcgctcacgtttgatggttaagccgctgggccggctttttaagacacgtgagtgctaaacgggtaggctgtgtaatgcgtttaggttaagcgtgcaagtggtagtttgggggggcggtgttgtatgggagtaattaaacgatgtaatagcagtaatacgacgtagttattaattaacgacgtaataaggatttatattggccatggcggttgtttatgattatggggttgaatagtagtacttctacttctagttatacttgtantactaccgcgtgcccaacccctaggacatgttataataaggcacaacgctttggcggccatgcggcaataaatag

SEQ ID NO: 42000 - DNA, 1289 bp, Glycine max
  Clone ID: PAT_MRT3847_137928C.1
ggacatgcctgctcctggccagggaagcagcatgattggtggtggatggcagctagcatggaaatggtctgaaagagagagcccagatggaaagaaggaaggtggattccagagaatatatttacaccaagaaggtggttctggatctagacgtgggtctgtcatttcactcccaggtggtgattttgatggtgagattgtacaggctgctgctctagtgagtcggtcagccctttacaacaaggagcttatgcgtcaacggccagttggaccagctatgattcatccgtctgaaacaattgcaaaagggccaagttggagtgacctttttgaacctggagtaaagcatgcactaattgtgggggtgggaatgcaaattcttcagcagttctctggtataaatggggtcctctactatacacctcaaattcttgagcaggcaggtgttgggtatcttctttcaaacctaggcctcggttctacttctgcatcttttcttattagcagtgtgacaaccttgttgatgctaccctgtatagctgttgccatgaggctcatggatatttcgggcagaagaactttgctgctcactacaatccccgtcctaatagtagctcttctcatattagtcctggggagtcttgtggatttgggaaccactgcaaatgcatcaatctcaaccattagggttattgtctatttctgtttctttgtcatgggatttgggccaattcctaatatactttgtgcagagatcttcccccctcgagttcgtggtctctgcattgctatttgtgcccttaccttttggatctgtgatatcattgtcacctacacactcccagttatgctcaattctgtaggcctcgctggtgtttttggtatttatgctgtcgtgtgcttcatagcatgggtgtttgtctttttgaaagttccagaaaccaagggcatgccactggaagtgatcattgagttcttctctgtcggagcaaaacagtttgacgatgccaagcacaactgacccaaggacatgataaattcaaagttttgacggtaccttctaattattttcaatctacggctgtttgaaattttcccctcttttaaaattttattttctatttattctctcttttccgtgggttgagattgagaaacaagaaactttgtttctgtaaagaaaaatgttcattttctggttcatttatggaactttatatacttcctagttaccctgctattcgtattcgaaagtgtaaaaaaatctgtgcttaatttaaaaaaaaaaa

SEQ ID NO: 42001 - DNA, 364 bp, Glycine max
  Clone ID: PAT_MRT3847_137929C.1
tctattttcactatcatgttatcaagactgtgcaattataggaattcctgttaagcacaataatgcgatgacttaatgtcatattacatatcaataccccatagttgctagaatgcattgtgatcttagaaattatatgaagcgtaccgaaattttattgagatataatattgtgctacttgagatggactggtccacccaacgaatgatgtccaggttacaaaagattgggacaataccttaaggaatgtgttcccacgacctaatgtgttttgaattcacaaaatcacttttgctgatataataaggaggctgggaaaaactgactttcttctcagagaactttcccgaagtgttaaaagaa

SEQ ID NO: 42002 - DNA, 982 bp, Glycine max
  Clone ID: PAT_MRT3847_13792C.1
atgacattgaaatcttgaagatggttcaaaatggcgaaggaaaatgcaagaggaaaaccttatctgggattgaagagaaaacaatcattcaagatgaaatagcatgccaaaaggaacacgatcctttcaacaaagaatctgtgcaactcggcgctgttccagaagtcgcctttgtcccagtgattgacaagcaagttaatgcatcttgggaaaaagcggtacaaaataatcaacttgcagcttctaaagattgtttccctagcgatgcttccaacacttttaacggttttaggattccatttactggtggaatcattaccattcttatgggagtgataaccatgctccgcatgacacggaatatgccaaggaaagtcactgaagccaccgccttgtatgctaaccctctatattgtgatggcaacatgatgaaagcacctgccatttccatgaatgatcaaatggccctgatgaagcgcatggctgaactcgaagagaaggtgaatgtcctctctatgaaacctaccatgccacctgaaatggaagaattgctgaataatgctcttaacagagtcaacaccctggaacaagagttggatagtaccaaaaagtcacttgatgatgcccttgctcgacaagtggagcttcaagctccccttgacaaaaagaaaaagaagaagaaattcttccgctggtaaggtgatagccataggtatctattgctattgccgtgtgacctcaaatacttgacattagcaaacgttgtaaattgttggtggcgtttctctattatcatcagccccaccggatgctattgcattcacctctgtataatttaacctctattcgactgaagtcattccttttcaatttgtgtgtatatatgtataaatacagtgtgccatgccatcccattgacaatatgtaaataaaattgtgtatatataagtaaataaaattatgtgtggcatcgttcaacaaa

SEQ ID NO: 42003 - DNA, 416 bp, Glycine max
  Clone ID: PAT_MRT3847_137930C.1
attctatagaaagtgcttttagtgttgttagtgggttaagtttccatggattcagtactagtgcatgttatatcttgtcccaatgcttcagccacaactggtggaaatctctggcggagtaaacattccactgagaaaatatactctacaagttcttgtgcatcaaaagctttgcaaaacaaaaggaaaattcaaatggaatacaatcttttgaggttccaacaaccaactttgaatcatcattacaagtctactgagagagggcatgtatatcaagaatccaatataaaatatgttgtgaaagcagtctctaaaccatcttttgattatgaacctccaacttctaattccaaaaacatgttggagtctataaaaaatttcttggcagctttctattggttttgctatccttacac

SEQ ID NO: 42004 - DNA, 983 bp, Glycine max
  Clone ID: PAT_MRT3847_137931C.1
cacgcgtccgattttgctaaccagattattttctattgtgtagttctcatttctcaactcccatcatcattacaaagttccaaactcgagccgattggacacaagaattttcaaggaaaaagcatcatagtgaaaaaatgtcagagtccaaggatgaaaatcctgaccttcctcccaagtcaaagccacaggaggaacatggttttgccatggattttgacattagcctggaaagtctatggccctcggatcatatatctttggtctctaaccccatgtctccttttctcttttccactagctctgaacaacctttttctcctgtctgggctttttctgatgccgaagatgagaggcaaatcaggattgcagcttcagcaggtaatacaaatacaacaactgaaaatccaattgaaaatgatgacaacaaaaaaaactgtgccaccccttgtagccatgacagcttcagaaaatccagatggttattgtctgatcaaggaaagaatgacacaagcgcttcgccacttcaaagagttgactgaacagaatgttcttgctcaggtttgggcacctgtgaggaatggaaatcggtatgcacttacaacttcaggccaaccatttgttcttgatccacatagtaatggactccatcagtatagaacagcttccctgatgtatatgttctcagtggatggagagaatgatgagatcctgggacttcccggccgagtttttcagcataaaattccagaatggactcccaatgttcagttttattctagtaaagagtatcagcgcctaaatcatgctcaacattacaatgtccgcggaaccttggccctgcctgtgtttgagcttgcaagacagtcatgtgtggctgtagtggagctgataatgacttcacagaagattaactatgcctctgaggttgataaaatctgcaaagcctttgaggcagtaaagttgaggagttcagaaatttt

SEQ ID NO: 42005 - DNA, 388 bp, Glycine max
  Clone ID: PAT_MRT3847_137932C.1
aggggcacaagtgagtttgttgatcgagatacctacacacaatgtgatgaaaatgtaagtccttgatttcttcgatgctacaattttcgtagcatgggaattccatgcgtacgatatgttccctctccgaatgaacactggctattgtgcccgtactccggacgtgaaatgcgcacattggaagcttgctgtggaagcacacaacatctttggctttgagaccattcctgaagagtgcgttgaaacaacaaaggaatacatccatggcgaacaatatagatccaactctagtacagttaaccaacaggcttactttttatgccagagacctcgaaaatccatccccaagaaacatttgtgttcagtatagatggcaccgtactctcta

SEQ ID NO: 42006 - DNA, 209 bp, Glycine max
  Clone ID: PAT_MRT3847_137933C.1
ttttgtgattgagttagacacaaattcaaatcctaagagtaatgctactacttataatatggtttagtgtgtgaaaatgatgattccaagtggttaaacgtttcaatcaatgcgttatggacgttgatctggggtgtggttgatgatctaagccagagtgattggggttaatttgaaataatgataataattttggaaggaaggtattt

SEQ ID NO: 42007 - DNA, 499 bp, Glycine max
  Clone ID: PAT_MRT3847_137934C.1
tcgcccactcgtacgtaaaccgcgatcacaggttgtcgcaccttaaaaccggaaacaaaagcaatcgttacttgttctcaagaatctgtcaatttcttactacttgtttgcgtacgatttcttaagggacagaaaatcactctctgtgctggccacagacttggagaatcattatcttttccactgttagcatatgtgctgaacactctgctatttgatataggacttcgtgtcagatttaaacttcttctgtctgtttaatcagttatctgctaaatctcaagttcaagctggtgaaatcttggattaggactcccactctcctatatgtaataggatttcgagggtagacgtatgtatacctgtcctaactttgaatatcttcttttcactgatccgcattgccgatgacagaggtcttatttcaaaaacacttgggcgttggtgctaatgttcgctaagttaaaattatcctgagacacatgctcactgagaaaac

SEQ ID NO: 42008 - DNA, 1528 bp, Glycine max
  Clone ID: PAT_MRT3847_137935C.1
ttttttttttttgaataaaagaccagcaacttaatatatataaatattactcaagtcaaggtacattacatacatagatgatgattaataaagctataataaacaagaaaagatgaatacttaattatgaagagtaaaatcagaaatgactaaggatgcacaagaccgaaaaggaacacttgaggaatacatacatggaaattaaaaaaaagaaaaagaaaaagaaaagacacaaaagggatacaaaatacacccttggacacaagcatgcttatctacaatttgatgcatgcccccatggttttggccttctcttccaaacacccccaacaactgtagctgatgagaggaaaagacgaaaaagcctaaattagggaactgcatagacagatcactagcactcctcaacatagaaattattattcttcgggggaaacaccactcatagctagccttgttggcaaattaatcaaggtagctagcttaattgattaattaattaagcgttgctcctgaaggatccaagagccttgatagctgctgctctaaggatgtattggtggtaaaatgcagccactgctgctccaacaattggtccaacccagaatatccactgatcatcccagattttgtcttcgttgtagattacagctgctccgaaactccttgctgggttaatgccagtaccagtaattgggattgtagccaagtgaaccatgaacacggcaaatccaataggaagtggcgccagtacaggaacatgggaatccctagcgttcctcttagggtcagtggcagagaagacagtgtagacaagaacgaaggtaccaataatctcagcacccaaagcagtaccattgttgtagccatcagcaacagagttggcaccacctccatacctgttgtagtatgctttttggaaccccttggccaatccagtaccacagatagcaccggcacactgtgccaccatgtacaacaacgcccttatcaacgacaccttgcgtcctaggaacaacccgaatgtcaccgccgggtttatgtgtcctcctgaaataccggcggtgcagtaaacaaggatgaagatcatgccaccaaaggcccaagcgatgcccaaaatgccaaccccatcacagtcggtgccacctaccgttgtatcagtctgccttttgtagccaataatggtgagcacagtgacataaaggaagagaagggttgctatgaactcagcgatgagggctctatagaaggaccactgtgtgagctcctctgggtcgaacaaaggtgctggaggagggtcatggtagtctttggcagagtactctcctccttgctcttgaacctcaacatctttagccatttctcaattctcacagagcctcaaatgagttatagcttactgctatagcaagttttgtgtgctagagtggagtggattgaaggggtgagtggaaagagggtggtatttaagtaatgaaagaaagggagagagagagagagactgtggtaatgaatcaaataattaaac

SEQ ID NO: 42009 - DNA, 692 bp, Glycine max
  Clone ID: PAT_MRT3847_137936C.1
ctgattcagatccatcatctgagaagagaagtttagatttttatggtcctcgcgatgagacattttctgatgtaaaacagtcacaattcacaatgagcacaatatcctcaggactgagtgcaattttagaatccttagatgcaattctcactgaccaaaatcttggatttagaagcttcgaagacatagacacgatctacaaagaaggatttaagttaccacctcttaaaggcaatggcctaaatttcctccaaagaaccgttcccaggttgatcgaggctgctaatgatagccagaaccttttgcgctttgataccccggaaacacttaaaagggacaaatttttttggttttcagatgaggaatttgccagagagactttggcaggggtgaacccatatagcatccaattggtcaaggaatggcctctaagaagtaaactagaatcccaaatctatggtccaccagaatcagctatcaccagagaagtcatcgagccacatatactaggttatggcacaattgaagaggccattaaagagaagaagttgtacatgttagactatcatgatctattgttaccgtatgtaagcaaagtgagagagattggaggaaccacactatatggatcacgaacactattctttctcactaaacaaggaacattgaagccactagctattgagctcact

SEQ ID NO: 42010 - DNA, 231 bp, Glycine max
  Clone ID: PAT_MRT3847_137937C.1
gcctatgctcttcacatatttaaagactcggtgccacatttttggcatttattttttctttctccttcctctatagtctttattattgctcatcccatagcatgaaatcatgaattccaaccacacttaactggcttcgaataggtgtgcgattagattgatttaaagaatatatgatcattcaaaccaatttaattaaatttatttagtttaattaaaaaaaaaaaaaaa

SEQ ID NO: 42011 - DNA, 398 bp, Glycine max
  Clone ID: PAT_MRT3847_137938C.1
aaatgtgcatcatatttttcttatttttctgaagattcttttgacacatggggattatttgtttgtaatacttacaatcacagagcacagaggatgccatttttaataaaaaaagagtatgtagcatgtagagagtcagatcccaaactccattagcacagcggacctttttttcaacatactacctcactaagtttttggtttctatttacaaagaaaagaaaaatcccaagatgccattgattattaaattgccttcagatttttttaaataaagacttttcaatgttctttcatcatatcatccttctggaggaatttgagcgcccgagcttcctagtatcatctgattttgttgatgcagcccccttttttttagctggtggttctcttttatt

SEQ ID NO: 42012 - DNA, 488 bp, Glycine max
  unsure (1)..(488): unsure at all n locations
  Clone ID: PAT_MRT3847_137939C.1
gtttgtatttcttcattgttgtactttttttttcatactccccattgttgtgctgtacaagtaatcatttttatattttgggttatgcatttaggtctattgggtttatatggttaatcttgctgtaagattagtgttgaaagctgcattccctgcctgaattttgtttggctccgttaaattctgtgcattagttttatgaacttacataaattcatcttttctttcggcaagtcatttgagttttgtcttgattcttagtaagatttttttttttacctgaaacagtagaggcaagggaattgataaattggataatcaagtcatttctgtttcaaatcctccaattcatattgttagggaatatatcctgagtgacttttcaacctctggtggaaattnttctcttggaaaattgctaattaattttctgaagtcaatttaaaaggaattgaattgctgttttttaggtatttgttattgcaaat

SEQ ID NO: 42013 - DNA, 662 bp, Glycine max
  Clone ID: PAT_MRT3847_13793C.1
cccggcctgggtttacaacttttaaagcaggtaacattggcgttttccagttctcacattcccaaaatcccttcggcaaacgctgtcatttgcaagtataacattgtcaagattctttgcgaggaagaggaagtggttgcagcgttgaaccgcataccctgctttcacgtgctatgccaatagtctgaaactcagagtggagcctacatatctatggaaaccaccacaaaggtgacacctttactgtgtcttacctcattaactcatgtggggtgtccccaaaactggccaaggagctctccaacagggtcaatttgaaaaacgcacatggcccaaatgctgttcttgatcttctcaacaactatggtttgtccaaaatccaggttgcaaaactcgttgagaaatatcccaaagttcttattataaaggcagagaaaacccttttgcctaaactgaagttcttccgttctattggggtttccaacactgacatgccaaagatcctacttcgtaactatgttatcttgaagagtagcttggaaaattacctcatcccccgctatgagatcctgcgtgatatagtcggcgatgatcagaaaggtgttagaatcttgaaaattaccgctttttgtcttacatatggtgacatgatgaataacttt

SEQ ID NO: 42014 - DNA, 234 bp, Glycine max
  Clone ID: PAT_MRT3847_137940C.1
catatagaccctaagcactttcaatctagctctgaaagaccccaatgaactcctttcggcccatgctacctaagacttgacatgtattaccaagcccagtattgcgcctgctactgacgctgccattaatgcagttacctgctgacttatcagcgattcctacgaagaatgcctcgccagaccctacagctgctgaacatgcttgatccacagcagaccgaaatgctacttgaa

SEQ ID NO: 42015 - DNA, 390 bp, Glycine max
  unsure (1)..(390): unsure at all n locations
  Clone ID: PAT_MRT3847_137941C.1
tctagctatctcgatcgaactgtccaaggtcctgtcacacacaagccacacgaaacaccaagagcggaatcggccactaaataacggtgtacaaacctaattaaggccgatactactgtacccgccgccgcataaccatgataaccaccgtgtttttactgttgggcgggcaattgccgcacgtgtaaagtagccagttggtgatacactgccaaggctgcacgggcacctaatgggtggcggttgtgataggattagtggaatgcgtacccgcgtaataccgtatttgttacgcgcttgtcggcctaggtaactaggctggcccttggccacctagcagtggcatttggcgtgatcgtatgntgccaagggtccccccatatagtaatt

SEQ ID NO: 42016 - DNA, 947 bp, Glycine max
  unsure (1)..(947): unsure at all n locations
  Clone ID: PAT_MRT3847_137942C.1
tttgtatttattcgctggagctacannnnaatgcctgtcatcaactgcaatccatttacacatatctctctgaaaaaacttggtgggggttcagaaagagcagcagaagaacctaattctgttgccactatgaaaggcataatataagtttctttattatgtaacaagaataaatatatttacacatatctctctgcaaaattttggtgggggttcagaaagagcagcagaagaacctaattctgttgccactatgaactgtaattacaatatttatatacatacatgattcgcctcacatctcagacagaagattgctaattttcctaagctctttgagagctgtcatggcagtaacttgccctttgcggtcttgttggaaaacagattcaattacctgaatatggtctagcatagactgcccaatattcttcaaagtgcccatcacattcttgtcaacagattccccactgcaactaacagaactacaaggctcattagctacagatgaggctggttgtggagtattgttttgagtgctatcgcggttggcagcttctgcagcacctcctgctttctcagagattacctcagcattattccgtccaaacggccaaaaccactgcaacttattctgttttttgtctttaggaagattgactgtatttcctgcttcatcgttcttgctccctgatgttggaggtatgttcttcggaggatcggagattggaaggggcagatcactgggacgggtatctgatgtttcattgcattcagaattttctgtattgcaccgtgatgtctgagaaatgttctcaggaggatcggagattggaaggggtggatcattgggactggtatgcaaagtttcgttgcattcagaattttctgtattgcactgtgatgtctgagcggacgcgtgggtcgacccgggaattccggnaccg

SEQ ID NO: 42017 - DNA, 224 bp, Glycine max
  Clone ID: PAT_MRT3847_137943C.1
tttttccagtaatagtatttaaaattataagcggacagagataattcaaattaacctaacttttttcttaatcgaccaattaccaaacatttaaaacaaaaaaaaagaagcaaccatgagcttaacgcacccatgacaagtccaaaacacttaaacttgcttaaaggcaagacatgaccactttattttaaggatgtttgattaacaccaaaacaccagagttg

SEQ ID NO: 42018 - DNA, 367 bp, Glycine max
  Clone ID: PAT_MRT3847_137944C.1
aatcggaacataaactttatagtattcatttgaacagctaggcgtggatctcgtcactcaccacctcctatggggactacgaaaaccagcgggctccatcgaattggcgactgcgctagcttagactccaccggaccacatagctgcggacgccccaagaagggctttccattgccttccatataccagagttgccacagctacttacgcggcgggcacagctaatagggcatttttcccagctacaaaagctttgacatcgggtgtacatgccttgcaatgaataacatgccataaagatgcgttggcgaaaattggggtatgcatcgtaccaatgcccaccttggttggagaacaagctgattgt

SEQ ID NO: 42019 - DNA, 546 bp, Glycine max
  Clone ID: PAT_MRT3847_137945C.1
ccccaaggactctacctttttttcgctgggtttttctctttcaggcgtttttgtttggcttttccttcttaggtggggaacaaaaaaaacaagcctttttttctccaatggggggtacaaaacaccatttttccccccctttttccccccatgatacctttatctttgccctacccctgggaaggggaaacaaaagcttgaaatgaaaaaacttaaacccccccttgcaaaaattgggaatttataactccctttggggccccctttttttagcattttcccaatcccccttttgacatccttcaaaaagggggggcatcacttggggggtcccttgggtttgggggccttccatatgggggcttggggaccggaggctttttaacagggggtttttaaataggaggtttctcccctgggggcttgtaaaccggggggttctcttctggggggttggaaaccgggggcttcctctctgggggctgggccccgggggcttctcccctgggggccctgtttccgggggcgtctcaaccgggggcttgg

SEQ ID NO: 42020 - DNA, 327 bp, Glycine max
  Clone ID: PAT_MRT3847_137946C.1
tggtccacgaagtgcgggctctgctctaatgaatctctcatcacctcgcgagaggaggtttgcatattggcggtcccacagctttcacgatcaatgacgtgtctgcactctggtcatacagatgcttttatcggttacaccgcacacatattgcggttgctgctgcatccacagcgtctggggataatgcaagagagctgttgtaagcactacgtttacatggtgttgagattcgtattttgggtgcgttgcaggtgtattcctataggctccgagattgatgagacatcagctccctttgaatccggaagtcttgggtagccatcc

SEQ ID NO: 42021 - DNA, 181 bp, Glycine max
  Clone ID: PAT_MRT3847_137947C.1
gactccaccccttttggttcacgttctaaccaaagtgcaacggctattgttctttggctcctatgatccactacaatatcacatttcctcttactctatattcatgtccatttaactccacgatgcagatccgcacaaccaaccccttcactattactgtttccttatcctatttcaaact

SEQ ID NO: 42022 - DNA, 448 bp, Glycine max
  Clone ID: PAT_MRT3847_137948C.1
ctcggaattgcctcgaggctgcgagaagacgacagaaggggacgcaaacccaatggtcaaaagcctcactagccaactcttgtcttctcattcctcactaacaacctcaagacgctccctaatcctctcccaaacaatggcgatggcggtgctatgttcttctcactcacctccaatcctctcccaaaccctaaccttccaccgaaatcgataaaccctaacccaaccctactttgtattccccgctttcttagaccatcacggccaatgacaaacaatgctatgttcttctccaatcctctcccaaaccctaacctcacacctatcccctcatgctatgttctttcattaagaacactatatttatcagcattgatggataactgaaacattgtcgccctccccaagcctctgaactgaataagaagaactctccgaaggaaagtgt

SEQ ID NO: 42023 - DNA, 343 bp, Glycine max
  Clone ID: PAT_MRT3847_137949C.1
tgcttataaaagctatgtttaaggggaaacaattttgaaacactacccagcctcaaggagctttccaaactgttacatttaaacttacaacactgcaagagattgaaatatttgcctgagctcccttcacgaactgatgtcccatcaccatcaagtaacaagctgcggtggacaagtgttgaaaatgaggaaatagtattgggattaaatattttcaactgcccagaattagttgagagggattgctgcaccagcatgtgtttgtcatggatgatgcaaatggttcaggcattcacgtaacctaagagcccgtggtggattccattcatttcaagtattattc

SEQ ID NO: 42024 - DNA, 364 bp, Glycine max
  Clone ID: PAT_MRT3847_13794C.1
gtggctagaaaaaaatccaactaaaaattttctcctgcgagatcaagcccttattaatttacccttggggatcctcaaaacgccatccaactttctcagggtaaacacattactcgtgcccccaacgggaaacaaagggatcccctcccgcaagtctcatggacaaaagtgtcaacaaaacgccgttggcccccttagaacatatcgggtcctctggttggctatatggagaattatctccaagaagcagcgtccccagaaacatgtgaaagggtggttcaacgcctggggggaccaggggcccaaggggcccctggggttttttgtgggccaaccccttttggggggggaccccaaattaccc

SEQ ID NO: 42025 - DNA, 424 bp, Glycine max
  Clone ID: PAT_MRT3847_137950C.1
cactaatatgccatactatcaaaaacatggatatggcgtggacgaatttaatgaaaccttatatgatgaatgggttaacatgggcgacgcaccgtgattgccagagactcttaccaatcacaacatgctgtcgcttcttggctgctatattgtattcttgacaggaagatctcttgactaaatagccgaaacacaagccaacctaaagaaggctggcttccacacatggtaacatgctattctcaacgatacacatcttatcactccagatgcactttcatacacatcatcactgaaagagaatctgactatgcaacgatacataattgttgaaatccttggagaccactggagctatcttcttgcataccactgaagcgaaatcaagacctttaagctttctaatcccatgtactacatagag

SEQ ID NO: 42026 - DNA, 121 bp, Glycine max
  Clone ID: PAT_MRT3847_137951C.1
atacgttcatgacttgttgctctatacccaaaaacacctattaaatattgagttatgactattacattgatccctgcgctcacaaaagaagttccttagtgactaaattggtgtatatatc

SEQ ID NO: 42027 - DNA, 332 bp, Glycine max
  Clone ID: PAT_MRT3847_137952C.1
ccaaaaaagtcttaacatttctccataaaaaaagcaagaacaacctgcttgttactggtcaattaaacgcagggggggttcttttaactgcgttggacattacccccacaaggtaaacaccctacgcactagctcattggtacggatcatttgctgaactgcaattaaaaaaacacccgaatgtgcttgtttcaaccttaaatgctgggggcgcattttggatcaacgccccaaatacctgagcccaagctcctaaatgggcgcttcggtgagaaaactttccattacagcattcctttcggcaggcccatattagctcataaattggttgg

SEQ ID NO: 42028 - DNA, 243 bp, Glycine max
  Clone ID: PAT_MRT3847_137953C.1
tttaaatttggccatatgggaaccttaaaaggcgtccccaaataatggatatttctgggggtagaccccttggaacatattattttggaaaaaagcccaaggagcaaggagtttgcctataattgactcaacaagccctgttttggcttggtaacacaataaattatacaatcttttttttgcccctaaaagaaaaatgggaggaggaaaaattcccaaagaaactcttaatctacttttttt

SEQ ID NO: 42029 - DNA, 420 bp, Glycine max
  unsure (1)..(420): unsure at all n locations
  Clone ID: PAT_MRT3847_137954C.1
tatcacaaagttattagttagatggattaaacttggatgaatgcaagtcgcatgagccctgcatatgaggaaggcattgaagagttcttgtcatttgcctctgaaagaagtcgactcgataaggatggaaaatatttttgtccttgtataaactgtttgaatgcgagacggcaagtactagacgacatatgggaacatcttctgtgtgaagggattaagaagaattatacaacatggataaggcatggtgaattgatagacatgaatatggggtctaaaactaaaccgattgatgtagaaatgggagatcgattagaggatatgatttgtgatcttggacaagattcatttgagcaagaacacgcncttatgtgtgatacattggaaagtgattcgaaagagcctttgtatcaggaatgc

SEQ ID NO: 42030 - DNA, 785 bp, Glycine max
  Clone ID: PAT_MRT3847_137955C.1
atcgacaacgtttattcaaagatccaagacaaggaggggatccctttttatacagcaacgccttatctccgccggaaagcaactcgaggacggccgcaccctgtccgactacaacattcagaaggagtccacactgcaccttgtcctccgcctgcgcggtggtatgcaaatcttcgtcaagaccctgactggcaagaccatcacgctcgaggtggaatcaagcgacactattgacaacgtcaagtcgaagattcaggacaaggagggtattcctccggaccagcagcgtctcatcttcgccggaaagcaattggaagacggccgtactctctccgactacaacatccagaaggaatcgaccctgcatctcgtcctccgccttcgtggaggtatgcagatcttcgtcaagactcttaccggaaagactattactctggaggtcgagtcatgcgacacgatcgacaacgtcaagtccaagatccaggacaaggagggtatccctcctgaccagcagcgtctcatcttcgctggtaagcagctggaagacggccgaacgctctcagactacaacatccagaaggagtctactctccacttggtgctccgtcttcgtggcggacaataggtgcgctgatggttatgatggttgacgatagttctgcacggcgttcacaggatggtctggtctgcggactaagatctggtcggttttgttcatagttcttaagacggctactaaagcctaacaatgcattcaagcatgcctacgggctgagagttctctc

SEQ ID NO: 42031 - DNA, 370 bp, Glycine max
  Clone ID: PAT_MRT3847_137956C.1
gcgcgcgtacgtcaggctgtaatcagctcacgccaaacacactgctacagatggtgtccgatagagcgagttatgcagcacatgtaagacaccaaggtgagtatggaaccagtgcgcccccacatatatatcggatttgggaactgggaatatagccccgttgatcttgaaaacccatgcttcaaataacgaaggctctgtccatctttggcaaggagatgaggatatgatggttccagttgcactgcgacgatacataccacatgaccttccatgggttaactgtcatgaactcctaagttctggtcacattcttgctgatgctgatggtgtgagagatactatcagcaagtctcttttacgtgcgaag

SEQ ID NO: 42032 - DNA, 303 bp, Glycine max
  unsure (1)..(303): unsure at all n locations
  Clone ID: PAT_MRT3847_137957C.1
agtcgaangcangnntaggtaagcncgnaattngggtnnanntncngttgtannagtcaanncnntagttnntngngctccgcaacgatcgngntcccataatccggagttgaccataacagcagcggctactcattcacgcgggttgcacgtgtacacgctacccgatctggattacgactatggngcactggagccagccatnagcggngacatcatgcagctgcaccaccagaagcaccaccagacttacatcaccaatacaacaaggccctcgagcagtccaagacgccatcgccaagn

SEQ ID NO: 42033 - DNA, 162 bp, Glycine max
  unsure (1)..(162): unsure at all n locations
  Clone ID: PAT_MRT3847_137958C.1
ctgagagggtctctgaaacgaatacaacgattgcctagcgttcccctcttctgggggacccagtagtcgccgttgcatnctgcgttgggcgtgataaaagaaagcctcactcggcccccaatttttcttttcaacgaaaagggatttagggcaaggtttttt

SEQ ID NO: 42034 - DNA, 323 bp, Glycine max
  Clone ID: PAT_MRT3847_137959C.1
catatgcgtcgtgatgcctgagaaaagggcgctacattgaactggaaacggagggtaaaacaacaggggaaaggtggtgagagaatacagactgccctgagggtgcgtaggcttcatacgtgtcagcacaatgacaatgactcatgaaggaagcaagggacaacaacgaggcctactcgcactagggccccgcaaacagtaaccggaaaacatgtttctctatcaccggagagggtcggaaagatcccatatttgttgttagctatgatggaactcggaagacctgcttctctttgaaactaacaaaagttggatatgagtgc

SEQ ID NO: 42035 - DNA, 799 bp, Glycine max
  Clone ID: PAT_MRT3847_13795C.1
tacgtaagctcgtttttcggctcgaggggaaagaggcttctcaccaaagagtaagacatgggttccattgatgatgatacaccgcttctggaagagggtctccttcaggatgatgaagggagtgagcaattcacaggagatggctcagttaactttagaagagagcctgctcttaagaagggtaccggcaattggagggcttgtccttttatcctaggcaatgagtgttgtgaacgtttggccttcttcggaattacaacaaatcttgttacctatcttaccaccaaattccatgaaggaaacgtttctgctgcaagaaacatcagcatctggcaaggcacttgttatctcactcctatcattggagctgttctagcagatggttactggggtcgatactggacaattgctgttttctctgtgtttctgggatgtgtaccctgacactttctgtctttacattgaagcctgctgaatgcttgggttctgtatgcccttcagctactcctgcacaatatgctgtgttctactttggtctatacgtgattgcacttgggatcggtggtataaagtcatgtgtgccatcttttggggcaggtcaatttgatgatactgatccaaaggaaagggttaagaaggggtcgtttttcaattggtattacttttctatcaatctaggtgccattgtatcgagcagcatagttgtgtggattcaagactatgcaggatggggccttcgatttggcattcctactttgttcatggtattatcctgtgataagcttctttataggcacac

SEQ ID NO: 42036 - DNA, 379 bp, Glycine max
  Clone ID: PAT_MRT3847_137960C.1
caaataatatgttttaacttaataaattattgtgccttcaagaagggcagaaagcttcggggccctaaactggccaaggaagtatgcaaaagggacggggcccagccggaacacaatggttcaaggccctgaacgggagcaaaaggctgggaaggtgccccctcttttagtgtgactttgcaatgggggtttccaaaaaagcacaaaaaagaaacgggtctaaaagctggagattggggaaaaaccttatcgaaattctaacggagggatgagcaaagaatttgtagtacaaaaaaagcttgatgaaaaaaaaatttgttatttaactggggactacccggttggggcccgccgcctacaacattcttggatgccaaat

SEQ ID NO: 42037 - DNA, 773 bp, Glycine max
  Clone ID: PAT_MRT3847_137961C.1
agatgtgctcgcgccggatcggctcgagttggaagatgctccatacttggccattgttcctgcgccatggctgatggagtacaatctagtggccttgcagatgttttgtcaagagccttggatttcttggaagatgctccatacttggcaattgttcctgctgttagtctaatatgtagcattatcactgagttcatcacctccaatgatgctactgccacccttcttgtcccacttctgttcaaatgtagcagaatttgccatgtgccacatagaaattaaagacatgctcaaagttggcgtgccactcaaggttgttgggattgttgtgttatctcttctcatgccatcactaggaactattgtttttggaacaaacaatgatactcaataagggacattgaccaaggaaaactctcgttggtttggaaattgattgatttcttctccaaattgcagaatcttgtttgtctaggaggttaatgaaaatttaaatgtgcagggccttctgctatatttaggtaatggggaataccctgtgtagatatcaacagggcaaaggagaaggagagaaagatctccatctctttctttcttgcttctattttgtatttctttgttaatttgtttataagttttttacagggttatattatatagatacaattattaagtataggatgaatttccagctgttgtaaatctttaaaccagtaatagatgaacggaattgattttttttattgtgtaaaaagcaatttgttgatctagaa

SEQ ID NO: 42038 - DNA, 307 bp, Glycine max
  Clone ID: PAT_MRT3847_137962C.1
ccgaaattggggcccataaacttgttatgaaaaacccttggaaaggcatacttggggaccaattctgataaaagcaaaaattgcgccaaatgattgacttttggactcccccttatttaaaagaccttcgggtatttatagagaataccgggcttttgggggagcaaagagacgacccttttccgcacaatttactaaaagggggggcttattttggtgtgttttatcaaagcggcccattaaagcctttgttaaacattggtctttaaagaaacattttctcaaaaccactgtttctacgggtggg

SEQ ID NO: 42039 - DNA, 809 bp, Glycine max
  Clone ID: PAT_MRT3847_137963C.1
atgagttggaatgactgcaaaaagttaccttggaacctcattttgcttctgggagctggttttgccatagctgatggagtacaatctagtggcctagcagatgttttgtcaagagccttggatttcttggaagatgctccatacttggcaattgttcctgctgttagtctaatatgtagcattatcactgagttcatcacctccaatgatgctactgccacccttcttgtcccacttctgtatcacatagccagaactatgcatgtgcaccctcttcttcttatggtccctggaggaatagcaactgagtttgccttctggcttccaacttcaacaccatcaaatgtagttggctttgccactggacacatagaaattaaagacatgctcaaagttggtgtgccactcaaggttgctgggattgttgtgctgtctcttctcatgccatcactaggaactattgtttttggagcgggcactggtactcaataagtgatattgccgaaggaaaactcttgttggttaggaaattgattgatttcttctccaaattgcagaatcttgtttgtctaggagatgaatgaaatttttaatatgcagggccttatgctatgtttaggtaatgaggatatatcaacagggcaaaggagaaggagagaaagatctccatccttttctttcttgcttttattttgtatttctttgttgatttgttcataatttttttacagggttatattataaagtatagaatgaatttccagcagttgaactttatatcagtaatggatgaatggaattgatttttt

SEQ ID NO: 42040 - DNA, 318 bp, Glycine max
  Clone ID: PAT_MRT3847_137964C.1
cccacgcgtccggcaattctctcccctgaacagtttcggatcctcaggcaaaagggcaccgagttccctggaacaggagagtatgacaagttctatgaagagggagtttacaactgtgctggttgtgggactccactctacaggtccataacaaaattcaattcttattcttaataaaattgagtctgcagtttggacgtgactacttaagtacccaacatcggtaaaaaaattatgcaatgtacttatattatgaatgaagttaaaaaaaaaatgatggctaaataacaatgttgataatttgtacctttattcctc

SEQ ID NO: 42041 - DNA, 504 bp, Glycine max
  Clone ID: PAT_MRT3847_137965C.1
cacgcgtccgccgtcccatctcttctggaagaatacaccctccccttccctccgatatctgatattgtgagcctcgcatggagttgcgacaatgggggcactgatcttcccccaccctgacatccgccgcccacctcccccttgctgaacttggttctgtacctcttctcggcggggttctcgctcctcatcatctaaaagttgaggcttttatggtgttggtgttcgtcggagggtgcagcagaataggcataagggctagaagcatgtgcggcgccgaagcgtggtagggtggcacgtgcgagagtggcggcggtgacgaactcaagctcgggccggtgcttcttgatacttgttaaaattggaccctcttccgcatctaaaagatgttcttagcggctgaaaaaccaaagtgcccaccatctgtttgctctttttccaacttaaatctgaaaatctgaaaaatggtcctttattttcttgcttccatgaaatacaaactta

SEQ ID NO: 42042 - DNA, 954 bp, Glycine max
  Clone ID: PAT_MRT3847_137966C.1
cccacgcgtccgtacggctgcgagaagacgacagaaggggagggtgaccagtgaacacaatacagggcagcatcgccatgggattgagtattctgagaagcacttccatttccactcctatctcttcctccaaatccaaacccattttctcaactcttgttcgttcatctttcgcctccatttcccccacaaagtgtgttactcccaccactcttttcgtttctgccacccccttcttcaccgcctcacccaagcgcggctttcgtggtgggattgtggccatggccgccgctggctcgctccgcaaatcagaggaagagtggcgcgcagttctctcccctgaacagtttcgtattctcaggcaaaagggcaccgagttccctggaacaggagagtatgacaagttctttgatgagggagtttacaactgtgctggttgtgggacacctctctacaggtccttaacaaaattcaattctggttgtggctggccagccttctatgaggggattcctggagccataaatcgcaatccggaccctgatgggatgaggacagaaataacgtgtgctgcttgtgggggacatctaggtcacgtctttaaaggagaaggatttccaacgcccactaacgaacgccattgtgtcaatagcatttcactgaaatttgcgccagccaattcttaataaaaattgagtctgctgttcggacgtgactgcttaagtacccaacattagtaaaaaaaattatgcaatgtacttatattatgaatgaagttcaaataatgatggctaaataacaatgttgataatttgtacctttattcctctgttccctttttcacttggtgctagatctactatgttcatttgtgcttgtgttcgtacttgggtttatatatgtgatatgtccaagtagattaaaggtgatactgatattgtaaatacgctcatg

SEQ ID NO: 42043 - DNA, 568 bp, Glycine max
  Clone ID: PAT_MRT3847_137967C.1
ggtttgtattgtatgtttcgccagcttctttttttttcttcttaaaaactacttttaagttaaaattaaaaataaaaacttaaaaaataaggtaaaagttgcttcttctttttctttttttaagcttcgaaattcctttttagttaaagctgttaagtaattttttaaaagttttatttttatttaaaactagtcacattatcaagcaaaaaaagtatatttataaaatgaaaaatgtgtataattaatttaatttacataaaattattttttatgataattaaaaacaaaatattaaaatataaatatttaaaactaagacctatatcatctgggagagagtagagagggaatggagaaagagtagagagggaatggagaaagagtgagagaatctgtttgactaataatctacctaagatctatcatctacattttagttaatttaaatacgagattctgtaatgtatttgtgtttgacaaataattaaaacataaatgttattataatattgacattagcaagtaaaataatagaaaataacataaataaaactataggatgtac

SEQ ID NO: 42044 - DNA, 408 bp, Glycine max
  unsure (1)..(408): unsure at all n locations
  Clone ID: PAT_MRT3847_137968C.1
attcaagatactgcaacctcttgatttataagatccatctaataaatcaacatagttagtttactcccaatcttattttattaaaaattgttttaaagcctcngcttttaaatttaatagaaaagganctcttcttacacaaaatntccatcagaacttaaagaagcaaatcaggattactctatgcaactatcatgtgaagaaattttaccaagattcaagatattcttacaatttttacatcacattctatcaacaaactctactgctctatctattgatttaaagaacatctatgtgattccattctcaggtatgcatctaatataacaactaacaatctgctatgcctaatattgtcaccttcccagtatactgttatgcctaatatactagataaaaactaaa

SEQ ID NO: 42045 - DNA, 902 bp, Glycine max
  unsure (1)..(902): unsure at all n locations
  Clone ID: PAT_MRT3847_137969C.1
gatgtaaaaggtgagggtgacccgtgattcgtgaacacgaacaccatcnccatgggcttcaatattctgagaaccacttccatctccactcctatctcttcctccaaatccaaacccattttctcaactcttcttcgttcttctccttccaccattttccccccaaagtccgttactcccaccactcttttcgtttctgccacccccttcttcactctccatcccaagcttggttttcgtggtgggattgtggccatggccgcacctggctctctccgcaaatccgaggaagagtggcgcgcaattctctcccctgaacagtttcggatcctcaggcaaaagggcaccgagttccctggaacaggagagtatgacaagttctatgatgagggagtttacaactgtgctggttgtgggacacctctctacaggtccttaacaaaattcaattctggttgtggctggccagccttttatgaggggattcctggagccataaatcgcaatccggaccctgatgggatgaggacagaaataacgtgtgctgcttgtgggggacatttaggtcccgtctttaaaggagaaggatttccaacgccccctaacgaacgccattgtgtcaatagcatttccctgaaatttgcgccagcccatttttaataaaaattgagtttgctgttcggacgtgactgcttaagtacccccccttagtaaaaaaaaattatgcaatgtacttatattatgaatgaagttcatataatgatggctaaatacccattttaattaaaaagttatgttgatgatttatgttcccttcttcccttggtgctagagtctactatgttcatttgtgcttgtttttcggacttggatgtttatatatatggtgtagattgaaggtg

SEQ ID NO: 42046 - DNA, 1439 bp, Glycine max
  Clone ID: PAT_MRT3847_13796C.1
acggctgcgagaagacgacagaaggggggaggctcataatgtactagtcccagctgtcaacgggggaatattcgcgaagagagagagggcggttgcaattgcatagagaagtgcagagagagcgcagcgtaacgactcagtcaaacagtcggtaactctttcttttcttttctttctttctccgatcgcatcgctcgcaaccacaatcatgccttcccgaagaagaactctcttgaaggtcatcattctcggtgacagcggggtggggaagacgtctttgatgaaccagtatgtgaataagaagtttagtaatcagtacaaggcaaccattggagcggattttttaaccaaagaagtgcaatttgaagataggcttttcaccttacagatttgggatacagctggccaagaaagattccaaagccttggagttgctttctatcgtggtgctgattgttgtgttcttgtatatgatgttaattcaatgaaatcatttgacaaccttaataactggagggaggaatttctgattcaagcaagtccttccgatccagagaattttccttttgttgtcataggaaacaaaatagatattgatggtggaaacagcagagtggtgtcagaaaagaaggctcgggcttggtgtgcatcaaaaggaaatattccatattttgagacatctgccaaagaaggtattaatgttgaagaagcattccaatgcatagcaaagaatgccctgaaaagtggagaagaagaagaattatacctgccagacacaattgatgttggaaacagcagtcagccacgggcaacaggatgtgagtgctgaatatataggttttcttttcaatacaataaagtacattacttcaaaatgatagtcattgctgtgtgtgaggagacatcattgtacattagtgtttgctcaagaaacaaattggtccaatgctatacgttgggtgcttgtttggttttgtgataattgcccatatcagttgttctacatgtatgctattccgatattgtgaaagaaacagcgttagatttttctgaagtaatctgttttgcaatgtctatcgttcatactcgacacactaagtattttttgtacgtctattttcgttgccgtctctttctctctctctctctctctctctctctatcttcttccatttctagggtttacttcaatcacagatctatactcccttcgcgcttgccaacctgtttctccaatctcttttcaattattccatttcgttaattcctttttacttctgattagattatattagagaattttttcatggatcacaagaaccgttgcttctgttactctaatctctcggacaattgcaatcgcgcctacttgattttttagttacagagatttacttaattattttaattttgttgttgatgcttcacagggtggggaa

SEQ ID NO: 42047 - DNA, 306 bp, Glycine max
  unsure (1)..(306): unsure at all n locations
  Clone ID: PAT_MRT3847_137970C.1
ggaacatcaacacaatagataaatcagttgtccacataggtctcatacagagnataaccagtttactatttgaggtgatcagaaacacagtagcatactttcctaagacgtgggacgagatgcacaccaacttttcaaggtcacaactggttacaggaccagtttcagggctttagtacgctagtgttacactagtaaaacacaggttaccagacttcattaaccttaatacagattacattcagtggtctggtgatctctacgattcatacgtcataagtctttccagcactatccacacaaaca

SEQ ID NO: 42048 - DNA, 363 bp, Glycine max
  Clone ID: PAT_MRT3847_137971C.1
ttccggtaactttttaattcctaaattctctaaaattcgaaattctaatttcgttagggaaaagaaattggttgtttataagtgagtatttcttgaaaaagccagggtccttctatcggaatcgatttgggaacgacgtactctttcgtctgcgtgtggcaacacgatcgtttttaaatcatagccaacgatcaaggtaacaaaactaccccatcctactttgctttcaccgacacaaaacggttgatctgcgatgctgctaaaaaccaagttgctattaacccaaccaacaccgtttttgatgctaaacgttttatttgaaagcgttttttctattcatcaatacaaggttacattaaattt

SEQ ID NO: 42049 - DNA, 492 bp, Glycine max
  Clone ID: PAT_MRT3847_137972C.1
ttttctatagcggccgcttgtttttttttttttttttttttttttttgcacaacgcgcacaactaagttacatagcattcctcgagaagaacaagaggtatgaatctctccaccgcacaggaaaacgggcctacatttaacaccattcagcttatactcttcctctccctcaataagaaaataaccgggcgtggaatctactggaaggggagacacgagaccaaatgcaactggcttcggcctataaggcgtaacactagtgatgccctactgctaacactccttggaaagggaggttatgtacgacgcccaatattaaaccaattgaaccttacattatcttcagcctcaaatacgaggatattcataccggtgaaaaataacctgtctactctgtaccggacatgcctagttcggctgatagagccaccaaagaaggcgggcaagggtcatcacctatccataccgtgagggataaatatgtgctttatt

SEQ ID NO: 42050 - DNA, 292 bp, Glycine max
  Clone ID: PAT_MRT3847_137973C.1
tgataatcgttcaaggtggatgtggatccaccagcgtttgctgttgtaatccaccccgctgttatcagagggatattgggtaacagcgaactactagaggtggagaatctcactatctaagaagatcctgtggagaagctcttggaaccgataccagctgagcaaaccctgtgtgtcgtcacgcccgtcatgaatatgtttaccctattgctagctagcgtgcactcgacttgcttgcgtggaccctgatcacaagaaaatctacgtccatgggctttgctgagacgccact

SEQ ID NO: 42051 - DNA, 462 bp, Glycine max
  Clone ID: PAT_MRT3847_137974C.1
gccatgcgtttggaaattttgataaaccgggatcacaggttgccggaccttaaaaccggaaacaaatgcaatcgatacttgatttcaagaatttctaaatttcttcctacttctttgtgaacgaattcttaagggaaagagaatcgctctctgagctggtcacagacttcgtgaatcattttcttttccactgttagactatttgctgaacactctactatttgatgtaggacttagagtcagattgaaactttttctgtttctttctcagttctctgttcaagttcaagttcaagctggtgaaagtttggattagtgcttccactctactatctggtataggacttcgtgggtagactttcctatttctcttctttctttcactctgttccgctcactgagccgcagtgccgttcaaagaggtcctatttgaaaaacacttgggcgttggcgcaaatgatt

SEQ ID NO: 42052 - DNA, 268 bp, Glycine max
  Clone ID: PAT_MRT3847_137975C.1
ccctcgcgttcggtttctacaatccttcaaaaattttgtttctttgtggccaacgcatgaaattgtaagtgtctttatataacctgtgttctgtgacatctttttgcataattatggcactaagtcttttttggtagaaattgtgaagatgtactgatatcatttgcataaactatattgcgcccttttttttttactagattaggctaacacagatactttttttcacttgagaagaatcattcgtattgcctgttttttacacaat

SEQ ID NO: 42053 - DNA, 901 bp, Glycine max
  unsure (1)..(901): unsure at all n locations
  Clone ID: PAT_MRT3847_137976C.1
ctcgagccgctcaacagtatggccgcggccgagactggcattttggcaggtcttctaccagcattgactaaacaaatctctgaaagtgtcgtcgaagtcacgggtgaagtggaaaatgcgttgcatcagagattggagtcaacgggcagcaagaagaagcaggcgaagcagctgaatgccgttgcaaagagctctggaaagtacatgtccaaagtgcatcgtgcattcgaaaagaactttgaaaagtttgaactgtacgttcgccgcaacattgtgttggtgcctgacgcgctggcagatgaagtggcgcagattcgagcggagaagcaaaagaaggacggggaacacgagaggaggattactcaacaggaggaaaaagacatagctctgttgtcaaaggaagagagggaagagcgagaagtgaatgctcagctggaagcgttgcgtctgaaattgagagaattgacaacggcaaaccagcgattagagctggaacagaaagcgttacatgagcgtacacaacacctccgaggccttgtgactcaggttgcgttcctagatgatgtacctgaacggacgatatcgccgttaaagcgcactgcagaggatatctcaggtcttcatgaagcttttcttcagagggacggtattcaggcggcactagaggaaggatctcggcagtccaagcgntcnaaagaagcgacacgaggcagctttcggaatctgcggaaacggtttgcagctagaacggctgaaatgacgtacaggacgccagaagatttggaagaattacattccaaactgctgacaaggtatccccagacacaggcttctcagtaaatctgcacttgtagacccaaacgtaaggttgtttaaactcccnnncccccccccccccnnn

SEQ ID NO: 42054 - DNA, 471 bp, Glycine max
  Clone ID: PAT_MRT3847_137977C.1
cgaaagccacaaatcttgaatttctggagatcagctcttgttctcagttgcttagtatgaatccatctattttgtctctcaagaagctcgagagattgtcttctcatcactgttcccttaacacgctcataagcgataatcatttaacctcccttaaatatctcaaccttcgagggtgcaaggcactaagccaattttcagtgacatcagagaatatgattgcactagatttatcattcaccagtgtcagtgcatttccctcaacttttggacgtcaaagcaatctcaaaatcctaagtcttgtcttcactaacattgagagcttgccttcaagcttcaggaatcttacaagattgcgatatctgagtgtagaaagttccaggaagcttcatactctgtctctaacagagcttgccgcatcccttgaagttcttgatgctacagattgcaaatcattgaagactgtatact

SEQ ID NO: 42055 - DNA, 734 bp, Glycine max
  Clone ID: PAT_MRT3847_137978C.1
ccccccacactttttcaacccttttttagggactctgccccccccccccccttcgttcgggcccctttttttttctcaacacccccccccccccccccgggggtccccccggaaattccggcccgcacccggcgggcgacccaccttccccaatagggacccgtacaaaaccggggcccaaccaggcccaaagcgggccccgggggaaaatggttacccccccccaatcccccccaacatccgacccggaagcaaaaagggaaaccccggggggccccaaggggggccctccccccccttaatgggggggcgcccccggcccccttcccagggggaaaccctggcgccccccctgcataaaggaacccccccccccccggggaggggcggttcccctatgggccccccggggggttttcctttcccccagggagccggccccccgctgatggcccccccccgcccgcccccgaaagaatacccccaggcggcccccctgggtcgcccccccgggaaaaaccctgtggaggggggcccccgggggaaaaaaccaggcccgtctccggggatcgcccccccccccccccccgaaaaacccccccccccacccccccaacccgggaccttgggaaaagggggcccccccattggccccccccccccccccaatcggggaccccgggggggccacccccccccaattttgaaggggggggaaaacacaaacccccccc

SEQ ID NO: 42056 - DNA, 365 bp, Glycine max
  Clone ID: PAT_MRT3847_137979C.1
cccacgcgtccgcgacaaaattgtatgcaaattgtaatgtacgttacaatcaaaaaaaaggggagaataaaaaaagaaaagggggtgattataaaaaaaataatttaaaatggaatttttaaatattattatattttatataatatattatggggggccctttttaagtgtcttaactttcttttctcttgtatggaatttctttatttctctttttattggtctcctcttattttattattactgtcctgggcgttttataatattattttaatttgggtaaaattctatgcgttttcccctcatttatattttcttgtgagaattatatcctctttttgtcagattgtgttaatattttaata

SEQ ID NO: 42057 - DNA, 1336 bp, Glycine max
  unsure (1)..(1336): unsure at all n locations
  Clone ID: PAT_MRT3847_13797C.1
ggtaacgactcagtcaaacactctgtaactctttattttattttctttctttctttctccgatcgcatagctcgctcgcaaccaccatgccttcccgaagaagaactctcttgaaggtcatcattctcggtgacagtggggtggggaagacatctttgatgaaccagtatccttcggtttctgtctacaaactccgtgttctttacttttttttttttaatttgcgtttcaatttgttttctattgtttagtactgcatgaaaactatgtattttcccctaacatacgcaatttagatatgtgaataagaagtttagtaatcagtacaaggcaaccattggagcggattttttaaccaaagaagtgcaattcgaagataggcttttcaccttacagatttgggatacagctggccaagaaagattccaaagccttggagttgctttctatcgtggtgctgattggtgggttcttgtatatgatgttaattcgatgaaatcatttgacaaccttaataactggagggaggaatttctgattcaagcaagtccttctgatccagagaattttccttttgttgtcataggaaacaaaatagatattgatggtgggaacagcagagtggtgtcagaaaagaaggctcgggcttggtgtgcatcaaaaggaaatattccatattttgagacatctgccaaagaaggtcttaatgttgaagaagcattccaatgcatagcaaagaatgccctgaaaagtggagaagaagaagaattatacctgccagacacaattgatgttggaaacagcagtcagccacgggcaacaggatgtgagtgctgaatgtataggttttcttttcaatacaataaagtacattacttcaaattgatttcactgtgtttagccattgctgtctatgtggaggcatcattgtacattagtatttgctcaagaaacaaattggtccaatgctatacgttgggtgcttgtttggttttgtgataattgacccatatcagttgctctaaaaaaaaaaaaaaaaaaaaaaaaaaaaaaaaaaaaaaaaaaaaaaaaaaaaaaaaaaannnaaaaaaaaaaaaaannaanaaaaaaaaaaaaaaaaaaaaaaaanaggggggggcccccccttaggggcctcttcaccccggaatttatttcgggccgggtccctgggggggtcccatttttccttatgggggggggtttaaagcctgggggaaataagggcaaaagttgttcccgggggaaaatggttttccgttcaaattcccaccaaaattacaacccggaagctaaaggggtaaccccggggggccct

SEQ ID NO: 42058 - DNA, 149 bp, Glycine max
  Clone ID: PAT_MRT3847_137980C.1
caggacgttacatgcatttaattttgcgaacctttctataggcgagggattttgtagaggagagacatttttctggaagcgtcattaacggattaattttgaccaccaattgtggggtgagatcaactctttctagttagatggatcca

SEQ ID NO: 42059 - DNA, 117 bp, Glycine max
  Clone ID: PAT_MRT3847_137981C.1
gctttgaaactcgacaaattcatcttgtcacggttaattgtgggacaacataaaggagtacaatggtgttggccactttaatcttacgaacgtggctgtgcacgtttgaaaatcttt

SEQ ID NO: 42060 - DNA, 122 bp, Glycine max
  Clone ID: PAT_MRT3847_137982C.1
gtggtttcatatttagacttggtctgatgggctaatagggcactgacaaaatgctcggggagggtggagcaatatgaagctatcgctcccacactcctgttagggttaggacttccgggaac

SEQ ID NO: 42061 - DNA, 358 bp, Glycine max
  Clone ID: PAT_MRT3847_137983C.1
tgatacggagacatacgataaattctatataaagatttgcggtagaaacgatagctgtaaagcagttgacttcaaatcgtgctctccgcatgtagcacctacttagtgtattgtgcaagtggagctacattgggatcggtaattcaaaagattaccagtgacagtagtgactcgtctaagcaatctttcaagtgtagaacaaaaatggaggggcagattcctatttattctgcgctccaaaacccaaagtaagcgggccaacttgcaaattccttccaagggagtaacaatccacggccacgaattgatggaatccatacctaaaagaacggtaaattcctgattcacagaacaccac

SEQ ID NO: 42062 - DNA, 540 bp, Glycine max
  Clone ID: PAT_MRT3847_137984C.1
gagggtgttaggagtatatagtcatgaaaatgtcagattccttggcttgccatgttaatagtgctaatatccattgttagcatgaagacaaaggcagattggaaacatcaatttctggctagtattagtgttagattactaattccaattgtgttgtgaagttttgattccgaataaattaggaaacaaaaacttataaaaagatgggtcaattaaatagggtgttctcaatatatagaagggtgttatagaggatttttcctttagtttctgctggattcctgtttaattcatttgttcagttttgcattacccttctaatagatttaaacaattaacaaaaggatttagggagactaagataaaaatttgctaaaatatttcaaggttccccaataacttttaaccttcataataattatttgcaattttttaacaaaagagtaccttgcgaatcaaatagaggaaatcctcaactgatagcttccccctctgagatccaatatcttggtcgagccagaattccgagcatacgtacgc

SEQ ID NO: 42063 - DNA, 428 bp, Glycine max
  Clone ID: PAT_MRT3847_137985C.1
aaaaaaaagtttttttttaaataaatgaaaagggccgggacgggtcgggctcaattgtttcccaaaaaacctggggggggcacatacaccccccaccaattttaaaaccaaaaactgggaacattatttttattaaacccctttccaaaaaattcctcccagcttttttttaaaaggggttttttttcccccttttgggggtcccctcaaagggtttttttttcccccctccacatccccaaaatctttcagaatcggtttccatgcttcccataaccctccacccctttggtttttgccccccaagaaaaattttaagccgggggggacataactttttttccccaggtccggggacctttaatcttagtcaccaaaagggaagtccccaccctcccccccttaacccacccccaaaaccccccccc

SEQ ID NO: 42064 - DNA, 197 bp, Glycine max
  Clone ID: PAT_MRT3847_137986C.1
gacagcatcgccaattaatcccaatcactttgaagcacagcatggtggtgcaataggtgcgtgtgcagcatcgtctccgtgtggaggctatcccgtcatacatgtgactgagtttcttcaaatttgattcttcatccagttagctacatgatcagtatctcatcagatgctctgctctctacaggtgctacacatcc

SEQ ID NO: 42065 - DNA, 322 bp, Glycine max
  Clone ID: PAT_MRT3847_137987C.1
gttgttcggtgtgcgaagattgagacgaggagctagctgtgatgctcacttcttggctaaagagagatttgcccacatgcttgctatatctactatgagcactagtcataagcgtatcgatgggaccaccgggcagacatttatccttgatagagaagcctccaccggagatgaaactggacaaagatatatactatcagctgcattctcatgaggtgacagtattgaacgacccactgaggcagtgtatactgccatacacgagcgtatgatcgagctgcaccaatgggggaaacacgatgccatgtgccatgctcttatg

SEQ ID NO: 42066 - DNA, 480 bp, Glycine max
  Clone ID: PAT_MRT3847_137988C.1
acacccacttgaagaagaggctgccccaacaagcaaaacaaaagcaacagcaaaagctatcttccttggacaccctaaattccaaacaacaacccgtgaatcttcccacagaggagaagaagccactatctcccccacagtgtgtaagtagtagcatgtcaaccctcaccactagtagtgacaccaccaccaacgagcataatagtaatcatcatcacgtgcccatgatgaataacagtactactgctcctgaatcgctggacgatgatttctggtctcaagttctctcggctgataataataattccgatgccaccaccagttttccggccactggcgccgcggctgacgggaagttccaaggggtccatccatcaagtgtgtacaataatgtggactattggtttgatgtttacatgggagcgcaggaatttccaaaattttgatgttgcatggctacttaagtacttatatatgttg

SEQ ID NO: 42067 - DNA, 2542 bp, Glycine max
  Clone ID: PAT_MRT3847_137989C.1
atcacccaccccacatctaaagccacttccaagtccaccacacacaacactttgcctacttacctgctacttactactatagtgtctgattcacaggccagagggcaaagattttgagcacaatggcctcgacacaatgctttttgcaccaccacgccctcaccactccagctagagcttcaacacagcgcctagttgtgagcaccaaaccaaaccacattgtttgcaaggcagcacaaaagcaggttactgtccaagagggtgaggacactactactggccttgtctctcgcaggttggccctcactgttctcattggtgctgctgctgttggctctaaggttgcacctgctgatgctgcctatggagaagctgccaatgtgtttggaaagccaaagacaaacactgacttccttccatacaatggggatggattcaaactctcaattccctcaaagtggaacccaagcaaagaggttgagtacccaggtcaggttcttagatatgaggacaattttgactcaaccagcaatgttgctgtcatggtcactgcaactgacaagaagtccatcactgactatggttcacctgaggagttcctatctcaggtggattacttgcttggaaaacaagccttctttggccaaactgatgctgagggtggttttgattccaatgctgtggcaactgcaaacatcttggagagttcaacgcctgtcattgatgggaaacagtactacagtttgactgtgttgacaaggacagctgatggagatgaaggtggcaagcaccagctgattgcagcaactgtgaaagatggcaaactatacatttgcaaggctcaagctggagacaagagatggtttaagggagcaagaagatttgtggagagcacagcaagttctttcagtgttgcctaagaacttaattagtggagtgctattctgcatgtaaatcatcttgaaggggtgtgtatgtcttgaattatgtggcccctttttgtccacaagtttcattatttgaggctgttggttggagtaagcacttcgattcttaatttttcatgtcttctaaggacttaccctcctctcttgtccccctttttctctctttgattaagcattttaagttcctataagccattaagaagcattatgtttataaagggctcaagggtccttttgcaaagtgcttgaatattttgtaataaattttttatttttaaaaattttattttattaaggggcaaaaaaaaaaactcgtggttatttcgccctaatggctcttgctccatccaaagtttccaccttttctggtttttctcccaaacccagtgttgggggtgctcagaaaaacccaacttgctctgtttctctgagctttttgaatgagaaacttggaagcagaaaccttagggtttgtgcctcaacggtgcctctcactggggtgatttttgaaccgtttgaggaggttaagaagagcgagcttgctgttccaactgctccccaagtctcgttggctcgtcagaactacgctgatgagtgtgaatctgcgattaacgagcagataaatgtggaatacaatgcttcctacgtgtaccactccttgtttgcatactttgacagggacaacgtggctctcaagggatttgccaagttcttcaaggaatctagtgaggaagaaagagagcacgctgaaaagctcatgaaatatcagaacactcgcgggggaagagttgtacttcaccccatcaagaatgtcccctcagaatttgagcatgtggaaaagggggatgcattgtatgcaatggaattagctttgtctttggagaagttagtgaatgagaaacttctgaatgtgcacagtgtggcagatcgcaacaatgaccctcaaatggccgacttcattgaaagcgagtttttgtctgaacaggttgaatcaattaagaaaatttcagagtatgtggctcagttgagaagggttggaaagggtcacggtgtttggcactttgatcaaagacttcttgattaggaagatgctgcttaatcttgaatagccttattattagtcttcatttacatttggtcttttctgaaattctgggttgttttctaatttagtagtatttaaatgtttttcctatgtactgagatttaggaactcggagtaatgtaattgctagtagcacatgtaaaaggctgcaagcctattatgcaataacatttgatatctgcatttcaattatctccagtaaaatgtcattggttaaagcttaaattggtggaattctgatggtttgaacatttccacgtagtgcagtatcttgatactgcataacacccgagaaagaaaaatgtccccaaaagttaaattgaaaactacctcgccccaaaagttaaattgaaagctatctgcgaactaaacctacctatcatactgaattacttaaggttcttatggtttaaaatgaacatatttgtatcagcttactataaagaaatgacacaaaaatgtcaattgccaatttgaatattggtaatgg

SEQ ID NO: 42068 - DNA, 265 bp, Glycine max
  Clone ID: PAT_MRT3847_13798C.1
ctccaaatggagaagctgggtacagagtttggatgtgggtggggtcagaagcagatggtcaactcacgaaaggaggatgtgtttaagcctaggagtacctgatatcaacatggacagattctaagccttaagaacactctggggtgagaattgatgtaacatgaacaattctgtaaagacagaaatatgcatttgttaattcaagtaacaagtctgaagtgtcaatgatgtgggaattgctgcactaggtgctgaggagataatg

SEQ ID NO: 42069 - DNA, 1678 bp, Glycine max
  Clone ID: PAT_MRT3847_137990C.1
gtgattagttgcgtgggggccgcggtggggctcccgtccggtttggttggtctcctttcagtaccaataccaagcaagcttagtgaagaatgatgattactagatttgagtctcatctcaggtgccactcagtgtacggaacagtgtcataaccgttttcgcaacagtccaatctctgaaccttggtctcgaacgctctggcctcggggcggaaacctacgtccccgaggccatgcactccattcgtccgcagccctcctggccgcggccagggccgaggcggaacaggtcatgttcggtgccttggacaaacttttccaaagcaccaacataaaaccaaaggatattggtattcttattgtgaattgcagcttgtttaaccctactccctcactgtcttccatgattgttaataagtacaaattgaggggtaacattaggagctttaatttgggagggatgggatgcagtgctggagtcattgctgttgatcttgctaaggaccttttgcaggttcataggaacacttatgctgtggttgttagcactgagaacattactcagaattggtactttgggaacaagaaatccatgctcattcccaattgcctatttcgtgtgggctgctctgcgctgcttctctctaacaagccggcagatcgaaggagggccaagtaccggcttgtccacgtcgtgaggactcatcgcggggccgacgacaaggcgttccggtgtgtttaccaggagcaggatgatgctgggaaaactggtgtttccttgtctaaggatttgatggcaattgctggtggagcattgaagactaacatcaccacacttggtcctctggtgctgccaattagtgagcagcttctgtttttcgtgactctgctgatgaacaagttatttaaggctggtgtgaagccttacataccggatttcaagcttgcatttgatcatttttgtatccatgctggtggcagggctgtgattgatgagttggagaagaacctgcagctgcttcctgagcatgtggaggcttctaggatgacccttcatagatttgggaacacttcctcaagctccatttggtatgagttggcttacattgaagccaaagggaggatcaagaagggtaacaggatttggcaaattgcgtttggaagtggtttcaagtgtaacagtgcggtttggcaggctctgaggaatgtgaggccttctcctaatggaccatgggaagattgcattcataagtatcctgtggaaatagtcacatagtgatcatagttcagttcagttctcagtcacatactctggctgctacaacttaattcagggtacccttcattagtttccagatccattgtctctctctctgttgtagatttcattgtgtaattcactgcctcttttgtgtttgatgattgtggattttcattgggttaaattcatgtatctggagtaatatgatatggggaattcctgaatttttttttcttcctactaaaaaacttatgaatttttatttttttagtcataaagttgcgccttggtaaggagttgattataggttcgaattcgaaaatactccttttacatatgtaagggtaagactgtccaataattctctcccatatttttacccaacgaggaccctttgagcctcgggatccagagctgc

SEQ ID NO: 42070 - DNA, 1140 bp, Glycine max
  unsure (1)..(1140): unsure at all n locations
  Clone ID: PAT_MRT3847_137991C.1
gtgattagttgcgtgagggtcacagaggagcacattggtttggttggtctcctttcagtaccaataccaagcaagcttagtgaagaatgatgattactagatttgagtctcatctcaggtgccactcagtgtacggaacagtgtcataaccgttttcgcaacagtccaatctctgaaccttggtatttcggcaacgcttaacataacttgtttttctctttctctttctcaaccaatttgtactcgtcattattattattataaatcaatagaaagacaggaaccaaaactaattaaaaaccacattcacattattcctccgaagatgacagtgacgagtggagaagaagaaggcgccgttggaggagttcagatccaacacaggagcagaatggtgctcccagattttctccagagcgtgaatctcaagtacgtgaaattaggttaccactacttgatctccaacctcgtaaccttattccttgtccctcttatcctcgtcacgctcattcaggtttttcagaccaccgacatcgaccacctccgccacctctggctccacctccagtacaacctcctcaccatcctcacctgctccgccgtcctcgtcttcggcctcactctctacgccgtcactcgcccccgcgccgtctacctcctcgactccgcctgcttccgccccgccgaccacctcaaggcccccttgcgtagcttcatggatcactcccgcctcacgggagacttcgaggagtcctccctggagttccagcggaagatcctcgaacgctctggcctcggggaggaaacctacgtccccgacgccatgcactctattccgccccagccctccatggccgctgccagggccgaggcggaacaggtcatgtttggtgccttggacaacctcttccaaagcaccaacataaaaccaaaggatattggtatccttattgtgaattgcagcttgtttaaccctaccccctcactgtcttccatgattgttaacaagtacaaattaaggggtaacattaggagctttaatttgggagggatggggtgcagtgctggagtcattgctgttgatcttgctaagggaccttncaggttcataggaacacatatgctggggttggtagcact

SEQ ID NO: 42071 - DNA, 2436 bp, Glycine max
  Clone ID: PAT_MRT3847_137992C.1
atgtcttctaagagagcctcatcagttacagttagttgtcttttgaagttgtgcaaaggatgttgctcacacaaaggccttagtacattgagtgtgactacttgggatactatgatgaacacagcttgctaagaatgggtttgccagaagattcaattgatctatttactcaatttaaaaacttgggactgaaacctgatgggacagatgttcattggagttcaatttgcatgtagtgtgctgggagatattgacgagggaatgctgcactttgaatcctatgatggagctggtcagattgcagatggaggtcatataaatgtgacccgaaatgttcacaataatttggtgggtcacaatggaagtgtcaatgggtactttggtcaaggcgacatgaaaatgcaacaaaaagttggggcaggtgttgataatgcatggggctctgggatgcatgcaaatccatttgttgagaaacatgattggacacaggaacctggattcttctcgtttaaatgagcaatcaaaggttggcctgggcctttagagtcacagggaaatcttagaggggacctaaatcaaaacattgatcattttcagcagccacaaaatgttcattacaaagggagtcatgaaatgcgtccacagtacccaggttatggacagtctcagcagagtctaaaagatggtcaatatttgccaaatttgaatactgcacaaagatcagtggttggctctcatctatcaagtaatgcaatcaggaaggcaaagaagaagctcttcttgcccacagtgagagacttgctgttgcttatggtcttcgaaaatttctgcattgagggtaacgtgaaggaagcagttgaagttttggaattgctggaaaaactagatattcctgtggatttgccccgatatttgcaattaatgcaccaatgtggggagaataagtctcttgaagaggcaaaaaatgtacacaggcatgctttacaacatctgtcacctctccaagtcagcacatataatagaattttggagatgtatttagaatgtggttctgtagatgatgctctcaacattttcaacaatatgccagagcgcaatttgactacttgggatactatgataacacagcttgctaagaatgggtttgccgaagattcaattgatctatttactcaattcaaaaacttgggactgaaacctgatgggcagatgttcattggagttctatttgcatgtggtatgctgggagatattgacgagggaatgcagcactttgaatccatgaacaaggattacggcattgtaccatctatgactcattttgtcagtgtagtagacatgattggcagcattgggcatctggatgaagcctttgagttcattgaaaagatgccaatgaagccaagtgctgatatatgggagactttgatgaatctctgtagagttcatgggaacactgggctgggggattgttgtgctgaactagttgagcagctagattcttcttgtttaaatgagcaatcaaaggctggtcttgtacctgtaaaagcctcagatttgacaaaaaagaaagaaaaaaggactttgacaaacaaaaatcttcttgaagtaaggagtcgagtccgtgaatatcgagcaggagatacttttcatcctgaaagtgataagatatatgccctgcttagaggtttaaagtcacaaatgaaagaagctggctatgttccggagacaaaatttgtgttgcatgacatagatcaggaaggcaaagaagaagctcttcttgcccacagcgagagacttgctattgcttatggtctccttaacagccctgctcgcgctccgatgagggtaattaagaacctccgtgtttgtggtgattgccatacagcactgaagattatttctaagcttgtaggcagagaactcattattcgagatgcgaaaaggttccaccattttaacgatggactatgctcctgcagggattattggtgaacatgaacttagatgtatcctgattcctgactaccagatggattgaatagaatggctgttggtaagtaacccctcaagccagcagatagggaaattgttcatatatctcccggtcattaaattaaaattgatctttatatccacgaggagattggaattttgtttaaccaggctcttccacactaataaatcaagcagtgggacgtgcattcaggttgcagaggcattattcattgagtagttttatataattggttgttgtagcttccatataagatataaattattattgtcactccaggcaagggaaaagcttatgtagttaatagacaacattttttttgaaaggcagttcatagacaacattgacattcaatggtataatttcagacaacttttttggatgtcagaacctagtcatttaccacaatcttaaaatcc

SEQ ID NO: 42072 - DNA, 723 bp, Glycine max
  unsure (1)..(723): unsure at all n locations
  Clone ID: PAT_MRT3847_137993C.1
catcctgaaaatgataagatatatgccctgcttagagggtttanagtcacaaatgaaagaagctggctatgttccggagacaaaatttgtgttgcatgacatagatcaggaaggcaaagaagaagctcttcttgcccacagtgagagacttgctgttgcttatggtctccttaacagccctgctcgtgctccgatgagggtaattaagaacctccgcgtttgtggtgattgccatacagcactgaagattatttctaagcttgtaggcagagaactcattattcgagatgcgaaaaggttccaccattttaaggatggactatgctcctgccgggattattggtgaacatgaacttagatgtatcctgattcactaccagatggattgaatagaatggctgttggtaggtaacccctgaagcctgcagatagggaaactgttcatatatctcacggtcattaaattaaaatcgatctttatatccgcgaggagattggaattttgtttaaccaggctcttccactctaataatcaagcagtgggatgtgcattcaggttgcagaggcgttattcattgagtagttttatataattggttgttttagcttccatataagatataaattattattgccactccaggcaagggaaaaacttatgtaattgatagacaacattgaaattcaatggtataaacttgtttgtcttgcattcttgcttat

SEQ ID NO: 42073 - DNA, 292 bp, Glycine max
  unsure (1)..(292): unsure at all n locations
  Clone ID: PAT_MRT3847_137994C.1
cccacgcgtccgnccacgcgtccgggccgccgggccaacggactcttttgggccaccggttgaaggcccaacccctccgccaatttttcattcgccgcggccaaggccattaacggcttgaaggatcaaagccaagttttaacttccccttacccaacttacgtgggggttaacaacggcaacgggggcccgaaacttcttgaattgtgaaacagcgcctctttccttatatgcacacattcgccactgagcaaagaaggttgtctgtggatgtgataaaaaaggcattcag

SEQ ID NO: 42074 - DNA, 331 bp, Glycine max
  Clone ID: PAT_MRT3847_137995C.1
ggttagctaaggaagtgtgtcgccccaaataaaacgcctccaataaacgttaggattcccgtggggtccccaaaatttagaaaacgggacacgcgcggaaagcaaacccttttagtttttttttgtgccggatttcttgctaaccctcccgtaacggcttcccagcctttctcctgtttgggcacctggacacacccgagtgccccgcttactttgaggttaagctggggctaacaccctttgggggcccttgatgggcccttggccccttcggggtttctggggaagaacgacaactattggggcccccaagggaacccttttccacctt

SEQ ID NO: 42075 - DNA, 1965 bp, Glycine max
  Clone ID: PAT_MRT3847_137996C.1
ttctcctacatcctcacaaagatgcaaaccgagcactcttctctcgtctctcagttgctcgcttattgtgatttattatgttaagtcccaaatgatgtcttcaaagagagcctcatcaattacagttagttctcttttgaagttgtgcaaaggatgttgctcgcccaaaggccttagtacattgagtgctgttagcactgctgctgaaaggacagatttacagttttctggtggttatcaaaatgatgattcttcaggttaccagcaaaatcgtgttgggttttatcaggaaagccaaaataaggttgattctaatgagcttttgaataagcaaagacctgattatgtttcccaagcaaatgcagagcaaaattcttatggagctggtcagattgcagatggaggtcatataaatatgacccaaaacgttcacaataatttggtgggttataatggaagtgtcaatgggtactttggtcaaggcaacatgagaatgcaacaaaaagttagggcaggtgttggtagtgcatggggctctgggatgcatgcaaatccattggttgagaaacatggttggacacacgaacctggacaaaagatgcagtctcccaatgcatatggttcacctaggcctttagagtcacagggaaatcttagaggggacctaaatcaaaacattgatcattttcagcagccagaaaatgttcattacaaagggagtcatgaaatgcgtcaacagtacccaggttctggacagtttcagcagagtctaaaagatggtcgatatttgccaaacttgaatattgcacaaagatcaggggttggctctcatctatcaaataatgcaaatcatgatggcgaatcagacaaggcatctaatgatagtccatatagagctacacttgaggaattagataatttctgcatcgagggtaacgtgaaggaagcaagtaatggtttggaattgctggaaaaactacatattcctgtggattgccccgatatttgcaaataatgcaccaatgtggggagaataagtctcttgaagaggcaaaaaatgtacacaggcatgctttacaacatctgtcacctctccaagtcagcacatataatagaattttggagatgtatttagaatgtggttctgtagatgatgctctcaacattttcaacaatatgccagagcgcaatttgactacttgggatactatgataacacagcttgctaagaatgggtttgccgaagattcaattgatctatttactcaattcaaaaacttgggactgaaacctgatgggcagatgttcattggagttctatttgcatgtggtatgctgggagatattgacgagggaatgcagcactttgaatccatgaacaaggattacggcattgtaccatctatgactcattttgtcagtgtagtagacatgattggcagcattgggcatctggatgaagcctttgagttcattgaaaagatgccaatgaagccaagagatacttttcatcctgaaagtgataagatatatgccctgcttagaggtttaaagtcacaaatgaaagaagctggctatgttccggagacaaaatttgtgttgcatgacatagatcaggaaggcaaagaagaagctcttcttgcccacagcgagagacttgctattgcttatggtctccttaacagccctgctcgcgctccgatgagggtaattaagaacctccgtgtttgtggtgattgccatacagcactgaagattatttctaagcttgtaggcagagaactcattattcgagatgcgaaaagcaaaattaaggtaagcctcacaacaatcttgttatgcagatatggattgaatagaatggctgttggtaaattggaattttgtttaaccaggctcttccacactaataaatcaagcagtgggacgtgcattcaggttgcagaggcattattcattgagtag

SEQ ID NO: 42076 - DNA, 368 bp, Glycine max
  Clone ID: PAT_MRT3847_137997C.1
ttctggctgcgagacgacgacagaaggggaggggtcttcttaccattgttcattgttctacaatagcggctagggggatagcgcaatttcttctaaaatcaacgaagatgggctatgacatagttaacatcaatctcgcggtcattgtgcatatatactctgggaaatccactgccactggtcaccagatttacaagcttacaggcattgacaagcagagtcatcaccaggttcgagaaggtagctgctacaacgtacaagaggaccaccaagcttgcctgaatgctggtcagactcaaagcagcgccagacataggaataacgctacttatagctttgtggacaccttaaacaacagaccattattg

SEQ ID NO: 42077 - DNA, 129 bp, Glycine max
  Clone ID: PAT_MRT3847_137998C.1
acgcgcgacgtcgagctactgtatcgagctcgaatcgcgctcgagctgtctttggcatcttcgctgcaactctctaacttccctctttttacgaatctgaatagaaatggcttcggagactgagacgtt

SEQ ID NO: 42078 - DNA, 402 bp, Glycine max
  Clone ID: PAT_MRT3847_137999C.1
gaggagctaaatggcaattaaagagaatggagaggggcattaaagtgaggaaaagtatttacaagttttgggtccatgattcatcgtgcgtatctaaaacatcttcaaatctatctttgaccgtcgtactctttttaattttggctcatcatcacccttcgccttttcgccgctgttgcagactctgctcaaaatacacaaacaacagccaccacactttcattcacccaccaccctcttacaatacaatatctccattttgcccttctttcccccctcatctctataaatattttaatctctctcccatttcattcattaagcatacactcacacttttctttctcatcctctcattcattactctgatccgacggctgcgatcttctcgtttctccaatc

SEQ ID NO: 42079 - DNA, 899 bp, Glycine max
  Clone ID: PAT_MRT3847_13799C.1
acacccactaacaagaaagtcacaccgtaccaactcaaccatggatgataaacctctctctcttctcttgttaatcaattagaatcagattctttcttctttctctctccgttttagttgctatggaaaatactaagaagcgagaggtgagggagggtgaagatgatgaagatgaaatgaagatggagaagttttacgcgctgttaaggagcttccgagacgcgcgtgatcggcggcgaagggagttggaaaaagaaaaacacgagagccgccacagctggaagaagatgaagaccaccgccgcaacaaccaaggacaataaatcacaagtttcttttgaatttcaggacttcaccaccgagattcatttcagaaagccacctttgacttttgcaaatccagttgcatcatgtgacactagtatcaaagacgacaacaaaggtaagaagaaggaacaacaggatcttgctctcgacctcaaactcgctctctagtaccaatcatggaccttcaattgtgtatatattgcaatgatgcaattcgcaaatatctacaatttgtcatctatcaagttctttatgtattcccgtcacaaaaaaaagttatttatatgttgacgcatgacttgaccggggaaatggtttccgacgaataacgtacataagtacttttatagcagttcgattaatggtgtcaggttaaagaaaacgtgtctgaaggtgttttttttttaatgtttgaaatgtattttttttagataaataatcatttttgtgtctcaatgtgtaaagcgttgataattcctgttttaaaatttagattttaatcttggagagtgaaaaaaaaaaaaaaaaaaaaaaaaaaaaaaaaaaaaaaaaaaaaaaaaaaaaaaaaaaaaa

SEQ ID NO: 42080 - DNA, 435 bp, Glycine max
  Clone ID: PAT_MRT3847_1379C.1
gggtccacggcggacattcaggtatttccccatgaggaagggtgcagcaagtgatgaaagctccccccaagccgaaaacaagtgcatacttggggacctttgacacaggctaattccctgaatcgtcgtcgaacttatggctaggtaagagataattcggcgaatcgaaatactccagcagttagaggaaaagaaagtaaaagtgacctttgcagcagtggtgagtgaaacgggagtagttcaaattgcgaaaatggggccgcgggagagtcacataagcgctgcgtcgtcaggtgaagtagtagagaacgtcgtatttcagacggtcagagcttagcagttgaaagtactatcagtccatgtctcgatttcagcagtacggggtatgcggaactttgcgcgaactagtaaggattattccgtaaagtcaaacat

SEQ ID NO: 42081 - DNA, 367 bp, Glycine max
  Clone ID: PAT_MRT3847_137C.1
ctcctactgctgaacgccagggcaatcagacccgtgctaagcagagcaacaacgccatcgacatcacgattagggatcgtggagccagtgccagcagcaaccgtgctagaggatctggtgagccctaacagaattgtagtggtcgtagtggccgtagacgcgggtcccgtggagatgcccgcgtgaggagtggtggtattgcacagtcatgagggtgaccgttacagcatgatctgacttgcagagcacgagaagcaagctgtttacggatggagtgccgagactggtgacgtctagcatgctgacaagcatgccggttaggccatagacatgatagaagataaggattccgataaagaagatgccg

SEQ ID NO: 42082 - DNA, 250 bp, Glycine max
  Clone ID: PAT_MRT3847_138000C.1
ggctcacatatactcccactaatgtgtggcctagtgacctgagagctaaacgcggaggcttgactcctatacttgacggaaatgaagctagattgaggaatcgtgatgccaaaactgagatgtgcagactttatgctgatggcctcgcgggtgacataccgattaaacaaaatcttggcacacgtgctacggaccacgctaacttcaaagtattgtatactgcgcttcgtatcacgaaccaatgtgaagg

SEQ ID NO: 42083 - DNA, 218 bp, Glycine max
  Clone ID: PAT_MRT3847_138001C.1
ccacgcgtccggactactagcgccggaattcgctgctccgtgtggaatccctatcccttgtctaaccatgtgagcctctcgcttacttactcttgattcggatgcgatgtcgcctctaggccggcgttggtgatgtgatgtatagttaatctcagcaaccttgatgccgagttaaagatgcctgggaccagcactgtgaagagctccgggtgccctcc

SEQ ID NO: 42084 - DNA, 675 bp, Glycine max
  Clone ID: PAT_MRT3847_138002C.1
ccacgcgtccgggaaattaattggagatgagagtcatgtttgccagttccaggttccttgtacttactgcttgtttaaatggattgacatttacatgcatttcaaaatgttttcatggcaaaacatagatatagtttttcctgtgtttttagtattgttctctactcagaatcagagtttcactattaaagtatgttatgttgacctatcgaagtgaaactcattctattaacaccaaaagcacctaatcagttacatttaacttttgtccttgcctaaattggttttactaatatatatatgatgtggtttgtgtttatggggttgggtgtgctttcaacactaatctctaattagaattggagtattataataacctatgttatggtgacttttagagatgaaacttcaattttaatcagagattaaagtagtaatttttggacactccatatttctaaatacctcattaatattttttttttcttcttatcaaatcatatcacgtatcatacttataattttttctcttttatctttctctcactaggtgtaaagtagattgatgggtgttcaaaaatcatttttgtagagattaccactaaaagcacctaatcaactacatctaagatttgctcttgcctaatttggtttactaatgtgagtgatgatgtg

SEQ ID NO: 42085 - DNA, 272 bp, Glycine max
  unsure (1)..(272): unsure at all n locations
  Clone ID: PAT_MRT3847_138003C.1
ggcttcggggttattttttgtttttgcaaataaattaccccattaccagccgaccttacaactgaantgggcctttttccacttaaaagccaaaggataccttgggccatggacccaaccctgccccaacttattattattaatttacctttttaccttccaaattccaagacttttaatttttaaaaggagaaaaggagttaaccggttctttttatggaatggaacccaaaccccacaaccttggccttgattttggtggtggtggtggt

SEQ ID NO: 42086 - DNA, 547 bp, Glycine max
  Clone ID: PAT_MRT3847_138004C.1
ctctcattgaaaacacaacccgttttctctctctgcactctccaatcatgcgcctaacttactaacaactcttcaactttatagccaccgaaacgtcaatcgagaatctcgacgcttccgaaatctcgccgagcacttcgtccgaaagtctcggcgagacgccggaaattgccgacattaccactcggaatcgatctcgtgtcggcggcgaggcgaaatatctgcttcttgaggacttcggcggattctttgtgtcttcaccacacgcccattatggtcgaagccgtaagaaggtaccatgatttctggatgccgctgattgctgatctcacgctgcaaaactcttcccctcccatgattcttcctccccttgacatccactgggtttggttctgtcacactttaaaccccgtgagttacagggaatactgtgaaacgagattctcgaagctgattggcaaagcgggaatctttgacgaagagaacagagagtacgcgttgatgcggtgcatggagattttgagcagtagataccccgttggagtcg

SEQ ID NO: 42087 - DNA, 146 bp, Glycine max
  unsure (1)..(146): unsure at all n locations
  Clone ID: PAT_MRT3847_138005C.1
taaacggggaatccactgatgttttgctnagcagaacttaagcaaacggtgggttgttcaacaaaggaaaatctgattatgtgagagatcccattcctgatgtagggttagaagggcgttcggcctgcgcctaggagtatggggac

SEQ ID NO: 42088 - DNA, 400 bp, Glycine max
  unsure (1)..(400): unsure at all n locations
  Clone ID: PAT_MRT3847_138006C.1
catatgagacaacactgagcatcgtctagctatctcgatcgaactgtccaaggtcctgtcacaggcactggtatgggagtgttggaaaccgtgcacgtgccnaggctaaacaggtagcactaggccaaaataacccggtatcggaagtcgcatgtccagctgctaggtaggcagttatgtagcccaagttattgacttggccggtgtgggtgcctgttgtggtcaacgatgtgagtgtaccagaggcaatagccggtaaggtgacgcagcaaggtactgaggctgaaatgcacagcaggtagtcgctgatgagcagccccttgtacagacgcgcaggatactgagcttttgccgcccaggtagtcntgcgaaagtgccatgctttgtagttgggtgggct

SEQ ID NO: 42089 - DNA, 367 bp, Glycine max
  Clone ID: PAT_MRT3847_138007C.1
cccacgcgttcgaaaaaaagaaaaaaatttaaaattttaaaaaaaaaaagaaaaaaataatgtaaaggtaaaaaaaaaaagataaaagtaaaaaaaaaagaagaaaaaaataaaaaaggacaccatcttacaagacaaacgcttgagtggatgcacattaaagaataaggatcttaaagcagttcacgagataatgaaattggctcacaaagcgatagagactaatgatgtaatagtggatgtgaagctcaagatggctgtgtggaaccagtggatactcagcgtggtaagtaggattaggattcggattgctcgaaagaggaactacgatgaggatgcaaaggaagagcttaattgtaacgttact

SEQ ID NO: 42090 - DNA, 325 bp, Glycine max
  Clone ID: PAT_MRT3847_138008C.1
ggggcaagccttttaaaaggattacctggaaaacagcccaaaccatttgcccttgatcccccaaggggggggggctcaaacactcccaaaaaaaaaaacccccccccaaccccccaaaaaagggggggtcaacaaaaaagggcccccccatccaaaaaaaaaccacccctttgggttgggccccccgcttccttgggagcggcttgaacaaacttgaaccccaaaaaaccccgggggggaatgccgggaaaaacaaaaaaacccaccgggggggcaaaaaacccccggggggagctaaaaaccccaaaaaccggcctttggttca

SEQ ID NO: 42091 - DNA, 268 bp, Glycine max
  unsure (1)..(268): unsure at all n locations
  Clone ID: PAT_MRT3847_138009C.1
tcntatcntattgattgcatantanacaagagtcncatcgcntcacaaatcttttttgtctctctctnactttnntgcnttctttcttcttctgtttatcgcatncgcgtattggttggtcgaaaaacaaagagtgtgtgtngtgnggtttggtttggttttncacttttcttcatctttttgcgagaagacacacacacagagagagatggctacgacgaggattngangncagagaagaagncgaagacgagatcgtgtgccagct

SEQ ID NO: 42092 - DNA, 385 bp, Glycine max
  Clone ID: PAT_MRT3847_13800C.1
cccaaggggtggaaaaaaacccagtttttggggttggcttttaaacatggcacagggggggggaaaaaaaaaaggtggtcccccaaacttgttttccccattcccacctttttggggggggaaggggggtttcgctccacccggttctaagataaaaggattccttaaaacttgtttgttgcctaccttaggggatggaatatggcaaatttggtgggggggggcaattgaggggaaaatccccccggaaatatccttttttttcgggtggaaaataattcccaggctgaaaatttcccaggggggggtctccatttgctaaggctcctttttgggtcccggggttgggcccattatggaaatccttcttttaagggtttttttt

SEQ ID NO: 42093 - DNA, 345 bp, Glycine max
  unsure (1)..(345): unsure at all n locations
  Clone ID: PAT_MRT3847_138010C.1
aagnaaggaagccggctcgaggcactgccgtccattctctccataacctttctattctctgctcgccccagaccggaggagccggtctaaactgggtcggccgcctccgctccaacaagggcatccccaccggcgacgaacctgacctcgattccttcctcctctcggcccctccgcaatccccgcaggcccgccccaatgacccgccccttaaccctccctccgtggcccgcgacgagcccatgcccatgagcaccatcctcgctgagctcttctgcatgggcgccaccctctccaaaacaaacaagaaatgcccaaggaaacagacccaaccttaaaattttt

SEQ ID NO: 42094 - DNA, 336 bp, Glycine max
  Clone ID: PAT_MRT3847_138011C.1
tttttacattattaatgaaatttcactctttatctaacgggtctaacgcggtatatagtgaatgatcaaattctttcaaaatgataagactaacaccttattaaattaaagaatatatataaggaatagtgtcaaacctatttattcttcttacaaaaaatatgcattaaatttcaactatgtaaaaccagccccctgaaacgggtgaaaggcccccttcccctactagcacatgccaacctattactgatcaactgacctttgccaattcacattcatgtatatattaaaatccatcgctactgataatggattacagggaaataagacacaacc

SEQ ID NO: 42095 - DNA, 375 bp, Glycine max
  Clone ID: PAT_MRT3847_138012C.1
ggaaaagcaaaaataaaaaatgttaattttacatttttgttgacaacccaggtataagaatagtgggcatacgggggaaatgtgggggaaatactgcgtataatgcaacattataaaaaaaaaccttgggctattgctcctaatgtttaatagaaggagggggcggaaaaacaaactgtaagggacgcttaaagaagagcatagggccttataaatcccgtgccaaaatgaaaatgaagactggccaatctttttatttttcatgacaggggggccacccccattcgggcaaaacaactgattcctaaaactagggcaggcaaaagaaaaggaacaattttttccggcaaggaaaaaacgcacttagagccttta

SEQ ID NO: 42096 - DNA, 725 bp, Glycine max
  Clone ID: PAT_MRT3847_138013C.1
ggagagaactagtctccagttgtttttttttttttttgctcaaattcttggcaatctgaaagttgaaagagattatttctgttcatttttttgtttcacgattatgagtttccaatcaatttcacataccaaagagcagttattcttgttcccatgctatattgggtgtgctgttgcaatttgttgaggtctgcatacttgttattgaaagatatgtttgattgtttcttctccctaatgttgctagctttgtccattttacataatgaggtttcattttatatgggcatacgttgaatttattacttttggagacatggtttgttgacggaaatctgttgtataaggcttgtaatgctttgggagtaaggtaagatgtgctgtggacttcttgttagtgctgaatcagtttctcatctcagaagatggtgctctgaaaagttaaagcaaaagtagaaaagcaaatagggtaaggagacacaaatgcttgaacgccgctgcgctgcacgcccatgttctgatgggttgtttctatcaggggcagtgaaaacctttgtgtgatgaactcatcgcttggggcatagtgcctgggataacttggtcgccgtgcatggttgatgatggctctgtgacatgggtttgagtggaggatcaaatatatctccaagttgcagcgaatacagaaggtcacctcctcgggacttgggctctctcgctctcatgcg

SEQ ID NO: 42097 - DNA, 362 bp, Glycine max
  unsure (1)..(362): unsure at all n locations
  Clone ID: PAT_MRT3847_138014C.1
agaaaagggggttttaatntattttttttttttttttttttactttttttttttatngggaaaacggggaatagatattggaaaaaaacctgtatattttatcgggcatacaggggggagggacaattattgccctatttaaaatttcttctacgaggggggggccaacacacaaaaccccagaanncaaaaaaaacccaaaacgggggggggagggggggacaaaaaaaaaagagggaccgagggggaccacaaaaaaggccggagaaggaagaggaagaaccaaccaggggcccaaacaaaacagancggaccaaagggaccggcaagagngcccagccaaaaagaagcggacaaccccc

SEQ ID NO: 42098 - DNA, 405 bp, Glycine max
  Clone ID: PAT_MRT3847_138015C.1
gttgttgtgactaaggaaaaaaaattttgttttaaacatccagtcccccgggggcgagaatggtgaatttccaaaaaaaaattgggtccatctgtgcgcccctttttctcataggtgtctaaacgggaaggggcaataacgggggaggggggggagaaaaacactgctggggggggtcgcgggggccccttaaaaggccggagagctaagtggccatgctcgaacccaaaatatgggggcccacattagatgtcttttaaggctgctcaagatgagaccactaagaatgctctgtctgagacattatgatctccgggggctttgaataagggaagtcaacattcttgcccctctgggcagaaacactctggtggggaacgggagatgttctcaaaaggggggggg

SEQ ID NO: 42099 - DNA, 511 bp, Glycine max
  Clone ID: PAT_MRT3847_138016C.1
tacggctgcgagaagacgacagaagggggttgaagatgagtgaagatataggtcaatggacttcttaaaacaaatctgtgatgagtaagttcatgataaaagtgactcagtagtgggccatacatattgtccataatggatttaattttgttcccttaagggtatttgggtttgaaaatctgatattgattttagtttccaatctcattgcaagtcaaacaccacaaaattttcttggaagttggtgttaaataatattgtatgtaactgtagttcggaaatttaggactcaagatttagttgggacttaaataatcatagacttgtgtgattatggtcactactatttgtaaatgcctgaaacttttgatgattttggcttagttcctccaacaccttccaataaattcgagcaaaaaaacaggtacaatcgcaagattccgctggtatgctgcacaagttatctggaggggcatggaacccacatgatgtgagttctgttgctgcaact

SEQ ID NO: 42100 - DNA, 226 bp, Glycine max
  Clone ID: PAT_MRT3847_138017C.1
cctttgcgacctcccacgcgtccgcccacgcgtggggtcaggcttactcttccttctcccccgtctattttacgcccctcctctgttcttcgctctctccactctgtttccactgggagaaaaaaaaaaaaatgcctgaagaaaatccgcaactcgatcctaactttatcatttcggctggcaactctccgtggcggctttcatccccagagcagatatcttccgt

SEQ ID NO: 42101 - DNA, 382 bp, Glycine max
  Clone ID: PAT_MRT3847_138018C.1
gagttgaaaacagaatgatggaaaatttagaggggggagggaattactcaacattcctattctatttacatgttgtaacagctaaaacgagctccgcaaattcctttacacctttagaacgaggcgatccgattcaactgaaccatgtcaccacctttgatgtgtgacccgggagaggccattatttgagaagcagggaggaaagtacatataacgataaatcaaaggatccctggccttcactgattgcatagagtagcttcttgtacataatttccttggtagaataaggaggaagcttaaggtaatttgcacacgtcatcacacttggcaagtcatcatccgctaattctgaaggaccgttcccattagatgaagcatt

SEQ ID NO: 42102 - DNA, 1416 bp, Glycine max
  Clone ID: PAT_MRT3847_138019C.1
atgaaaaagcaagtgcagggtccaattccaaacgcgtgtttgagtgaaagcagcaggggagcaagatggtctctcaatggaatgacggctcttgtcactggtggcactcgtggaatcgggcacgccatagtgaatgacttagccgcgtttggcgctgcagtgcacacttgttccaggaaccaaacagagctcaaaaagtgcttacaagagtggcaaactcaggggtttcaggctactgggtcggtgaacaacgtcggaacaaactttagaaagccaaccgttgaatacagtgctgaagaatattcagagctgatgacagttaatttagactctggttaccatctgtgccaacttgtatatcctcttctaaaagcatctgtaaagggaagcattgtgttcatttcatctgttgctggtgtgcttagcaaaaatctggcttgtgaatgggcaaatgacaacataaggagtaactgtgttgtaccttgggcaaccagaaccccacttgttgaacatgtaatttgttccaaaaccaaaagtttgtggaagatattttgtctcggacccctcttaagagcattgcagaagcggaagaagtgtcatcactggacaagaagcagcattaacagaggagcaagatggtctctcaatggaacgacggctctcgtcaccggcggcacccgtgggatcgggcacgccatagtgagtgacttggccgcgtttggcgctgctgtgcacacttgctccaggacccaaacagagctcaacaaatgcttacaagagtggcagagtctgggctttcaggtaactgggtcggtgtgtgacgtgtcctcaccatcccagagagagaagctcattgaggaagtcacttccatcttgaatggcaagcttaacatctatgtgaacaatgttggaacaaactttagaaagccaaccattgagtacactgctgaagaatattcacagcttatgacagttaatttagactcctcattccatctgtgccaacttgcatatcctcttctgaaagcatctgaaaatggaagcattgtgtttatttcatctgttgctggtgtggtgagcttgggtactggagctgtttatgcagcaagtaaagctgcaattaatcagcttacaaaaaacctggcttgtgaatgggccaaagacaacataaggagcaactgtgttgtaccatgggcaaccagaaccccacttgtagaacatttgttgagagaccaaaagtttgtggatgatattatgtctcgaactccgattaaacgtatagcagaacccgaagaagtgtcatcgttggtgactttcctttgcttgcctgctgcttcttacatcactggacaggttatttgtgttgatggaggattaacggtgaatggatttcaacccagcatgagaattacctga

SEQ ID NO: 42103 - DNA, 469 bp, Glycine max
  Clone ID: PAT_MRT3847_13801C.1
aaaaaaccaacctatttacttgatatgctgaaaaggttatgtttaaaaatttttcagggcttgcccccaatagggaaaggcaaaggcaaatttgttttgcgggccaatacataaacaaagcctaaaaattgactgccttagggaacccataaattttacaggggtaagttttaaaccagtttttgtcctaaaaaaaaaaaaaagtttctggaaagtccccaataccaggacaaactggaaaggttttccataaacattggtttaaacaaacgggggagccctcaaacctcaaaattgacaaataaaaaacttttttttggaggcccattaaaattttccaaaatggcttctctccaaatgggtttcacttaatcgggccggaaccgctgggggaacgaaaaatcctttaggggagtggttgccccatgagcaaattcaaggaggccgggaaaagctatcattgctccct

SEQ ID NO: 42104 - DNA, 3178 bp, Glycine max
  Clone ID: PAT_MRT3847_138020C.1
ggggaaaatttaaagtgcattagaattggcgctatcacagtttagatagccctagctagtacatgaaatttagggaatgtttgaattcccattcaaaccttggttgcgggaatttcaatgcatttcaacggagaagtaacaaaagagatgctttagcaaaagtgtacattagcgactaaccaatcggcaacccaaacagcacttatttatgctatagagcgcctcattttggggcaatcatagcaaatagcatcagcatagagtgatatccacattttacctcaacaaaagctcgtaacagatctaacatgaaataataaagcatagtatttgatattatttctattccttttaccatcttccatgcatgtataataactaactgccaataatttgagttgaaaacagaatgatggaaaatttagaggggggagggaattactcaacattcctattctatttacatgttgtaacagctaaaacgagctccgcaaattcctttacacctttagaacgaggcgatccgattcaactgaaccatgtcaccacctttgatgtgtgacccgggagaggccattatttgagaagcagggaggaaagtacatataaccaaaaaataatcaagtctcaagagtaaaccctgattcatcatcatattaacatacagggccgggttggttagttccagaaactcacgataaatcaaaggatccctggccttcactgattgcatagagtagcttcttgtacataatttccttggtagaataaggaggaagcttaaggtaatttgcacacgtcatcacacttggcaagtcatcatccgctaattctgaaggaccgttcccattagatgaagcattagctgcacttgatgaaagcttcctcacaatcgttaattttggatttagaactgccagtccaccaggaggcaacctaggtgcaccagtaacaaattgacagaaggcacgctgttgctctggtgtgaattctcccataattccgagtaaattaactatggcagggctcttggcagtataaccatggtcaaattttatatgatcggctagtgtctcagtcttccacaattctctccggccacaaagcaagtaatccagttcttggggagaaaaaatttgtaaagatgagatgtcaaaaacctgattgaaccctgctctaaatgcttccatttgacgcatgattccagtcttaacagttgcctcaaccaccatggatatgtactcctctagattattgatgtcaacaatttcatctccaggtttcaagatgtactctggataaccaggaagtgtgaagtccaagcagagatcttctattggggccccacgacaatccccaccagcaaaggtatcggtgcagctaccaccagtagattgtatataatgttttcggcaaacaagggcatttaactcttgcaaagttttcccaagttcagcatcaatgaaaagaaatgtcatgcaaatcaagctcttgaccaagaacaagcttataaaatgccactgacaatggtaaatccaataagcgtccatcttgaagagctttagccattacacggcctaataatcggaaatattcaatcactttgaaaatttgggtaccctctgatgcatcagcatttgcaggccaaggtcgaggaaacagcccaagaggagcttgaacgagttctccatctccaacacaagacgccttcactatttttcattttcttttcatctccatcaatttccatttgatatttctctgaagaacctgatctccacatttgaagtacaactttttgtaagtcatgactgagaagtgtgtagaactccagagtgggacccagaccggtgccaacttcaccaaaatattctacttcaagtacagccttttgactagaatacaactccatcaccttagcagcagaatccaaaatgcgatttcgagagacacgaaccttttgacgctgcaatctcccaaccctgacctctctttcatttgttgatccatgaccatcagcaccctgctgctgctgaaggcgatacaatgcacgagataacccaaaggcagttgaataaaaatactgtcgccgggtctcaaaaggaaacaaaaaagggcacgctttagataactggtaacaccacgagggaagactcccactgcataaggcaagggcatcttgtatttgcctagctaattttggagtaagtttgctgcttataaattcctctgtaggaaccctagcaccgctggtaacacttagctcatctaaatccaaaatttttccctcagcaaagctatcagtaaccacttgggccctcaaacgagatgcaagttggttcaaaccctcaagcacccgcaataatgccaatatattgtatgtaggattagatttctccagttcacagggcaattctccctgcaagatactatctagtacagatgtctgatttagcttgtcttcagaactagaattcaatacagacccagatttgccagattttgaagcattagaggttgatcctccagggggagtcctatctggctggttctctgccctttgataagtgatggtgtaaatatcaccccacagactgcttccatcaccagatacatagtcactactgccagcaaatctctcatcatcatcttcatctagcacaagctgtctttgaattgcctgatatatactcagattcctattaagctgcttcccaccagtagtaaaaatcaactttggaggatcattagaactaccaaacaatggacgccctagtcgatctcttccacccctgatacctctgctattggcagatccaagtccagccatagcagcagcagcaaatgacattgcacctcttgagcttgaggtatagccactcctaaaatcagcagagtctgatcccctgactgtaccagctttgctactagaacctgaggcagcattagtctggccaccatcactagttgcaggagcaacattactctcctccactatgtcgcccaatttcacatcatgtactttgtcaggtgaacaaacaggaagagaatcatccctcagtacatcatcatggtcatcatcttcatcatcagaaatatcatcatcttcaatcaccaatgcctcatcaatctcaacaggggatatatccaaatcttcatcctcagaagtagagtcacc

SEQ ID NO: 42105 - DNA, 840 bp, Glycine max
  Clone ID: PAT_MRT3847_138021C.1
aatacaaaaaagttggaaaggcgttttagagtggaaaatggcaggaagcagcattaacagaggagaaagatggtctctcaatggaatgactgctcttgtcaccggcggcactcgtgggatcgggcactccatagtgagtgacttggctgcgtttggcgctgcagtgcacacctgttccaggacccaaacagagctcaacaaatgcttacaagagtggcagagtcaggggtttcaggtaactgggtcgctctgtgacgtgtcctcaccaccccagagagagaagctcattcaggaagttgcatccaccttcaatggcaagcttaacatctaccttgcatatcctcttctgaaagcatctgaaaagggaagcattgtgttcatttcatctgttgctggtgtagtgagtttaggtactggagctgtctttgcagcaagtaaagctgcaattaatcagcttacaaaaaacctggcttgtgactgggccaaagacaacatacggagcaactgtgttgtaccatgggcaaccagaaccccggttgtagaacatttgttcaaagaccaaaagtttgtggatgatattatgtctcggactccaattaaacgtatagcagaaccagaagaagtgtcatcgttggtgaattttctttgcttgcctgctgcttcattcatcactggacaggttatttgtgttgatggaggattaactgtgaatggatttcaacccagcatgagaattacctgaaattacttcactgctttctctttgtggaacaagcgattctcatttgatttcaacatggtttgtgacaagtgatgccgcaatttcgttttatctgccct

SEQ ID NO: 42106 - DNA, 1964 bp, Glycine max
  Clone ID: PAT_MRT3847_138022C.1
atagaattattctttttttacttcaacaaaagctcgtaacagatctaacatgaaatcataaagcatagtatacgatattatttctattccttttaccatcttccatacaggtatgataactaactgccaataatttgagttgaaaacagaatgatgaaaaatttgggagggaattactcaacattcctattctatttacatgtaacagctaaaacgagctccgcaaattcctttacacctttaaaaacgaggcgatctgattcaactgaaccatgtcaccacctttgatgtgcgtgacccgagagaggccattattttgagaagcagggaggaaagtacatgcaaccaaaaaataattaagtctcgagtaaaccctgattcatcatcatattaacatacagggccgggttgggtagttccagaaactcatgataaatcaaaggatccctggccttcactgattgcatagagtagcttcttgtacataatttccttggtagaataaggaggaagcttcaggtaatttgcacacgtcatcacacttggcaagtcatcatctgctaattctgaaggcccattcccgttagatgaagcattagctgcacttgacgaaagcttcctcacaatcgttaattttggatttagaactgccagtccaccaggaggcagcctaggtgcaccagtaacaaattgacagaaggcacgctgctgctctggtgtgaattctcccataatttcgagtaaattaactatggcagggctcttggcagtataaccatggtcaaattttatatgatcagctagtgtctcagtcttccacaattctctccggccgcaaagcaaattatctagttcttgaggagaaaaaatttgtaaagatgagatatcaaaaacctggttaaaccctgctctaaatgcttctatttgccgcatgattccagtcttgacagttgcatcgatcaccaaggatatatactcctccaaattgttgatatcaacaatttcatctcctggcttcaaggtgtattcaggataaccagggagagtaaaatctaagcaaagatcttcgattggtgcaccacgaaaatacaagttaacaattgtatctgtatagctaccaccaatagattctatataatgtttccgacaaacaagggcattgaactcttgtaaagtcttcccaagctcagcatcaatggacagaatgtcatgcaaatcaagatcttggcagagaacaagcttataaaatgccactgacaatggcaggtccaaaagtcgtccgtcttgaagagctttagccataacacgacctagcagccggaaatactcaacgacttttgaaaaccggctactctctgaagcatcagaatttgtaggccaaggccgaggaaacaaccccagaggagcttcaacaagttctccatctccagccaaattaggcccagagccatcacttttctttttcttttcatctctatcaatttccatttgatgtttttctgaagaataagatctccacatttgcaatccaacttgttgcaaatcatgacttagaattgtataaaactcaagggtgggacccaggccagtcccaacttcaccaaaatattctacttcaagtacagctttttggctagaatacatccccataacttttgcagcagaatccaagacacgatttcgagagacacgaaccttttggcgctgcaatctcccaactctcacctccctctcagttgttgatccatgaccatcagcgccttgctgctgctgaagtcgatacaatgcacgagataacccaaatgcggtagaataaaagtactgtcgtcgggtgtcaaaaggaaacaagaaagggcatgctttagtcaactggcaacaccataagggaagactaccactgcatagtgcaagggcatcttgtatttgcctagccaattttggaggaagcttaccactcacaaatt

SEQ ID NO: 42107 - DNA, 256 bp, Glycine max
  Clone ID: PAT_MRT3847_138023C.1
gcgattaatggggttaccactggcagagctgaccgggacttattcacctctgctggtgctcctgtctgaccttgacgggtccgtgcacgtgctgctggttttatcacatgacctgcatggcctcagccacttgcgtgtgatgcaatgtctaattgaccaactgattgctcgcctctgctctctggaaaagcaacagtaccgtgacagcaccctgactgtgacaaaataaaaacccacgctccctagggcgaagcat

SEQ ID NO: 42108 - DNA, 1095 bp, Glycine max
  Clone ID: PAT_MRT3847_138024C.1
cgtaagctcggaattcggctcgagtggaaaggcgttttagagtggaaaatggcaggaagcagcattaacagaggagaaagatggtctctcaatggaatgactgctcttgtcaccggcggcactcgtgggatcgggcactccatagtgagtgacttggctgcgtttggcgctgcagtgcacacctgttccaggacccaaacagagctcaacaaatgcttacaagagtggcagagtcaggggtttcaggtaactgggtcgctctgtgacgtgtcctcaccaccccagagagagaagctcattcaggaagttgcatccaccttcaatggcaagcttaacatctacgtgaacaatgttggaataaacattagaaagccaaccattgagtacactgctgaagaatattcacagattatgacagttaatttagactcctcattccatctgtgccagcttgcatatcctcttctgaaagcatctgaaaagggaagcattgtgttcatttcatctgttgctggtgtagtgagtttaggtactggagctgtctttgcagcaagtaaagctgcaattaatcagcttacaaaaaacctggcttgtgactgggccaaagacaacatacggagcaactgtgttgtaccatgggcaaccagaaccccggttgtagaacatttgttcaaagaccaaaagtttgtggatgatattatgtctcggactccaattaaacgtatagcagaaccagaagaagtgtcatcgttggtgaattttctttgcttgcctgctgcttcattcatcactggacaggttatttgtgttgatggaggattaactgtgaatggatttcaacccagcatgagaattacctgaaattacttcactgctttctctttgtggaacaagcgattctcatttgatttcaacatgtttgtgacaagtgatgcgcaatttcgttttttctgccttctagttgcatatgaaaatgaatggcctcatttaattccatatgaaaaacttatataataaatggaacatcctatttaatagtactgatgtttcttttttccttttataataataataataataatacatggctattgt

SEQ ID NO: 42109 - DNA, 1817 bp, Glycine max
  Clone ID: PAT_MRT3847_138025C.1
gggagaaccatttaaaccatttgatcagctaatggggaccctacctgcttcaagttcaagtgcacttcctgaaaaatatagggatttgatgattgatccttcatcacctattcttcaattctaccctgctgattttgagattgatatgaatggaaaacgatttgcatggcagggtgttgccaagttgccattcattgatgagaagaaattgctttctgccacaagcaagcttgaagccacattaacggaggaagaacagctccgaaatagcaagatgcttgatttgctttatgtcagcagtgcgcataatttggctccacatatcttatcatatcatcaatattcttgtcaattgcctctacatgaaagacctgctctaccaattgacccaagagctagtgatggtatgaatggatatctctggttgtacgaaaggaatgtgctcagaaccactgtatcttctcccatcaagggattgcaagacattgagtttaatcaagttttaaatattacttatctcaatcctcgtaaacatagacatattccaaaacctccggatggtgtactaatgccaaaaaagatattaaaagccattgacattaaaccttttcctgtgttatggcacgaagacaatagcggtcggcgacaaggcagggaaagacaacaagtacatggagcaatggctggccctcaactgggagaagcagcacatcgtcttgtcaagaactcccttaatattaaatcaaataacatgccgtatggatcaccggagcagtttccaggccatcatgcaatgaaccggctcagatcagctggaccttctggatctgggaaatattatggtgaggacacaagcggttattacggacaacattacaatcaccaggggataataactaggcctagatatccagtctcatctaatggtggacataatgacaaacagaattttaggatacaggataggtcatatcatcatgatcaatactacaacgggacaactgggttttataccatggcaatggaggaaggtgcaagagctaggccatatgcagtgcctttgccaaggacacctgcagtgacgttatcgaggcctcccaattcagggtcaacaactaatggacaacaccaatttgtgcagaacatgggtcctcctataccacctccaaattggattactagagtaccggatacgaatggaatatatgctgggcatcaagaaactgcattggggggaacttatgataagcagaacatgaaggtgtaccaagttaaaactcgtcaaccccaagatatgccagagtacgggaatcaatgatgactgttgtggattttattcgccttgtgacgaagtgccctcttccattcctcgggctgtttctcaaatcggagcccatccaagttctacaatggagtatgagggggcaacaattgtgtgataccgtaaggcaataggctgacaaatgcttattgaagctatggatgacactaatctgtagtgaaggtgctgctaagaatcacgatctgccttcactagacatgggcacttccttgatagttagttgtccaggctataccaattggaaacgtgggagagctatatattatatattcacaatattattgcttttcaagttttaaacaaactcataaaatatcgtaaaaacttgtaattgttgattttgctgtccgcggcatgagtagggtatagcatgtataaaatcccgctgcgctcagtgacacttgtattatcatatgtaccatattggacttgaatggacaatcttaattttgtagtaaaaaagacgttttgtttc

SEQ ID NO: 42110 - DNA, 1893 bp, Glycine max
  Clone ID: PAT_MRT3847_138026C.1
agcaggggagcaagatggtctctcaatggaatgacggctcttgtcactggtggcactcgtggaatcgggcacgccatagtgaatgacttagccgggtttggctggccagtgcacacatgtaccgggaaccaaacagagctcacaaagtgcttacaagagtggctaactcgtggctttcaggcgattggggcggttgatgatgtgtcatctgcaccgcagagagcgcagcacatctcagaagtggcatgcaccagaatgactgctcttaacacctatataaatagcggcgtaacgaattttagagtgacagacttgctcttgtgtgctgacacttccccagcgcagagcaaagttaattttgaattggattagcatctgacccaatttggaaacccactttttaaggcatctgtaaatggaagtattgtgttaatttcacctgatactggtgtggtcatcttggatactagatctgtctatgcagcatggaaaggtgcaattaatcagcttagtaaaaatctggcttgtgaatgggcaaatgacaacataaggagtaactgtgttgtaccttgggcaaccagaaccccacttgttgaacatttgttccaaaaccaaaagtttgtggaagatattttgtctcggacccctcttaagagcattgcagaagcggaagaagtgtcatcactggacaagtcaagttatttgtgttgatggaggattaaccgtcaatggatttgaacccagcatcattaacagaggagcaagatggtctctcaatggaacgacggctctcgtcaccggcggcacccgtgggatcgggcacgccatagtgagtgacttggccgcgtttggcgctgctgtgcacacttgctccaggacccaaacagagctcaacaaatgcttacaagagtggcagagtctgggctttcaggtaactgggtcggtgtgtgacgtgtcctcaccatcccagagagagaagctcattgaggaagtcacttccatcttgaatggcaagcttaacatctatgtgaacaatgttggaacaaactttagaaagccaaccattgagtacactgctgaagaatattcacagcttatgacagttaatttagactcctcattccatctgtgccaacttgcatatcctcttctgaaagcatctgaaaatggaagcattgtgtttatttcatctgttgctggtgtggtgagcttgggtactggagctgtttatgcagcaagtaaagctgcaattaatcagcttacaaaaaacctggcttgtgaatgggccaaagacaacataaggagcaactgtgttgtaccatgggcaaccagaaccccacttgtagaacatttgttgagagaccaaaagtttgtggatgatattatgtctcgaactccgattaaacgtatagcagaacccgaagaagtgtcatcgttggtgactttcctttgcttgcctgctgcttcttacatcactggacaggttatttgtgttgatggaggattaacggtgaatggatttcaacccagcatgagaattacatgactttcacatatttctcagtttattgtctatcagcatgagaatgacatgacaacactatcctttattcttgttttatccgtaatattggagcacattgtgaggaggtttataacaagtcacacatctcaactaactgagataccctttcttctttaatttatttcatgtgacattggatttaatttcatccttggtgattttgctttgcctgcctgctgcctagaacatcacggacaggttatttctgttgatggggattggagaataaaccatgaacgaatttcaaaccagcatgagaaattgggaataacacatctttgaaataaaggatctcattctttcaaaca

SEQ ID NO: 42111 - DNA, 2133 bp, Glycine max
  Clone ID: PAT_MRT3847_138027C.1
gcctggagaaccacgtgcttcagttttggacaaggttaagttaggagagcctggatacaaggaaaggtattatgctgaaaaatttggtgcattggatctggagaagattgacaaaatcaagaaagatacagtcttaaaatatgtagaaggcctttgttgggtttgtcggtactactaccagggtgtctgctcatggcaatggtactacccataccattatgctccttttgcttctgatcttaaagatctagctgatctggagataacattttttttgggagaaccatttaaaccatttgatcagctaatggggaccctacccgcttcaagttcaagtgcactgcctaaaaaatatagggatttgatgattgatccttcatcatctattcttcaattctaccctgctgattttgagattgacatgaatggaaaacgatttgcatggcagggtgttgccaagttgccattcattgatgagaagaaattgctttctgccacaagcaagcttgaagccacattaacggaggaagaacagctccgaaatagtaagatgcttgatttgctctatgtcagcagtgcgcataatttggctccacatatcttatcatattatcaatattcttgtcaattgcctctgcatgaaagacctgctcaaccaattgatccaagagttagtgatggtatgaatggatatctctggttgtatgaaaggaatgtgctcagaaccattgtatcctctcctatcaagggattgcaagacattgagtttaatcaagttttaaacattacttatcttaatcctcgtaaacatagacatattccaaaagctccggatggtgtactaatgccaaaaaagatattaaaagccattgatattaaaccttttcctgtgttatggcatgaagagaatagtggtcggcgacaaggcagagaaagacaagtacatggagcaatggctggccctcaactgggagaagcagcacatcgtcttgtcaagaactcccttaacattaaatcaaataacatgccgtatggatcaccggagcagtttcctggccatcatgcaatgaaccggctcagatcagctggcccttctggatatggaaaatattatgtcgaggacaaaagtggttattacggacaacaaaacaatcaccaggggatgataactaggcctagatatccggtctcatctaatggtggaaataatgagaaacagaattttaggatacaggataggtcacagcatcatgaacagtactacaacgggagaactgggtttcatactatgacaatggaggaaggtgcaagacctaggccatatgcagtgccttcgccaaggacacaggtggtgatgttatcgaggtcacccaattcagggccaacaactaatggacaacaccaatttgtgcagaacatgggtcctcctataccacctccaaattggattactagagcaccagatacgaatggaatatatgcttggcatcaagaaactgcattgggaggagcttatgataagcagcacataaaggtgtaccaagctaaaactcgacaaccccaagacatgccagagtacgggaatcaatagtgactgctgtggattttatttgccttgtgccctcttccatttctcagactgattctcaaatcggagctcatccaagttcaacaatggagttggagggggcaattgtttgatacagtaatgcaataggcagacaaatgcttattgaagctatggatgacactaatctgcagtgaaggtgctgctaagaattctgatctgccttcactagacacgggcacttcattgatacacttcattgatagttgtccaggctataccaattggaaacgtgcgagagctatattcacaatattcttgcttttcaagttctaaacaaatactcgtgaaatattgtaaaaatttgtatttgttgattttgctgtccggcatgagtagggtatagcatgtattaaatcccgctgcgctcagtggcatttgtatttatcatatgtaccatatttgacttgaatagacaatcgtaaatttgtagttagaaaaaacgttttgtttcccaaaaaaaaaaaaaaaaaccaaaaaaaaaaaaaaaaaaaaaaaaaaaataa

SEQ ID NO: 42112 - DNA, 302 bp, Glycine max
  unsure (1)..(302): unsure at all n locations
  Clone ID: PAT_MRT3847_138028C.1
anaannnacgtaaactcngaantcgnntcgagatngcatttcgttacttacatttganntncaancttacaagtncnaaactncncaataannnnatnaactgtacnnacntccaaanaananaaaaaannnaaaanaaaaaanancaannctcaaangaggnnncggannaggaaaaannnatnangaaannngnnaagaacngaaangtacnaagtnnnnaacanncctttaatcaaagaggaaagncacaaannncanganacnaaanccannntanacaaacatngaacaagaccann

SEQ ID NO: 42113 - DNA, 296 bp, Glycine max
  unsure (1)..(296): unsure at all n locations
  Clone ID: PAT_MRT3847_138029C.1
gggcagtcccacgagcatgnnnagaaataccagcttcaaaaccatcattagtggggacttttggggggacaggataccaatggtttggcacttacaatactctaggagaggtactattttttcactgcaaacgataccgttcgggttattggctcatcgagattcgttgttgacaatcagtgttgctaaacctacggttcgagacttaacaatcaaatcctgcaaatacaaaacatgtttgtttgaaaattagatagatccctttgacctcgatgctcataggtgcttgcttagtt

SEQ ID NO: 42114 - DNA, 674 bp, Glycine max
  unsure (1)..(674): unsure at all n locations
  Clone ID: PAT_MRT3847_13802C.1
tgtacttaagtatcggtcatatactcatacataggcatttgatagtttatatattgttatgtctatgtgcactaacaagcttttgaaaactaggacatgctgtagttttgaaagtttgattttagtgttttatgagttcatttaaaatttatggtttatcaaactttatgctgcaggtggagttttaagtgttgtgttaataacagaactccgtgacaatggttttgataagtggcaacaacaaaaggtattcatttgacatgcctatttcctaacaattatgttctatcatttgttgtcatatttcaaccctcttagtcttatgtgcacctaaacattttcagtttaaatgaatgtataaggtcgttcctcagtaattctattttgttaaaaattctgtggaaaaagtaatatatggtcatgatatatcatacattcatttctctctctcgaattatttatgtcatgtgttttttttattcttaaaaccaacagtcattgtttttacacttactaatactatttatttgaagaggagacttttctggtgcttttgttaaacggtggatttgtccaccgaatgtggagcactttttcttatgttgnctaagaagntttgtgttaaataaagaagccaagttttttttgctaatgcgtgatatatgctgntatct

SEQ ID NO: 42115 - DNA, 290 bp, Glycine max
  Clone ID: PAT_MRT3847_138030C.1
cgtacgctggagtcgaggatattcggctcgagattactagttagtgctgacaaattggtgctacttatgagtggtaagaacaattttgtgtttagaagttagcatagagtgaaataaacgaatgtccaagttgtgttcttgtgttttagtcttagaaggtatggtaacaggagaaaagcagtggatgtttttttcttttggttcgttaaggatgtaagttacgtcaacggcatttggtatatcttatctgttctcaaaatgattctttagtaagcggccaaaaaaagcta

SEQ ID NO: 42116 - DNA, 449 bp, Glycine max
  unsure (1)..(449): unsure at all n locations
  Clone ID: PAT_MRT3847_138031C.1
aaaaaaaaattgggccccttttaataagccaaaaaaaatgttttttccctgaaaaaaaaaaaggggggagcccaattttattcccaaaacccaaaaatccctttttggaatacaaaaggcccccttttcccataggggtaaacaaccccttgggggctcctccttgaagagccgggttcaaaatttttttttggccctagggttatcaaaaaaactttacaggtggaacccccctttttccaaacccttacaaaaccggaaaaaggggaaagccaaaaaaaaggccttttttgggcccaaaaaaggggccaaaaaaggaaaaaaaaagggggccgaaaataaggggctttttttaatttcccccggggcctcccccttttttaancaatttcttctgggataaaaaaggaaaccctcgggaccccctccccttaaaaaatttgtggggg

SEQ ID NO: 42117 - DNA, 541 bp, Glycine max
  Clone ID: PAT_MRT3847_138032C.1
ggcatcccggctcactccttgcttacgactaggcacgggagcttcgcctcacacatccaacatcatgtctacatctgcagggcagaatcgccgcccacgggcacccacgatcaccatcgatacctctgcagttggtcgatcatccgagaacctggtccaacccgaacaggaccacagccaggcaagcaacggatcgccaatgttacgaccgacctccactgggcaagcaacgcctccagagctgcgcaaaagtggtagcttcgaaagtcgcgaatcacggccggttagtccacataacatctcatccccgacacagatcagccatcctcaaaacttcctcgccgttcctgtgcaacgaaagagaggaggcagcgtcgagtccgatggcggtgataccatctccaccaccgatacgacctacgtcggcaccgaccatcaatcgaaggctttcggcggcgacgaagtaagacacggcgccggcgaccacccagtattacctgataaggatgcgctcatacccgatcccggcaccgaagccgac

SEQ ID NO: 42118 - DNA, 449 bp, Glycine max
  Clone ID: PAT_MRT3847_138033C.1
gcatcatgcaaaaatttatacaagtcaatcagcttccactttcaagtcatcacttttccttcagtactgatgcctcctttgaaaactcaccctgacctccacatgcatattcctgataaggaatagaatatctaaagctgtttgtaagagctgttaacatgcttgccgcatttgtcagttgaaagcaactatgacagttaatgagtttatcttcgtctctttcgtggcagtggtttattgaaagacaagtcaaagcccataattttctccatggcaaggctagacagagtaaaaaacataactggattggtagaaagctttggtaagaacagcaaattgagggaactggtcaaccttgtcatagtagctggttatattgatgtaaagaagtccagtgacagagaaagaaatgcagaaattgagaagatgcatgagctcatgaaaaagta

SEQ ID NO: 42119 - DNA, 1095 bp, Glycine max
  Clone ID: PAT_MRT3847_138034C.1
acccaatcaccaacgtcacgaaaaacagtaaaaccacagttgtataatattatattgtgttctggcatgtccaattctcaacagaatgagcttcattattcaaccgccaacggggacgagaggtcaaacccttgtttagccaacacgcgctgcagcttctgctttccctgttgcttcggttcccgtcgcggctcggttctgaatgtcgaattctcaacaaaatgagattgatttaaccggcgacggggaagagaggtcaaactctctcttagcgaacacgcgctgcagcttctgctttccctgctgctttggttcccggtgccactcggtcagcgtcgggttcgcgtggtgggagcgcgtgcgagccacgtcgtcatggtcggagacaagccctcactctgaggcgcaaccagcaaccgggagttccagtgggagttggtggtctggcggcgtgagggcctttatgaaggtgcgggagtggtcggagctcgcggcggggcctcggtggaagaccttcatccggcggttcagccggagccggagtggctgggcccggcacgcggcggggaagtaccagtacgaccccttgagttactccttgaacttcgacgaggggcataacgggtatttcgatggtgacggttacgacgggttacggaatttctccgcgcgttacgccgcgcctcctccgtttaagcccgtttcctcggattccattcaagacgccgccgttttgggataagaaatagggattgccatgtggtgtcgattttgggaattttgcttcgactagcttacaagtgcggttattgtgtattaattttattctatcatatcaatatcaatcaatagttacaggattttaatttttcttattgtatattccttaccttggcagtatttctttatttatttaattaatatattgtttagatgttggtaataatcagaagtgcgttgtgcgcatggattaccaatggatgaatcctgataatttcttatactatttactaattaggtttgtcaaataatgtacaaccataagtggatgcaaagttttcattttaaatgatgttcattagaggtgctttgagt

SEQ ID NO: 42120 - DNA, 564 bp, Glycine max
  Clone ID: PAT_MRT3847_138035C.1
ccacgcgtccgctgtctttatggcctatgctttcgccgtggttgcagtggcctacgttggaacggacaattcctgagggcctgtatagcagactggctggtcatgcgttttcctccaccttaagatgatccttctactgggggtaccatactacattagtggagttaatcatgtatatggttgtgtcggtattctggatgagtgagggcgactctattgtgacacgcgattagcacttgatccagtggggtctgagctgtgagaacacactggatgaagatcggacatgagcttaatggaggtgcacagaatcatactcttatgccattgtatagcaagaaggggaaactggaaacaatggctacaataacaactaccttcagtgtgggtgatatcgttccagtggaaggtatactgctctagactgtgctaaactactggttaacagctatgcgctgactgatttgagctctacctagaccaagcactaggtcgactttcctagcacgaatagcgccagtggaatgcatgcctaggcttacgagggttgctttatcagccaca

SEQ ID NO: 42121 - DNA, 426 bp, Glycine max
  unsure (1)..(426): unsure at all n locations
  Clone ID: PAT_MRT3847_138036C.1
cacgcgtccggttaaaatgaaaatctgatcgttcggtcactgccgtaaccacgttggaaaccaaaaagaggtaaaataaataatataataatcaaaaaatactcttttagtaaaatgaaaacaaaaaatcatcggacgttttctctttgggactttttctttcttaattgaattgactaataactaaagtgaaactaaggctaaaatcaactcacaaaatcaagctttgtccgtaaaaatcactgaaaaaacattttaaggtccaacgccttaaacggtcctctttgctttttatcggttaacgtggaccattcgaaagcgtaaaattgacacatcactgcctttagaaagaactacnngtaggtctgaattttctctttcgatgggagggtacataggagcaagagccctgcttttgtcgacctc

SEQ ID NO: 42122 - DNA, 1221 bp, Glycine max
  Clone ID: PAT_MRT3847_138037C.1
gtacgcgtcggacgcgtgggcggacgcgtgggcggccgctcgagctcatctgtatgcctatgcttgtttatcattttcttactttcctctcacgctctgccacaaaactccgtctccgcaataacggaataaaaaaacaagtttaattactattatggcgccgagggatcataagacaagcaacgctaaggctaacggtaacggtaacagcggggtgaaggaggtgcattttcgtggagtgagaaagaggccgtgggggagatacgccgcggagatcagagatcccggcaagaagagccgcgtctggctcggaaccttcgacacggcggaggaggcagcgcgtgcctacgacgccgcagcacgagagtttcgcggccctaaggccaagacaaacttccctctccctttggaaaatgttaagaactcgagccccagccagagcagcaccgtcgagtcctccagccgcgaccgcgacgtcgccgccgattcctcgcctctagacctcaacctcgcccccgccgccgtcgcatccgctcgattccccttccagcaccagttcccggtttttaccggcgcggtgcctgcggcaaatcaggttttgtacttcgacgctgtcctacgcgccggcatggccggtccacgtggctttgcgtttggctacaatcatcatcccgttgcggcgagtgagttccacgcgacgacgagcgactcggactcttcctctgttatcgatctgaaccataatgaaggcgaggttaaggggaacggttctagaatcttcgatctggaccttaaccatcctcctccgcatgagatcgcttgatccaaagtctgactcacccctttagttttttttttttttttgtgtttcggattatgaatttctcgttagtttttttttttatataagtagagaaagtagcagcctccgataagggaaaataacgagggaagggaagggaaagaaaagaaagtatgtgaatacgtaggcggtatgattgtctcaattttttgcgacatagaggaaccaccaccggtttcatcctgttgtttcttaaatcacgaaatggttatcgggtttttctttcgttttaattgattatgtactgcggtgtaatgtttttggtttgcagccataatttggttcaatgaaattaacacggaaagtttgcataaaaaaaaaaaaaaaaaaaaaaaaaaaaaaaaaaaaaaaaaagggaa

SEQ ID NO: 42123 - DNA, 1342 bp, Glycine max
  unsure (1)..(1342): unsure at all n locations
  Clone ID: PAT_MRT3847_138038C.1
cctcgccccggttcggtcaaattttccgtggccgctaaaaagggctatctcaattttttccttcttctgtaaggcgtagcaacaatcttggaaacccccaaattcttgtatttgattagaaaaggttactggtaatacttttagggattgttttttatctgtataaatcccctggcagtaaatcttatttgttagttacggcactaagcacgttatatgggttggtcaaataggaatcaaagattatcaatttcaggcctattactttttatatcccaacggagcaagttgcaactgctgcatctgctccccatgataagtatgctgtcggactaatcgaccaaacaaaaagttattgagtcgtataacatatattaaagatcctgaccacccagattcctttgaagagcttaaggtgatcacagaggaagcagttgaagttgatgatcaacgggatcctgagcatgcatattccttggaagagcttaaggtgattactgaggaagcagttgaagttgatgatcatcgtaactatgtgagggttacatttactccaacagtggaacattgcagtatggcaacggttataggtctatgcttacgtgtcaagctcatgagaagcttgccttcacgatacaaggtggatatcagagtggcacctggatctcatgcaactgaagctgcagttaacaaacaattaaatgataaagagcgggtggcagctgcactggaaaacccaaaccttctgaatatggttgatgattgccttgcttcatcttatgattgaaggaacttttttcctcctccaattctccaaatgcaatgaactctgtaggtgcttttatgcctgtcgtagaagttggtcagctttatctgtgtttatgatatttttggttgctggcatattggtcatgcaattagttgaataggaatacatagttggaaatgtgatagttgagaaggttccgaggttatttgatcattagctctagaaaagaaaaaggaaattctttccatgttttgaaattctcagctcatgcttcatagattgaacaatttataccatgtttggttgagaagttgtaaaagatgaacatttcattagcgatggcaacacttgttgtctggcttttttcatgggtgaagttatgtctctggaactgcatctgccatgtggttatgcagattttgttgaatctgccatcagttctgtaacagggattggggacccatgagatagtcaacagatgatatggagttttttttattctgtaaccttttcgaatgtgtatttctgatgcccaattttatcaaataatattttactttggctgacccnaac

SEQ ID NO: 42124 - DNA, 340 bp, Glycine max
  unsure (1)..(340): unsure at all n locations
  Clone ID: PAT_MRT3847_138039C.1
ggcaggacccggtccggaaacccggggagagacacacgcgcccggatacaaacccgcggacgagaaagagacagaggggagcgagaaaaagaaaaacccggaattccccccacnagcgaaccgaggacgagcagaaccaacgacacacaggacaagaacaccccccaaaagcaccgccgacagccaccccaacacgacagcagaccaggggcaaccaagcagaccgcaaaacacgaggcaacagcagaacggaaaagcaaaggaagaaggggaagaaagaccaagaaggggggggaccacccccaggcagacaagagaggaagagggcagagccgcagca

SEQ ID NO: 42125 - DNA, 265 bp, Glycine max
  Clone ID: PAT_MRT3847_13803C.1
ccgaagaggaaagctataaagagcatcggtatttgtgcacattcactgatgaaatccagccgaagttgcacgtccttggttatggagactgatctgataccgaatgttaggtggttccacggctataccatgtgaatttaatgaatgacagcgctgcacttgttccaatgcaccaagttatatggaacggtgactatggccctttttctgttatgataaggatgggaccacacaaatgggatcacggacattgaattcgacctat

SEQ ID NO: 42126 - DNA, 240 bp, Glycine max
  Clone ID: PAT_MRT3847_138040C.1
ttaaaaataccacacacttcacacatcgttacgagagttaaaagaggggaggaaattttcatataggctaaccatcctactcctgagggtcatgcctattttcctttatggaactaaacaaacctacattcaagagaaaacgcaaaggccctacctgcaagggattccgctttcccagaacatccgcgctattcctgtggaacaaaaaagactggcctataaggtcaacagctattacta

SEQ ID NO: 42127 - DNA, 610 bp, Glycine max
  Clone ID: PAT_MRT3847_138041C.1
attctctatttccacactctcatcaaattcgctacagggttaacggtatcgaataacttcgcccataaattctctgactactgggcgaacatgacggtattcttatacaccatgttcgagatgcggacatccccgccgcttctctgacggagcaacttttctcgataggaggtagaagccgaaaaggatagtgatgccgggactgcgcttgccgtgtgttcgcattactctccatctccggatgaatatcctcgccgctgactagattctaggaaagaacaagcagaatcggacttcttccatattgcacttctacagatatcccgtgaacatatggagtggatcaatcatacctggttgacgataaggtaagaaagtacgagaatgcgattgcagggactgctacggggtgctgcgggcactgtcacactgatgtggtccaatgcatagtccaccaaaccagaaagctgcagcactccacaggtctctaccttaacaactccatcgtcgatttcactcaatgtctgacattctagcattccagaaatctcaaggtggagcttttcacaaactctgcgacataatgagaagaattgccgatactgattgc

SEQ ID NO: 42128 - DNA, 216 bp, Glycine max
  Clone ID: PAT_MRT3847_138042C.1
tactcgagccgaatcggctcgaagggaaaagcagaatcccagtcacaataagtgcctctgaagatccaatagcgataaagactactacaggaaccaagcatgccacgctcgttagaacctccataaggtggactcagaacaagaatgcgaaaaggttcaattcaggatcacgacataataccggagagggaagtcagcaacacgtgagaaggagga

SEQ ID NO: 42129 - DNA, 437 bp, Glycine max
  unsure (1)..(437): unsure at all n locations
  Clone ID: PAT_MRT3847_138043C.1
ccggtccggagttcccgggggcgcccacgcgtgcgaataaataaaaaatagagaaaatagatgcggagtgtgtgtgtgagagagtgtgcgtctccctggggctagaagataacactanagaactaggggtggtgagaggggaaaaaaagtgacacccatagtgctgctgttgtttcttgttgggggggttncttantgggttctgcgccgctactcttcatcaaacgacgcttttttttttttttgggggggggggggggtctttcttcttgcgtttctctcaacaaccaccacttcctctctctcttggtggttaatccaccttccttctctctaccgggctctcttctcttgggggtggttgctgctncaaccttggggggggggtctaatcctaaccctgtgagtttgacacacatattcacacactttttttt

SEQ ID NO: 42130 - DNA, 488 bp, Glycine max
  Clone ID: PAT_MRT3847_138044C.1
ggaattcggcacgagggagaatcacatccagcagattcatcggttcaaaatatagagcagcagcttagttcacaggttagttactaacaggtactactgcaatttatcattaaaagtctctctttcagggaaattttggttgtgacgtaagtgaatttctattattgaggaggtggattgatgtagttgaatcgatggtattttctatcatactcttatctgtttgtaggtagccttaactgcctttaatcttcaaattgtatttttaattctcctggaaactttttgaaatctttttgccttcataaacttaacaactttgagcatttatgaatttcttgggtgctttcctgtcctgtttgaagtatttaaattgttaactaatttgtttgtttgtttttcttttaataaaattatgcattgttatagttgaggattattttagtcttgcacaaatgggtagagggaaatgaagaaggacattaaag

SEQ ID NO: 42131 - DNA, 400 bp, Glycine max
  Clone ID: PAT_MRT3847_138045C.1
tggctaacccacccccagttcgtccatggtttcgcttagcctcaattcgctctagcccacccgcacttcaccttgggcaactgcccctgcccagaagttaccctgccaacatttacaactggttagctagatcatctgcacagattcagccaagtcaagcatctccccagcctcacaaggaaccttcttctcaacataacagattctcctcgtcttcactcgctacttctccagagaatcacaacattacccgtattcccttgccaagtacctctcactcgccaaaaagttcaactcccccgtctcagcttgtcctcatagctccacgatagcaaaatccctcgccaggctggtctttcgggttctagcgggatcctgtgtgctgcgttgaactgtttgt

SEQ ID NO: 42132 - DNA, 201 bp, Glycine max
  unsure (1)..(201): unsure at all n locations
  Clone ID: PAT_MRT3847_138046C.1
caaaaggnnannnaacgcgtacgtngagctcggaaattcgggctcgaagntagaagcgcagnangatcnannctgcnncctcannnccnnaagnagaangtgcgacngaganncnnaacngggggcagagcaattcacaccnntggagggtaaggaagcgactggnanaagatnggaggaatcgtacnagcaccaagaann

SEQ ID NO: 42133 - DNA, 188 bp, Glycine max
  Clone ID: PAT_MRT3847_138047C.1
ggacaaaaacacaaattttacagtagatgggttaccaggatttaccattggcagacctataaaagaaagcagaattagatctttgttccaattatcacacctaagcttgaaccaaaaacatttttttgaactgactgatgatttttaaaattaatggttccccaggaaggcactttctatgctaaaac

SEQ ID NO: 42134 - DNA, 226 bp, Glycine max
  Clone ID: PAT_MRT3847_138048C.1
aggggaaaacagaacatggactcactctggcacctgaactcacagtggctaaaatcgttctgtggtgaattgtcaagatgttcacatcaatgaagaaaatccacaaagagtcagatgctgatccaacttaatttgacgaatcagtcagacaggcattgtttgatctgtgaaataccaacagtgacctgaaaactgatctgagagatttatacataaactcatctgt

SEQ ID NO: 42135 - DNA, 108 bp, Glycine max
  Clone ID: PAT_MRT3847_138049C.1
gcatttgtagacgtgttcgagcataatatttcttgactgcattaatgtcagctacgggagagatctatacagcgcgatatgttctaaaaatgtcttaataactactat

SEQ ID NO: 42136 - DNA, 295 bp, Glycine max
  Clone ID: PAT_MRT3847_13804C.1
attgatggagacccttataggcttttactacactgtttattcacttgaaaatacacaattaaagaagccttgactaatattttacacgagttccctgtttgcagtaaaatttacattaagttgtatctaactacgcagaaatggtgtggttccattggatagaaccataacctgtgaatctgagagagaagaactatgggggagtagaatagcaggtacattacgttgagattagactgctatttggctttacacgtggcgaggtttgctgataggcatggcgaaccaagtagta

SEQ ID NO: 42137 - DNA, 327 bp, Glycine max
  Clone ID: PAT_MRT3847_138050C.1
tttttaatagtctaatagactgttaatgggactcaaagcgaacaacttgtacaaacgacatattacatttgaaggagcctaaaagttaccagcgtaattaactcgtttgctacatgaataatttccaactcgaaattctgacgccttgctggaacaacgacatgtgttccagaagaatagggggtgacaaaaggattggggggtgcaattaatttgcctacatcctctgtaagcatttggacaaccgactctatggatggacggtgcactggatttcactgaatgcaccaaagtactatattggcgagagtatttgcacttttcaca

SEQ ID NO: 42138 - DNA, 385 bp, Glycine max
  Clone ID: PAT_MRT3847_138051C.1
ctcgagccgaatctggtagagctcgacccgattctgctcgaattaagattccgaccggtagagctatctgcaatttgatctgtaacgatcatcgcgcgtgtcgatctaaccgaatatagatctacacatcctgtgatccgctttgaaactaccgtctatttaattactcaacctgagatcctttgtgaaacgaaagttgaccatgatggctttaggtcatataattaattgatcgaaaccgagcccaatgattggagattatacatgtaatatctcaatacttgagacatgtaataggtattgtactggtctattccggatatcaaacagattgataaagttattggcatcgaatttttaaataccaagctgaatgattgattta

SEQ ID NO: 42139 - DNA, 584 bp, Glycine max
  Clone ID: PAT_MRT3847_138052C.1
aaagttacaagtaaagtaaattaagaagatcattaatggcttctcttgcaaccttagctgctgttcaaccagctgcgctcaatggccttgctggaagttccctctctggaactaagctctctttcaagccctctcgccacactgtcaaatccaagaacttcaggagtggtgccgtggtagcaaagtatggtgacaagagtgtgtactttgatttggaggatctggacaaccctcttcagagcaagttcttcgagacatttgctgctccattcacaaagaggggattgttactcaagtttctgatattgggaggtggttccacccttgcatacttcagtgcaacagcctcaggtgacattctaccaatcaagaagggaccacaacttccaccaaagcttggtcctcgtggcaagatctaatttgatttgtatcagagctccatctattgagttcctttttaatttttatttttctggtttgcataatgtgtaagtatgcttgcagactactattcaaagatgcttctttccagtctaattgagtggcattgctttggttttcaattgaagcaaagacatatttgg

SEQ ID NO: 42140 - DNA, 1642 bp, Glycine max
  Clone ID: PAT_MRT3847_138053C.1
ggtcgcccacgcgtccggagaaacaaagttacaagtaaagtaaattaagattatcattaatggcttctcttgcaaccttagctgctgttcaaccagctgcgctcaatggccttgctggaagttccctctctggaactaagctctctttcaagccctctcgccacactgtcaaatccaagaacttcaggagtggtgccgtggtagcaaagtatggtgacaagagtgtgtactttgatttggaggatctgggcaacactacggggcagtgggacttgtatggctcagatgcaccttcaccctacaaccctcttcaggtttgttgcttctttacatgtgcatcttcttcaatgagaatcaaacatgaaaaattatagataattcaatgatataatatatatactttgataacaaagatgcatgcataactttagattttaattttttgtatccatatcactgtaaaacaattttacattgacaactgataagaaatcatgacaggtgtgattttaaaagaaaataacggtaaaagttaataaatttatcatattaatttgttataattgaatgaccgtaaaaaaatttatattgtcaatttataaactattttatctaattcatatatgataagtctttgatttttataataactaaattaaaagtggtacctgtatgcatgattgatttatgactttttgacatatacacttacatttgatagaaattatagtatatagctgttttattgatatggatttgcagagcaagttcttcgagacatttgctgctccattcacaaagaggggattgttactcaagtttctgatattgggaggtggttccacccttgcatacttcagtgcaacagcctcaggtgacattctaccaatcaagaagggaccacaacttccaccaaagcttggtcctcgtggcaagatctaatttgatttgtatcagagctccatctattgagttcctttttaatttttatttttctggtttgcataatgtgtaagtatgcttgcagactacttactattcaaagatgcttctttccagtctaattgagtggcattgctttggttttcaattgaagcaaagacatatttggaaaaaaaaaaaaaaaaaaaaaaaaaaaaaaaaaaaaaaaaaaaaaaaaaaaaaaaaaaaaaaaaaaaaaaaaaaaaaaaaaaaaaaaaaaaaaaaaaaaaaaaaaaaaaaaaaaaaaaaaaaaaaaaaaaaaaaaaaaaaaaaaaaaaaaaaaaaaaaaaaaaaaaaaaaaaaaaagggggggggggttttaagggaaaaaatttttgtaaaccggggggggaaaataaatttttttttttggggggaaaaaaattaaatttggggccccgtttttaaaaaaagggccggggggaaaaccggggggcccccccatttaaaccttttggaaaaaatccctttttccgaggggggggaaaaaaaaaaaaggggccccccaattctccttccaaaaaaatggccccccttaagggggatttgggcccccccctttatgttatttttaaaggggggggtgggggggggtccccccccgggggcccctttattttttttagggggccttattccccggggaaaaattcgatttttt

SEQ ID NO: 42141 - DNA, 886 bp, Glycine max
  Clone ID: PAT_MRT3847_138054C.1
gaagatcatggcttctctagcaaccttggctgctgttcaaccagctacgatcaatggccttgctggaagttccctctctggaactaagctctctttcaagccctctcgccacagtgtcaaatccaagaacttcaggttccattccatgcatttccataaattgctatatatatatatatatacacacacacatacatacaagaattttgcataaaagaaatatccttgtatattatgattcgcatgtgttgtaattgtatgctaaaacagtgtaactaagcattacaggagtggtgccgtggtagcaaagtatggtgacaagagtgtgtactttgatttggaggatctgggcaacactacagggcagtgggacttgtatggctcagatgcaccttcaccctacaaccctcttcagagcaagttcttcgagacatttgctgctccattcacaaagaggggattgttactcaagtttctgatattgggaggtggttccacccttgcatacttcagtgcaactgcctcaggtgacattctaccaatcaagaagggaccacaactcccaccaaagctcggtcctcgtggcaagatctaatttgatttgtatcagaactccatctattgagttcctttttaattattttttttctggtttgcataatgtgtaagtatacttacagactactattcaaagatgcttctttcccgtctaattgagtggcattgatttggttttcaattgaagcaaagacatgcttgattggatgttgatctgaaattgttaatttgattacccgactacctctttaagttgtaaaaaaaaaaaaaaaaaaaaaaaaaaaaaaaaaaaaaaaaaaaaaaaaaaaaaaaaaaaaaaaaaaaaaaa

SEQ ID NO: 42142 - DNA, 1089 bp, Glycine max
  Clone ID: PAT_MRT3847_138055C.1
cactcttccatctttctcgctctcaccttactcctctctctgtttcccctcttcatttcgattcttctgcatctggcaagcagtttgtgatgaagattgagtaagaaattcattttttctatgaggtcaatcaaatcatggaggtggcccacgagaaaaaggagtttcttgcctaatgggaaaatcaagtttgaagatgacacaactgccttttatggcggttgtttgtatagtaatgttgtttgttgtgtataggactctaaagtatcaaagttaccaagaacagatagacaaacagtggaatatcagggaagatgaaaaggcatattctgaaacttctggaaatctgaagggcttaccacggggtataatacaagctacttcagattttgagttaaggcctttatggtcgccaagtagtttgaggtcaaaggttagtgtttactccaatcgcaacttgctggcagttccagttggtattaaacaaaagcataatgtagatgccatggtgcagaagtttcttccagacaatttcacaattattttattccattatgatgccaatatggatggagcacagggatcttaattggactatgtgggagttacacataactgatttgttgttcacaagggaattcaaactctgggtggtagctacgatccaactaaagtttcaagtctgaaaaggaaaactccgagactcggtgcaacggcctttgatcatcgagttgagatacgaagccaatcaccatgggaacttgaagtcttcaatgagcggtggaatagagctattgctgaggacaaaaactgggttaatccattcaagagtgataaaaaacgcattagacaaaggcagaaaaccaaccggttctcttaaccacttatttttgtctaacctggtttcatatgttagcccttcttcattcatagggcattagttttttcattttttttttttatatataggcttaatttagtttttgtagctgaatgaattctcaattcattcaattttggaacctcaacatatttctttatattcttttgttcttttcttcatgtcacaaatgcttccctttctctttt

SEQ ID NO: 42143 - DNA, 365 bp, Glycine max
  unsure (1)..(365): unsure at all n locations
  Clone ID: PAT_MRT3847_138056C.1
gcccgcagaaccgtccggaaacccgctccacccacgctttctttccgttttgcccaaagccactacanccgggaccgttggtaaaaactggagggggcccatcccaacctttcttcaatctccgctctcactaccccatatccaaaaactctctcaactccccaccccactccataaccaatactaaaccctcccgtgtcaccgacgacgagcctcgagattctccaagatacatctccgcctcgccaatgaactcaaaataatcctctgctgtatcagtcttggatggaagcactcccccgctgtacatcagaaacgacaacattccataaaactgaaaatcattcctcacttaaaatctaaca

SEQ ID NO: 42144 - DNA, 276 bp, Glycine max
  Clone ID: PAT_MRT3847_138057C.1
tttttaaaaataaaaaatgtaaatccacttttttaaggcagattgttcattatgcatatacagcttgaactatagtttgggtccatataggaaccaatcaccaaaaactctggtaacagaattaggaaatcctcttgagaagagggccttaatgaccttttatgtgaaaaaaattttggagagaatttctggacatttttttttctgtctctctcacagggtttggttttcagataggagttaggtatgagaacaagaagagagaaaacttggcgg

SEQ ID NO: 42145 - DNA, 195 bp, Glycine max
  Clone ID: PAT_MRT3847_138058C.1
ccgatagtgccactcaaagcggagtacctatgggagctactccgattctaccagttggctgccgcgtgccgtgaggtcaccgcaggacctaagctccctgggtcctgcagagaagacaaaactatcgaccaccatgaggtattgtgcatgtgccgcaccagggtgaccccctctgtgaaaagtgaacaagaaatc

SEQ ID NO: 42146 - DNA, 604 bp, Glycine max
  unsure (1)..(604): unsure at all n locations
  Clone ID: PAT_MRT3847_138059C.1
ccccggggtccggggtcccggcttcgccccgcccccgnggagctttacacctcaactgttctgcgctggngggaggcacagccaccagggatggggttccttacccaagagacgagtgcccctccccctagccgcacattattttgcctattcccagtcagtgacagacctgggatacatcttccaatgatcaactccgacgtatcgtccgggagtctgtatgaggattacagtcaaaaaccggaaagtacgactgggcgcatcgctcactatggtcaaaggataagttctgaaatgcccaagggtattgtctcatttgagcgaaaagtacttcccttcaaaaatgattctattcatatttcttacccagatgctaatttttggagcacttctgctatacctctatgcagatttgaggttcacagttcagggctcatagaagatcaatcaagtggagctgccgaagtagatcttgcaaataaatatcttgggggaggcgctcttggcagggggtgtgtacaggaggaaatccgcttcatggtcagtccagaactggaggctggcatgcttttcttgccagctatggcagataatgaggctatag

SEQ ID NO: 42147 - DNA, 377 bp, Glycine max
  Clone ID: PAT_MRT3847_13805C.1
taagattcttccaccaagttatgggtttccttgtgttgcatcatttctcactcttaggtctctcttctagttccagcatatcaactcatcgttccatattggaccttgacctaaccaagtttaccacacagaaacaggtgtcttcactgttccaactatggaagagtgagcatggacgtgtctaccataatcacgaggaagaggcacagagacttgaaatttccagacataatttgaccaaaacaagggaaatgatgcaaacaagacatccacccaattccaacctttaagaattgaccagtttggtggcattaagcctcaagaattcaacaaaaagttactggcagctcccaaggatgtgtcccaagaaattaaaa

SEQ ID NO: 42148 - DNA, 136 bp, Glycine max
  Clone ID: PAT_MRT3847_138060C.1
aaaggtgttgttaccacagactgatgtggttgaggtatgcactgggatgaatatagccgtgatggttggaggattcccaagaaaagaaggaatggagaagaacgatgagatgactaagaacggctccatttacaag

SEQ ID NO: 42149 - DNA, 426 bp, Glycine max
  Clone ID: PAT_MRT3847_138061C.1
ggcgttgttccgaaccgtgttacttatgggtgctttgttagttactattgtgctgtgaatgagattgataagggtgttgagatgctgagggagatgcagaggctgggggacggggttgctagttcaagtctgtatacacccatcattcatgcgctttgcgaagctgggaggaaccagtttgagtttgaatgcttgaatctagtgttgagttggatttgaatttctgctagtgaagtcaatcaagagcgtggttttcttcaaatgattattattgatctagtggggggatctttgattcttcagatgcatgcaagtgcaatgttcagacaaggaattttcgtaattggcagatccacagttgcaaggtcactgaccaggatctggtctaacgatggtcatttgatttgcattcatgtatttcgagaa

SEQ ID NO: 42150 - DNA, 496 bp, Glycine max
  unsure (1)..(496): unsure at all n locations
  Clone ID: PAT_MRT3847_138062C.1
gataagtacataagctatgataggcgatctatcataactcagtctccgttatatgatgaatgatagcagtgctagagatgcttgccctcttttaacgagaagaagctatggtcggtcgacgcctcttgggcgcggaggcccgctacctaagaacggaccttcaccccgtggcggccccacttgccctattaaggaacagccgaatattcgtcaaactcattgacgctgctgtaacgccaggagacagagtgattgtttgaactagccgagaagatgctaacgctcctgaactgctcccactgctccatctcccaaagatggagggaaccgacggatagaccgcagtgctccactttcgcctctccgtctacgatccttgtgttggccatggcgaagaataatgtttgaagaaggggacagtggtttcttncgatcccctccccatattaatagntgtcattcccattattgttagactcctttgctctaagatgcg

SEQ ID NO: 42151 - DNA, 835 bp, Glycine max
  Clone ID: PAT_MRT3847_138063C.1
tcaatggctgttactaatggtgtgaaggttcgtgcttctgcattggttatccctgagttgattgatcttcaagatgaccttgaaaagtacttatttgcttattcaatccgcttgtcccttgaacctcaaagggtgcactattaatggaatgtccttcagctcctgccagctccattggaggcactggatcatccgagctaatgatattgttatatctgatgtcaatggagaagctgttataggacagtatccacttttgcgtccaggtgctcaagaatttgtctatcagagtcgcatgcatctaccaacaccatcaggttccattgaaggttcttttacatttatacccggcagattggcagacccaaaaggagatccttttctagctacagtggctcgtttcccgctccagcttccagactatattttctgattttgatgctagatgggattgaagcatctctaatggcaaatgcagctctcagtatattgtttgggtgcattatgtcattttcgtgagagttgctaggtcgttgagttttttaagttggacctgcacaatttccctatctattatatatcaatatctatctatctgtatctagtgtggtgtagtaataattcgattacttgcgttcttgacttgtgtattaacttcctatccttcattcattgtacaaatctatatgcatgcagcaattcaatgatacatatttagtattgtcgtctaaaacatgggaacgtgtttgtgttaagtggtggtttgcaatgcgtactctaatatttacgatacaatgttagttgttaaagtaaagcaatgttagagaatccggtc

SEQ ID NO: 42152 - DNA, 421 bp, Glycine max
  Clone ID: PAT_MRT3847_138064C.1
ggctcgagcggctcgggcggctctagcggctcgagctgctaaagatcattaactgttacttgctttaaagttgttgctacttgctgggacccaatatgaacttactactatggtgcctgaaatgagatggggaggacatgcaactggcctagatactggttgacctgttaaagagacattgaatagggaactggatgatttacttccaacctgagtcgatcttcaaatggaacgtgtgactcacccactccgacttgcacaaccccgaaggacacaaagagatggttgtgttagaaaatcatccacctcagtctctactgacacctgcacaccggcaacaacttacacggaattgaattttgtaaaacaaacgtgactgttcaacagactgagcgaactgacgctgatattcagaatgatc

SEQ ID NO: 42153 - DNA, 2066 bp, Glycine max
  Clone ID: PAT_MRT3847_138065C.1
tttggttttttgatattattttgtggcagcagtgacagagtgattggtgtgagtgcggcaattactggaacagcggttgagtgtgcgatcgagaaagcagagaaatggggttggaatcggtgggagatttagcgattcacgtgattctcagtaagttaggagcccaagacactgccagagtcgcgtgtgtgagcaaaaggttctgttcttccgcttccgacgacactctctggaggaatcactgttgagagtacgaccgagaaagcagaaagcagaaagatggggttggaatcggtgggagatttagcgattaacgtgattctgaaaaaattaggagcccaagacattgcgagagtggcgtgtgtgagcaaaaggttcagttcttccgcttccgatgacactctttggatcaatctctgcttcaatgaactcgctttgacacaacccctcgatcatctcggaaaccctctctcttccttcaaggaatgctatctagcatggagaggagcttttgttatgtacccttggtctcttgttaagcgtgtaaaaaggtgctgggatagaataaaaacctggttgaccaataattttcctgaagcggaggccactctttgtaaaggtgcaactgaagctgacattcaggagttggagaatgtattaaaggtgaaattgcctcttcctacaaggatcctttatcgctttcacaatgggcaagaatttgcaaaggcagatccagaaactagtacatttggcagatctttgggtctaattggtggctactccttctatggtcatttggtgaatgtttatctattacctatatgtcagataatcctagaaactcagcaaactaggcgtcgcttgagctttttaagaagatcaaagtatgttcttgtggctgcttcatccacatacagtagaaagttgtttttcctcaactgtaccaatggtcaactatatgtcgggaccaggtctcctcttaccgaaagagacataatcccttgtgtacctcatgacctgattagtttacatcaggaattgaatagttcagagcaacaagatgccatgctactgtggttagaagaacatggtcgccgtttagaacacggctttatcaaacttcatgatgaaggaaatggcaaaagcattaatcttttcccagaagaaccccatatttgttcaacggctgttactaatggtgtgaaggttcgcgcttctgcactggttatccctgagttgatggatcttcaagatgaccttggagagtacttatttgcttattcaatccgcttgtcccttgaacctcaaggatgcattattaatggaatgtccttcagctcttgccagctccattggaggcactggatcatccgtgctaatgatattgttatatctgatgtcagtggaaaagctgttataggacagtttccacttttgcgtccgggtgctcaagaatttgtttatcagagttgcacgcctctaccaacaccatcaggttctattgaaggttcttttacatttatacccggcagattggcagacccaaaaggagacccttttctagctacagtggctcgtttcccgctccagctgccagactatatattctgattttgattctggatgggattgaagtatctctaatggcaattgcagctctcagatattgtttgggtgtattatgtccctttcgggagaggtttttaagttggacctgcacaatttccctatctataagagaagcaaagtatgtacaatatttgatctctatcataagagaagcaaagtagatacaatatttgttaggggtgttcatggtttgattaggttggattttttgttaaaaaatcatccaaatcaaacttaaaaaacttgtgatttggttcgattcagttttcatttaaaataaaattcaaatcagaccaagttaatatatattgcactttagttcttgaattgtgtattaacttcctatccttcattcattgggccaatctatatgcatgcagcaattcaatgaaacaaatttagtattgtcgtctataacatgggaacgtgtttgtgtt

SEQ ID NO: 42154 - DNA, 1318 bp, Glycine max
  Clone ID: PAT_MRT3847_138066C.1
ccggggcggccgacgcgtccggtttttaattaataatgtaaaagaaaagccatagtctccctctcttaagccctgaaccctcatctccaatctgcaaatccaactaacatgggaagccagcaagccgccgtgtcgttcctgacgaacctggcccgcgccgctttcgggctgggcgcctccgcgaccctattgagctcctccctctacaccgtcgatggcgggcagcgcgccgtcctcttcgaccgtttccggggcatcctcgacgagaccgtcggcgaggggacccacttcctcatcccgtgggtccagaaaccctacatcttcgacatccgcacccgcccccacaccttctcctccgtctccggaacaaaagacctccagatggttaacctaaccctccgcgtcctctcccgccccgacaccgacaagctctccctcatcgtccagaacctgggcctcgagtacgacgagaaagtcctcccctccatcggcaacgaggttctcaaagccgtcgtcgcgcagttcaacgccgaccagctcctcaccgaccgtccccacgtgtcggcgctcgtgcgcgacggcttaatccgtcgcgcacgagactttaacattttactcgatgacgttgcgatcacgcatctgtcttatggcgcggagttttctcgtgccgtggagcagaagcaggtggctcagcaggaggccgagaggtcgaagtttgtggtgatgaaggccgagcaggagaggcgggcggcgattattagggcggagggagagagtgacgcggcgaagctgatttcggatgccactgcgtccgccgggatggggctgattgagctcaggaggattgaggcgtccagggaggtcgctgccacgctggccaagtcgccgaacgtggcctacttgcctggagggaagaacttgctcatggcgctcaatgctggtggacgttgattcatgtatctctgtgtgtggttttcacgatacggtgtaatggcatgcttggaagggatgctgttgaggttcttctttgctggggttattttttccccaccttgttttgtagaccccatttgtaacatgtagaatttggaccttcgcgttgaggattaatgaaaaatttggaccttcacgttgaggattaatgaaaaatttggaccttcatgttgagcataaatgggtcttttacagttgtacttgtagaattacatgctaagacttgaaatcgagtccttgtttgaggataaaggggtcttttagagtttgtacttgaagacttaatgtagctattttatcatctatttccatttcttttcacaga

SEQ ID NO: 42155 - DNA, 157 bp, Glycine max
  Clone ID: PAT_MRT3847_138067C.1
tttttctcaaaaacagtttctaattggcattataagggattaagtaccgatcaaaattttctctcattgcaattcctcttatgtatacaaaatgatttaaattgaacatttcagtcactctgtttgtatatattttccacacccataaaaaaagaat

SEQ ID NO: 42156 - DNA, 380 bp, Glycine max
  Clone ID: PAT_MRT3847_138068C.1
cctcaaaattaataagtaatcaaacgaatacttaccgcaaacttagctatgttatcaactaattatgtattatcaaattgttaaataagctacctaaattattaaataagttcgattatcttactactaaaccaaaaaaaatatttattttaacagtatgtacaagtaaatgagttatctagttgtttctaattattagttttagttttatatttaatatgttccgtgtaggaaagaacttttcaggtataaaaattgaaattacgataatctaattttatagtattagtttcccccaagcaacagtagaccatatttgctccctggccttattgcatacagtcacatcagttagaaaccagtaagcacgaatcagtaac

SEQ ID NO: 42157 - DNA, 735 bp, Glycine max
  unsure (1)..(735): unsure at all n locations
  Clone ID: PAT_MRT3847_138069C.1
ccacgcgtccgggtagttgatgaagaggaagaaggaacactgatgggagaggagtcccaaccacaacgaaccctatggagcaacgcagagagaacgtgcttacaccttctccaatgcagaacaaagagcatccccacgcttctccaaatccacgccttcatcctccgacactctctccacagcaacctcaacctcctcaccgctttcgtcacaacttgtgcctccctcgccgcctccgccaagcgccctctcgcaatcattaaccacgcgcgccgcttcttcaatgccacccacacccgcgacaccttcctctgcaactccatgatcgccgcccacttcgccgctcgccagttttcgcaacccttcaccctcttccgagaccttcgccgccaagcaccaccttttacgcccgatgggtacaccttcaccgcgctcgtgaagggttgcgcgacgcgtgtggccactggtgagggcacgctgcttcatgggatggttttgaaaaatggggtttgctttgatttgtacgtggctactgcgttggttgatatgtatgtgaagtttggggttttaggtagtgcgaggaaggtatttgatgaaatgtctgtgagaagcaaggtttcgtggactgctgntatcgtgggctatgcgaggtgtggggatatgagtgaggctaggagggcttttgatgagatggnaggatcggatattgtgggcttttacgcaatgattgatggg

SEQ ID NO: 42158 - DNA, 374 bp, Glycine max
  Clone ID: PAT_MRT3847_13806C.1
gagcataaaagaatttcaattatttaaaatttctccctcatccaatcacacttttaatgaacgtggcaattcaattgtgcgtttcagcatccaattttttaattgatgaaaggtgcgaggtgttctacgaatgctgcaagggttttctggtcccccattcttttgggataaaaatgcaaacattttccgtgcaaagagcggagtgtacgttagtcatctctcacagaaaagtcttcactctctgctcaatcagtttatccacgcagccacgtgtctccaattggtggctattacactcaacaaagtcgaaaccgcagtgccaaaatctcctcctactttgaacgcatttgtgtgcctcaaggggttgcggaata

SEQ ID NO: 42159 - DNA, 479 bp, Glycine max
  Clone ID: PAT_MRT3847_138070C.1
tcacgcgtccgcccacgcgtccgcggacgcgggggttgataaaaagctgaaccgagagcacaggttgccggaccttaagaccggaaccaaaagcaactgctacttgatgtcaagaatcttacaggatataactactctttgtgggacgatcacttacgggaaggaaaatcactctctgcgctggccacagacttggtgaacaattttctattccactctgagcttattggctgaacactctcctatctgatataggactaggtgtcagattaaaactatgtctgagctgttgtcagttctgtgctgaattccaagtttaagctggggaaatggagtatgagggctgacactcttctatctggtataggacttagtgggtagacttaactattcctgaccgtcgtttcactctgttctactcactgatccgtattgccgttcaaagagggcttgtttgaaaaacacttgggcgtgggagc

SEQ ID NO: 42160 - DNA, 309 bp, Glycine max
  unsure (1)..(309): unsure at all n locations
  Clone ID: PAT_MRT3847_138071C.1
gctgctgttaatagcgacgtngcatctgctacctnncatacatantntcgnccaanncgacggttacngntanagcgtttctaacngtagcgctcaagaagnaggcnctggctgatcntgttgcgttntggtngaagnggttttgctgatcatttgtggtagnaggtaagaaaanaaaaaanagttgaanaatgagttcagnacatgccgcatcangagcacnagcaagagtcccatggaccgtaagatccgctctgatcgantttnctatcgtgatgnacttacangcagagattcacgtccggggnt

SEQ ID NO: 42161 - DNA, 249 bp, Glycine max
  Clone ID: PAT_MRT3847_138072C.1
aagaacaaccccatctttgcccttttgatccttaccaaagaaccttggcttctttttggtccaaattcattgatgataaagtttttggtgcttcatagaaatccgttttcacagctgatgagaaagaacgtgagaagaattttgaggaagcaattgaggctttcagtttcttgaaagagataaaggacaagaatttttggaggaaggaattggtggtagatttctgctgtctatacttttgggtcttgg

SEQ ID NO: 42162 - DNA, 352 bp, Glycine max
  unsure (1)..(352): unsure at all n locations
  Clone ID: PAT_MRT3847_138073C.1
caaccacatggcacactacacaacngngancnnccgcaggcacgagaggangaananggaggacgggggaggcgggaaaacagaagagacgccacaaacnangcagaggggagnnaaagagagcnaggagaaagagaccagnacaggaccacngagaacgagcccaangccnnggccnngggcggcgaagaacaaggaaccgccccaccgcagcgaggggcncccccacnnggcacaacaaacagcacgaggggcaacacaacanacgaacccnacnnggcagaacaacaaagngggagancacacncggcagccgcgagaaagcacagaagaaagnagagggaccaacaac

SEQ ID NO: 42163 - DNA, 330 bp, Glycine max
  unsure (1)..(330): unsure at all n locations
  Clone ID: PAT_MRT3847_138074C.1
gcagcttttacaacataaaacataagaattgtcttatcatgtactatggatcgtctataccaatccttcgtctcaaactntgattcaagcacaactaactaactaaaggaacatactccacagggatgaaaaccataatgcactcaaagggtttcatcctcaaacactctaaccaacgccatacccacatgtttcgtgacatcattttgcatgcgtctcgcagttatcacactactgaaacacatcttctactcacgaccgactacccactgttacatgcttgtgccgtttatccttcaactccataacgctagtcttaacctctatcat

SEQ ID NO: 42164 - DNA, 336 bp, Glycine max
  Clone ID: PAT_MRT3847_138075C.1
cattggctggttaacttatgaaaagccatttctgaaaaacaaatccccaacccagtcaaaataaacgaaaaattgaatgggggggtttttccaatgtgagcccgcccccctaaagtttttgaccaattgtttacacacaatatcaaaatctcatctcatctaataattataaaccaagggggaatgggagtttcggaatcacataagcaaaccccagtttccttacttttttgggagccacctttttaagggggggcctcacttttggagatgggactggccctgttcaccacttggggtttgaaacaatgagaagccagcctttgaatggggctt

SEQ ID NO: 42165 - DNA, 144 bp, Glycine max
  Clone ID: PAT_MRT3847_138076C.1
tttaaaaataactgacaaggggacattgagttggtccgttggaccttaggacataaattgagaaacaagtgacgaaatcactgggagtgatgaggcccttcgttggagagatacatgatctgattactcttcaatggtggaatt

SEQ ID NO: 42166 - DNA, 457 bp, Glycine max
  Clone ID: PAT_MRT3847_138077C.1
cgttttccgacgaggagacatattacctggcgattattatatgaggaaaagatatctaatgaatgcatgagttcgcatgcagtataagcgactccacttcttaactccccaaaacagaaagcagcaagaaaaatggtgttgctgtccaaggcaacaacagaacaatactcctacatcaagaactacatgccaacggcattctcctcaacaattcccatagtggacctctccaaaccagatgcaaagaccctcatatggaaggcttgtgaggaatttggattcttcaaagtcatcaaccatggtgttcccatggaaactatatcccagttggaatctgaagccttcaagttcttctctatgccactcaatgagaaggaaaaagtaggccctcccaaaccatatgggtatggtagcaagaaaattgacacaatggggatgttggttgggttgagtacct

SEQ ID NO: 42167 - DNA, 529 bp, Glycine max
  Clone ID: PAT_MRT3847_138078C.1
gttgaggagtgggcagcgtcagttctcggtggcggtgacaaggccgtgggaggacaaatggcttactctgcctcccgtcagtgctagttcgagtgccagtgtggagctgaatcaactctcgtccactccgaccaccgcactcaaatgggttgttcggtgctgcccccaccttcccagagctctggtgcacaagcttttccgtctaagacaggttcgaattcaccctgccactgctatacaacaacaaacattcaaaagggtggcagccaaggacaccttgaacacaggagaccgtatcttacttcctcaatctgttaaagtttaacaaacgcctacacattctcatctcactccccaacaaatcaactttatccgtactcttgttatctataaggttttcaacttttactcccttcttttttctttccgcatttctctttctctttctcattttgtgcttaggatcccgccattctcgtcctcaacaaacctcctaggatgccagtgcagggtggcattaatatcaaac

SEQ ID NO: 42168 - DNA, 430 bp, Glycine max
  Clone ID: PAT_MRT3847_138079C.1
cccatgcttccggttgctgacgctcacatccatgactacgtcagtacgcctactgacacggcaaaacaggcagtagaaggtcgtcatctggaactactaagagctgtccctggagctttaacgcccggactaccaacattaataccgggtgtaactgatgctggaaccaccacaaagacggccaacctaacatgcccgaaaactgatgatcataaagactgatgaattggccactgtggataccccagaatgcagccctcttctgcctggcccagtgcctctagaacacaatacgctattgattctccacgtaccacaaggtatgaaagtatgcctgccttctgatcgactgcatgtagcaaagaggtcaagagaaaccaaatgcagatgcctggtgatgaatttaggaacctagattatctacatccgg

SEQ ID NO: 42169 - DNA, 361 bp, Glycine max
  Clone ID: PAT_MRT3847_13807C.1
aacagaatattccccccctagggccttttaagttggcaaatcacaggacccattggggtttaatttcctaaggcctggccatgagagtgaaggcaaaatctctcgcgcaatggcactgggagcacttattcttcttcaatacaaaagcagctgaaaatccagggtcacaaccatctgtttgtagctgtgacgcatatcgaaaaatcaacgtggaaatgtcgcatccatcaggtggtagcgcttgctctcgctctaaactaaaacatgcttcttcatcaaggagctaaaaatcagctcccaacatttcatcatcaagtggggatagcacggcttctatatcgactctggaaggttctcatga

SEQ ID NO: 42170 - DNA, 333 bp, Glycine max
  Clone ID: PAT_MRT3847_138080C.1
aaagcaatgactatgtcatttaatccacacccgcggtctgacgcatggagtatgtaattactgaagcggactggatttcattgcgatatcatgtgtgtcactggatagactgccaccccaatgcaggatgttcaggctacaattgattggtttatttcctctcacgaatgcgctcccaggacctattgcgtttcaaatccacaagacccttttgcgtcaaataagcggatgggaaaattgactttccgccatggcactttccgaaacgttaagaaaatgtctatttctatagggggaggagctgatgcaaagaatgctatactgatgaatatg

SEQ ID NO: 42171 - DNA, 765 bp, Glycine max
  unsure (1)..(765): unsure at all n locations
  Clone ID: PAT_MRT3847_138081C.1
gtcgacccacgcgtccgcgttttttcatgaatatggagcgctacacgctacccgcaccacccattaatattattctcgaggaagaagaagaagaagaaaacattgccattgccatgggtgcccctcttatcccttcctttaaatccatgcttcaacaccaacaacaacaacctgactcttacttcaacttcaactttaactcttcaattagttctgctaccataccctttgttcctaacatggaatcttttccttctcttgaccctttctccccttcactttcatcacttcctttcttcaacaacaacagcagcaacaacatggcatttgacccgggttttgacttgggcctggacactactgggcttcactcttctgttcctcctgctccccatcttttttcccaggcccagatgggctttgagttctcggaactcgaggccctcactggacctgggaatggaaataatgccccttttgcggacggggcaaaggtggctgcggccatgctgctgcggccacctcctctcgatggggcgcagcagcagcagcagcagccgacgctgtaccggaagcggagggggacggcggcggaaattccggggctggagacggtgaggaggaaggggaggaagtgggaggaaggaggaagaggaggggagggggtaaggaaggggagcanttgctgacgtggatggttcccgggttgaactatgagtctgatgagcagaatgagaataatgggaacaatggtttgaagctgag

SEQ ID NO: 42172 - DNA, 2371 bp, Glycine max
  Clone ID: PAT_MRT3847_138082C.1
cccacgcgtccgcccacgcgttcgcccactcgtccgcccacgcgtccgcccacgcgtccgtacggctgcgagaagacgacagagaagttctgttggtgagtgtgagtgagtgtatcaatcggccacacagaaatgggcagtgcttctctgattccagtttcctggttgccttggcggccactttctcctttcaagggaacggtgaaaaccttggtcgcaaaaccatggctgaagaagattcagcaagcaagacccctcatttccgtggttaacaaggctgcctctctatcttcccccgtgacagcacccagcgtcggcgttcggtttcggctggacaatttggggccgcaaccgggttcgaggaagagggctaagagaaagggtagaggaatatccgcagggcaaggggcaagttgtggttttgggatgagaggtcagaaatctcgatctggacctggcgttaggaagggtttcgaaggtggccagatgccgctttatcgccgaatccccaaactcagaggaattgcaggaggtatgcatgcgggattgcccaaatatgtccatgtaaatctgagagacatagaagatgctaaatttaaggaaggggaagaagtgtctctagagtcactgaaggcgaaaggtgtgattaatccatcaggaagagaaaggagacttcctttgaagatcttgggtgaaggagaactgagcaagaagttgacattaaaagcccgcgccttttccacatcagcaaaggagaaacttgagaatgctggttgttccctcaccgtgcttcctggccgcaagaaatgggttaagccatcagttgctaaaaaccttgcccgcgctgatgaatactttgccaagaagcgcgccatggctgcttccgagccagcctcagcttgaacttgagccagcctcagcacgcactagattttttttgacaaagttgcttacgtcaacaagatgattctgtaattctaagctatgggtattgtttgtaatgcttccccatttgtgttgattttgaatctattcctcttaaaagccactgccaaaagcaaaggcaaacaaatggtggttgtgtgaacaccaactttattttgggaccaatgcgtgccaatcctttcaaaccaaaattgtgtttttcaccaaatcccctatatacagacatagataaatcatacttatatattgaaccattctattcattcggcagcaacaaaatcaccatccttcttctgcaccgcaatgctcttcctcttccctccgtcattagtttgttagttagattacccttttcccttccatgcttacgtcaccaccgctcaccattcactctctttttacccctaaaccattgaatcgatctaaatctctcccaaatcgcaaaccccttttgctcaattgagtcaattctctctacctttggaccctgttaatcgctggtccatatctggataaacttttaccaaaatgtatttggtttcaagtatacgacacaagtgacggttttcataattctttcctgccttatctccatctctgtcaatttcagtacgttccttgttattggaaagacatctccagtcacctatcaggttcttggacacctgaagacatgccttgtattggcatttggttatatacttctccgagacccatttagctggagaaacatactgggtattttgatagccatgattgggatgattctatattcttactattgcactctcgagaatcagcaaaaaactgtcgaagctgcatcgcaatcatcccaggcaagagaagatgaatctgatcctctgatgaatgtggaaaatggaagtgcagttgtgagttctaatgtcggacaaagacaaatgtctcctgtatggagcaagagcaaagactagtatgtttaatgggttttgttttagcattgtcaagaacagttttatagtccttatagagggttaacacccgtaatccatatggaattagaaagtggaagtgctgccaaacacatgtcctagtcatttttaatagctttagtctaatatttttatgaatcgtttgccgaccaacagtattagggaagggaacaagcacatggtcatgtcgtaattctattggccaacaaatatgtcttatagtaacatacatctcctggtgatgttttcatatcatgatacatttatgattttatatagatattcaaactttttcttggcttgaatagcatatcctggtgatgttttcttatcatgatacatttatgattttatatagatattcaaactttttcttggcttgaatagcatataaacacctactggtaattctttttctccctaaaaaaaaaaaaaaaaaaaaaaaaaaaaacaataac

SEQ ID NO: 42173 - DNA, 537 bp, Glycine max
  Clone ID: PAT_MRT3847_138083C.1
gttttactaccaaatctccgttgcttccttactctccagcgcctactcatatcacagatcatggataattcatagtactactatttcgtacaagtattcacgaaccattccattccaatttccattcagcagcaaccaaatcaccatcttcttttgcatcattagttttttagttagattaccctcttccgtttcaccttcctttcatgcttacgtcaccaccactcactctttttctaccctaaaccattgaatcgatctaaatctctcccaaatcgcaaaccccttttgctcaattcagtcaattctctccctaagttccgctgtcggcgtctaggtgggtaaaagatgatgatttgtcttctgggttttggagcatacgacaaaaagatgggtgagggagaacgtttccagcttgagacggtgggcgcgttgactctttctgtggtctcatctgtgtccattgtgatttgcaataaggcgctgatgagttcactgcatttcattttcgcttgcaagaatgtgaatagatctaca

SEQ ID NO: 42174 - DNA, 661 bp, Glycine max
  Clone ID: PAT_MRT3847_138084C.1
ccacgcgtccgatcggccacagagaaatgggaagtgcttctctgattccagtttcatggttggctttcaaggtattgatctcttgtgagcattcagcaatgaatttgggcattgcagggaacggtgaaaagcttagttgcaaaaccgtggctgaaggttgagcaagcaagacccctcgtttccagcgtcggcattcgaggaatatcggcaggccaaggagcaagttgtggttttgggatgagaggtcagaagtctcgctctggccctgccgttacaataggtttcgaaggtggccagatgcctctttatcgacgtatccccaaactcagaggaattgcaggaggtatgcacgcgggattgcacaaatatgtccatgtaaatctgagagacagaagatgctaaatttaaggaaggggaagaagtgtctctagagttcctgaaggcgaaaggtgtgattaacacatcaggaagagaaaggagactccctttgaagattttgggtgaaggagaactgagcaaggagttgacattaaaagcccgcgccttttccacatcagcaaaggagaaacttgagaatgttgggttggttcctcactgtgctttcctggccgcaagaaatgggttaaaccatctgataactgctaaataattggtattttga

SEQ ID NO: 42175 - DNA, 520 bp, Glycine max
  Clone ID: PAT_MRT3847_138085C.1
agttgacattaaaagcccgcgccttttccacatcagcaaaggagaaacttgagaatgctggttgttccctcaccgtgcttcctggccgcaagaaatgggttaagccatcagttgctaaaaaccttgcccgcgctgatgaatactttgccaagaagcgcgccatggctgcttccgagccagcctcagcttgaacttgagccagcctcagcacgcactagattttttttgacaaagttgcttacgtcaacaagatgattctgtaattctaagctatgggtattgtttgtaatgcttccccatttgtgttgattttgaatctattcctcttaaaagccactgccaaaagcaaaggcaaacaaatggtggttgtgtgaacaccaactttattttgggaccaatgcgtgccaatcctttcaaaccaaaattgtccttttcaccaaatcgtaagcctaacttggacatcctcagctgctttaatatatttaatttagaaaaaaaaaaaaaaaaattaaaatataaa

SEQ ID NO: 42176 - DNA, 713 bp, Glycine max
  Clone ID: PAT_MRT3847_138086C.1
accagtttgcatctagaatatttgataaacccgaaccatgactggtagcttcatttcatggctccaaaataaaaagtgaagggtgggaaagggggaggttgtggaacttagcagcgaagcgaggaagatgcaaagtcaacaaacagtgaaagaagaagatgatgaaggtccacctccgggatggcaacctctccccgctcagccaccgccaccgccacgtccatccggttgggctcaaatggtttgcggttcttgtcgtcgcctgctttcatatccacgaggtgccaaacatgtcaaatgttcatgctgtcagactgtcaacattgtattagaagctgatcaggttgggcaagttaagtgtggcagttgtgcggtattgctgatgtacccatatggtgcttcacaagttagatgttcatcatgccgatttgtgacagaaattggggcacacaacaagcggcctccatggtctgtacaacaaaggaagccatctcctccaaaaactggttgttagtggcctgtccgttggcctagtagatggatcatccttgtacatcaaacaaattaggtatgaggattcatgtaccaatctcaaaattgctttgttattgagatacgcatccttaaggaattatttattaatgtaaagttttggaatttcaccagaatttttaagatgaagtttcacttgagagtcttctattcctgcttgc

SEQ ID NO: 42177 - DNA, 1882 bp, Glycine max
  unsure (1)..(1882): unsure at all n locations
  Clone ID: PAT_MRT3847_138087C.1
ttccattcggcagcaacaaaatcaccatccttcttctgcaccgcaatgctcttcctcttccctccgtcattagtgtgttagttagattaccctggtgtgccttccatgcttacgtcaccaccgctcaccattcactctctttttacccctaaaccattgaatcgatctaaatctctcccaaatcgcaaaccccttttgctcaattgagtcaattctctccctaagttccgctccacgcgtccgggtaggttttggagcaaagacaaaagatgggtgagggagaacgtttccagcttgggactgtgggtgcgttgactctttctgtggtctcatctgtgtccattgtgatttgcaataaggcgctgatgagttcactgcatttcattttcgctacaactttgaccagctggcatctgcttgtcacgttttgttcccttcatgtggcgctcaaaatgagattctttgagcacaaaccttttgagcagaaagctgtaatgggattcgggattttaaatgggatctcaattggacttttaaatttgagcctggggttcaattctgttggcttctatcaaatgactaagctggcaatcattccttgtactgtattgttggagaccatttttcttgggaagagattcaggttctatttagcttcttatgaatacactgtttttatgtttgggtgttgatatatacttgaaatgataattatgtaacagtcactttttgttttttttcttctcatctgttgtatctctctctctctctcacttgctcattgttttgacctgaagtatgattgtaactgattgttatgctcatttttctgtctgagcatagctgcctttagtagttnttccttaataaaatttattattttcttttcatggctattgcagtaagagaattcaatttgccctcagtatcctccttttgggtgtcgggattgctactgtcacagatttgcagctcaatgctctgggctctttcttatcttttcttgcagtgattacaacttgtgttgctcagattatgacaaatactatccagaagaagtacaaggtttcttccacccagcttctgtatcaatcatgtccatatcaagcagcaaccctgttaatttctggcccatatctggataaacttttgaccaaccaaaatgtatttggtttcaattatacgacacaagtgacggttttcataattctttcctgccttatctctatctcggtcaatttcagtacgttccttgttattggaaagacatctccagtcacctatcaggttcttggacacctgaagacatgccttgtattggcatttggttatatacttctccgagacccgtttagctggagaaacatactgggtattttgatagccatgattgggatgatactatattcttactattgcactcttgagaatcagcaaaaaactgtcgaagctgcatcgcaatcatcccaggcaagagaagatgaatctgatcctctgatgaatgtggaaaatggaagtgcagttgtgagttctaatgtcggacaaagacaaatgtctcctgtatggagcaagagcaaagactagtatgtttaatgggttttgtcttagcattgtcaagaacagttttatagtccttatagagggttaacacccgtaatccatatggaattagaaagtggaagtgctgccaaacgcatatcctagccatttttcttaatagctttagtttaatatttttatcaatcttttgccgaccaacaatattagggaggggaacaagcacatggtcatgtcgtaattctattggccaacaatgtcttatagtaacatacatttcctggtgatgtttttatatcataatacttattatgattttatatag

SEQ ID NO: 42178 - DNA, 1064 bp, Glycine max
  unsure (1)..(1064): unsure at all n locations
  Clone ID: PAT_MRT3847_138088C.1
gcctaatcagatggtacagtagttcatcacatggctcattatcatatttgtgttactgattttagcttatcaacgtgcgcaagtacttaaacgaccattacgctttaaaaagttggcgtttatgctacttcttagtatctttattctttatttaaatcatattttaatatcaggaactttatatgcattagatgtttatcatattgagattgatacgtctttattacgatattacttttggatgaccattgttattattatgctactcgttggcgttattgcttggctttttgactataagtataaacgccctcatcatagcattgatttaacactttgcgatgcaattattcaaaaatacggtggtaattatttaagtcaccttgtttatagtggtgacaaagattgtttctttaatgaaaataaagattcttttattatgtatcgatataagtccaatgcccttgtcgttttgggtgatccaattggcaatactaaatcattcgagtcattattagaagcattttatcagtttgcagagtatcaaggttatgagattattttttatcaaataagtgatcaatatatgcctttatatcataattntgggaatcaattcttcaaattaggtgaagaagctattattgatttaacaacgtttacaacatctggtaaaaagcgacgtggtttcagagcgacgctcaatacatttgatgatttaaaaatcaattttgaaattattgaaccaccatttactcaagatttctttgatgaacttaaatttgtgagtgataaatggttggatggaagaagtgaaatgcatttttctgtaggtcaatttactcaaacttatttatcgaaagcacctattggagtaatgagagatcattctggcaagatgattgcattttgtagtttgatgcctacttattctaataatgcaatatctgttgatttaattagatggttgcctgaattggatttacctttaatggatggattatatcttcatatgttgttatggagtaaagaaaatgatgaactactgtaccatgntattagga

SEQ ID NO: 42179 - DNA, 766 bp, Glycine max
  unsure (1)..(766): unsure at all n locations
  Clone ID: PAT_MRT3847_138089C.1
ggctcgagatcagccataaataagtgagttataaaaactataaaaaaaaagtactatttagctttataacacgttctagagcttatggatttcaggcaaagagctccaactttccgtccacaactttctgttcgtcgcgtgtacgagactttggagccacgatcagagacagaagaacttccagaagcttatcttctgcgtgtatatattcctggttttccaagggagaatgtaaagattacatatgtggcctcttcaagaactgtgaggattacaggagaaaggcaacttcaaggtaacagatggcacaaaattgacaaatcatatcccattcctgattattgtgaggcagaggcacttcaaggtaagtttgagattccaattctcaccattacaatgccaaaaaaggccacttcacaagctgctactaaacaacaagaagtgggaacatcccaagagaaaggtgcagtagtagctgaaccaaagcctcaagaaaaagtccaagagaccacttcagcaccacaacctacaacaactactaaagtggaagaaccaattgaagagaagaaaagtgcatcaccaacaagccctgatttaaaggcacaacaaaaaaatgatacttttgaagacacaccatctcaaagcctttcaaaaccaattaaggatcaaaagggtcaagaggaattggtgccaaaacccacaccaacaccaacaccaacaccaagggcaactacaatgcanacatatgaaaaggctcaaaaaggtc

SEQ ID NO: 42180 - DNA, 727 bp, Glycine max
  Clone ID: PAT_MRT3847_13808C.1
ttcttcacattcatcagcaggttggctggcaagttattgaaatgaagaataagaatggaaaacttaaattgacgtttgagaagttcacatggacgattagtaacttctctaaattggactccaagaaactgtactctgagaagttttagctcgatcaccatacatggaagattcttgcctatccaaaggggactgatgtgggctcctcgccttcttctgcagatgctggtgttgttaatttgccttttggctggagcaaatttgcaaatttcaagttcgctttaattaatcaggccaatgacaaaatgactaaaataaaagaaactacaaaacagttcaatgcaacagaaattgcttggggttttccaaaattcatacacttagatgaacttaatgattctagcagtgggtttatggtgaatgatacttgtataattgaagttcagattttggtcagcaagtcagaacaggagaatcaagtagatcaacaagttaacaagattgatgataatcatgatattgataagcctattaaacacacagatatcttcttacccaaggaaacgttcccaacctcatttggtgagctagttgatttccaaggcttagggaaaatagaacaagcttttgttccattgttagaagaagtattttctcgacatccctcactcattgattgtcagcaaaaagaagtggcaggtttgttgaatgggcattcacagctttg

SEQ ID NO: 42181 - DNA, 323 bp, Glycine max
  Clone ID: PAT_MRT3847_138090C.1
gacagacaactattccgcttaaacctgctactgagtttccacactggataccttacgtcttccgaattcgaacttcatttgcgatatggctactgaaaaagctcacatcaacattgtggtggttggtcatgtggaccctgacgaagcaaccaccattaacgagctgaataatcctgttgtggagaaagaagctccagggcatgccatatcatggcatgcacgtacggccaccgaagggaaccagaccattatgttaacaaaataatctggaagcctaatgtatcagtgtcatcatcactgtgtagtttaagctatcattgcta

SEQ ID NO: 42182 - DNA, 108 bp, Glycine max
  Clone ID: PAT_MRT3847_138091C.1
ctttctcgtggggtcgaacaaaacttaagtgaagcgtttttacgttgtgcagacaagtataatgagtacctagaaatctgaggctgagaaataataggaggcagattg

SEQ ID NO: 42183 - DNA, 255 bp, Glycine max
  unsure (1)..(255): unsure at all n locations
  Clone ID: PAT_MRT3847_138092C.1
gatgaaaccaatgaccaatataagaacctcctcaaatgttacaacancaaaggttgaattttgtaacctcgtaggctcttacattgaaaagtcctcttttcaattccctccgactatgagtgctaagtaagaataacaatacagctagtagtttatatgcacatcgacatacaatgaactacatatttgtgctgataattcacaaacagttcgaacttttaagtctttaagttacgactacgaagatagcacata

SEQ ID NO: 42184 - DNA, 174 bp, Glycine max
  Clone ID: PAT_MRT3847_138093C.1
cgaagtgttcgccccgcagactgatcccaatggtttgatccagtgtactgttggtcgtaagggctctaaggcaaagttgtgaatacgataactggggctgttcttttgcatatcacagcgagactggcgtttatggttccgaacgtagacatactttatttgataccatttttc

SEQ ID NO: 42185 - DNA, 219 bp, Glycine max
  Clone ID: PAT_MRT3847_138094C.1
tactcatatcacttataccattctctctcgcacgcacacgcacctcgataaccacatggttttacccatggcatccaatcagatcgtgaacgaacttaaggatcgtcatacggcatctcctacctcatgcatcgccagtcctgttgctgatcacatgtatcactggcaagcaacaattatgggtcatctagacaatccttatgcttcaagtgttttcct

SEQ ID NO: 42186 - DNA, 571 bp, Glycine max
  unsure (1)..(571): unsure at all n locations
  Clone ID: PAT_MRT3847_138095C.1
ggctcgaggaaggatctgaaaaggacttcgatgtgctggttgaagatatcatgatctgtaaacatgtcataagatttgtgggatatgaagccaagtattatttgtggggtgtcttcagaaagaaagcaaacttaagaagagacaaatgatgcagtgtgcagagtttgacaaggctcttaggttggcataaccatagacgtagtctccatctaaaaatttgagcaatagtggttgtgtagctatgactctagtgcatagtactcctgtgtttatagtcactgatatgttaattaaacatatatatactgtagtgcatagtaccctttttgtgacttcattgtccaagagagatgcttccataaatgttccagaaaccctttgaaactgtgaccacagggttagccttgtctcaccgaaatctttgatggtggtaaagcattgnggtgtttgttctacagtcaccgtgttaatgtgctataaccttggtctactgacgatgtttttcatcagttacttatatttcaggaagtattgggcgtgtaaacgttaattcttcatttgttcaatgcat

SEQ ID NO: 42187 - DNA, 253 bp, Glycine max
  Clone ID: PAT_MRT3847_138096C.1
ttttttttttttttttttttttttttttttggttttggtttttaaaaagagaggaagaatgtatcaattgattaaaaaaaaattttgtttctccactggcaaagtaaataatacatccctttaaaataattttggggggggcaaattttttaatacccgtaaatgtcattaatgcagggggtggaatttgcaaaaaaaaggatgcaaattgtaaaaggcctccaaacttgagaggacccgcttgcaagctttc

SEQ ID NO: 42188 - DNA, 1291 bp, Glycine max
  Clone ID: PAT_MRT3847_138097C.1
atgcattgaacaaatgaagaattaaacgttacacgcccaatacttcctgaaatataagtaactgatgaaaaacatcgtcagtagaccaaggttatagcacattaacacggtgactgtagaacaaacaccccaatgctttaccaccatcaaagatttcggtgagacaaggctaaccctgtggtcacagtttcaaagggtttctggaacatttatggaagcatctctcttggacaatgaagtcacaaaaagggtactatgcactacagtatatatatgtttaattaacatatcagggactataaacacaggagtactatgcactagagtcatagctacacaaccactattgctcaaatttttagatggagactacgtctatggttatgccaacctaagagccttgtcaaactctgcacactgcatcatttgtctcttcttaagtttgctttctttctgaagacaccccacaaataatacttggcttcatatctccaattttggactggaagctcagtagaaggaaaaattaaaagctctgcatttttacccacaaatcttatgacatgtttacagatcatgatatcttcaaccagcacatcgaagtccttttcagatccttcactgtcaggaaagaaaaaaagagcaatgtcctgatcagttggatcccccctcttgaaactttcagcccacaccttatctctgggaagaaattctgcatgaagcacttctgggaaatgtcctgtctcctccgcaacttgggagcacgctaaattggagatatgagccagaagtccactgacagtacgaattgttccattgcaaaagtacatacttcccctccagattggctcgttagtaggctgtgcataaacatgaccatctacttctacacaacctgaatcactattggtagctccttgagaaactggaacagatttgaaacttacatcagaattagctaaatcccttgccacactttcttcttcacctacatcaaaattagctacatcccttggaactggtccacagtcatttttcacctcatgttcttcttcgcctctgttactacaatgaggatgctcaggctcagatgaactgtgactagcagataacacaccctttgttttagcaactaagccagcgttagcttttccttcaatctgcttctttgtaatcttcttttttcgctgtttattgtgttttttcactccctgtatgcaattttctcttgttacagatgcgataggtgtagattggtcaagagcaggtggcaccccaagctttgttgcac

SEQ ID NO: 42189 - DNA, 623 bp, Glycine max
  Clone ID: PAT_MRT3847_138098C.1
gaccccgccccatatcttcttcacggcaacagattccccgctggtaagcacaaccttgtaaaccttcccggacgacccgcttcctatcacattatcttcgtcgaggcaattcaagatctcatcttcgctaaaacccagtttatgaaacgacatcaacgtccacttcgatttatcaacagatctcccagcattcttgaaattcctatacctgaagtagaaccataccacaccaacaacaaacaccaaagaggcaactataaaaatagctcgcagaatccacacaaaacccttactattatcatcatcccctttgccatcacacaagcctttgaaatcgccacacaagccaggattacccataaaactagccctgtacatatccttagccagcagtggaggaagccttccagaaagcctattataagacaagttgagcagattgagcttcaaattctgcaacccaagaggaacattcccagaaatttcattgttggaaagatcaagaaaatttaacactgacaaaataccaatttcatcaagaatcttcccaccaatttcattattagcccaaattcaagtcattgagtttctttccacgaatgaaatccccttgggaagctccc

SEQ ID NO: 42190 - DNA, 452 bp, Glycine max
  Clone ID: PAT_MRT3847_138099C.1
agctttcttagatgaggtggttgaggatcctaggattgaggtaggtactcatgattggaattccatcatccatgctttctgtaaagctgggagactagaagatgcaagaaggactttcagaaggatgatgttcctgcagtttgagccaaatgatcagacatacttgtccatgattaatggatatgtcttggcagagaaatattttcttgtgctgatgttgtggaacgaggttaagcgaaagctatctttggatgggcagaaggggatcaagtttgaccacaatttggttgatgcattcctgtatgctatggtcaagggaggtttctttgatgctgttatgcaagttgtggagaaagcttatgagatgagagtatttgttgataagtggagatacaagcaagcattcatggagactcataaaaagctcaaagtggcgaagttaaggaaaagga

SEQ ID NO: 42191 - DNA, 1104 bp, Glycine max
  Clone ID: PAT_MRT3847_13809C.1
ctgggagtctccattaggttgcctcatgttttcttttactatgcaaatggaggatggacgagtcgttcctttggttcagtatgtggtttcccttgctatgacagaggcaatcaaggatatctgtgacaaaaatgggttacccagcatagatgttaaaatcaagtggccaaatgatctttacttaaatggctctaaagttggaggcattctttgtacctcaacatataaatcaaagaagttcaatgtaagtgcaggaataggcttgaatgtcaataataagaagccaacgacatccttaaatacaattctaaaagggttctattcaggagcttaccaatttcaaagagaagaagttctagcagccttttttaacaaatttgagatattttatgatttatttctgaatcaaggatttcaaaccctagaggagctatatatcaagacatggttgcacagtggacagagagttgttgtacaggaaaagaatgaggacaaagtgatcgaacatgtggtaactattcagggtttgacatcctcgggatatttgttggctgtcggtgatgaccatcaaatgtgtgagctccaccctgatggtaatagctttgactttttcaaaggactggtcaggaggaaactcgagtgaacaaagattccttgacacatttcacaagaggcaacactcttgcacactttgtatatattacgaaggttttggcttcagagctaagaattttccaataaatataaggttttggcttcagagctaagaacttaccaataaatgtcatatttgtataatatattttgtcattagaatttcagggcttttgtattccatttgtgaatttccgtcaaacttgtaatgccctttccttgtccggtcaaacaagatcttctatacatcatagcacgtaaaaaaacatcatgcagttgcaaccaaaataattacggatttttttttctcttgataggacctagttcatgattgctttagtcaatcatttgtaaggagtattgtggtccttcttagccagctatgaaatgatttgaaaagaaaaataacagaaacaacaaacgtttctatgattcatagttgtgctcaaa

SEQ ID NO: 42192 - DNA, 426 bp, Glycine max
  Clone ID: PAT_MRT3847_1380C.1
aaacacaaacaggatattgaaaaacatgggaagggtggaaaccttaataggggcacctctcatccaaatatacgaggaagcatccaagatttgtacatcatatcctacatcacccacagatttttctgaggagatggggcagaaaccccatacttatccggactgtgtgtgggagactggtgacactgaacaaaacatacacgcattgtaaggctcctcatacgagacatgcttatgacttggtagccaaaaacccctatattagttcaccatttccacccctcatatgattggccttacatgattcagtaattgcagtgaaattttccccggcgaatgcttcaacgagaccattcttgttgctctccaggcgcgtgaactactggggcatgggtttcaagaacaaaaaatttgggttctcctccc

SEQ ID NO: 42193 - DNA, 303 bp, Glycine max
  Clone ID: PAT_MRT3847_138100C.1
catattgattcctttacgcactgcacacacccatttgttcattctgatgccaccctatcttgtgcccttggctcgcatctactacccctgtcctttgctgaatgcaaccatgaagataatcaacccctacaaaagctatatgcagaacgaggagtgtgcttgcaccaccctttgcatgaggaaaaggaacaaggccttggatatgggtatttaccacctccaccaatttcagatgactatgctaccatggaaaccaaattccttgatcatgacacccacatggctatctgcattcaccacacc

SEQ ID NO: 42194 - DNA, 148 bp, Glycine max
  Clone ID: PAT_MRT3847_138101C.1
tctcctagcgctgctctatttctagcctgccattgtgtattctagagaatggacttgctttactgcccccacaagcttttccttttccagtataacattcacttgtgctatgcatagtgattataagctgcacaccgagcttattatt

SEQ ID NO: 42195 - DNA, 163 bp, Glycine max
  Clone ID: PAT_MRT3847_138102C.1
attctctatagagaagaggaaaagagccttgcaaaaacacaacatctggacaaagaaatacagaagcatctactgctccagtcaaagtgcatacctacaatgccggaaaattcttgttggaaaaaaaaagtaaaatttatcttacacacatccttaaaataac

SEQ ID NO: 42196 - DNA, 192 bp, Glycine max
  Clone ID: PAT_MRT3847_138103C.1
ttcacgcgcccgcccacgcgaccggacaacacgagagcttgaaaagagcagaaatccactcgacaacagagaggagcggcataccatacgcaccctcaattggttctgatcctgacagaatcaactatatataaaaattgatgttctaaaactaacaaaggaacaacttatgacataatcaaacacgtcatc

SEQ ID NO: 42197 - DNA, 214 bp, Glycine max
  Clone ID: PAT_MRT3847_138104C.1
gatgagatgttgatcaatggagcgtgttgtccactgggcaattttttcagaacctttttcgctctcgcaagctcacctcttcctcgttcactgtctgtcggacattcgcaagatccgcactgagaggacgacatggttctgacgcagaagtttcatgagcaccatcaactgcatcgtctagaggattacaggaccacgaaccgtttccgtgttt

SEQ ID NO: 42198 - DNA, 602 bp, Glycine max
  Clone ID: PAT_MRT3847_138105C.1
cttcccccccccccccccccccccccccccccccccccccccccccccccccccctcctccttttttttttttttttttaaaaaacaaaaaaaaatttgcttagggcaaacctcggccaacatattttttttttggaagcccaacaatttttttaacaagggggtcccaacaaaaaaaacttatccttttttggggctggggtttttgcaacggcaacctttaaccttttgggcttccggggaaatttccaaaaaaaaaaaggggaaaccctggggtttgcccctaagggaaggggacccctcaaaattttgacccgggggccccttcacttttttgaaaaccccctccccatgccttttggccttgaaaagcaaactggaagttccacaaaacatcctttataaaaggcctttttgggggctttttaaccaggcccctcacaaaaatctccattattggcttaaagggatggacccaaccctcccttgaaaaatgctgggataaaaaacgccccttctacctttttaataacctccaaagtttggttgcaaaaaacccctaaaagcatcggcaacattaacgtggttttatttggccttcc

SEQ ID NO: 42199 - DNA, 283 bp, Glycine max
  Clone ID: PAT_MRT3847_138106C.1
cccacgcgtccgatttatgtaatgttctacctgaaaaataataatataatctgttttagtattgttaaaaaaaaaaaaaaaaaaaaaaaaaaaaaaaaaaaaaaaaaaaaaaaaaaaaaaaaaaaataaaaacaaaaaaaaaacaaaaaaaaaaacaaaatcaaatagacacctaaaaacaaagaactggcacaaagcaataaaacgataacgaaatacaaaaccactgaagctaaccaacttaattgccttctacaacatacttgttttcgaaaatgtcaaa

SEQ ID NO: 42200 - DNA, 571 bp, Glycine max
  Clone ID: PAT_MRT3847_138107C.1
cctgcatgttggcgccctcgttgggcgcgagctcgttcaacaagtcatcaaggtcgtccaaggcgaaggccgcttctggctctgaggctgaggccaagacaaaagctgatccgagtaaaccaggtgcaatttcaatcagaacagaacctggtagcgcagtggagctgtgccttcaagcctgaccgaatatcgagacactcggagcaagtggtgttgtctcgcatccagaggttggccgacacttcctcgcagaagagctccacgaacgccaagaaggcgagcgcgacgagctggaagaaaccgtcgtcccgctcaaagaactggcggtggctaccgtcaggacagctcgggcactcaaggaggctcacgcggacggacgatcggaccgataccgtcccgactaagcacccgcgacaccagaaagccgacgcagagaaccgattcccaccgcgcaaccgcaaaatggacatgcgcacgattccgcacactttgttcccacccccacctacagatgggcctgggttttccctcctcccgacttcctcggcttcgccttctcccaatcctacct

SEQ ID NO: 42201 - DNA, 214 bp, Glycine max
  Clone ID: PAT_MRT3847_138108C.1
gttggctattaacgggtcgtgacatcatcttcttcgggttaactgtcttttttgggttatgatctaatagcccggaggttgaggagttgattatgtaggatgtggaccatgttattggcccaggccaagaatttccttaattcgaccaaatccgttaaatgcattaccttaacactgtaatttaccacaacatgaggctgttaccactgattca

SEQ ID NO: 42202 - DNA, 428 bp, Glycine max
  Clone ID: PAT_MRT3847_138109C.1
ggaagcaaaaaatgaaaacccaaagtgcttctctcctctggctttttctctctcttgctatccttttggctagtggcactgctgcaagtgcaactccaagaagcgcagtgccaagccaccatgtttcaacattcaacagaagcctttttccttccacttttctctttggaattggttcttctgcttaccaggttctgacaaccacataactaagcacattcaattagtattttctttttcattttttttgggtactacatagaagagatttgacgtattattttgttttctacaacctattcagatctctagtctttgaatttgtggaatacatgactggtttaactgtgagcgagtgagtcaaatttaatataatttcttttaaaaaaaggaaggacttttaaaataaaaatgatcttatatttata

SEQ ID NO: 42203 - DNA, 257 bp, Glycine max
  unsure (1)..(257): unsure at all n locations
  Clone ID: PAT_MRT3847_13810C.1
gtgcggcggtccaaacactcttctccacagcntttgcctacaactnncttnaccatggctgaanaaaccgagaaagcttttctgaagcaaccaaaagtgtttcncagcacaaagaagactgggaagggnaagagacctggnaaaggtgggaaccgcttttggaagtccattgggcttggatttaagactcccagggaagccatcgnaaggaacctcanatngacnncaanngccccttcatggcatgtttccangng

SEQ ID NO: 42204 - DNA, 327 bp, Glycine max
  Clone ID: PAT_MRT3847_138110C.1
gggaacactaaaatacacttttttttacccttaacctccaggcttttggggggggggcggttaattttttcaaaaggttcccctgtccaataaaaaagtaacaaatttgtttttccccatcgtttttttttttacggggtccatgggttaacctttcccgggtttgaaattgaagggcccttttgaaacatttccagcattagcttcttatttgcgggggggaaaaaattatttatttcatttttaatatcaggtgtcttcccaaattggaataagaaccccaaactttttttttttaatttttgcgatgggtaaagccaagccttt

SEQ ID NO: 42205 - DNA, 1180 bp, Glycine max
  Clone ID: PAT_MRT3847_138111C.1
ggttatttctgatgacaatgaatctgttgaaactgctgtcttttctggagggtgttgttctggaaccgagcacaaaattgttgacagagggcatgtcttaaatggtagccaggtgaatatgataaacgaggaatccaatgaaactgttattcctgagatgcaggtaggtgatcctttggcactcaatcagaatgttgaacaagagttggcagttgccacaacaccaatggctaaaataactgctgtgacagaagacttggtagtagagacatttccattaagctctgtttctgggactactgatctgggagggttgggggactctagtaattcaccagaaaatgatataaaaatgttggaagtgaaacaaggtgagaagtatgcccctggaaatcaaatattggagaactcctctaacactgggcttgataaggaggagaatgtacaagatatattagaagaaagctccaatcattctacccgcaaagaacattttgatcatcatgaatttgaagatcgcactgattctcaagttagagcatctcatcaaaataccacaaccttcaaaaccattgaccaaaaccagatgatagatggaacaagcactcacaccaataacctcagcaagacttgtaaaccttcagaggaagatggtagcctgctaaaagctgataaacatagagttgatgatcaacttggtggcaattctcaaagaagaaaaaacacaactgtggataggatcaatctagaatcctgggatggagcagctaagaattctgcaaagcaagaacctaaccctcttttagctgttttgaaagtttttgttgatgcttttgtgaaattttggtcagggtgaagatattaatgtttgtttctttctcttctgttgtgttgtctatgtatggtgatggtggagttgattttttgtacctaacagaataattttgatttagccttgatcatttaatgagctcgtcattttcctttataaattaaaacgatcttgttttcgtagttgatcctgttgtgtggcataatcatgcaagttcagttgtgtttagtagatgggatgcagtctcagttgtttagctgcaatctgtttcttattggaaattagaaaacataatctagcgggagaatctctcttttaatgttcacattctcaatatcctatctcaac

SEQ ID NO: 42206 - DNA, 276 bp, Glycine max
  Clone ID: PAT_MRT3847_138112C.1
gcaaactaattgccgttgagctctttgaagagccagcgtagcgaacgacattggtgaatccagaggtgctgatcggcgtatacgacagcaagcagagcacgtacgcgctgtatagggcttttcatgacttattcccgagcccaatctgaaacgctcgtactaatgcgctcgaggtgcatcgacaactatcgactggcgctaaccgctcatatataccaatgggatatttcccaaaggtgcctctgatttgtcagatagtgcacgctgactgctatg

SEQ ID NO: 42207 - DNA, 576 bp, Glycine max
  Clone ID: PAT_MRT3847_138113C.1
atggcgtacatcgccaccaccacggttggtgcaagcagtgtcaccacagtggattgccagaaacaagtaagatcatggaggctgctacgttccctcatggaatttctaatccccacttgcaactgcaccttcgtagaagaagaaaaccaaccacaaaagtgtctccaaaagcatccacaacaactcatgacttcaaccacaatcactggcaccatctttggataccgcaaaggaaaggtgagtttctgcattcaagctaatgcaaactcaagcaaccctattcttctgctggagttagaagttcccacaagcgttttggctaaggaaatgagagggggcacactcagaattgtgctggagagtggcaacaacaacaaccttaaccttttttccacgcctttgtggattgctgtgggaactggtgttataaacagttgcaaggaggatgagcttatgtaccttagagcaaactttcaaagggtccgtggctcctccaattgtgagtctttccatttgattgacccagaaggaagcattggccaagagcttagtattttctttttcaggcctaggtga

SEQ ID NO: 42208 - DNA, 618 bp, Glycine max
  Clone ID: PAT_MRT3847_138114C.1
atggcgtacatcgccaccaccacggttggtgcaagcagtgtcaccacagtggattgccagaaacaagtaagatcatggaggctgctacgttccctcatggaatttctaatccccacttgcaactgcaccttcgtagaagaagaaaaccaaccacaaaagtgtctccaaaagcatccacaacaactcatgacttcaaccacaatcactggcaccatctttggataccgcaaaggaaaggtgagtttctgcattcaagctaatgcaaactcaagcaaccctattcttctgctggagttagaagttcccacaagcgttttggctaaggaaatgagagggggcacactcagaattgtgctggagagtggcaacaacaacaaccttaaccttttttccacgcctttgtggagtatgtactgcaatggaaggaaagtggggtatgctgttaagcttgctgtgggaactggtgttataaacagttgcaaggaggatgagcttatgtaccttagagcaaactttcaaagggtccgtggctcctccaattgtgagtctttccatttgattgacccagaaggaagcattggccaagagcttagtattttctttttcaggcctaggtga

SEQ ID NO: 42209 - DNA, 831 bp, Glycine max
  unsure (1)..(831): unsure at all n locations
  Clone ID: PAT_MRT3847_138115C.1
ccctcgcgtccgcccacgggtccgtaaactcgtcctgaaccatagacaacaagtgctaagtgcaagtgcaagcaaaaaaaatatggcatacatcgccaccacggttggtgcaagcagtgtcaccacagtggattgccagaaacaagtgagatcatggaggctcctacgttccctggtggaacttctaatccccacttgcaactgcaccttcgtagaagaagaagaaaaccaatcaccacaaaagtgtctccaaaatcatccacaacaacaacaactcatgatgacaacttcaaccacaatcactggcaccatctttggataccgcaaaggaaaggtgagtttctgcatccaagctaatgctaactcaagcaaccctattctgctgctggagttggcacttcccacaagcgttttggctaaggaaatgagaggtggcacactcagaattgtgctggagagtagcaccaccacaggaacatgcagcaacaatgttaacaataacaacaacaaccttttttccacgcctttgtggagcatgtactgcaatggaaggaaagtagggtacgctgttaagcgtaggccttcaaatggtgactttgaagccttgagtttgatgcgttcagttgctgtggggacctggtgttataaacagtagttgttgcagtaaggaggatgagattatgtaccttagagccaactttcaaagggttcgtggctcctccaattgtgagtctttccatttgatagacccagaagaagcattggccaagagcttagtattttcttttcaagtcttctaagtgacctttgntaatttttttattaactatt

SEQ ID NO: 42210 - DNA, 1571 bp, Glycine max
  Clone ID: PAT_MRT3847_138116C.1
atttctaactttcctctctctctctctctctctctctctccgaggtcttagatctctgctctgtctctatctctacttgaggcctttccctctgttccgttggcgggtgggtctttcttctctcaaaatggccaccggagtgaccagaaaaatttctgctgcatcagctcgggcccacaccagaagggcgaagaaaaccaattctctaccccttccttcaggaattcttggaacagcactagcagtgttgtttattgggtttctagcatgggcttatcaggttattcaacctccccctcccaagatatgcggcactcctgatggaccacctataacagcaccaagaatcaaattaagagacggaaggcatttggcatacaaagagcatggtgttccaaaagatgcagccaagtataaaatcatctctgtacatggttttaatagttgcaggcatgatgctgtgattgccgataccctatcaccggatgttgttgaggagctggggatctacattgtatctttcgacagacctggttatggggaaagtgatcctgatccaaatcgtacactaaaaagcattgctctagatatacaagagcttgcagatcagctgggattgggctccaaattctatgtagttggtgtctccatgggtggacaagttgtttggaactgccttaagtacatacctcacaggctgacaggtgcagtacttgtcgccccagttgtcaactactggtggcctggtctacctgcaaacttaactactgaagcctatgaccaacaaaaattacaagaccaatgggcacttcgtgttgctcactacgtaccatggctaacttactggtggaacactcagcgatggttcccaagatctagtgtaattgctcatagtccacatatcttttctcatcaagacaaagaacttctgcctaagttgttgtccgatagaaagagttatgcggcacaggtaatacagcaaggtgattatgaaaccatccaccgcgacataaatattggatttggtaactgggaatatagtccccttgatcttgaaaacccatttccaaataacgaaggctctgtccatctttggcaaggagatgaggatatgatggttccagttacactgcaacgatacatagcacaaaaccttccatggattaactatcatgaactccaaggttctggtcacatttttgctcatgctgatggtatgagtgatactatcatcaagtcacttttacgtgcgaagtaggcttcttttatgttagttactgtctgtgagaagttggcggcttctatattggttacggtctatctcaggtcagtttcagcatttaatatctcagttttggaggattcaaactgttgaacagaatgatgtatgatcaactttgaacaacattgtgtacacttaatggtagggagaattcaattactcaataattgtatgaactatattcttttgtgtgggaagttgtttaacagaaattggcttgtttaagttactctgaagctgacactatggcgatgagtagcactatttttgcaaaaaaaaaaaaaaaaaa

SEQ ID NO: 42211 - DNA, 281 bp, Glycine max
  Clone ID: PAT_MRT3847_138117C.1
tttaaaatagaaacattcttttccttttctactacataaaaaaggatataattaccattttacgggaacaagatgaattaataaaactaattgggcgcggtttccacaaccaaagattcggggcaaaaaaagcagcagcagtactcactcgatcagactcaacagttatttgaatgggaaaaaataaaaagatgggaagagaactcctttttttttgtgtcccattcttaatttaaaccattgccgggtgaccttgactcctccaaaaacaaaaccaaatg

SEQ ID NO: 42212 - DNA, 446 bp, Glycine max
  Clone ID: PAT_MRT3847_138118C.1
ggctcgaggcagcatcacggtaatgttaatgcgcacgctcagcgggcccagtttcagaggaatagtgatggtggtgctaatgctgctgcgggttatggtggtggtggttccgtggtgcacccggggcacttgaaggtgcccggctgggtccggggattgggtttcatcccgctgatggtgctgctgctcaggctgcgttgaatccggcaatggcacaggcttccacggacctgatggcgtgacaggggacgttgtcgctgacaaatttgttggggagtattggaacgagagctgtggtgaactctggggtgactgctgtagggactgcggtgcaaggtggcggttatagatctaagacgaatatcattcccgtcgttgatggaggaattgggaatcacggtggggttacaggctgtgtttcctaatctataattatatgatatggc

SEQ ID NO: 42213 - DNA, 221 bp, Glycine max
  Clone ID: PAT_MRT3847_138119C.1
tttttaaaaccaagctgagactgtgatcatttagtaccacagactgtacaaagcgtactctaccgtaagaagagattaacaaagttctaactctgcgaatctcttgaaggacgcacgttgtgtcataaccaacttcacatgttttaaacgtggtgtttgtgcacactcacgcacggagaggtggggcaccaccaagctgaataaatacattttattattgc

SEQ ID NO: 42214 - DNA, 118 bp, Glycine max
  Clone ID: PAT_MRT3847_13811C.1
ttcggctcgagctcttccttggggaccctcttacagtgcttagattcatcctttccagcatgtggctggggaggatctattatgaggatcgattcctgacggatgctcttatattgct

SEQ ID NO: 42215 - DNA, 255 bp, Glycine max
  Clone ID: PAT_MRT3847_138120C.1
tagtcatccggctcccgtgaatttttttataaaagcacttactctctggtctaataataaacaatcccggtgggacggggggtttaaaaattgaaagctactttactttccactacaatgattgacacattaccgaattaaggtctctcggacaacctatcgtacaggatcaagaacgtctctgcaaatcttcgcatacatagccacctcatattttactgaacacaaacagttgcccctacaagtgcctgatat

SEQ ID NO: 42216 - DNA, 422 bp, Glycine max
  Clone ID: PAT_MRT3847_138121C.1
gcaaataaggctatatcttattgttgaatatagagataagtttgtcattcactaagattttgtaacttagggagtcatataatcgttataatgaatactaaccctgatattctatgataatattagcatgtataaaagagtgctgacactcaagcatgtattcaactacaaaatacaaaagaaagaagaccattcaaatttctcaatcagttggattctcatcatgctcatcactatctctaaggtgctccttcaatggctgcccaagagattcccagttttcactatcccatgccggatcaatttcaggcaattcatagtcatctggacgtaatgataattggaactcaggaaggtctggcaatgattgaagacccttctcttgctcccagaggtaaccatacatctgggcggacgcgtgg

SEQ ID NO: 42217 - DNA, 401 bp, Glycine max
  Clone ID: PAT_MRT3847_138122C.1
ggccacctttgccaaaaacattttcttcactcaatggcctctgcatcattttctcatgcatccactataccctcgagagggtgacactccctagtagggggggatgactactcttcctcattatacacaacaaacaataaggctcctccaaaatgacatatttacatcactaatccatcacactaaccccctacataatattacagtgctgcacattacactgcaccatgtacagctctggacttattctttgattggtattctgatccacttttctatggtgactatccggagagtatgaaatctttctgatgcactaggcttccaaaacacacaaaaacagaatctgattgtttacaaacccccatataatgtctagctaaaaatttcaacgcctatta

SEQ ID NO: 42218 - DNA, 471 bp, Glycine max
  Clone ID: PAT_MRT3847_138123C.1
gagagagagagagagagagagagagagagagagagagagagagagagagagagagagagagagagagagagagagagagagagagagagagagagagagagagaggctaactctgataaacaaggttaacagcatgcaaaaagaaaaggagttgccatgggacttgtatactgattatgagggttggtcggtttgtatttatgtcgatttacccaatgatgtgaattgccttgatgatcctgaccatatacaagaagttgcagagaatccaatcacagttacaaaaaattacaatctacgcaatcgcaatctttgcattgattgtcttaccaccccaatactaatttagtaattagaattttgatgtcgtcagtgcatgttgcaacatcctgaaattttaacctttagaagagaaacttgtcaggtatcttgtgtcctgctaagggatgaatgcttgctcactattggaac

SEQ ID NO: 42219 - DNA, 1017 bp, Glycine max
  Clone ID: PAT_MRT3847_138124C.1
gttaggagcgtgcgtgagaagacagcacctcatggtacggaatcggagaaagatgcttccgcggcggtgcacggcgtctatgggcagcagcaacgggagcgagagcgatgcgtcagacttggtgatgcggtgcccctcgtgcgaaggggaatacgacatggacgactcgggacccttcagggagtgcttcccggaggcccacgaggctgaggaggagctccgccgcgaaatcgaagagcttcaaaaccaaagtctccttcctcaactctcccctatcccaaactaaaagcttcaaccgccgaaatcatccccgttcccgtcgaagaattccaagccgttccaattcccgctcacaagcacctttctggttaagtcgctcttcctgttttcaaagcaatgcttgagaacatatggcagaaaggcggagtggcaccatcaagatttctgacgtatcatatgatacccttcatgcttttgttaattatttatacactgctgaagcgtcccttgataatgaattggcctgtaacctgttggttttaggagaaaagtatcaggtgaagcatctcaagacatattgtgaaaagtatttgatcgccaaaatgaattgggataaagctatttctaactatgcctttgcatatcaatacaattgcaaacaattacaaagtgtgtccttggcagtgatcttggaccacatggactcgctcactcaaaatgaatgttatgcggagctggtggacactaatcctcgtcttgttgtggaaatatatgaaacatacattggcaggctattaaatactgcaggcgcattttaggttataggaacagagctaaggaagctagtgaaatcatctttaagctggggtttgatacttcagttgggattatattcttgattggtaattagtctgttttagtattttaattgtacattatcatgcactaacagttaaacatgcaattggacctaacacctctttcattatagtattgttctttctagattaaaaaagg

SEQ ID NO: 42220 - DNA, 2040 bp, Glycine max
  unsure (1)..(2040): unsure at all n locations
  Clone ID: PAT_MRT3847_138125C.1
ctacgctctttccctgctctctccctccccccctctctctctctgctggtttttattccggatcccgaaccatcccccctcccctggatttttttcctggcctttcctcccccccccttcctcttggttccttccatcaaagttctttcccaattctctccctctctctctctctctctctctgctggtttttctattctgaatccgaaacaatccctcttcccttgaattattttcatggcttatcatccaccaccattctacttgtttctatcatcctcattcactcccaattccgttccgttcaattccttccacatcatacttttccgtcatatttccattcaatcttgtaacaccttctgacgcttagcagttactaccaaactcagcagcgtaggagccgctaccgttatgggaaaacggaacgaagaagtgcacttcgatcaagatgctctgctcgatcaagctctcgatgctttggatgaaaaaagggattccacgagggagagagcgttgtcagtgatcattggggcattcagtagcaaaatgcagcatcagtttgtcgacaagaaatttgctactttattacatcagtgccttgctttaataaaaaagggatccaaaaaggcatctgcaaaggagatagctttgacatcacatgccattggtttgttgtccctaccttcgggtgtagtgataactgctgaggaatcagcttcgtcctttcttgtatctaccatgagatttctcacatctaaatcacatttgacaaaaattccttcattgctggaatgcttggctataatcacatttgttggtgggaatggtctggaggaaacagagagatcgatggacatactgtggcgagtgattcatcccagattgggttccaatgtagttgcagtcaaaccttctgctccattaataactgctgtggtatctgcttggtcctttctcgtatctaccatgagtgatttgaagctaaattctaaaaattggcaaaattcaatatcttatttatcaagtcttctagacaaggaagaccggcctgtgcgtattgctgctggcgaagcactggttgtaatttttgagattggaattatagagaaattttctgctgattctaagggtgcaagtgatatgagtcaagaagagattaatctgcaggaaagttatacccatttacaaggattgaaagggaaggtcatcactcaagtcaaaaacctttctgttgaggctggtggaaaaggttctgctaagaaagatctgaataatcagaggaacttgttccgagatattgtagagttttttgagtgtggttactctcctgaaatttcaatgaaaattggtggtgattcactgcagacatcttcatggtcccaaatgatacagttgaactttctcaagcattttttagggggagggttcatcaagcatattcaggaaaatgagttccttcaagatgtatttaatttcaaaccaaagagaagatatcttaataacaatgaacatcggatgtctagtggtgagaagagaatgtttaagtctccaaattcagttcagaacaaggctaggacccaattacttaataagcaacggttgttatctgagggcagaaacttgggtcactacgcagccaatatggttgatgactgatgcgttttgagggggacatctaataattagcagggcttgtgttcatttgatgattcaatcattaattttatacttcatttttttctgccctcctgcccttttgacttaatggctaggaaaattatttctatggcagcttgatatcatattcacgtgttgcatatatgccttacatagcgtgagttttcctttattctagtttcaaattgaagatatcagcgtttgcttccaacactgcttcgtcaaggcggtttctcttgttttttatttttattttttattatttgtataaaaagttgagtaattttttacaagtaaatttctcttctgtttattcataaatggatcttctnnnngtgagatttttacttggattctttc

SEQ ID NO: 42221 - DNA, 769 bp, Glycine max
  Clone ID: PAT_MRT3847_138126C.1
tcccgggtcgacccacgcgtccggtgtgatctctgacctgagctggaaggaaaaagaacattgcgaatattccacaccaccggtttgaataatcccctttcaagtctcaaccccacacacctcatttttcatcttcacaaagctctccaccatttctctttctctctctctctctctctctcttctggtttttttattctgaatcagaaacaatctctcttcccttgaattattttcatggcttatcatccaccgccgttctacttgtttctctcatactccttctctcccaattccttccacatcttacttttccgtcacattcgcattcaatcctgtaacactttctgacgcttagcaggtaccaccaaactcaacagcgtaggagccgttaccgttatgggaaagcgtaattctcaacgtaaaaatgctgcaatgttggatagcgacgatgatagtagtagtgtgagttcatcatcaacttcacgaactgatcacatctccgtctcagggaacgaagaagtgcacttcgatcaagatggtctgctcgatcaagctctcgatgctttggacgaaaaaaggggttccacaagggagagagcgttgtcagtgatcattggggcattcactagcaacatgcagcatcattttgttgacaagaaatttgctactttattacatcagtgccttgcttcaataaaaaagggatccaaaaaggcatctgcaaaggagatagctttggcatcacatgccattggtttgttgaccc

SEQ ID NO: 42222 - DNA, 308 bp, Glycine max
  Clone ID: PAT_MRT3847_138127C.1
tcgtttgaaatttcatttaacaacaaaattgcaacgcacatttcaactgctcaggtttcaatgtgctacagccttctcgtttacgaaaccacgatccaccggtgccgtttgaactccaaccagcttccgtccactgtccttcaccagtgccgtacgttggtgctgtccactgtctcgcaagcagatcacaacttgcaccgtagttgcacaattcgcaatgtagtcgcagtctcgcagaccttgctccagaccatgccgtcacatgacttccacagttgcaccactgctccagttggtcacaccaggtt

SEQ ID NO: 42223 - DNA, 608 bp, Glycine max
  Clone ID: PAT_MRT3847_138128C.1
gaaattaactttataatagacttcttttattgccttacaataagcaagctaacaagatcattacaatgaataatctaaatcgccgatgccactgcaatgaagaggcattttggatgtttcattaacatgcatacaattttttttttttttttggcatatatgcaacacgtgaatatgatatcaagctgccatagaaataattttcctagccattaagtcaaaagggcagggagggcgagaaaaaaatgaagtataaaattaatgattgaatcatcaaatgaacacaagccctgctaattattagatgtccccctcaaaacgcatcagtcatcaaccatattggctgggtagggacccaagtttgtgccctcaaataacaaccggggcttattaagtgattgggggctagccttggtctgaactgaaattggggacttaaacattgtgttgtcaccactaaacatccggttgtgattggggttaaagaatctgggtgttagggggggaattggatacatggggggagggactgattgggctgagggtgcctgggtgaaccccggcgggggggaaaggccgggggagggggggggtggagggatgggggg

SEQ ID NO: 42224 - DNA, 688 bp, Glycine max
  unsure (1)..(688): unsure at all n locations
  Clone ID: PAT_MRT3847_138129C.1
aaacaaagctctttaccttctctctctctctctctcttctggtttttattctgaatccgaaacaatccctcttcccttgaattattttcatggcttatcatccaccaccattctacttgtttctatcatcctcattcactcccaattccgttccgttcaattccttccacatcatacttttccgtcatatttccattcaatcttgtaacaccttctgacgcttagcagttactaccaaactcagcagcgtaggagccgctaccgttatgggaaaacgtaattctcaacgtaaaaatactgcaatgttggataacgacgatgatagtagtagtagtgtgagttcgtcatcaacttcccgaactgatcacgtctccgtctccgtctcagggaacgaagaagtgcacttcgatcaagatgctctgctcgatcaagctctcgatgctttggatgaaaaaagggattccacgagggagagagcgctgtcagtgatcattgnggcattcagtagcaaaatgcagcatcagtttgtcgacaagaaatttgctactttattacatcagtgccttgctttaatanaaaagggatccaaaaaggcatctgcaaaggagatagctttgacatcacatgccataggtttgttgtccctgactgtccnggtgtagtgataatgcacgtgaaatatttgagg

SEQ ID NO: 42225 - DNA, 1349 bp, Glycine max
  Clone ID: PAT_MRT3847_13812C.1
tcgatagatctagacaatatagaaatttcttcaactaaaccatccagccagacttcagtttcatgtgtatttgaagatgaagatagtccatctcatgaagaaattgataatgaccaaaataacagctcatcaacttcatatctagttgacaaattacatcacttgtccaacattacctttccaccagacatgaaagagaaatcattctttgatgagatggataaaaccattataggtggtgaaagtgaagatggcagccgttttgtatcttccttgcataatgctggagaagtggcttttgatcttggctcatcaatgaaatcagatcttgaaaagccatatcaatctgaggaattagattctgcttccaacaacttgttgctgcccgtagaaagcattgaaatggaggattacttatctccaaggcagatttctgaatccattaattcagcgacgaggagcaagctacttatactccagcattgtggactcctatggagatagaaactgcaacaggaaatgcagactgcaccttcttggagcaccctttacagcttaggagcacatatactgaagctatggtagatctaaaaggatcttctgcacattttctttgaatttcacttttatatacaagctatcacatcttacatctcatatttaaaagctacagttaaagacttaaaagttgtatttccttaaaacttgtaaactaggtgctctttcatattatcttattgtgtactaatctccctttgtataaatgcaggattgttcagggactagagacccccatggagagcctctggtaaccagttataatagacgcttcttgggaactgttgactacatttggcggtctgattggtcttcaaacaaccagagttcttgctccgatatctaaacatgccatgcaatggactcccgggttccccactaagaaatggggtagtgatcatattgcattggttaccgagttggctttcttgaaagacagtaccgacactagcaacgatgttaaatagcagtttattcgatcacctgtgggtcttatgccattgttagatcatctgatgtggtgccaaggcttggccagattttgacaccctcaagtgaaaatgtcaagtcacatccacaattttcatcgacactctttcatttggatccaaatcccgttccttaagttgccccccttaaagttttatgttttagggaagtttaaaggttcttttgcaaaggctgagacgtgtttctttgtaaattaaatatttattttgatcctcgtgtcacttgtgcctcgtgtcactcgtgtacatttaataaaaactagctcatgatatacaaatcta

SEQ ID NO: 42226 - DNA, 401 bp, Glycine max
  Clone ID: PAT_MRT3847_138130C.1
gaagataataaaatgttttttgttttatcatatttccatacaaatatttaaacaacaactgcaatgtgactctagtgatgagagaaattaattgacaggaagaattgcagagagcagcaagcaattcgttgaactgtcaaagcataattggttgagaaaggaatgcccctctcttcaaagaacagctaaattggttcccccttccacattccatccatccctgatcccccaaaattcttgattcccaaatgcggttttatcagtggaattccaagtgactcagctgcacacaacaaaaactcataaaatataagtaaatatgaccaacaactccaaagagataacgtttcagacacacagcactaataagataaatcacagttttatcatcaatcacacgt

SEQ ID NO: 42227 - DNA, 438 bp, Glycine max
  Clone ID: PAT_MRT3847_138131C.1
tttacgcgtggggcaaagcctgatgctgaatccccagagtctaggttatcatgaccttagctcaaatgaggacaccatcactgttgggcagctagctgctcatgtacacccataaatacatgatgggcaattctagcacttctaaacatgggtgaatgctatgcttcgctggatcgacaccaaacacactgtaaatctcattatctatccagcttcagggcgtaagctcttgcggagcaaggatgataatttagggaatactgaaggcactagtaacgttaatgaaagaagctgcaatgttttgaggaatacaaacatcgtgtttcctagagtatgaaattaggaacctgaaggaaatacagttttgttaatcttcaagcagccaccaagagtttcacaatgaatggattgcttggagaaggaggtttcggaaaagta

SEQ ID NO: 42228 - DNA, 367 bp, Glycine max
  Clone ID: PAT_MRT3847_138132C.1
gcggctcgtggggcgcgagtccgtgccctgtatggactggctactatgcatatcaatggcatggaggaccttgaagttataccgacactatgacaaaacccttcaagaagcggcggccgccgcccaatgaggatcgtccaggacgcaattaagctgctgatcggtgactgcaggcgttccagcttgagtgatctgcgtagattacagctgctctaaaacctggtcgtagcaaccccctagtgtgtaatgcgtcatccacgggcagaaccagaccgcttacgaggcggaagcagcacttctgctgacggtggtgcctaatgggcgagccaacgaaccttagatgcggcgtgatcactgcccgtttgtc

SEQ ID NO: 42229 - DNA, 256 bp, Glycine max
  Clone ID: PAT_MRT3847_138133C.1
gacccttgctggtgaaatcatttctgagattggtgttcaggctaccgctgcaaagaggttcaacctcttcacaacacacctacatcacgtacaaaatcttactgataaaattcatggaaccgagctggatcttgatgaatactgacatcacaatgagtcggtcaagcactggacttataccatatatggcaaggttacaactcgcaatgacagtattacatccgttgatgaagagaacaatgcaatcagctacaat

SEQ ID NO: 42230 - DNA, 271 bp, Glycine max
  Clone ID: PAT_MRT3847_138134C.1
cacgggggtacatcgacggactataagaggggccatattatttttcagaacgcggctctataattgatttgtcaccctcttctaacggacgaaacaggtttccatcctacaatgtcgagttcataactctgaatgcactcttgctggactcaaacttgacggactggcggcatttcattcataaactcactcaggactaacatagactattgttaaattacacatctaaacaccaatggaatataactgcacagaggacatgaaacataca

SEQ ID NO: 42231 - DNA, 574 bp, Glycine max
  unsure (1)..(574): unsure at all n locations
  Clone ID: PAT_MRT3847_138135C.1
tcctctanagcggccgcttttttttttttttttttttttttttttttctataaccatttcctgttttcattttcttaaaactgttcccattttcaaaagattaaaactctgaaaaaatatttttgatttgatcccttgttttttgctttcaaaaaataaaaacactgaacatgcttccaaaaggtaaatattgcttaaaattatattccctgagtattttcattttaatcaaaatgaggttctgattccaactgaaaataaaattttattgtttttcattttcgattcgattgaaaaaatattttcactgaaaatgaaaacaaaaatttaaccaaacacatttttatcactattttctatttctattgaaaataaaaataaacaaacatttcaaccaaacaccccttatattttgtcacatcagaatccctttctaaatttatgccaagaactctgcacaagaaaaaaaaatccgagaaggtataaatctatcatttatatattatttaatctcaccatacccgatactaaagtgaaaaagtgatggtggcgctgccaaacctggaaatggttc

SEQ ID NO: 42232 - DNA, 1795 bp, Glycine max
  Clone ID: PAT_MRT3847_138136C.1
cggacgcgtgggggctggatttcttcttcttggcttcattggtgttcttatatggtgcatgagaaggcaaaagagaaagctgcctgtgagtggtggttatgtcatgccatccactcttgcctcatctcctgaatcagattcatccttttttaagacacactcctcagctcctcttgtacaaagtggctctggcagtgatgttgtgtacacaccatctgaccctggtggactaggcaactcaaggtcatggttttcatatgaagaactaatcaaggtcacaaatggtttctcaactcaaaatcttttgggcgagggtggatttggttgtgtgtataaagggtgccttcctgatgggagagacatagcagtcaaacagctgaagattggtggaggccagcgtgagagagagttcaaggccgaagtggaaattattggtcgcatacatcatcgccatttggtttctctggtgggatactgcattgaagacagcagaagactacttgtctatgactatgtccctaacaataacctttattttcatctacatggggaaggccagcctgtgctagaatgggcaaaccgtgttaaaattgcagctggtgcagcccgaggactagcttatctccatgaagactgcaaccctaggatcattcacagggatatcaagtcatcaaacattctcttagatttcaattttgaagccaaggtctcagattttgggctggccaaattagctcttgatgcaaatacgcatataaccacccgtgtcatgggaacttttgggtatatggcccctgaatatgcgtcaagtggcaaattgactgagaagtctgatgtatattcttttggagtcgtgcttttggaactaattactggaaggaagccagtagatgcatcccaacctttgggagatgagagcttagttgaatgggctcgacctttactgagtcatgcactcgacactgaggaatttgatagtttggcagatccaaggctagaaaagaattatgttgagagtgaattgtattgcatgattgaagttgctgctgcttgtgtgcggcattcagctgcaaagagacctcgcatgggacaggttgttagagcttttgatagcttaggaggttctgatctaactaatggaatgcgacttggggaaagcgaggtgtttgacgcacagcaatctgaagaaataagattatttcggaggatggcatttggtaatcaagattatagcacagacttctttagccgtgctagtttgaatccatgaaaggccactgtacatactggaagagcttattttggaccaaaatatcttgtgaagaagccaaggggaggccctggttaagttttcttggttgcttgcagatatggctaaggtgcactgttggttttgattttggaatttgactgcatcaggttcagatcctcattcttgtgccggaatttcattattcttttcattagctggttttttggcagcaattttgcttttgtaattagaatttgtaaagttaatttttacactcacgatgacaaagattaacatattagttgatttgttatgtaatgatagaataggatgtgtgactccttttttcatgtcttccacattttcttatgaatttctaatgagagagcgagagcaagcaagaagctatatgatttttcatttgagagtcttggtatgccttataaagagatttagggagaagaaagagagagaggaaagtgtttctgtattgatgaggatcccttctgtcgtcttctcgcagccgtctcgagccgctcgagc

SEQ ID NO: 42233 - DNA, 652 bp, Glycine max
  unsure (1)..(652): unsure at all n locations
  Clone ID: PAT_MRT3847_138137C.1
ggggtttttgggggggnngnggcccaaaacacacgcggggggnnannnnagcagaaaagggggcggccaaacacacacgggaggagacggggaaggaaaagcgaacagcaggaccgcagagcacggcccggggaggagaacaccgannaagnacggacggggggggggagaaacacttttttttttgaaagggcnnggnngaccgccagagggaaacggagggggggaagggggggaccccccctggctgggggattaccgtttatttggcagctggttttccttgagcggggatgccacaccatgggaaggattcccggtcttggaaggggtagtgtcgtgagtgttggttcggatctggcgagcaggcgagtgcctcgtggtctttggatggcagtccgctggcggagagtggggcccctttgcggtggttggtggggcgggcggggcgggctccttgggggcccggggtggtggccctgttggccggggggggggggggggttgtgcggggggggggtgggggtgcgcccccgggtggggggggggggggtgctcgcggtgggggggggggggggtggtgggtggggtggaggctggtgggggggggggggggggtggggcgggtggagaggggggggggcgagggggg

SEQ ID NO: 42234 - DNA, 314 bp, Glycine max
  Clone ID: PAT_MRT3847_138138C.1
ccaacacatcatattcttggtgcataacattcccacattggtgtttatgaatggggagactataatatccgagtgtactcagatacagagcattaatgagtaatgtatcgtgtatatctatgttcacggctccagcgacgatgctgttagcaaagtacacggagttaactggaaacttacctgccattgcagctcattgtcttcaaaagctttcatcttccaacaacaagttgattctcaactgtgaccaccacaccttgaatcccattgttgaagatagctatgcttactgcagtagtgctaaaggatctatt

SEQ ID NO: 42235 - DNA, 377 bp, Glycine max
  Clone ID: PAT_MRT3847_138139C.1
cccacgcgtccgctggataatctactggtgtatctattcgagctctatatggtgctagacgagtcgtacagctagcgactcagctagctacacacgctataggagcttcaacagtcgctgccacttcacgtcctacaaatctggacctattgaataacttggcaactgactaggctattgactactcagaagataaccctgaagatttgccagaaacatatgatgccgtttatgatgccatcaggccatgtgacacggctgataacgctatcaaagacggctgaagcaccgtggctcttacacgagctaggacaacagctggcttcacattcgaagttactagcaatggagctcttctgacgaaactaaacacttac

SEQ ID NO: 42236 - DNA, 526 bp, Glycine max
  Clone ID: PAT_MRT3847_13813C.1
gagtgtggctcgagacgaaaacacaaggatgcatctagagatgggtctggcagttctcgtgaacttgaatacgaagctaaaaggatagagaaggagaagggtccatcctcgtctgatcagaggaaacaggatatgtcatacgcggaagatgctcctgcaagggaagaaggccttgcatctatggcagcagcaaactccatcaccaacaatactgtttcttccacctctggaattgcaaacagtgatgcatccactcctcctgaggatcagaatttgtcatctatgcgtaactcacctaggaatgtatctgatgatgatacagcaactgctggaaggccagttcatcgcaccttacctgtttaatcaatgatataatgagcaaaggcaggcgtatgacatatgaggaactctgtaatgctgtgctaccgcactggcataacttgaggaaacataatggagaagcgtatgcttactcaagtcactctcaggctgttcttgattggttgaggaaccggcatgaatgggc

SEQ ID NO: 42237 - DNA, 506 bp, Glycine max
  Clone ID: PAT_MRT3847_138140C.1
aatgttgttcctttgttttttgtttgaccgtgcctttggccaagccagtacaaccgccccttcttgaagaactcgaacaggtttacctcaacgaggaggggtgcttcaatttttttttctgtgaaaatgtgtgggcccctggacacgggggggccaaaaaaaaaaggcgacctttaaagagagggggaacattttttccatggctaaaatgatcttgcccccctgaggcggggcgtgaacttgagggccatcctttttttgggggccttgccttttttgcaaaccctcgctaccttgggcattatgggggccctttgatttacggggcttaaacggtttccgggccgtaaacggttgccttggggaacccttggggggttcgaatccaaggcaaggccccactcctcgttttgcctacgcccccccttcttcggctgccccctctgtcttatttttccaagcattacctttttctctcggaaaaagtgtgacgcttggaccttggg

SEQ ID NO: 42238 - DNA, 328 bp, Glycine max
  Clone ID: PAT_MRT3847_138141C.1
catatgagggattcacacattcagaaggcgctaatatgagcggcgggggttgctttcatcacaagccctgctcaggacatttgaacaggctgcgatcttgcctcctatcaagaattgtaatataccgactcttgaactcaaaaaccagtgaatgcaactggaagatagagcctgagagatggagacaccccttgtcatacagcactctgtgataattacagatcttggctatgacattcttaacagactgaatgaagatgatacatgatcatgccgcactatttgcctctatgaaatcttcatcgtactacctaatacatctgatcaa

SEQ ID NO: 42239 - DNA, 321 bp, Glycine max
  unsure (1)..(321): unsure at all n locations
  Clone ID: PAT_MRT3847_138142C.1
nncaanngcgnagtaaggcggaattcggctcgagaatatannnaacactggnnggnnncaaanngannagnngcannnncctgataaagacncgggcnncnaggngagngggtcaaaccnatggaanaatgacncangatgnanncaatggcgagaccaatgggaaccgtcngcagtcanatangtgncattatggaagnatnactgtgatgtccgaggatcatttgaaagaatntgcntggggactagcaaanagcaattnaccagnnnngtggataaanaggccaganttggtaatgggtgagtccacacaacanacgn

SEQ ID NO: 42240 - DNA, 472 bp, Glycine max
  unsure (1)..(472): unsure at all n locations
  Clone ID: PAT_MRT3847_138143C.1
gaaaggaagaaaaaaaattnntgtggtagagttagtttatggaggaatggnaggnagagatgtgnagaaagntgtagagaaggagtttgaaatgggtttgnaagatagagttatggaggaaangaaagataagaaaaatggagttgagggttatgtttatgaaatgaaaaaaaagattttttttttttacgaagagnggggggttgattgagagagggaagttttttttgctacacttcaggaggcggaagattggctatatgaggatggtgaagatgaaagtaaaggcgaaataattgggaagggagaggaggtcgagaaggaaggggatccaattgaagaagggttaaaggaatacatggagaggggggaaagaaattgaaaaaattggcgattggataaaaggtatagagaaagtggaatggcaaatgatcggaagtttgatcagaatgacattaatgaggaaacaaaa

SEQ ID NO: 42241 - DNA, 622 bp, Glycine max
  Clone ID: PAT_MRT3847_138144C.1
atcttctgagatgaattcatttcattttggaaaatagaaaaaaagaaaaacaacaacaacacatttccgaattgaggtctgagcaatggcgaagtcgtgttccttagctatgatgttgatctccgccgccaccgtattggtggcgatgagtcggtggccgacagccgtgggcggtggcggggaccaccacttgggaatgggatgggcttccacgtgcaaaggatccattgctgagtgcctgggaggggaagagtacgaattggactcggagatcaaccggcgcatcttagccaccaacaagtacatcagctacggtgcgctgcagaggaacactgtcccctgctctcgccgcggcgcttcctactacaattgcagacccggggcccaggccaacccttacagccgcggttgcagcgccattacgaggtgcagaagctgaattttttaatttaatttattttttttcggatgtgaattggaatgtgttttgttgttgttgttatataaatttgttactattattattcacgaacatttgtggtaatccatttcgggttgctgttgtttatttggatttgaatgtttctgtaacaagaagaaaaaaaaagtgtttttttttaaa

SEQ ID NO: 42242 - DNA, 323 bp, Glycine max
  Clone ID: PAT_MRT3847_138145C.1
cgtgtacattcggctcgagcgccatcaccaccttcgacccttccctttctaacgttgctgttgttgttgtttccaagaagccaagcattcactttagggagaaacaaacaccctcttcttttttaagcttctttcgtttctcatgtttcttcttctctgctcttgtaacttgttgatggtgtttgctcactagtccttttcctttcctctcctttcccttcaaacgaacgtttcttcatgtcggactcggccaacaagttgcgattggtgcgttgcccaaagtgtcaaaatcttcttcccgaactcgctgattactctgtcta

SEQ ID NO: 42243 - DNA, 264 bp, Glycine max
  Clone ID: PAT_MRT3847_138146C.1
caataacttctttttctttctcttttatcataaatgacacgggatgtaaagctattaacattggttaacatttttcttatcataattttttttatgatatttcattaaattttacaataaatctctattgaaaaaaattcatataataaatttctattgaaaataatatatattatttaatgcatatcaagtgtttaatcagtgcacttaatcctcttgggacagagaatttaaacaaaccccattggtgaatattgcaatctc

SEQ ID NO: 42244 - DNA, 407 bp, Glycine max
  Clone ID: PAT_MRT3847_138147C.1
accagatttgtcttcaaagtgatttgctgtgaagttaatagtaattacctatcctgaaatagaaaattgaggacataaaaagaaatgtcttagtaaagttttggagaaagatagactttgattacatgtgcaagagactggtccctatgtgtattttaaatttatgtagggtcaaaatattgtgcctgattgtccatgaaattcattgttaactgtaatgagtattgttctgcagcatgtctgtagtcttgcaaatgtgttgttttaaaccttgtcacatctttactgaaccatcctgttgatatgtggtgaactaattcaagatttccaactattttgtactgagtgttgttttccatgttataaaatgttgatgtctaaaatggaattgtgcaatcccatgattt

SEQ ID NO: 42245 - DNA, 372 bp, Glycine max
  Clone ID: PAT_MRT3847_138148C.1
gaaaaaaaaaattttttttaattttaaaaaaaaaaaaaaaggaaaattgaaaatttaaaagctacgaaaccaaaaaaaaaaataacaccaaaaataaaaaaaaggcccccccctccccacctaaaccggaagtttcctcaccgtcttaaacttttttcgaaaaaccccagcctcccccctttttttaaggctcctaccagtcctttttaatgctggcaaaatggtgtttttttttttcccccactttttttgtttgcccaaaatctgtcccataaacccaacctttccaaaaaaaataaccttcatttcccccttttggaaacccgttgggtatttcttcttaaataaaactgatttcattttccttaaaaa

SEQ ID NO: 42246 - DNA, 421 bp, Glycine max
  Clone ID: PAT_MRT3847_138149C.1
gtgaacagcctcaaatatatccaactctgattgactgcgggctaagacatcggttagagcatcatcgtccaaaacaggtgcagcgtatttttttttacactcacgcaggagtgcctgcaagtattctcttcgatcttgagcactagtattattgccgaaaaaaccagctgtagtgctctgtatagcaactccaaggttgtgctcagccgaagccctgactagatcttcaacagtgtgaatccggttaaaccgtataacaagaacattcctgtattggccaattctatgagcccttgctcgagctcgcaaatcaacactgtggattccagtcagggtcaaatgagatcactgggtgagcagactgaaaatttgctccaacaccaccagcccgaatgctgagcgagaaaatcaaatgtgggga

SEQ ID NO: 42247 - DNA, 1442 bp, Glycine max
  Clone ID: PAT_MRT3847_13814C.1
tcgacgcgtccgacggcctgcgggagatgacaaagaaatggaaaacacaagcgaagtgaagagagagtgagtatcgtttgaacaatggagttcagtttcgacgagaaggacttcgcgtcgtgctgcggaagcaccaaattcgcgaaggaaatggcttcggcctctcctttccgttcgttccaggacgctgtttctgtcgcgaagggcgtttggttcaacagcgttgatgtcaacggttggcttcaggccttctccgcgcaccctcagatcggtcaaacccacgctccctctgtcgcctctgaagccagtgctcagtggagtaagggagagcaatcaactgctttagcaactgctactggttctagcttacaggaactatctgaatggaatgctcggtacagggaaaagtttgggtttgtatttctcatttgtgcagctgggagaagtactgatgagatacttgctgaactgaagagacgttatacaaacaggccaattgttgaatttgagattgctgctcgggagcaaatgaaaattacagaactacgccttgcaaagctcttttcaagtagagaaaacatttcttctacagctgataagaattccactgctagaaaggcagaagatcgtataagcattatcagtagtcacatgactgctacttcagagagttcaacaggcaaatcaattcagcatcctgccagaacccgccctcccattaccactcacgtgttggatgtttcgcggggggctccagctgctggtattgatgtacttctggaggtgtggaggggcactcagtctcagccaacatttggggccacaggcggtggcagttgggtgttccaagggtcttcaaagacggattcggatggccgcagtggtcaactgttgagcatagtcgatgaagcgagtccagggatatacaggataagtttcaacactgggaagtacatcccaaatggtttctttccttatgtgtctatagtgtttgaaatcaaagagtcacaaaaaagggaacattttcatgttcctctcctactttcaccgttctcattcagcacttaccgtggaagctaggaatatagggacagttgccaaaagaatgccatgaatttctgaagatttgatgaagggaacttgtgtttttgctcatagaacgtggttaaaagggtaccaaatatagaaaggtaatcaatgtattattgtttagtcaatgcatgttatataagttcttttgaattaataatcgagacttgcaatatttgagacgctaaatggcacattacagtgcatgagcaagggtttatgcctttttgctagaagtttcaatttacaaacaagttaactcttatttgcattacttttgcttttaatgatgtaattattcatggaagtatatcgacattgcctccatattttgtttttcacaagttacaatc

SEQ ID NO: 42248 - DNA, 750 bp, Glycine max
  unsure (1)..(750): unsure at all n locations
  Clone ID: PAT_MRT3847_138150C.1
cccgggctcgacccacgcgtccgatttccagaaccctcacaccaacactgcgttcatcatcgcgaaagttgttgtgtagttagttttgaggggttaaaaagaagggacatggcatcttcagatgatgagggagaggctcaaccactgtctgtgtcgaattaccattttgaagacaacaaagatgtgcctgtgtgtttttccgtgttgccaattcagtggagtgagtctcagagtccagttggcaagaaaatgcaggtgttcttgcacggttttgtggataatgggctgcagaaatttttcgtgcaagttgttgcatggaggtttgatctttcctatgtgaggccagagatattggtgctatcaaaggatggaagatggattaaactcgagaagcctcgtaagagctacgaggataccataataaggactattttgatcaccattcacttcctgagttatgtgaagaagaatcctgactcgtctgccaagtctgtgtgggataacttgagtaagaataaggagtttagatcttatgaggttatgccttcgcaaaatgatttattaaatcatatgactntaatgggtgaagctgccaaaagagacactgccttagcaaagtccaagcttttgctcatggttctggaagataaaggatagctgaagattaaaaaaccttctgacagggaagttaaagatntagcacgacctgnatttattattgatgatattgacaatgatatgattgatgaa

SEQ ID NO: 42249 - DNA, 333 bp, Glycine max
  Clone ID: PAT_MRT3847_138151C.1
cccagccttaagacggatgcaagaggacgacgtaagggggtcgaaccgcgatcacgcgccctagaacccgagctcgcgtgcagcttccgtctcctacaccaggatggagtctcaggtgaatcacgcacttcttgtcaaagttatgggtcgtactggatctagaggagaagtacgccaggtgcgagtcaagtctctggatcatcagtaccgtcacatcaccaggactgtgaactgacctgtgcgatgaggagacattctcagccaactcaagtcagtaagggaatcacgaggattgcactcaatcgcatcttttggcttgcctccaagatcgac

SEQ ID NO: 42250 - DNA, 336 bp, Glycine max
  Clone ID: PAT_MRT3847_138152C.1
aagcaaactttccgggttaaattacttgaaccaaatttttggtggcaaccaaaaaccttaccccgcgctactttattgcttaaagccacagaaacacccgggtgcccgttgtggattttagaaacaacaggatgaaaccgggggggggttcctttttggcgaaaaaattggcacaattgtaccgcctccgttttcacataactttttttatttcccttcccttccctgcgtgttttcccctacggggggcgggagcttttctttccttttggaaaaaaaaacttccctgaattttttgtccctgacaccaaataaaaaaaaaaacttagggggggg

SEQ ID NO: 42251 - DNA, 936 bp, Glycine max
  unsure (1)..(936): unsure at all n locations
  Clone ID: PAT_MRT3847_138153C.1
cccttcacctcgccttctccttgtcccctctccacgcctcaacatgaaggtcgtcctggtgtctctcgccgtggtcctggcggtggcggccgccctgcccgtgcgcgtcaagcgcggccacgtcgagctggaggagcacggccacggacaccacggccacgccacctcgtaccagaacttcaacttggagagctaccaccccgtgcccgtgtacaagaagcacgagccgatccaccacgtgtctcacgacgaccacggtgacctgngcggccacggccacctggcgctgtccctccacgaggaccagggtcacgagctcgggcacgaggcgtacggcggcggcctgggcgagacctcctaccaccgcgcctccctcaccgacggcgccgaccacggcgaggacgcgtacgcgcacgcgggggcggcggccgtgtccgaggacgccgacgaggcccacgaagggtcacagcgcctactagacaccgcgccgccttgcgcgtcgcccgtatttattgttgatctcggactcggccagtcaccggagcgactgagtatcttcgccaccactgttgtcttcaccgtcacgttcatcctcatcatcctcatcttcgcacacattggcatactcatcctcaacctcgtccccatcattcattcactttgtnnntcgttgtcatctatgccactaaatactgtcaattctctttgttccttaaaatagttttatttgagttacgatattatcagtatgctgttgttgttctgatacattttttacgttaccactttgacattgattttttgtgataattctcgatgctcgggtagtaggataaccaccgacatcaaagcccgcccagtttgggccaattttatcgtttttgtttataaaacgaattttgttgcgtgttgcttaattcttaagtgtagtttttc

SEQ ID NO: 42252 - DNA, 572 bp, Glycine max
  Clone ID: PAT_MRT3847_138154C.1
ggaccttagaaagagaaggaaaaaaaaaacttgtgtttcttgggaagccatgagcaccaccgagagtcaaagatataagggcacagtgaaatggttcaacgaggagaagggtttcggtttcataactcccgaagatggtggctctgatctcttcgttcactacagtgcgatccaaaccgacggcggcttccgcaccttgtcggagggtcagtcagtagagttcctcgtcactcaggacgacagcgggcgagccgcggccgtcaacgtgacgaccaccacggttaaatctagtgacagcggtaacggggaaaactctggtggtgatgctgccaatgttgagaaataagtgagaatgaattattggagtttcctgaattgcgagtatgatatttatattgatagttggacaatatactagtccattggtattttatattttattatattatctctggttattggcatttggttccaaacttgtaatacatttatcatgtgtttaacgtggttatgtagtaagttgttggatgtgtcaaaaaaatgtcaaataaaaatatatttatattattttt

SEQ ID NO: 42253 - DNA, 233 bp, Glycine max
  Clone ID: PAT_MRT3847_138155C.1
gtgtggactcaaggtgtgtcaaggcttctatctattgctgcagagaggaacaacagaaacagaatataaatatataatgaaaaattattgaggagatggtagtaattaagtatgatatgatataattaattaatgaacatggtagtagatcttttgatacatggtggggttggtggggttttaatccaaatgtaaaaatgggtaaattaaattgaagttcctctagttatgcc

SEQ ID NO: 42254 - DNA, 322 bp, Glycine max
  Clone ID: PAT_MRT3847_138156C.1
gggttaatccttttttttttttttttgggagacaaaaaactacatatttgataaaccaaaaaacaggccagtattacgaagccagcaaacccatcttcataacaaattagcagacccaaataaaaagaatacaaaatggcatgaggcactttgtgatttagcggagggaaactaccaaggcctaagaaaacgagacaaactgccaaaaacacaggggggcggaactcaggatgtcacccacattgaatattcaatgccctaccttccaatctacaaaaaggaaacttctttgatttcttggaggctggagctggctgggatg

SEQ ID NO: 42255 - DNA, 318 bp, Glycine max
  Clone ID: PAT_MRT3847_138157C.1
atatgttgtttttggtctttgctttttttaaaattatcaatgttcttaaaaacagatacctggggggaacaccaaaaacttgaattaccaccaaaaacttggggacataacaatgccaaaggtcgataacctcattcgcgatgacgccacctttgctggtccccaaggcatcctcactaacacgggcctcagagcaaaaagggtgattttaccttataactggcatctatctgggctttagccgaaacaaaaactcttctgccactgggggaagcagcttttggatcttgggagccaccagaaatcacccccccccgg

SEQ ID NO: 42256 - DNA, 319 bp, Glycine max
  Clone ID: PAT_MRT3847_138158C.1
gcaccacgccctatgggacgagtactttcaagtcttcatccggaaggcaatgccctcgcatgaactgaaccgcatacaagccgccggctgatcatgccctacaaacctccctgaactcagcagaggaattcctccactgccccggtccagacaattactgtactttcacaaggatttgatgtcagagccaaaatggcatcaagcactacatggtgagagaggtccaaagcaaagggccaaaacgtacagatgataatatttaacgccagggcttaacatgagagactaagtcaaaggtcatatcgctacaagggcatgt

SEQ ID NO: 42257 - DNA, 1606 bp, Glycine max
  Clone ID: PAT_MRT3847_138159C.1
gacccacgcgtacgcccacgcgtccgcagaaaggaagcgtggctttatcatatcataataggtgagcagccgagatctgttgccggtggcatcaaggaaagtaagagtttagagtttgaactctgtttatccaatgcacaaagcgtagatctctgtgttataatggaatacaggaaaatcaaagacgaggatgaagttagggatgcgggcgttgaggacgttggaaaatcatttttgctgtcagtcccagataacgatttgacttccgagggagaaaccaaaattgacagccacagggagaaagtaaagtggaagcgcaagtcagttgttacacttgcattgactgttcttactagttcgcaaggcattctaatcgtttggtccaagagagctggcaagtatgagtatagtgtcactactgctaactttatggtggagactttaaaatgtgctatatcccttgtggccttgggaagaatatggaaaaaagacggtgtcaatgaggacaacaggttgactacaaccttggatgaagttatagtgtatcctattcctgcagcactttaccttgtcaaaaatttgcttcagtattacatctttgcatatgtagatgctcgcacctatcaaagtcaaaaatttgcttcagtattacatctttgcatatgtagatgctccaggctatcaaatattaaagaactttaatattatcagtacgggtgtcctatacagaattatacttaagaaaaggttaagtgagattcagtgggctgcttttgttctactcgctgctgggtgcactacagcccagttgaattcaaattctgatcgtgttcttcaaactccctttcaaggttgggtgatggcaattgtcatggctctcttgagtggttttgcaggagtatatactgaggctattattaaaaaacgtccttcacggaacataaatgttcagaacttctggttgtatgtctttggcatgtgtttcaatgctgttgcaatattggttcaagattttgatgcggtgatgaacaagggattcttccatggatattcattcattacagttctgatgattttcaaccatgcactcagtggaattgctgtatcaatggtaatgaagtatgctgacaacattgtgaaagtgtattctacttcagttgcaatgcttcttacggcagttgtttctgtgttcctttttggcttccatctctcccttgccttcttcctgggcacagttgttgtctctgttgcaatttatctgcactctgctgggaagatacaaagataactatggcttctgtcttctgtttttcctatactggatttttttattcattgttgtttagccttgagcaaacgaatacatattagttcactgtaatagtgtgtgtatctcaacattcaacaaggatagaaccaggcttaggttcgattgtctacattatgcttcttgatgcgtgagatgtaaattcgactagaagctcttgttgtagttaaggatgttgccctgacctagcaattgaatcaccttcccacgccccatcctaaattttttaagttctaaaaagggggcaaaacctatagtttaagcgatgtgactttgttg

SEQ ID NO: 42258 - DNA, 642 bp, Glycine max
  Clone ID: PAT_MRT3847_13815C.1
gatttcaacagcaaaattgattcaccatcctgccagaacccgccctcccattacgactcatgtgttggatgtttctcagggctctccagctgctggtatcgaggtacttctggaggtgtggaggggcactcagtctcgaccgacatttggggcctcaggcggtggcagttgggtgttccaagggtcttcaacgaccgatttagatggtcgtagtggtcaactgttgagcatagttgatgatgtgaatccagggatatacaggataagtttcaacactgggaagtacatcccaaatggtttctttccttatgtgtctctagtgtttgaaatcaaggagtcacaaaaaagggaacatttccatgttcctctcctgctttcaccattctcattcagcacttaccgtggaagctaggattataggcacagttgccaaatggatgtcactgatatttgtgggtacctagcatgaatttctgaagatttggtgaattgaacttgtgttcatgcccatagaacatggtaaaaagggtaccaaatgtacaaaggtaatcagtgtattactgtttagttaatgcatgttacataagttctttcgaaaaaaaaaaaaaaaaaaaaaaaacccaaagcggccgctctagagga

SEQ ID NO: 42259 - DNA, 1250 bp, Glycine max
  Clone ID: PAT_MRT3847_138160C.1
ggatttaaagggctactattcaattgctatcaagacaacggatctttcaatctttgtaactgtctagtatgctttatctggttttgaatgtaagacagtaagagtgtcttcatgactgcagttccccgaaactccaaacttgtatgttaaattcatttttacttgatgtgtgttttgatcagcatcactgaactgtggacgtgtcacacttgaaggtctgttatttatgaaattttatgtgactctcgcagaaatgtgacatagacctctagacgtagaatcaatctgacccttagtcataaaggattggggatctgctttcagttagcattcatagctgaagtgaaatgcatgtctaaatttttcataactaattttgtcaattaactgaaataactttcttgggtgcaggggcgagtgaccggagcggcgtagagtttctttccttctctctctctggagctagcgcgagtgaccggagcggcgaagatagagtcagatcggaagcggaagaaggcgtcgacctcggcggcggagaaggagaaccggaataagcataagaagtcgaagatgtcgtcgtcgtcgtcgaagggtggtggcggtattgaggttagggcttcgcacatattgataaagcacgaaggttctagaaggaaggcctcgtggaaggatcctgaaggtcgcatcatcaagagcacaaccagagaaaacgcggtttctcagctcaaggccctccgcgacgacatcgtttcgggcaaggcctccttcgaggacatcgcctctcgcttcgcagattgcagctccgccaagcgcggcggtgatctcggtccttttggtcgtggccagatgcagaagccttttgaagaagcaacttttgctcttaaaattggtgaaataagtgacattgtggatactgacagcggagtccacattattaagagaacaaaatgagattattacggaataatctcctaatagggagagacattaacatctgtagaagatttccaggattcttgttcaactcaagatctgttgatatatgtttgagacatggcggtgtcatgtttttggatgatatattgttttctgacaattaaaaacatgtggtatgcttgtaattttgaaagacatttataaggtttggattctattgtctttgggctggagcttctctaaaaaccgcccgggaatttgtggttaaaccgggtaaaaaaaaaaaaaaaaaaaaaaaaaaaaaatcggccgct

SEQ ID NO: 42260 - DNA, 738 bp, Glycine max
  Clone ID: PAT_MRT3847_138161C.1
cccacgcgtccggtttctttccttctctctctctggagctagcgcgagtgaccggagcggcgaagatagagtcagatcggaagcggaagaaggcgtcgacctcggcggcggagaaggagaaccggaataagcataagaagtcgaagatgtcgtcgtcgtcgtcgaagggtggtggcggtattgaggttagggcttcgcacatattgataaagcacgaaggttctagaaggaaggcctcgtggaaggatcctgaaggtcgcatcatcaagagcacaaccagagaaaacgcggtttctcagctcaaggccctccgcgacgacatcgtttcgggcaaggcctccttcgaggacatcgcctctcgcttctccgattgcagctccgccaagcgcgggggtgatctcggtccttttggtcgtggccagatgcagaagccttttgaagaagcaacttttgctcttaaagttggtgaaattagtgacattgtggatactgacagtggagtccacattattaagagaacaaaatgagattattacacggagtaatctcctaataaggagagacattaacatctgtagaatatttccaggattcttgctcaactcaagatctgttgatatatgttttagacatggcggtgtcttgtttttggatgatatattgtttttgtgacaattaaaaacatatgcttgtaattttgaaagacaattataaggtttggattctattgtcttaaaa

SEQ ID NO: 42261 - DNA, 484 bp, Glycine max
  unsure (1)..(484): unsure at all n locations
  Clone ID: PAT_MRT3847_138162C.1
cctgcggggggccgggaatgccgttccccattttttttaaaccaaaatngattatgtgcttcataagggaaaaagggaccctgaaccagaaaaaaaagaaaatccccaaaaaagaaaggaaaaggggggaatggaggaggggaaaagaacttcaaaatcccttttctaagggggggggggacccaaaaaaaaaaaggcggacaaaagaacaccgaagcgggggggaggggcagcccacaaaaatgggatggggggctaaaggaggcaggacccagaacacggcgggggcggcgaacatcatgctggggcccaggaacagcactggtgccggcgatggtggcccgccgggcgggcggaagccaaaaaccacggcaggacgcccaaaagggcagaatcggggggcggaggctacaagggaggaagcggaggaaaggcgagaggcggaaagacccaaggattgatgcaaagaaagggggaggacggg

SEQ ID NO: 42262 - DNA, 348 bp, Glycine max
  Clone ID: PAT_MRT3847_138163C.1
gcatatagagtagaggaagaagacgatggctgtggtttcggtgtaaagcttggactcgctgacgtcgttctgatactgcctcgtccattttcaatgaactgccttagctcactcttgaagatccacctcatagtgtagctgattatgcctcatttgctactacacatgatggtgctgaacggatgtgtcgaatcagcgtattgagtacgctactaatactaagatagagcagctgctaaaagctactggattttcctctcttcttctaatatacgctaacacttattcattgctctttgtaaatttattttgtttctggcacttatatgcatgcatcggatagatttt

SEQ ID NO: 42263 - DNA, 327 bp, Glycine max
  unsure (1)..(327): unsure at all n locations
  Clone ID: PAT_MRT3847_138164C.1
ggaaaggagagaccccagcccggaccggaccggaacggccgggccgacccaccccaccgatacaatgccccccgcgcaaaagggaagacagggggggggcgcgaggaagaagccgccaaaccaacccccacgggaacggcgacccgagcgcacagaccccgcgagagggcagacgaaacccgcacggccaacaggagaagaaaacagggcccacangaaaaggaacgaagccaagggcaagggcanacaccaacaccaccaggacgacgcggagacagaggcaacccccgaggagaacagacagaaccccaacagaaggcgcccaac

SEQ ID NO: 42264 - DNA, 426 bp, Glycine max
  Clone ID: PAT_MRT3847_138165C.1
gttcatcaatgacctaagcaggcacagatgtgtgcacaacatgctcgcctggatgagcaacttaagattgtatgtcatcttcccatagaactggcactgcccccctatggctgaggatgctacgtactgcaatatctggtccgctgataccctgagactttccaacctgcacagtgtgcagacccacacgtgctgcagcctggggggtgcggacactctcctcaaagaacagatacctttgtggatgaaggtgggctaccttgagggccacccaaatgtgcattttccgatggactgcttatcaccggggcattgggcacaactgcgatgagatggtgattgagcggatggccgatgatcaaacatatttgaaagcagattgcatgtgcatctgtggccggattgggtgtgcctgatccccatcaa

SEQ ID NO: 42265 - DNA, 1046 bp, Glycine max
  Clone ID: PAT_MRT3847_138166C.1
attcctcacaagagtctctgcattcttgatttcacaagaacataccctctctgcaagaacccgtttttcacttttctagcttgtatattcggattctcgggagtgaaaatgttcgatgcgctattctattccaagtgcaaatcgcggttgaagttaacaaacgcaagaaaaggagcgaggtgtagagatttctcaagaaagacatggccgaccttcttgggagttcccttgattacaatgcatatggaatgctttatgtgattctgtagcaagaaaacttatagaggatggagaagtatttccacaaatgtttgtgcttgctcaatgtctattgagatcccaagcgaattgtttaaaagtggttggtttgtgtggtgaagctcttgttgatgcaataatttgtgggatgaaagaaactgggctgagttctaaataaattgggaacaaccatgggtctttgtcaggggaagcatgccagtcggctctaattactcgctgggcgggtcatatcaagttttggaaacaaggaattgatagaattctccttaatcttcctgattgaaaatattcaagaccaattgtctaaacctgtcttgtcattgaaaaaacaaatatccatggtaaaagagggattaaaagccaattatcatcttggtcttgggagttatctatgagacattcttgggtggcttactattcactgtggagaaaatttaaaccctcatactcatggaagtgagctctgcatcaacttactaattacttgtgcattgtaaattgtattctttccattataatttcttgatggatttatcatgtgtatacatgttgatgttataatatatatcctatgcctcagtttcttactaatactgttgaatgttgattatatttctgaaattttataggtgaacttttatttcaccttcattgtgttgatggtctccaactatactaattctaatttctcctttgtctatagcttgagttttgtggatacacttgaaaaatggtgccgaatatgtcaaaaggatattgctgatcct

SEQ ID NO: 42266 - DNA, 227 bp, Glycine max
  unsure (1)..(227): unsure at all n locations
  Clone ID: PAT_MRT3847_138167C.1
taagcttcgggaattcgggctcggagggcaaggtttttggggngcgggaggtcacctatananaccaggacttttccgtgtcgacgacacntctgccttttatgcgttttcactgtccgtgcgtgcgtgcggtctttcaatttgttgggatgcttcggagtcggaatcggcaatccctattgggggtaggcgagcaggaggggacacgactgctccatggggagggt

SEQ ID NO: 42267 - DNA, 376 bp, Glycine max
  Clone ID: PAT_MRT3847_138168C.1
ccaaaattttggactagaattgaacttatccttagactcatgccctccagctcatgacatcatcacagaactgcccgacttctcttactaccgctcataaacactgatttctcctggctctatgaacatcttccttgactgtgctgatcagatatattatgcttccctgatagctgaactccacgagaaagacttgtctgaaaaagatacatactgaaactttgggtcgataaatttcttgtacattgagaccatcaacttaacttttccatgagaatgccctacatttgtatcatgtactgatatcctcctgctctctgccaaacatggcattgtttctctacgacgtccccctatccctcttactactggaaga

SEQ ID NO: 42268 - DNA, 882 bp, Glycine max
  Clone ID: PAT_MRT3847_138169C.1
atatcataataaaaatattatttatatatattatactatatgatatgatataatatataatggggaagggacatgaacttgttggtatgcatatcacatttaccattcaaccctataacgtaggatgggtggcatcattctattgccacttgcatcttgaatttgatcagcactgaccgcactttgagcaatggaactttctctataaccattgatccctcccatctcagtgaagctctttggagcagctacttgaggccccacagaatagaagccaccagcactgaaagtagtgttgttgaagtctgcagctttgttggttgctgccacagaatgatgcaacttgttgatttcaaccacccccatcaatattggtttgatgagttggagagtgttcttcttgttttgccatagaactcttttctccctcagtttccctgtagttgttcaggtagaacttcaagggtccaacatagttctcaaatcctagtgttgtcatggcccaaagaagatcatcaccattgattgtcttcctcttttccctctggcacttgtctgaggcctcaccagtgatgaagcttatgaactcagacacacactcttgaactgtttcttttgcttcctttgagattttggcattggctgggagtgcccttttcatgattcggctaacattggctatagggaggaacctgtcttgttcttttgaggaggagctgtctgagatgttaccagatgttggacttcccacaggacttgttgtaatttggtttctcttccctgtcatgttaatggaatagacaataatagagccactcacggaataagctaaacaattgagattctcaccttcaccctctctccctatgtgtgcaagttaag

SEQ ID NO: 42269 - DNA, 513 bp, Glycine max
  Clone ID: PAT_MRT3847_13816C.1
tcttctgacacatcctcttctcttcttttttttccccaaaaatcttacacagatcctcaaaccataaaaacacactccaattccaattgaaatgttcaaaacacaagcgaagtgaaaagagagtgagtatcgttggaaaaaatggagttcagtttcgatgagaaggactttgtgtcgtgctgcgggagcactaaattcgcgaaggaaatggcttcggcctctcctttcggttcgttgcatgtcgctgtttctgttgccagagacgtttggttcaacagcgttgatgtcaatggttggcttcaggccttctctgcgcaccctcagatcggtcaaagccacgctccctctgttgcctctgaagccagtgctcagtggagtaagggagagcaatcaactgctttagcaactgctactggttcgagcttacaggaactatctgaatggaatgctcggtacagggaaaagtttgggtttgtatttctcatttgtgcagctgggagaagtactgatgag

SEQ ID NO: 42270 - DNA, 224 bp, Glycine max
  Clone ID: PAT_MRT3847_138170C.1
ctcacgcgttcgtggacgcgtgggcgtaaaacggaattggaaactgcccaacgtcgcatttaaccggggtctaaggtgtcattatgggggcgaactatttgaaagctgacaaggagcttatggatgaagctgttaacgtggaaaatggaatctacaaacagcaaaaatttgcagagaaggtgaatgcaatttgggaaactactaattctggaactgttgacggt

SEQ ID NO: 42271 - DNA, 297 bp, Glycine max
  unsure (1)..(297): unsure at all n locations
  Clone ID: PAT_MRT3847_138171C.1
aaaagaaggaaaccagnttagagtagtagtttgtgttgcgattgangacgacgataacgacaacgacgaagcatnatgtcttccggcggnggcggaggcggagcaaagcngttcttctgccacgtgtgcngtcnnaggatcacgtgctccgatgagtcggaacccttctgcccgatctgtatggaaagtttcgtngaagaatgcaaccctaanaaccctaaccctaatcttttacnggnnatgatgaatcttctgattccgaaatctnctnctccctgctccctctctncactcntc

SEQ ID NO: 42272 - DNA, 473 bp, Glycine max
  Clone ID: PAT_MRT3847_138172C.1
gaggagttggtcaaactactctcccgcaaagacttacaactacaagatgacaagggatctgctttgctgcagctgttggaacgtgcacatggctgagatgatcagcagaaaaaaatgagtcgtggccaacgataaagggtggagaaggagtcactcctcttcgcttgggaggagtgagatggctcggtttgataaaactagagaaatactctactatgatgattggattacactaatccgttcggtatctgtttgataaaactagagaaaatactcaagtatgatgattggattacactgatcctcaattgtgtaaactctgtactctatggtaagcatgttaagaaccaaacattttgtttaagttttcaacgtccttccaactaggtttaaattcacttcttttttcatgtagttttatgaatatgtaattttagtcccctacaatatttattaaacatttggttctaaaa

SEQ ID NO: 42273 - DNA, 239 bp, Glycine max
  Clone ID: PAT_MRT3847_138173C.1
acaaacaaaaagcccacaattatatatgtaagggcatgttccaatataacccccttataagaatgtatctatgaacccatacctttcaaacaagcatattaaaattacatgtatatgacacaaaaggctttatactttctcttatctgaaggtactattatatcattgaatttttatgcattattatataactttactttggatatcatttataaatcaaaaaaactcattatatttct

SEQ ID NO: 42274 - DNA, 231 bp, Glycine max
  Clone ID: PAT_MRT3847_138174C.1
atttggggggtacatttaaaatattttcttgtttttaccacaccaggatgcaaacaacaaggagatgatccaacttgcaaactacaaatgctggaccacagcaggaacacgagagcacataaaaaacataggaaccgcccacagaccggtttatggggtgtaataagatgcgacaataaggaaaaaagcctactgtatataaaccttgaggcccccgagcccactccccta

SEQ ID NO: 42275 - DNA, 264 bp, Glycine max
  unsure (1)..(264): unsure at all n locations
  Clone ID: PAT_MRT3847_138175C.1
cccacgcgtccgcccacgcgtccgcccacgcgtccggcggaacganaccacaaacacggctacaccagattaacttctctgaagacatcgctgttaatgactcgtcggttttgtttgaggatggtcgtggtggtcacttcatctagtatctttaagttgtatgctacttgtaacacgatcttgtccttgatcaagaacatctgatgagcactgatgtatggtcatggagcaggtacgtacattgctttcgtcagcgttactagg

SEQ ID NO: 42276 - DNA, 554 bp, Glycine max
  Clone ID: PAT_MRT3847_138176C.1
ctccacaaccttagcttaagcttttcattcactaaactaacttcctcaaatcaattacaatttttggacattttctctctcaaccctccaacaatattcccttctctctcatcattctcatgacataatcacatcacacaattgatttcctcaattacttctaatccacaatcaaatagcgcagcatggaagattctgcgccccaacccaaaccaatcttacagaaaccccccggttaccgggaccccaactccaaaccgccaccacctcctcctcgaaagctcatgctgcccccctccttccagcccaaacggaagcgtcgcaacttctgccgcatatgctgctgtaccttctgcatcctcatcctcatcctcctccttgtgctcgttatcgccgccgctctcttctacctcatctacgacccctccctccctgagtttcacctcggctccttccgcgtccccaaacttaacgtcaccaatgccgccgacggggcctacctggctgccgacacggccgcacgtgtcgaggtcaagaaccgcagcggcaggatg

SEQ ID NO: 42277 - DNA, 434 bp, Glycine max
  Clone ID: PAT_MRT3847_138177C.1
gggaacaaaaacaaatccttttttgaataaaaaaaaccgcctttggcaacaactaattaacgttccgggggaggggcccccccccgggaactgaaagggggggacttgaaaccaaagcctcccatttcctttggggctaatccttaatccccctaaccttaaaacttttttggggcccttaacccccccccttttttttttttttggaaaacatttaacccataattttttttcactctttaggcccgggccaaaccctggggtagatttcaagaggcttaatcgggcagaaaaattaaacccttttccaatttattaacccttaccccctggggaggggggttccacaagggctagcaactttccttgctttgggagaggcaacaaactttttgaaattggggttcttgaggtattggcaaaagcatggtttt

SEQ ID NO: 42278 - DNA, 432 bp, Glycine max
  Clone ID: PAT_MRT3847_138178C.1
aaaaaacaacccttccttggattaggcaaacaagtcaacaagggggccatctgaatctaaaactctgaatcaaaatcgaacgggggggggtgcctgcccaagcctttgaaaagttctcgggccaaattgataacacagaggaaaggggcgcccggctctttaaaggggaaggggcttgtaataagggggccttgggggtttttttacaccctcgctgatgggcggatgcgcatggaacacccgtgcattggcctcccttggagcattaacctggagggctcttggagctttgtgaaaaagctctccggagtggggcgcccaattgcgcactcccaatatgatgattgtcttcttttaaaccaatatctctaccagcccttgatctttgtgaatggacttaggtgtggttttagccaagaatgggaacttccc

SEQ ID NO: 42279 - DNA, 175 bp, Glycine max
  Clone ID: PAT_MRT3847_138179C.1
gcggccacgcgtacgcccacgcgttcggtttttttctttgttatactaactctatgtcgtgaaccctcaattgtaattgcccttgtgattctacatgtcatctgtttgcaatattaaccagtagcctacgtcgtctattctaacgttctgatacatagctacataccgctgacat

SEQ ID NO: 42280 - DNA, 1690 bp, Glycine max
  Clone ID: PAT_MRT3847_13817C.1
gaaaacaagaagcaataacactcaaaaactcctctcttttcctctcctcacatttctccccgaacctctccccacattactgcactgtgaggtgtctgaaatagaatagcttcttctgtttcatttgttactatatcacccaccagcaccagcctttgtgctagctctttgattcctttttactcttttttcgtttttttttcctgttctttccctttcccctactagttgctttgatgatgaatggaagaaacaggtttccctttaccccatcacagtggcaagagcttgaacaccaagctctcatctacaagtacatggcttcaggcatttccattccccctgatcttctcttcaccataaaaaggagctattttgattcccctctctcctcaaggcttttgcctaaccagccacaacactttggatggaactaccttcagatgggtttgggaagaaaaatagaccctgagccaggtaggtgtagaagaactgatggcaagaaatggagatgctcaaaagaagcatacccagattctaagtactgtgagaggcacatgcacagagggaagaatcgttcaagaaagcctgtggaagttttgaaaacaacaacaccatcatcaacaatgacaacaacaaacacaaactcaaatgcttcttcaacacaacaagcaatctcatcaatcaccaaaattaatactctttcacctcttgcttcatctgagactcaccaacaccaccctcaacactatggctcctttctctatcatcatcaccctccttcatacggctccgagaagacgacagaaggggaagacaacagtgctcccttgtttcttgacactggctcatgctctcagtccaacacagactgcaggagtaggtatgtttatggagagaaagaggaggtggatgagcatgctttcttcacagaaccttgtggtgttatgaaaagcttctctgcttcctctatggatgactcatggcaactcacaccattgactatgagctcctcatcttcatcttccaagcagaggagttcctttggcttgtccagtgattactcttgcttgcaacttcagagccactcaaagcagcagcaagagcatcatcaagatcagggttgctacatgtttggtgctggtcaagttgtgaaagaagaacctcagaaaacggttcatcgcttctttgatgaatggccacacaaaggaagagaaggctcttggcttgatttggatgacaaatcttccacaacccaactttcaatttccatccccacatcttctcatgatttttcaactttcagttccagaacccaccatgatggttgagtgtaggtttccaataatgggtcctctgtacggaaatcaaaggccaaaaatgtacctataagggtggggtttaagatgctttggggtcttatttcaaccacatcctcttctttttccttctgccataaaggcacttgaaagggatttctgtctccatggagagatctaatgtgtaatgctatatgatgctaatgctttcttagttataaagtgcttccttccaaacatagtataaaaaattctctgtgacaaagcctgaactgtttaatatttgagctaacattcaattgcacatctatgtaaataaaaaaaaaaaaattttctgcttaaaaagctaaaaaaaaaaaaaaaaaaaaaaa

SEQ ID NO: 42281 - DNA, 442 bp, Glycine max
  unsure (1)..(442): unsure at all n locations
  Clone ID: PAT_MRT3847_138180C.1
gccgccctttgtttttttttttttcactttattttttttttttngcncccgaaaacaaaaatcagccgagtttaaatatatncaaacacaccgacccttccccacaaaaaacataacaaatgacaattcccaatctccaaactaatatacaaaacccatcatacaaaaatttttatattcctacctaacaaacactcaacaaaaacatgttgctaacacaaccttccttctaaaaaaccaaaaacctcaaatttaataaaaacggaaacaacctttctctacatttaaaaaaatatactcatcaaacccacatgaaacaccacttcaaaaacgtctagacaccaatcaatcactaaaagtgcacctaatcacccactttcttaaaattaataaaccaactgaagcatatagcaatacaagaacattttattcctttgctacc

SEQ ID NO: 42282 - DNA, 428 bp, Glycine max
  unsure (1)..(428): unsure at all n locations
  Clone ID: PAT_MRT3847_138181C.1
ttcagctttgggatagatgccattgaagatgtgctctaccatattgaaacatatgatgtgactacaatttgagcatgcacacctatatgtctgatgtctaggctgattaaatcactgggggtcaaatgggttatcccaagagaaggatctagtgagatctttggagggtatttgtacttacacaaggcaccctacaaggaggagttcctcagagaaccatgcctctggatcaaagcacttgaccactatgatcgcttgcgagccaatagatcaacatttggttggggtctagaagcccgagtaccattttgggacaaggcgtgtatcaatgctgcanttgagttcagccctgagtggaatatgatgaaaagagattaaggacgaattgagaagtgggttctgaggagagcctttgatgatgaagagca

SEQ ID NO: 42283 - DNA, 981 bp, Glycine max
  Clone ID: PAT_MRT3847_138182C.1
acttggaaaagaaattcattcatataagctgtagaccgacaatggagattgcaaaaaagcaaaaagaaaagttacacaaaaagttgtacaaataaaactaagagcttattccctaggttgtgtgtggtcttcatcctctgcatcgacatctttagtgtgaaagtcctctaccagggtcatcggcctctctagggtaaaggcaacgtcttccgagatgtcatctatcagcaccagcttcccatcatagacatctttattgatgtcaaagacccccgggtttgtgaccacacataaatgcaacacctgtcggaggaaatggttgaagccaacctcatgtgcattatacacatcatcaaaggacttttgttggattttctctttttcggtggtagtctcctacctttccttctcgacaacggctaaggaaaaccgaagcttggcaacctcaccctcacgagacttaaccaaagcctcagcattagcagctcgagtctctaaccctttagcctcgatggtcagagcaagtacctggtcctccaagctcttgttgtcctcgaccagcttcatgtttgcttgaagtgctgagttcagagagtttttagccttcgacagttagttcttcaaagcatcaacattcgtggaccccaagagatgttgagccacggttgaggccttgaaaagaaaggcccaaaacttagcccaattggcggcatcatcacccttggtcaacacttacagaccatggtctgatatcatcaccagattgatgagacgatctagctcaaagtccttgacaaagaaaccttgattagtcattgttgacatgttggccaaggtggcagcgatgacaggccgaaattcaagaaaatgttgcttaagcctcttatcatgagagataacctccggattcccagaaggttaccccgaaccacttcgatgctcgcaatgactccgcttcttgatattatattttcccttagg

SEQ ID NO: 42284 - DNA, 457 bp, Glycine max
  Clone ID: PAT_MRT3847_138183C.1
gcacaacacaagggccatttcccgtttgtttctaaattttcgtatacatttatcttcacattatctggttgctttttatgatagatttgtcatgatttaagcattttgaaaatatgatcaattgcccatttcttcgtgttttacaacctttatttatatctgtaaaaaagttgttaatggtattcgtagcatcaataatcctatatcccatcaaaatattatgttaagtataattgtttatattgttttttttctaaatcaatggattatgcaattattgcatatgacacacgccgttggtttccctaatcacatggaccatgctagtaaacctttctagaagtacaagataatttaggtagcaaagtatattgcagctaacttgagctcgccgaaatgggaagagactttgaatatgcagttgaaggaataggctgatgcgctagagatatggaat

SEQ ID NO: 42285 - DNA, 229 bp, Glycine max
  Clone ID: PAT_MRT3847_138184C.1
accgaagaaccattcaaacttgataaatcataacaccacaatcttttggtacatacactacattctgccattgcaatgtaagggtaaacaaatgaccggacccacctcgcacttgaaatggtgaagacatgttgaacgaggctcccactatggggagccacattggcctcatattatcggcattacctactgcaagaaaataccccatagcacctggaaaggcctattt

SEQ ID NO: 42286 - DNA, 473 bp, Glycine max
  unsure (1)..(473): unsure at all n locations
  Clone ID: PAT_MRT3847_138185C.1
gctgcgagaagacgacagaagggaccattaaacagtaatgttctgaaaaatctataaattggaagtatttcatatatcaagatcagtaacacttataagggtcttctttccaattgagatttaatatattttcacaaactcaaaatactgctctaactatatatgggcatgaatttttaaatatagccaccgcattgatgcagctggtacaacaaaggtgatatccagactagatgtattttatcattagagaaagaacatgtagacatgttaataacatgcaatataaactataagtagataaaaataaaaatcaattattaccatgataaaattaagcagtagtaaactaaatgctcggaacaaacaagtaactgtaacagctattcattacctcgctggatttttttatcacagggaagatcaaattagagcctgaaaatttgccatacanagagatagctgcaggtgct

SEQ ID NO: 42287 - DNA, 419 bp, Glycine max
  unsure (1)..(419): unsure at all n locations
  Clone ID: PAT_MRT3847_138186C.1
gtgcgggccccggcccgatttccgggtggagctacacgcgcgcgctctcgtcnccgaaagctgccggagtaaatgctacatgtgttaggggacgaggtggtttacccaccactgttggattaagtctggaattaaaaatggcttcttatggattatcgaaaggattcacacaaaacttgggaaaggtaagaaagaagatggtcgtaactgaaaagcgcctttgtcagtagatagactgggtggggttttggaaaaataaatgaaactatgggctgtaggagcactaaccctatgctgacacgacttcttgtaaactgtacgagtttcaaggatttgtttgaggagtgtccttttgcatttgcggactctgatgaagcacttcaatcacttaactaaagcgcatgactatgtgcaatgag

SEQ ID NO: 42288 - DNA, 1832 bp, Glycine max
  Clone ID: PAT_MRT3847_138187C.1
attattcaattgatccgcctttattggatgataaaattcaaagaatgcctcgacattatattcttcccttgcatgtctttaacatcaacatgacaacatgtcatacacacgtgatgatccatcttgttccaactaaagacattgcagagaatgacataccaaggtaaacttgggaacttgaatagctcagacaactgaaactaaaaactaaaaacttttaaggggtttctttgctttcttttctgcttgaaatctgctggaccagctagacaagttgatgacgaattcaactcctttaaaagttctgttgccaactcaaccttccctgttttatttaaattatggattagggatcgatagatatatatcgaaggaagaacacccttcagtttcatctccctaaagcatttcaatgattcctcaacatttcctgatcggccaaaaatctcaattattgcagtatatgtaagcagatctggttcaacccctttctcagtcatttccttaaaataaacaaagcacatatcaaatcttccagccttccgcaagccatttattagagtattgtaggaaaccgtgtcagggacaaaaccagtatcctttatggatgcaaacacatcaagcatttcatccatacggcctgtgcgacccaagatatctagaacaatattatatgtgaccaagtccagaccatacccctgtcttttaagatgatcaaatatcaccaaggacttatctctctgtccacatttggcaaaggcaaaaatgatcttgttgatgaaggatgatatgcttgaacacgttatcactgatattacctcaagaaattggagtagcttcacacaatcattcatttttgaaagcctgggcaaacttaaggcatgaggttgcacttggggatttacaagacaacaataatttctagaaaacttgacaagaaaggtcaatgtcattcttctgacttgcctccactaatatgaagttatacacattaagggtaacagcaatgctcttatcatttaaaatttgtagcatcttactggcaactgaaagatttccaggcttgcatatcttatcgatatatgcgtaatagacttttgcattggatgttggtgcattttcaacagtggcaagaaattctttcaggacttgatgtgtcactctctctatgccagaagatgcctctgtcgaataaacctgaaaacaaatggtttttgaaagagcagaggagtgtttgaagcgaaagcggaacagaggaagaagtttaatcagggaaacgccccttgctgttgcacctcccaacatcatttgcagatgaattgagattaccaagtttatgtctttattccatagggtgcgaaaacattttacgcaggggcggaactggacgtcattggtttctccccttccggtataggcatttggggcaatttgctccactgggtggggagcaggcagctgcagaacttcctggagactgggtttccatgggtcacagcactcaatggctttggtattctgtatatgcaagcaagcaagtgagctggcgcaccagggtcttggtcatgtctgattggacaagaagattcatatttggcagggattcaagtagagtttaatttgacaccttgtttctctcttgttaatttttgtacctaatgttagtgatatatgttgatggaacagcattttgctccattctcgattgggaacagtttgagaactgatattagattttcattgagtgcttatgttgtttacagcttccattttgcatcaatatatgtggatttgaatcctttcaagcctaaaaaaaaaaaaaaactaaaaaa

SEQ ID NO: 42289 - DNA, 508 bp, Glycine max
  Clone ID: PAT_MRT3847_138188C.1
gcctcccgggcccggtccggacctgcatgctcggcccaccccattttttttgtcaggttgccgaacgaaaaaacctggacggggtcaagtaacgtgcatgtgctgttgttggcttgacatcaacttacactccaactacattgttgggatctgatttgcactatgacagctggccacttgcggagtatatcggaaggatgtctaacgtgctcataacgctatacaccccaatagaaagatttgacgtgagggaaatatttactctgatattaaatctcgctctagattgaaaaaagtttcctgtacaaaagcacagtttgttagtggaaaaaccttcactattgatataattgtagctggttcacattctacacaagattttcctgacaaggtagatcaagaaaaacccaaatagactcgtgccagattgagacaaagaatatatcctcaatacaatgaagttcaggctcagatggaaacaaattagtttaaattgtctcttgatgat

SEQ ID NO: 42290 - DNA, 381 bp, Glycine max
  Clone ID: PAT_MRT3847_138189C.1
actgattaaattaaaggttgaaattgttaatttaagggaaggaaaaggttagtaaagaaaaaaaaaacggaagaaaaaaaaaaaaaaaaaaaaaaaaaaaaaaaaccaaaaaaattttttttaaaaaaaaaaaaggccggaaaaaattgggaggaaaaaaaataatgccaacacccaggaaaagcaaagcgggaaccaaaaacgcacaaaaaggggggaaaaaagccagcccaaaagggggggagggacacccgaaaaaaaagaatgggccagctagcaggaggaaagaataggccagggactactgtccccggaaaaaaagggccctgcccactatctaaaaagaacacaattaaaagcccctgaaaggtacgaggaagg

SEQ ID NO: 42291 - DNA, 560 bp, Glycine max
  Clone ID: PAT_MRT3847_13818C.1
tttttttttttttttttttttttttttttttttttttttttttttttttttttttttttttttttttttttacgaacccaacctaaaccttcccccaccaaaaaaaaaagaaaaaaaaaaaaaaaaaatcccaaaaaaaaaagaaagggaaaggggaaacagaaacagagcccttgttcccttgaccgggaacccgataaaaaagaacccccccccccggaaatggaaatttgggggggcccgccccccccccaaaggcaaaacaccaacactgggaaaagtaaaagccaaaggcgggctccggcccgttggcccggggcccctaccccaagcccaagggccgggggaaaaaaaaatttttgggaacgggaaccattcgcctttctggacaaaggggagggggcgcaaccccaccggttctgggggggccaggaacaaaaaccttaagggctaccccaccccaaaaaaaaaaggggggggggggggcccgaaacacaaaccccttccggggttggcgcggcaaagggaacgggaacttaagtttaagccttaccggtccc

SEQ ID NO: 42292 - DNA, 461 bp, Glycine max
  Clone ID: PAT_MRT3847_138190C.1
aaattcggggggagctccgatcggcaaacaagttaattaactcaagaaagattgttttaccataatttcatatgttttgaattgaagttttaatgacaattttttaaatgtttgaagggaaaaaaagagtttttagaaaaaatttaaaatagaaaaataaaaattggtcttggtctaatcctgagtgtgcaccaggctgcaccagcatatataccccttctcttctcactctcttccacacacacttgcccatcatcaaagtttcttcctttctctgctctttgccttctctgacacatttggtgccttgtagagcgtgttttggcaggaaggtggtatggctaatgacgttgaggttgctgagcgttgcttcttctctgggaaggactaccaggaccctccaccagcaccacttattgatgcttgagagcttacaaaggtgtccttttacaaggctttca

SEQ ID NO: 42293 - DNA, 158 bp, Glycine max
  Clone ID: PAT_MRT3847_138191C.1
agaaaaacgggggggtttttgaaatgacggcaccaaaaaatatgaaaaggcggtcaacattcttgtgacatactggttggtggggagggagataactattcctccagcggaggcttctcactcacggggcagctatggtagcagtgacgctcctactg

SEQ ID NO: 42294 - DNA, 455 bp, Glycine max
  Clone ID: PAT_MRT3847_138192C.1
gatcttcgtgtgtagcacttaagcacaactactgtacttgaccggtgtcaggcatataattacagagacctccttccctatcgatttcgaggagattatcagtgtactcgtagagtagaggaggaggagctcaggctgatagaagtgagtgacaggggaactttcactgagcaaaatagaatgctgtgcatacttgccccatctagtgcaaggatgctcatcccctcctaagatgaactattcaatttgagaaggcatatccgcgtgtatacctgcaactgaggactgggttgtgacatcaccactgagaaagacccccatattcagaacttggattgctgctcagttctgtggatctcaacgaatgagctctgactagagcacacttcaattcaaaggcgctcacgacactagtgattaatgactgacaagcaatcagtgtgcttgatggcttt

SEQ ID NO: 42295 - DNA, 126 bp, Glycine max
  Clone ID: PAT_MRT3847_138193C.1
taccacggaggggggcagccctactgcaccactgcttcacgctatggagctccatgtggatcgtgagatcacccactgaccattggctaggggagaatggttgctaactgagatagcgggaaatgc

SEQ ID NO: 42296 - DNA, 504 bp, Glycine max
  Clone ID: PAT_MRT3847_138194C.1
tgtttcgcgtgggaattggcacatgcattgcttttacagaacaagaagccgctgtggttcatgaagagactggaccatctgaagtgaacattttctccggaacaagactaattgattcaagtcaagctccaacaacgcaagtgaaacctgtgtgtcagcttcacaaggttctcaagtttaaactatcacctgattctgaaattcagaacgtcacagctaaggaggccaaatgaatttaaaacttatgagatcctgggaattgatgtcaatttgggtgtatttgtgtgtaccttggtgagcaatgacttattcccttagattttcttttagatatgtacagagagcctttttcaatatagcttacattgttctttggtaggtatacgtttaaggtacagagagcctttttctgtatatcccccttcatttttaactaatacgtggcattcaatatagtattgtattttagaatatatgaaagttccaacttgccaatcgtattaa

SEQ ID NO: 42297 - DNA, 316 bp, Glycine max
  unsure (1)..(316): unsure at all n locations
  Clone ID: PAT_MRT3847_138195C.1
ctaaaaaactcttagttcggtctaaaaccctgaactgctgaagaacacaaggcaaaaagaggcacaaaatttacatattatgaagtgagaaaatcctaagagatgtttgttacatcccttgcttgctcttacttcacttatcccacccttttgcattctttttgttccacatttacttcgtctcatcaccaatgcacgttgctgcagctcaatagacacagacagaaatattgcatttcgccgtccatcaatggtaacatttcctacgatgtgnggaggtggatatccggtattggagcagaatcagattggaaag

SEQ ID NO: 42298 - DNA, 798 bp, Glycine max
  Clone ID: PAT_MRT3847_138196C.1
atcaatcacgatctcgaaagcaactaagtgataaatctgcagaacaaggatcctggattgctgatgggagaaaagccctaacacaacgagctggtgaatttctacgaaatatggagcaagatctggatgcaattgctaaggagtattcatcattgcaagagggattcatttctcaattgcctgtacagcagcatgttgatctaaagtttctctttttccgtcttgacttcaacgaattttataggcggttgtgtcctagcatgtaggaaatttgtgaataaggctgagggtcaggctgaagcattgtttcttcaaaaagacaaggcattaaaagcgttgcacccagctaacttccattgtgtgtttgagtggaacaattctattgttgctaacttcctttggaccgacagaatgggtcattaattgaccatatagttttttgcagtttgatatgaacctattaatattcgattggatgcccgatatgagtagtgcagacatctaataggaaattgctggtttggctgaaaatgttggagcggttcaagcaactttaggtttttggaaatgttgtgagaaggaggtggtgatacaggttgaatttttaactaaggttcaatcaagcttatgtaatttatgattcagatattataatttctgattcttttcctgatatagatagatggggatgaggcaatccctttccccctctagtagtaaattagttgtttgagcttcggtgagaacaagaaccaacttggttatgtaattatcttgctgtgttgcatatgccctccc

SEQ ID NO: 42299 - DNA, 477 bp, Glycine max
  Clone ID: PAT_MRT3847_138197C.1
ttcccaacagaataaagaatttgttagaagtgttactatagatagtaccaattaattcttttaaggcatcttcagttgtgcaatttcatgcttgcacaatctctagatctctttcattctagtgtgattcgatcgaggtgttacaagaagatatcagagtcaattgaatcagggaacaaattcaatagtaaatatttttttgggtcttgggagagaaaataacagacatgatgttactgtaagtttgtaacaactatatagttatcatccgcactcttttctttctttctttttcctttgaagttgagggttgtaaagaagtttcttgtttgatattctttctttctttctttttcctttggtattgagggttgtaaagaagcttcttattgaataaaatgcccaatgcttttacttattttcctgtgaaattctttttttcttaaattcagtttggacttagcagttgtctctcgg

SEQ ID NO: 42300 - DNA, 391 bp, Glycine max
  Clone ID: PAT_MRT3847_138198C.1
aacttattacaaatagcaaaaagggagccaaactatccaaaaaaatacccaagccctaaaaatattaaccatgacaaacaactcaaaatataatgcgaaccacccacaggtcgcaacattttaaaagccctaaagaaagaacaaaatgaaaaaaaaaaggaggcggaagaaaaataaaaaacgcaaaaaaggaccccaagacaacacccaagcctatcccattgaaaccccgaaagggggattaaatcgtaaccaaaaataccccaagggagcactcaactttgagggggaccaacggggcgaacaattgcaacggggattcccccaggcccgcccttagggagtgccacagagggacccacaacctcaggaaactgctaaagccccccca

SEQ ID NO: 42301 - DNA, 662 bp, Glycine max
  Clone ID: PAT_MRT3847_138199C.1
ctttgtttggctcgatttaatttattgcccatcctttctttgtcaaacaccaaagtccaaaccattttttgctccgatcaacatgaagttgatcaataaaccatcgcaactacgttccctcttgagccttttctgctccattttgctgctcttggaattagctttcgtggctgcggaggacccttatagattcttcgactggaccattacctatggtgacatttatcccctaggagttaaacaacaggggtattcttatcaatggccaattcccaggccctgaaatctattctgttaccaatgacaatttgatcattaacgtgcacaataacttgaccgagccgtttcttctatcatggaatggtgttcaacaaaggagaaattcttatcaagatggagtttatggcaccacatgccccatccctcctgggaagaacttcacctacacacttcaagtcaaagatcaaattggaagtttcttctatttcccatctcttgctttccacaaggcagctggtggttttggagccatcaaaatccttagcaggccaaggatccctgtcccgtttcccagaacccagctggtgatttcttcctttcttattggtgattggtaccaaatcaatcacaagaagcttcagagtgttctagattttggacac

SEQ ID NO: 42302 - DNA, 659 bp, Glycine max
  Clone ID: PAT_MRT3847_13819C.1
gaaaacaagaagcaataacactcaaaaactcctctcttttcctctcctcacatttctccccgaacctctccccacattactgcactgtgaggtgtctgaaatagaatagcttcttctgtttcatttgttactatatcacccaccagcaccagcctttgtgctagctctttgattcctttttactcttttttcgtttttttttcctgttctttccctttcccctctgctcgatgatgaatggaaggaacgttgacacaaacaggttccccttcactccttcccagtggcaagagcttgaacaccaagccctcatctacaaatacatggcttcaggtatttccatcccccctgaccttctcttcaccatcaaaagaacaacccacttggactcctcaagactcttgcctcaacactttgggtggaattatttgccaatgggattggggagaaaaatagacccagagccagggaggtgtagaagaacagatgggaaaaaatggaggtgctcaaaggaggcgtatccagattcaaagtactgtgagaggcacatgcacagagggaaaaaccgttcaagaaagcctgtggaagttttgaaaacaacaccaatgacagcagcaacaaacacagatgcctcaaccccaacaaccatcttatcaatc

SEQ ID NO: 42303 - DNA, 302 bp, Glycine max
  Clone ID: PAT_MRT3847_1381C.1
cctgagtgcggctgaaataagactactgatcgagataactaggagcatggtgatgataaatatggtgattgttttattggttgctacaatgcatggaacatggctatggcatgcgtactatatactgacattgacaatgaacactccctatagggtctgatctaaggacgtgaaatgctcaccttggaggatggctgttgtaacacacatcatttttggatcaccaaccattactaagaaatgcttatgagcgaccacatgatacatacgtggcacactgtctttatctgactccttaacaa

SEQ ID NO: 42304 - DNA, 210 bp, Glycine max
  Clone ID: PAT_MRT3847_138200C.1
gcatacactatgacatttatcaactatacattagatagagctgatgagactactaggcatgcacatgtgtttttagtgacagactacgacgctgagaagtgtgagactttaatttcataactcctacaccgatatgtgtacagtaaccaacaagatttggatacataacgtagaaattttagttctataaaattttttgcggttacccag

SEQ ID NO: 42305 - DNA, 291 bp, Glycine max
  Clone ID: PAT_MRT3847_138201C.1
attgggattggtttttattttattctattttaatcctattttttttgattcttatgtcacaaaataatcatctacatttatctcagaattaatgatactttttcataggaacaaccaaagcccgccttcacccaaaaaaccataaaacacatacaaataccaccattccataaaccaagccgaaaacaatcccaattaaaaaataacattaagacggatatcaaaccaaaacagacttcatactgaataaaaaaaaaaaaaatagagtcccacaaaaaacactctctgatg

SEQ ID NO: 42306 - DNA, 235 bp, Glycine max
  unsure (1)..(235): unsure at all n locations
  Clone ID: PAT_MRT3847_138202C.1
aaatggaagacgtgataacagaagcagcacccccatcaaggttcctggaagaagacctaaacatcttcacacccccatccccagctctccccaaacctttcctcatcttcccacacaacatacgagggggcnngnncngtcnnctcatcancgnccnggccccctcctccctcgctcgctgcaacgagaccctaaccgctaacgctgaggccactcgcctccggatgtctcccgg

SEQ ID NO: 42307 - DNA, 353 bp, Glycine max
  Clone ID: PAT_MRT3847_138203C.1
cgcagctcaacaaacaaacggacctagtcagctcattactataaatccgttcatttgtgcaaattccagcgtgcgatgatacccgtaatgacgcgaaacacgcaaagaatgcaaagtgtataaagaaacgttcgatctaaacgactaggaccctatagacttgacctcaacgtgcacacccattggctctcagtttcttacacccgatggcatctatattttcctaaactgctatagcccagcttaaacactgaacccacattggctcttccatgatggaactgggatggtcttgggggcatccaacgctcttccatggtcgcataatataaaaaacccttatacaactgtaa

SEQ ID NO: 42308 - DNA, 109 bp, Glycine max
  Clone ID: PAT_MRT3847_138204C.1
gggtccaattgacatatatgtctttgcactttttaatgagaatgtgaagcctgggccagcatcagagagaaactatggactttactatcctaaagggtctccagtgtat

SEQ ID NO: 42309 - DNA, 444 bp, Glycine max
  unsure (1)..(444): unsure at all n locations
  Clone ID: PAT_MRT3847_138205C.1
acgagtctgtttcgcaaccagcattctccataatcaaatccaccatcaccaaaccttcctcgaagctcctcccgtcgtcttttctcctcaaaactcgttctcccgttacggccaggtgggtgggcggtgagctcggttgcctgcagtcgctgcttcccctgcactcggcggtttcatcagcgcgcctcacctcatgtctgggcatcgattcnagtaggtcgaggtcgctgtctcaggaaatgggtctcagcacaccgcgataagagattttgaagaccattcattggcagattagagtcttttttgctttgccgggacgctctactgttaattattttcaagttttttcttgacagttcactgtaacaggtatatagttgggagaatnctttgatcttctggtgtctgttgcaatggttcctataaaatgcttggtcaatcctg

SEQ ID NO: 42310 - DNA, 2430 bp, Glycine max
  unsure (1)..(2430): unsure at all n locations
  Clone ID: PAT_MRT3847_138206C.1
aattaattctcctttggtgctaccacgaaggaagacggaatgtgaaagggaagtagtcaactagtgcacacaacgcatcacaagtctaacaaatggacattatcatctttctgttcgcccaatctcaaacacccaaacatagtcaaacgcaaactctgcaacaaagctttcctttgcacgctaaacatatccacacagattcgttttgaatctcttatttctttcaggtgaaagaaagactttaagtatgggaaatgaagaatcaacacatgattctcatgatgattttttccggcaaccccgttcccatgatggaagttcaccgaatactagccatcaatatcatcaacccccttcctatgatggaagttcagcgaatactagccatcaatatcatcaaccctcatcatatgctgggagttcggtgaataccagacatcaatataagcagcgacccacatatatagctgacagtttcagttcattggatcagtgatattgcacgcaggttgtttctgctttaagagaagctggtctggaatcttcaaatttaataattggcattgacttcaccaagagcaatgagtggacaggcaagcactccttcaaccacaaaagccttcattttactggaaacactcctaatccgtatgagcaagcaatctctataattggccgtactctctcttcatttgatgaagacaatctgataccatgttttggatttggtgatgcatctacacatgatcagtatgtcttcagctgttatcctgatgagtgctattgtcatggggttgagcaagtacttgcacgctaccgagagtttgtccctcgtctgcttatccgcaggtccaacgtcatttgcccctgtaattgacgcagcagttggcattgtggaaagaagtaatggtcaatatcatgttcttgtcattattgctgatggacaggtcactagaaattcagatacaccacatggaaagtttagtccacaagaacaagcaactattaattctatcattgctgcaagccactatcccctctcaattattttggttggagttggagatggaccatgggatgaaatgcagcactttgatgataacattactcaacgcttatttgataactttcagtttgtgaatttcacaaagattacgtctgagaacaaagatgcatcaaagaaggaagcagcatttgcacttgctgcccttatggaaattccaattcagtaccggataacccaaaatctacaaatcgccaatgaaaatccaacaagtcatcaacgtaaaaggcctcttcctccgcctaaggaagtaatagatcgtgacaatgcagtcctagctgttccacacgtgccaaattttgaatcagttgagccatcagctccagctgcagtagaatcagtatgccctatttgcttaacaaatccgaaggacatggcttttggatgtggtcatacaacttgcaaggagtgtggtgtgacattatcttcatgccctatgtgccggcaggaaattacaactcgcctgagactttacacttgagttgggttggggatttctcgtctgctaacttaagatttatagtttatattgctgttattgcctgttgagaaggaatgtaatgactacctgttaaatttcccaattcttcagattaaaaataagatgtaacattgtcatagaatattattgaaagtagagatatttcttatgatgttattagatatattttaagatatgaaaataaaataaaatctctaatttttgttattaaaaaaaaaaaaaaaaaaaaaaatccaaggggggcccggtaccaattcccccataatgagtcttattacaatccctggccgtctttttcaactcctgaactgggaaaacccggcgttcccacttaatcccttgcancactcccctttccccactgggttataccaaaaggccnccccatnccctccacattgcccncctgaatgggaatggcaattgtaacnttaaaatttgttaaatgcccctgtaattgacgcagcagttggcattgtggaaagaagtaatggtcaatatcatgttcttgtcattattgctgatggacaggtcactagaaattcagataccaccaccatggaaagtttagtcccacaagaaccaagcaactatttaatttctatcaatggctgcaaacccactatccccctctcaaattattttggtgggattgggagatggcccatgggataaaatgcagcactttgatgataacattactcaacgcttatttgataactttcaggtacttgactgatgtatgatcaagtatgtgttcaagtttgtgtgagcttgtaactagtgtttagtattgtttaaatgttcgggattagacggcaaagggaaaagaaatacttataagttataattagactctgaaaaa

SEQ ID NO: 42311 - DNA, 456 bp, Glycine max
  Clone ID: PAT_MRT3847_138207C.1
atgtcggatttaatattaatgagagagatagtaattaccgtgttcctatttataggcgcagcaactgcagatgatgcatcagttgaagcgaatgattatcctaaattaaaaaagttgagaacagattgcactgggcatgttggtgaaacatgctgctctactactagttgtagaggcagtgaattattcaagcagaagcaggatggggaggctcttcgactttgggattctatggagagaagcttgatagaccatcatacatatgttggaactcttggtgacctaattacacatgcaccctttccaccaagacctgcagtagatcctaacataattccattggcaagaccttcaaagatagtttcatttataaaacgtcgtcgctccaaactagataactcataaacagatgctggaacttttggaaaagtaattacacattcaccgattcgagca

SEQ ID NO: 42312 - DNA, 529 bp, Glycine max
  Clone ID: PAT_MRT3847_138208C.1
gtctatgcctgctctgtatctgtcgtgggtccctccttggccctgcttcacagtgcaggcatggcccatgaaactccattcttctgtggactgttcacttacccatgtgagcctaacacttgcctgtgactgatttcctaacgctgtgggtacaggtaaaaccctctttgatgtataaaataacactactaactaactgagtaaacgtagaagactaagggaattaccaatggcgtgattaccacactctatttttacctctgatctacacgttgcggattgaacctgacattgtggcactcccattatctctgattacccttttacctttctacaccctgcagaccacaagagcaaaccttgtacctgctacctactttagatgtgggacaaggatccaggaatctgaatctccaacaccccacagccagctgatgttccacgtgctgaaaccactttcctgatgcactaccgcctgcatttgatattacacatttcgggacatcttacaatcaagaacgagaacgag

SEQ ID NO: 42313 - DNA, 275 bp, Glycine max
  Clone ID: PAT_MRT3847_138209C.1
actccgagcataaagcgtagtaataaaatatgcttccaactaatattcgggacattaagactctggctctttaaacactgaagcccatcattctggatatggtttggcaccacgttccaccccatacacgtatgacgtatcatgcctccggcgaggatacaccctttactgggagaaacagagtgtaaaaggaaggtgactacttttttctctgctggcatgacactaccaccttacaacgtagacgctactacacacagtagacaccatggttt

SEQ ID NO: 42314 - DNA, 913 bp, Glycine max
  Clone ID: PAT_MRT3847_13820C.1
gaagagggacaagaacaccatctgcggagcaaatccaacaaatcacggcacagcttaggaggtttggaaaaattgaagggaagaatgttttctattggtttcagaatcacaaagcaagagaaagacagaaacgccgccgtcaaatggagtcagctgctgagggtcatcacacccgtgactttgatagtactcttgaaaagaaagacttaggcgcaagtaggacagtgtttgaagttgatcagaccaagaactgggcaccctctacaaactgcagtactcttgcagaggaatctgtttcaatacaaagggcagcaaaagcagcgattgcagagtgtagaacagatggatggctccaattcgatgaaggagagttacaacatagaagagactttatggagaggaatgccacgtggcatatgatgcagttatcttgtcctccccctcctacagtttcaccccacctcataaacacatctcctattacctctactactagcatggccaccgcaaccacagtaacagcaagactaatggacccaaagctcattaagactcatgatctcagcttctttacttcacctaacagagaaaacggtattatccacttaagcagtatcagcacccaggatgataattctgtggaatctcaaacccttcaactttttccaacaaggaacgcggatcgaagcagtgataacatcaaccagcaaaaagagacagaggtttcggtttcagcgatgaatgcacccagccagttttttgagttccttccattgaagaactgaaactgattagaaaaagaaaaaacttgctgtgtatgtaaaattatgggactgcgtttagatatagtattttgttagaaaatagcactgtttttattgttattgatgttatgtttcaaggaattggtgct

SEQ ID NO: 42315 - DNA, 605 bp, Glycine max
  unsure (1)..(605): unsure at all n locations
  Clone ID: PAT_MRT3847_138210C.1
gccggaattcccggctcgacccacgcgtccgggaacatgcaatgatggtgtttgccaccaagattcacatatattcatcgttggaggagaatcctgttggaaatttgttacttttctcgttattcctttttgtatcagtctagtcagattgtggggtccttcaaaattggatcttgaccttcaaatttgttggtatggtttttcaacacttgtgatgatcctttgtaagtgatgctgtaatctgagttcttgaactagagcaaaaaaacttgatgatgctttaatttgcatggtagagtgaatgatacatggaagtgttggctggcgcattgcattcaataactagcaaatgtatggttttgcttgttactgttttgatccttagagcactgttgtttgcatccttccctggctttggtgggatcgaatggggcaaccttgtatatctccgcgctccgttgttgaatttcgactttgggattcgacaagataagttcttggtggttcctcagctcgtgtggggataaacaaaccagagattgcatttgcaagggcttgccttactgncagattgctgaatagaacattgntgatgccaagcctta

SEQ ID NO: 42316 - DNA, 300 bp, Glycine max
  unsure (1)..(300): unsure at all n locations
  Clone ID: PAT_MRT3847_138211C.1
aggattcacganacctttatgcatgctagcctaacgggcaacggctacctacacggttcaagtgcacatctcaaggatacatgcaacgaacccacatattggacaagtgatacatttattgcctaaggcaatgctcaactaagaaaacaatgctgaactggctaatgcacctgaaaagtagcgcccacgccgaacacctgagcatacagggagttgaaacaatattgaagcagaaacatctgtcaggcacagtcaatgggacttgaatgacaagacacccatgtacgcataaccacccgc

SEQ ID NO: 42317 - DNA, 406 bp, Glycine max
  Clone ID: PAT_MRT3847_138212C.1
gtttaatcgaattgttgcaaaccagctttgttattacgactgcggtactctggtggacgagctcatttcggggggatgaattgtcgtggctaacccaccaacagcgaatgagggcttgtgctccaaggttgagacctgcacccaaaaatgcatgaacacgtggaaggcgagcatggtgcagagttagggccacatgtacggggtggatggtatcgagggcaaagtggaccactgattggtcagaaacttgactgtgctacaatagagattcaaatgcacccatacacatagccaaacggtatgtgccaaagcgggggcatcaggtaaacaagtgacaaagcgataccctgtaacgttggaaatagctacaatggagtgagatcagaaggatggtcaacatgatggg

SEQ ID NO: 42318 - DNA, 366 bp, Glycine max
  Clone ID: PAT_MRT3847_138213C.1
gtccccttctggatccttcctttctttcctgtatacttttcgttgcttgttctgccgagccattgagtgggtgttaacgctcttttttctcctcaaccaagacatttgacgtgttgtattgtaattcttttcccctatataatatgcttagcataaaaaaaaaaaaaaaaaaaaaaaaaaaaaaaaaaaaaaaaaaaaaaaaggaaaaaaaaaaaaaaaaaaaaaaaaaaaaaaaaaaaggaaagccaaaaaaaaaaaaaaaaaaaaaaaaaaaaaaaaaaaaaaaaaaaaaggggggggcctttttaaaggatcaaattttacttccgggggctggcaaggaaaaattttttttttggggccccc

SEQ ID NO: 42319 - DNA, 440 bp, Glycine max
  unsure (1)..(440): unsure at all n locations
  Clone ID: PAT_MRT3847_138214C.1
agaactctttgtgggacgagaaagaaagcccattgcttaccattgataaggatgcaaatgtggattaggacccttactggttagaccatgactctatatanatatatatatacattccatgatacagtgttaaggccaaaattcaagacaaggtaaggatcccaccaagaacagcagcggctcatttttgctgaggagcgagttgaaggatggacgtacccttgctgattataacatccaaaaggagaccactctccacttggatcttcatgttcggggcggtatgcaaatctgggttagaaccttgacggcaaatacaatcaccgagcagggctataacagcaatacccttgacaacattttgaatgaaatagaagacgaggaggatggctcttgcatatggcgaaccctgatgattcttgttaaaatgctgttaaatg

SEQ ID NO: 42320 - DNA, 175 bp, Glycine max
  Clone ID: PAT_MRT3847_138215C.1
gagaaaaacaggatccgcctactaaaagcaactagtgacagccaaacagcaccggccatggcctaagaagtccagccatcacatcagaccaaaacacatagcaatcagagatcactgtgtcagagaagctgaggcactagggagatcagtcccgactactgcccaacagaagatc

SEQ ID NO: 42321 - DNA, 468 bp, Glycine max
  Clone ID: PAT_MRT3847_138216C.1
caagtcccctattacattacaattcaccattaatattctcttcatcatatactttcccttgataataatttcttggttacatcaaggtacatattttctgttcattcattaactcatctgcaaacatggccgataagcaaccccacttgaacggcgcttattacggtcccgccattcctccggcggagcaaccacgctaccgccctcacagtcaccgcggaagaagctgctgttgctgcctcttcggaatcttgtggaagattctggttgcactcattgtcctcgttggcctcgcggtcctcatcttctggctggtggttcaaccccgttccttcaagttccacgtcacggaagccgacctaacacaatttgattactataccaacaacaacacccttcactacaacatggtcctcaacttcactgcacgcaaccccaacaagaagctaatcatatactacgacaaag

SEQ ID NO: 42322 - DNA, 507 bp, Glycine max
  Clone ID: PAT_MRT3847_138217C.1
cccctattacatatttcccgttcattcattcactcatctgcaagcatggccgataagcaaccccacctgaacggtgcttattacggtcccgccattcccccggcggagcaaccacgctaccgccctcaccgcgaaagaagctgctgctgctgcctcttcggaatcttgtggaagattctggttgcactcattgtcctcgttggcctcgcagtactcatattctggctggtggttcaaccccgctacttcaagttctacgtcacggaagccgacctaacacaatttgattactatagcaacaacaacacccttcactacaacatggtcctcaacttcactgcacgcaaccccaacaagaagctcagcatatactacgacaaggctgaggcattagcattctacgaggatgtcaggttcgccaattacagtgtgataacgcccatgaactccttccggcagtacaagaagagcagcagcaccatgagcgctgttttatcggggcagcaa

SEQ ID NO: 42323 - DNA, 337 bp, Glycine max
  Clone ID: PAT_MRT3847_138218C.1
ctcgcctacgaattcggctcgagggactctagcacggacaatctttggactgcatatggcagtgaaagccgacaataaggattctcgcgttgaccgcaactgatgcaacaccttcagaaaccctcgtctatcatccgaaaaggggtcgttagacgacgagtcgattctcgacagcgaatgccgcctttattagaaaaaggcagcgccaaggagatcaggacgcgctcagatgtgtccatatgctacgcagaaggctttgaccctcgggcggagatcccgggccgaatcttcgaacgagaagaccgacgcctgagtatgtcacgataccgacttctta

SEQ ID NO: 42324 - DNA, 396 bp, Glycine max
  Clone ID: PAT_MRT3847_138219C.1
ggggccaccccccccccaattaagggttttatccaacactttaaatttcaaattcggatataaccccaaaagcattttgggggggggggggggcccctacttggtaaaactgggccaaaccctaaaataaaaagggtttttttttaatgggcccccaaggggaaggggcacctggggaacggggggaccccgttggcttaaaaaaaaagggggaaaaaaaataatccttttttaagcattatgggttccccaactcaaccaaggtttttaactcaacccgggaagacccaccatggggggggggggttacaggattatatttggggccaaaaacttttttttaaacctttttccctttccctttttcgggggccataagctccctaactgggtttt

SEQ ID NO: 42325 - DNA, 430 bp, Glycine max
  unsure (1)..(430): unsure at all n locations
  Clone ID: PAT_MRT3847_13821C.1
nnnggnnntnatnnnttatattttttttttttttttttttttccccccggccccccttttgggggcacatattataaaaagaagcttttttataaaaaaccctgccccaacaacattttataaactctgcccccgcggcataataaaaaaacaaaatgggggggaaaaattttgtggctcctcaaagagccaaagggggatctttttttttggaggcccttttaaaacacacgggggttaaagagttcctttttggggggaaaaaaatttttttttttggggagaaaaagggggcgcccctttaaactttgggggggggctttaaaggggggagattattacccccggggggggggatccccccctctttttttctgaaaaaaaaaacacccgtgctgagaattaaaaaactgggggggcaaagattttt

SEQ ID NO: 42326 - DNA, 494 bp, Glycine max
  Clone ID: PAT_MRT3847_138220C.1
ggctcgaggatacaacaacttggtttgttataataaccgataatgcacaccatggccgaggcgattaagccgtgtgctgtttggaggcaaggcacacctaacctggaatcaaaccagaccaagctaccttaacttgagttctttctgctggcagccatgcaggtttggcagatgatggactccgaattttagatacactggtgaaagttcatggctttgtgccaagtgaggatcatttttctcgcttaggagatctgtgggttcgcaatgaataccttgacgaggcagagagagtgattaaaagtggatactttggagcacattgcaatatatgctgctcatagatcagtgcttgtgcagctcatggaaatgtaggacttggaagaacagctgctagacttatcctggaaagagaccataccaacgcatcagttgatgtgctagtatcaaatatctgtgcagcagatgaccagtgggaagatgcagctaatctg

SEQ ID NO: 42327 - DNA, 403 bp, Glycine max
  Clone ID: PAT_MRT3847_138221C.1
ggagaaattggcaagagctcagtatttgaagaacaaaaatcctaaggattgtgctttgctgtatattgcactgaatagagttcaagttttggctggccttttcaaaatcagtaaggatgagaaggataagcctctagtgggcttcctttctcgcaattttcaggatgagaaaaacaaagctgctgctttaaaaaatgcttatgtcttacttggaaagcatcagctggaattagcaattgctttctttttgcttggaggtgatcactcttctgctataaatatttgtgctaagaatcttggggatgaacagcttgccctagtcatttgtcgtcttgttgagggtcatggtggatctttggagcatcatctaattacaaagtacgtacttccatctgcaattgat

SEQ ID NO: 42328 - DNA, 438 bp, Glycine max
  Clone ID: PAT_MRT3847_138222C.1
gtcaacaatggaattccccagcagaaggcacgtgatacttgccagaaggaaggacgatctctcgtgtccattcacgatcaggagaaggaattgttcgtgaatggagttgtctcaatcttcggaaataagaagaagtattggatcggatatcagaacgatggaactcgatggaattgggatgacaagtcgactaatcctttcactgattgggataatgccaatggccagccgaataccaatggaggcaagaatatgtgcgcctatgcactacagggcactggattcaatgtgaagtggacggcagccaattgtgcagcaggaggaataatctacgtgtgcgagtctgcgccatgctcgatcgggaacaagaactgctgagaagcagagagagtcctgccttgtgcatattacggtcctcgataaagattttccgcgtct

SEQ ID NO: 42329 - DNA, 226 bp, Glycine max
  Clone ID: PAT_MRT3847_138223C.1
ataaaattactttcatttcgggttgggtgttttttacaaatacacgccttatattatttttgctattctacacactttcatccaaaaaccaccactgtccgggagatgccgaaactaaaaaaataaccagttcgcaagcccccgggcttatcctagagaaaaagatgccgctccttattgagagaagacaccgagacccacagtcacttaaacctttttatagggg

SEQ ID NO: 42330 - DNA, 642 bp, Glycine max
  Clone ID: PAT_MRT3847_138224C.1
tcgggaaaagtaaaaaaattcttcacaataaattcatcaacatattccttaaacctcttccatattcttaacaagctaaaatcctgctgaagcaaaacaaccttagcttattccttccattttcatggctaattctcattattctaaaaccttgcatcttccatgcaaagccttttctctggctattctccttgctttcttgcttcttgttggttcttgcactgcaacaaggacaggagcaaccatgaggctgaatgaaggctcagaacttctccggccaaagcagcaaaaaccacgatttccatacaaaggtcttgttttcaacttcttccccaaaggggtgccaataccaccttcaggtccttcaaagaggcataactcattggtggcttccactcctcagaattgagatgaacatgatgcccattttgcacgagtttctccattttttttcttctttaattgttgggtttttaattgataagagagatgaaaggtttgcaatcagatatagatcaagcacaatgatattatattagatccttagaaggtctgaaattttttggttatgtaattctaaattttactgtacatatgggatatggcatatagtaataatatatttactcattttcagtttgg

SEQ ID NO: 42331 - DNA, 350 bp, Glycine max
  Clone ID: PAT_MRT3847_138225C.1
cctgcgattggaagaaaacgacgagcagaggcggagcatcattgtaacataggaacaaacagtattcaacaagtgcaagaactggaccaataggagtaagaggctatgtgcaaacgaaaatgaaaaaagccgacatatgaacgcaccgtgccgcagcaacagctagaggctgaccagcacaagagaggagaatgaagggcgcaaaggaggttgcggccaccatgcacataatcaacacaacctgaggaaggccaaaacggcgcaactccgaccccaggagcagggaaggctgcgtattccgtgacagctggagacagacctgcaagaagcattagcagcgatcgggcatg

SEQ ID NO: 42332 - DNA, 1021 bp, Glycine max
  unsure (1)..(1021): unsure at all n locations
  Clone ID: PAT_MRT3847_138226C.1
agcaacggccattgtcaaaaaattagcttccatgaatctggctaatgtcttagtgacaaggaaaaatacaagtgatacagacagttactattacaataaccatttcatcattctccatgatattttaagagacttcgcaatttatcaaagcaaccaggaacaagttgaacagagaaaaagactgatgattgacataacagaaaataaacctaaatggtggcccagagaaaaacagcaaggcttgatgatccgcgtactgtcaaatatttttggatggcgtgttgaacaaaaaccccaacagatccctgcacgggcattgtctatatcgaccgatgaaacttgcacatcatattggtcccacctgcaaccagttcaagctgaggttctgattttaaactttcaaactaatcagtacacctttccaaagttcctgaaagaaatgagtaaactaaaagttctgacagtcatacatcatggtttccatccttctaaaatgaacaattttgagttacttggctcattatccaacctaaaacgaatcagattagagaggattttggttcctccctttgtcacattgaagaatctaaaaaagttatccctcttcttgtgtaatacaagacaggcttttgaaaatggaaacatgctaatttcagatgcttttccaaatctagaagatttgaatattgactattgcaaagatctgatagaattgcctaaagggggtctgtgatatcacctccctgaagatgctcagcattactaattgccataagctttctgcattgcctcaacaatttggaaacttggagaatttgaaacttctaaggctaagttcctgtactgatttgcaagagataccaaattctattggaagactttcgaatctaagacatatggacatctcanactgcattaaccttccaaatttaccagaagacttttggtaatctttgtaatctaagaaatctgtacatgacaagtgtcccaagtgtgaattgccacccttaatcatcatctg

SEQ ID NO: 42333 - DNA, 711 bp, Glycine max
  Clone ID: PAT_MRT3847_138227C.1
ttttttttttttttttttttttttttttttttttttttttttttttttttttttttttttttttttttttttttttttttttttttttttttttttttttttttttttttttttttttttttttttttttttttttttttttttttttttttttatatttttttttttttttttatgcaggaggggaaaagaattttatgtgtgaggttcaaaaaaaaacaaaaaaaaggaaaagggttaaaaaaaaaaaaacgagggagggacagagggaaagcaaaaaagcaccttgtaaggggggattttcacaatatttaactacccctttattgggggggggaaatgagaactttgaaacaattccaaaaaaaaaccccttgtcttaatttgggggaaaaaagggccaaatataaaaaagaaaagctttttttgaataaaatgaaaaaaaaaaaaatgttttttttttataaaaagaaaaaaactggagggggagaatagtttaatggagaagagaggttttggttcgcccttggaagaatcttcttgacaacaaataaaaataaaaaaccggaagaggggagagaaaaaaaaaacattttggacgaggccgcatttttcgttaaaaaaaaaaaaaaaacccaccaaaagttttgttatttaatagtaagaaatttttcaaaccctggttgtttttttgtttgtggaagcacaccc

SEQ ID NO: 42334 - DNA, 229 bp, Glycine max
  Clone ID: PAT_MRT3847_138228C.1
acggacttcattctccgaatcacctaccccacgattcgccatcttggctgactctactgttgtcaagcttgtcagagatcttatctataaatatacttgcattgtcctcaacatctgtcttaacaacgtctttcttgacgctgtcacctacactgaacacgcttgtcgctagaccgtcactgccatggacgttgtttatgccctcataaagcagggaaataccctctac

SEQ ID NO: 42335 - DNA, 254 bp, Glycine max
  Clone ID: PAT_MRT3847_138229C.1
cttgctgaacacacacacacacacacacacacaggtggggactgggcacagctcttcacaccattcattctggtcatttcccccaaaggcatcccagcctgggggccagtggggaactgagggcaaggggatatagtgatggggctcagatggactgggaggagggggagggtgatgcattaattaatggcttcgttaattaatgtcatgttgcttgtcgctttctcagtgtgtgtgtgtggtccatgcacact

SEQ ID NO: 42336 - DNA, 520 bp, Glycine max
  Clone ID: PAT_MRT3847_13822C.1
ggaaggtttgaaggcaatgatgtgcgaagaagctgataatcagcaggtaaaggttgagacttgagaattgaagtcctaatggccgtacctctacagctacgctgctactattttaacgtttcaagagggttgcacttgcatgtgattggaagtgcaagtagtaatgttttttcctctcaggcattgcatcaaacagtttcaatacactctcagcctcaggcgccattcaacttcaacttcaatttggatgacccaactctaccgaagttcctggaattgctcaaaaaggtggcccattcatcaccgcaagcagagggtctccacctctcaggtttccaagcaaatagggatttgatatgttccgctatttgggcattgagggaagaatggaaacctgcattgcttgccttcaaatggaattgccatggtaatgatgagaaagtctgcaacttgatgatatgggtcttgacaactcacggaaaattttccactgcttggtgcatcattcgagatatgcatc

SEQ ID NO: 42337 - DNA, 515 bp, Glycine max
  Clone ID: PAT_MRT3847_138230C.1
attcgtaggtttcccgtcatcactgtatgacgtcctccttctttggggggggggggggggggggggcacggtaagtagttatggcagagggtaggaagagtaaagctgaccgtgaagagttaaggcctatggcttaaggcgttcgcgtgggggacgtatagagaggtatagaacttaataaccgatgcgatgagtttgcgagcgcccagtgactgacgggatacggtaaggcaagtaacagtccgcaattataataatttgggcgtgaagtgacgttaccaggctaatatgcgggtgcgctaacgggtatccttaggatagtggcaatatagccataagggcaattcgcacatatggacacctacacgggtgttgaaggggacgggcagcgtgttatgtgcggatattactaggggctttagagagttttgtccaatgtgggtaacctaggtggcgatgggccccttgtgattcagatgcggcagcgattaaggggtgttggttttggaggatgt

SEQ ID NO: 42338 - DNA, 467 bp, Glycine max
  Clone ID: PAT_MRT3847_138231C.1
aaaaatataaaaaatcttgtctgactgtctctgtaatgtatgctatggagacgtaacaacgctggtgttcactgtgttgggtcacttaccaaggttcctttctctgtcatccaaaacacttttgacaacaatgtttttggtgatcagtgccatgagaatgattcggcttgttgttccccatatggcaacttggaaacagggaaagattctcaacattggtggtgttagtgccttggcctctggactttggtcaggcacttacaatgcttctaaagctgctcttcatgctttcacagatacattaagggggttttcttcttcttcttcttcttcttctaacttaccctacagtacttgtacccttcatgaatcatgttaatcaaatcaacaagaggaaacataatttctccttgtttttacagaaattaattaatgtgattatttcgtggaaactggaacatatagtg

SEQ ID NO: 42339 - DNA, 753 bp, Glycine max
  Clone ID: PAT_MRT3847_138232C.1
aatattcgccccaaaacctcccaaccaaattaaatcctcactctctttctcttcatttgaatattcctatactgttgcaaggaaaataatacaaagatagtatatacatgcccggggtcatgtattattctgtaatgagtgcttgcaattccaagcgacccttctgcttcagcaatgttcaccctgctttgctttaattggaggattgttggtttatctgtatgcaccctattgtcggataatgaaggtccaggaccaccatctctgccccttgtggacaccttcccttgctggcaaaggatggacctgatgtgttctcatatctcgccaatcaatatggtcctattgacagattccatatggaaaaacacgccactaatgattatagcatattgatacctttgtaaggactgttgaatagataactgccaagaactttcccacagaagaagttcctccccaccctcagcttctcctcttcgccaaaagcgactctgtctgctctcttcaattcacaatgaggctaccatgttgaaaccctatattatcactgctgctcccatcttacttgtccagatcactgccaactaggctatcctatcacagaatctgctactcaagaacttgagtctcataaagaagacataatttttctccaacctgtccctaagactagcaactgatgtgattgaacatgcagcatttggtgtccactttggtctttcaaggccacattccgctctggattccatc

SEQ ID NO: 42340 - DNA, 587 bp, Glycine max
  Clone ID: PAT_MRT3847_138233C.1
caacaacatagtcactgccaccaccatgaattcacaacactcatcacgtgacatttccttaatacaaaaccagttacatgatttacatccttccacagtgagcatggtaaccacggacacgtgtcacacatcaaacgtgcttcaagggtttgggaatttttccatggccagtgacttggcctgtgtgaatcagcagcaacaaatagatgggtcaatgcgggttttttatggattggaaaccatggacgtggcaacaaatggtagcacaaacactagtacttcaacagaaagcattagttggggagacataagctctttggtttactcgcctttgttggtttctgactacgaagcttgtcaacaaagattattaatgcctcaagatgttactttcgaggagtctagttactttgcaatgcaaacgcaataacagctccttaaagagtatcaaacaaaaccctaaagagatcactttagcttagagtttttctcccttttttgttgtttcttgttttgtttgaattgcttgtagcttcttatagttgcttaattattaattacactacacttttgctctgctctgaaaa

SEQ ID NO: 42341 - DNA, 1394 bp, Glycine max
  Clone ID: PAT_MRT3847_138234C.1
tccatctttctatatgtgtttcatctcatctctattttttgttttattctgtttaacttatggtctgtttgtttcaattgatgttcggtttttttatttaccatatctaccacgtttaccggctttaattcagcaaccacataattctcacttccaccatctttcaataaagatttcagatcatccacatttattgttttatgcaatctaagatatggtctatggagttcaactaatgaacagattgtttaaatagaaattaggtgctcttcttttatctatctaatagagatacaggcacatcactaacttggtgaaaatggtatataaaattgatattttaacacacctacataactaccccaccccaaagaaaaaggcaaaatatatgcattatttagcttcccaattcttttcttttaggccatcacttctgagctccctagttgttgccttgtgtgaacacccaaatcatttgataacttcttacataactgtctatatagagaagcatctccacaagacttacttaactctactacatacaaggatggacttatttcaaacacctctgcttccactgagaagctacctggacatttctgtactttgatctcttgtatcactttcaacatcccatttttcttctggactctgaatcccatttctgttacaatgtcttcaatcctctcaaccaaatcttttggtgaatggatggatgtaaatcttatcttcctctcagaaacatcctcttgctcaaaaagaccagagagatctagacttgaagacattgatatcaactggaatgcattgataagtgttggtgatcttggacacccttgatctgcttcatgtgacacatcatggattgaaaagtcttcgtcatcaatatacacactctcttcctcatcttctggatttgcaggagtataaccctccttgctcgagccgaattctttgatcatagccattgttatccgggttttaggattggcatcaagcattctctttataatgttttgagaaccaggtgatagccatcttggtatctgaacttctcctttaaaaatcttttgatagagaactgcaagatttctgtcatcaaaaggaaggtatcctgttagaattacatacaagataacaccacatgaccatatgtctgatgttgcaccatcatagcctttattggcaagaatttcaggggcaacataattgggacttccacatgttgtatgcagcaacccatcttccctaaaatgctggggcaaagcactaagattaaaatcggttatctttatgttccctttggcatccacaagtacattctccagcttgagatccctgtggaagacacctttattgtggcagaagctcacacaatcaatcaacctcgt

SEQ ID NO: 42342 - DNA, 576 bp, Glycine max
  Clone ID: PAT_MRT3847_138235C.1
ggcgagttacggctgcgagaagacgacagaaggggggagaaaaaggaattgttgaggcagcgattagtattggaaggaaaggtagagattttcagtttgatgctatgaaagactttgaaaattttatgtctctttgtagaggtggaaaaaaactgaaccatgcgtctacaattgcagggtcgccaaagcttggaacatatgagactgattttgggtggggaaagcccaagaagtgtgaaatacttcacatagaatattcaagaactatctccctttcggattctagggatgaagaaggtggagtggaagttgggctagcacttggaagggctcaaatgagcaaattttctgctatattggaagaatatctcagaaatattgctatatagtcgtgactaacattcccatcttcttaaaaataattataagatgctaataattgttgttgtaggtctctgcattttagtatttattttagtcttcatcgtttttataagttgtttgtgtcttgtattatttttgcattatcaattctggaagctataattcaatatttattcaatgctcgtgcttgcc

SEQ ID NO: 42343 - DNA, 106 bp, Glycine max
  unsure (1)..(106): unsure at all n locations
  Clone ID: PAT_MRT3847_138236C.1
gtgataccgacataccgtgaacatgcccatacgtgattcacagagattcctggtaaacacgtgcagtgtttccaaaagttactaacggaccaccagntcccaggcg

SEQ ID NO: 42344 - DNA, 392 bp, Glycine max
  Clone ID: PAT_MRT3847_138237C.1
gacccacgctttcgtcctttcgtacggggacgcatggggtgctggtgtcacattgttcataagatttctctgaaagggaagatcaagaaatacccaaaaagattgatgccagattgagacaaagaatacatcctcaatacaatgaggttcaggctcagatggaaacaaatttgtttaaactgtctcttgatgatgttgaaacttctaaaggctccatgctggatcttaaaaaggctcaatctaaaagggcgcttcccaagaacacacttggaggaaccattctgcgttgggatctattggcaaattttttgacagggggcaattctagagcaagtgttgatttgcagggcactcatcgtgttaaaggaatgattcaaatggtggccacagat

SEQ ID NO: 42345 - DNA, 643 bp, Glycine max
  unsure (1)..(643): unsure at all n locations
  Clone ID: PAT_MRT3847_138238C.1
cgtcncatcnnanntcngcacgngctcataggtggtgcaatgaagcctactacagatggccggtgggctcatttggcttgtgccatgtggatacctgaaacttgcttagctgatgtaaagagaatggagcctattgatggtttgagtagaatcagtaaggaccgctggaagttgttatgcagcatatgcggtgtatcttatggtgcctgcatccaatgttcaaataattcttgtcgagtagcataccatccactctgtgcacgtgctgctggtctctgtgttgagcttgagaatgaggacagactgtatctcctttctgttgatgatgatgaagatcagtgcatacgcttgctttctttctgcaagaaacataggcaaccatctaatgagccttctgttgctgatgaacgtatggtccgagttgctggtctatgttcagactatgaaccaccgcccaatctgtctggttgtgctcgaagtgagccatatgattactttggcaggagaggtcgaaaagaacctgaagcacttgcagctgcatcgttgaaacgtttgtttgtggagaatcaaccttacttagtaggtggatactgtcagcatggttcactaaacaacctagagccttcggcagaggagtctgctc

SEQ ID NO: 42346 - DNA, 420 bp, Glycine max
  Clone ID: PAT_MRT3847_138239C.1
cttttcttttgggactacaaaactgcaaaatataaacctctcacatcatacgattctgatgtaatcatcaggtagggaaaaaaatatgactgtccagattcttagcccagggattcataaaaccatcttgtctagcacagggccaagttattgctaccttcctctaccttccttgctcggctggccatccatatgctcttttcccgtgacttgtgatagatcaacatggcgaccactagccatgaaagcatataacatattattcagtttgtccatctgcttaccctctcgtgcttgatctgtctaatactgaagacactgccggttctcagggtcctcgagtgccaacttgccatcacagggctctgacttcatgacataccttgtagaatctagatctgcacggctcagctcactgga

SEQ ID NO: 42347 - DNA, 408 bp, Glycine max
  Clone ID: PAT_MRT3847_13823C.1
agattcggctcgagcagaaaaaatgggctcttcttcttctatgtggacggtgagtgtgaatgtggcatcactgtcctgtgcagcgctctgcgccaacccacgcaggccagtggatgcacaatttggccgaaactacgtgcccagattggcctttgatcagtttgatatgttaagggtggatattgcattcaatttcatcttgacaaggacactggtactggcttccattgccaaagggcttacttgtttggtcacttgaggctggtcactaagatggatgctggagattctgctgggacaaacacctgtctggtaattatcttcccaaacacggagcatgagtagatagactttgagtacttggagaacagaacaagacaaccttacattgtgcaaacacattggttc

SEQ ID NO: 42348 - DNA, 506 bp, Glycine max
  Clone ID: PAT_MRT3847_138240C.1
ttggggggggggggggggggggggttggtaccgaatggtctacttaattaagttgttaggttggggatgatatggtgggttggcggcgtggtttaaaaaagggtattaaaacaagagcgattggatcaaaggaaagattgagtgtaataacagagcgaaacccgtaaggggcatgacatgataactgcagttactgctagggctgtaacttacctgttgaaaatacaagccgtaagccaggtaagggcccaagggcaaggtccgttagtactacagctacgacctagaccacagctaaatggtgtgggcagtagtgtaccgccccatgttggtattacacaggccatttaacacacagtacctgtggttttaggcggtggctctgtaaatcaccagcagtggtctagtgcatcattaacccacgtgttagggatgcattaagtactgggtttaagaccacaattttatgggcattaacccgggctaccccacttaataacgcacct

SEQ ID NO: 42349 - DNA, 401 bp, Glycine max
  Clone ID: PAT_MRT3847_138241C.1
gtgaccaatagcccaccttgtttttctcactctaatgaataacctgttgcgtgggttttcactagcatatgcgttggttactaatgcaagacagccctacacatcttttaccctgatttctgagactacttatctattaatcaatcttaggagttatctctattttctccaatgaaaaagtccaaacatatctccaaatagaagatgtatatttattactagcatagtaccataatacttctaattatatacactatttaccatgtctacttgcactttcatgaggaaacatctattcacactctctattcattacctatccattttttaccaccatccaagtagtagattttcacatatcactattagcctttaataactcctaagaaggacccacttta

SEQ ID NO: 42350 - DNA, 507 bp, Glycine max
  Clone ID: PAT_MRT3847_138242C.1
cactggcgtcctctaatggcaaattcaagggaaatagatacaattccaactaatatcctaccatttccaattgaaaatttggcagttacttaatggggaacatatcactcctttacaatcaaaaactactttaaaaacagaacctaaacacaggtttcgattacccccaaattaatccacacaatggaataacctaaaaaccacagggaaaaaatcttcataaccggggaaaaaaatgtgtaagcacgaaaacggggctccttcgtttaatttcaattaaagtgtgactttttggatgcggaacaaaacaaaataaacttcatatcttacagaacaaacctaaaccaaaacatcacaccgattcaaaaaaacagggattttttcggtgcgataaaatccaataacactaaaaactttttacgctacaaaaccatagggggggccttccctgcctcttaagagcataaacaacatccattaggggtaacccgggttcctcctagcggg

SEQ ID NO: 42351 - DNA, 192 bp, Glycine max
  Clone ID: PAT_MRT3847_138243C.1
gccgggccgacccacgcgtcctattagtcgcggtgattgagaataaatgatgtaaagtatactaatgaaaaaggaaaggagatgttagaataaaaataattccccttcacgttcttatttcttgagagccacaggacactatcaatcttttattatgctctatcaacacattaaaaacattatataatacat

SEQ ID NO: 42352 - DNA, 474 bp, Glycine max
  unsure (1)..(474): unsure at all n locations
  Clone ID: PAT_MRT3847_138244C.1
cttgggggggggggggggggagcaggcatataaatcttggtaaatcctaaataagggggtaggaacaaaatagtggggtcagggtagggcttggagaataaataaatggcgcagtaaccaggtgtttgggagagttaagttacgtaaagagttgttagttataataaagagctaacgatgataaacagccccttaaaaccctgatcaaggtactgaactgatagcgaacacaccaaacattacctagtaaaagctcatggtagctaaccaagcgatgcttggttggtagggctgatttacggaaaaatctgagatatggtagataatcgagggagggggactattgtgcgttactggtgggctagttgtagcaaagagaaacttaaggcgcgtaggcgaagtaacaaatgttggttatgctgggttaagctgtattgcactactggtaggncaactcggtggacgttaaagact

SEQ ID NO: 42353 - DNA, 126 bp, Glycine max
  Clone ID: PAT_MRT3847_138245C.1
catcccctgcaccttccagccgctcaaggagggctatcgctcctgggcctcgggcttctgcgtctccaagggcgtgtcgggtgcgaagctcgaatgggcctacgagttcgtgaactggttcctgtc

SEQ ID NO: 42354 - DNA, 387 bp, Glycine max
  Clone ID: PAT_MRT3847_138246C.1
cacttttatactaccctttccactcacttgccgacttaatatcccaagatggagaaggatacctacgacgcttatcgtctcactctcatgaaagtcaactatattaaagaaggaatgaagaccattgtggaaggaattttactcatacaagatctcattcatacatatatactcattctccaaattagaaacacattctacaaactcccaagcgttcgtctcaaaccagtagataatgaaattgatgtcttgaatatgaagtctactaccaagctttttactaattcaccagcttttgtgccttactggcatattaatcagtatgtaacaatctggtagaatccaaattattcaaccataatgtatccctactgcccttcttatata

SEQ ID NO: 42355 - DNA, 486 bp, Glycine max
  Clone ID: PAT_MRT3847_138247C.1
tacgctgcgagaagacgacagaaggggagccatggtaacaacacttctaattgacttgtttaatatagacttctgcagataaaaaaaaaatgttaactttatcgttatcaatagcaagtacaacaaatacttacatctaatacttttttcatgcaggattctactgggtttgtattcaggaactatttctatttggaactatcagacaaaggtaaagaattatatctgcacttaaatactatgaaagaaactggaataattgatattaatgaaaaagaaaaagaaaacctaaaactgacatctgttttcgaggtaggacttgggagtttgttgttaacatgtattttgataatatgacagactgaaaagaagtctttaaaaatcagcgaatctccaggtaaatgtcaacgctggtgtgatttacgaatttttgcttcctctgatttgatgtaatcttattttctctacgtgtcttatgtctggtct

SEQ ID NO: 42356 - DNA, 359 bp, Glycine max
  Clone ID: PAT_MRT3847_138248C.1
tgtcggttgcaagagaccacagggggggatcacatctcaacacatcgcgccctcattattatcattcatagcacatacacccgatctaaattcaaggattactctagtgtagacatgccatatgacaattacaacgccaagaccagctctagactgataacgcgcaaggtcgctggtactggaaggaagcaatcggccaaagctgaccaagatcctaacaagccaaagagacctccaagagctgtttaacaccacatgaacgaccacagagagcagattcatgaaggagcacactaacaacatatccgctattgtcgtcagaacagttagacatgacaaagggaaacagctagatgatg

SEQ ID NO: 42357 - DNA, 277 bp, Glycine max
  Clone ID: PAT_MRT3847_138249C.1
caaacatatgcatgaagtttggtttataaattttcttttccttatatattgaaaagtttatcctaattgactcttaatatcctgattatcatagaatgtgaatagattgttcattttactgcagtggaagagtttgtgcaaagccttcctagttgaagcaaaatggtttgcttctgggaacttgcccagtgccgaagaatacttaaagaatggaatagtaagctctggagtgcatattgtgatggttcatgctttctttttttttgggcatgggttt

SEQ ID NO: 42358 - DNA, 392 bp, Glycine max
  Clone ID: PAT_MRT3847_13824C.1
cccacatcatgcaacacaaatgcaagatctggcacatagccagtcaacttcattttgttctccaagacatttagtttttcatgtatataaaccaaatagggtgcaatctgtctctcaatctaaactcatgcaccacactttttatttcaaaccaactatatccaggtgtctacattattttctttaattgatttttggatcatagcaacatgatcccatctgttttgtgctgcataaacattagccaattgaacatatccagttgcaatagttggatcaagctcaagcagattattggcagtaaactcagccatgtgtaaagcttaaaggcatgcttattatcaaatctacatgcatgcatagtgttctggcttagtttcaattcctaaatc

SEQ ID NO: 42359 - DNA, 342 bp, Glycine max
  unsure (1)..(342): unsure at all n locations
  Clone ID: PAT_MRT3847_138250C.1
ccacgcgtgcgctgcagtggagtgctgactaaccctcacatcaacgaaaaaaagagggcttgtagggttcattgccatggggcggaattcacagccgagaccatttgcaagcaaacgatgggctgctaggcagaacactgcgcagacccttgtggacgcgatgaccaacaatctgacgactaaatcggttttcacacagaagtgtggaactttggaccaggaaaacgctgaacacaatgcaaacacgattgangatgtggcttttgctacagcgaatctacactatgagaaacatgcagatggtgatggacgttctgcactccanctttatgccaaacaatg

SEQ ID NO: 42360 - DNA, 552 bp, Glycine max
  Clone ID: PAT_MRT3847_138251C.1
aaacttgtttttttttttattattgtaaatcccaaaggccctttctttagggaatgtactaatttgaaaaaaaaaaaacccccgggcatctttattagccatttttctttatccctctggcgagcggtgagggcaagatctcaaatttttcgccagaaagccggctacggaactgatactatcgccggggcccccgcaaactgttacgcccattacggcacccccgcgctagttgccccgccgagcaacaactgccaagtctttggccccggggccgggtgatagccttccccccaggcatgcatcgccaaaagccaactaactcgaatccctccccaaaaggagacagggcggtaacaacaaaggctttcctgtatctcaaaagcttttacctgaacaacatccctgaggagccccacttccacaaatctccgggcatgattccgtcatgtgccagacacgcatttgggaatctagtccttaccctctgaaagccgggcgacaacgtggttaacttcgcacgttactactttaatgcctacccgcccttcc

SEQ ID NO: 42361 - DNA, 253 bp, Glycine max
  Clone ID: PAT_MRT3847_138252C.1
aatttttaatctctccatattcccacgccacttattgtagttggcatattctgaagactctgcaaaatatataaaattacgttttaatctcgaattttacttttccaatgttttctcccttttttgttttgtagttatttatccgagttgttattggaaggcttactccaaattagctgatttgattattaaagttgtaattcactgggggtgaaatctttgtaagaggttgaagaacctggttccgggtatt

SEQ ID NO: 42362 - DNA, 495 bp, Glycine max
  unsure (1)..(495): unsure at all n locations
  Clone ID: PAT_MRT3847_138253C.1
tacggctgcgagaagacgacagaagggggggaaatgatggatgcaagttgcattaagttaatgcaatatggctatgtttgatactgcatctgtatgatgatagtattgatggctgcagatgctatgctagtttgttagttaggaattggaatacaatgattgcatgatcatagagatgtaatcatagaatcatgatgtataaaatcttggaatttagattattaagctaaattggacaacaataatctcggcatgcagtatcttttttgcttaaagcacaatgcatttttactcaagtttaagatagagaactgccagggtcaggaagttttagtcaaaggcgccaaaaaacagttgccttactaaggaaagacattaacattattaaagaaaccagtaaactattttactactttgcactgatcttncatataaatctactcaagcaaacaattcgtagtaataaaagatattcaattaacaaaacaaaacaat

SEQ ID NO: 42363 - DNA, 618 bp, Glycine max
  unsure (1)..(618): unsure at all n locations
  Clone ID: PAT_MRT3847_138254C.1
ataatatgataatatatatatttattatgatatttttttaatgtgtgaaataaaaagatgcatgttaaatgattttctattcggtataattgtcgcaccaaagtttacaaattaatgtttgttcttggacataaagtggctatggaagtatctaaaacccatgtctaatatctaatatacacatgcatacacccacttcgaatctaaagactcagtcctttttcccatatcaaagcaaggttgaaagcgaagcatgtaaagccctataatagacacactaatgcaaacttcccatgttgaggctagaagccctgacctcatcagctttctttggagttggcagcagaagaactgctaatattgcactcacgacggcggccaccgcacccaacacgaatgcaggcaagtttccaccgccgaacaaggcatcccaaggtccacttatggttgatactatcatctgtggaacgacaattgcaatattaaggacacccaaagatagaccttggcctgctccggaagtgctggagtatatagatgctagagcaaatgggacactgaaaagtaatcgcaagagggattccaaggacagagaagaaaaccatgnagccaactttg

SEQ ID NO: 42364 - DNA, 1956 bp, Glycine max
  Clone ID: PAT_MRT3847_138255C.1
cccacgcgtccgctttttcttaatagttgctttggcagggaaagacgatcgaaggcagaagcttggaataaagccaacaaacgacgtcgtgtggtttcgaataccttgtgcgttttgaatctctggaaattgagatggcgaacgagaacgaacccgcgaagctgctgttgccataccttcaacgcgccgatgaattgcaaaagcatgaaccactcgtcgcttattactgtcgattatatgcaatggaacgggggttgaagattccgcaaagtgagcgcacgaagaccactaatgctcttctggtttcgctcatgaagcagcttgaaaaggataaaaagtcaatccagttggggcctgaagacaatttatatctcgagggatttgctttgaatgtgtttggaaaagcagacaagcaagatcgtgctggaagagcagatttgactacagcaaaaacattttatgctgccagtatcttttttgagattcttaatcaatttggagcagttcagcctgatctggagcagaaacaaaaatatgctgtgtggaaagcagctgaaataagaaaagctttgaaagaaggaaggaagcccacagctggcccccctgatggtgatgaggatctgtcagttcctttgagttcttcaagtgatagatatgaccttgggactactgaaaatactgtttccagtcctggaccagaatctgattcatcaagaagttatcataaccctgctaactaccagaatctgccaagcattcatcctgctgctcctaaatttcatgatactgttaacgaccaacattctgctaatattccatcatctatgccatttcatgatagagtagataataacaagcattcttccgttgtttctccatcatctcactctttcacacctggagtttatccttcccaagactaccattctcctccaccttcccgagactatcattctcctccaccatcccaagactatcattctcctccatcgtcccaagattatcatcctcctccaccatcccaagattaccatcctccaccgtcccaagattaccatcctccacctgctagatctgaaggttcttattctgagctctacaatcatcagcaatactcaccagagaattcacagcatttaggtcctaactacccttctcatgaaacttcctcttattcttatccccattttcagtcttatccaagttttacagaaagcagccttccatcagtcccatcaaactatactcattatcaaggatcagatgtttcatattcttcccagtcggctccgctaactacaaaccattcatcaagtgctcaacacagtagcagaaatgaaactgtggaacctaagccaacaactactcaggcataccagtacgacagtaactaccagccagcacctgaaaaaatagcagaggcacacaaggctgcaagatttgccgttggggcactggcatttgatgatgtctcagttgcagtagacttcttgaagaaatcacttgagttgctgacaaatccatcagctggccagtaaaattttttgtaaatcgaaatgtggatttcggtggtgttttctaccttttatttgcatgtcttgttttgtatattaggtacatcatgcatttaaagtgtgaaaaaatttgggaagatgaacggaaattataaaatctgctgggatctgcaatctttcttgtttatctggtagttattgatattggcttgtttgtcaaggaattgtgatacatataagatgaccgcctgataaatttcagttgtctgtctgggacaattctctttttctttttgtttgggtcttgcactcaaattcaggttcgcgttcattaacccattgaccctgaggatttgaatctcagctgtgaaattccttagtacatcataattacttgttgcttaagttccatttcagagattagtacaatttggtttggcat

SEQ ID NO: 42365 - DNA, 402 bp, Glycine max
  Clone ID: PAT_MRT3847_138256C.1
tttttattgatctttctttttttttattttgaagcccccccaccagaaaaaaaaccacttactcaggaaagtggggagagtacgacctgcccaaactattaaaacctagcatagtgataacacaagacaaatttttgggtacaaaatgaaagcattaatcccccaagaaatcttaaccctgttggaaatatgaccacactcatccataacgaccaactgattagcctttggtaggtgcttactagcactgggtactgactttccagttgcttgagaattcctcttccacccctggatttgtcttttaataataaccccacaactcccatcaacaccgagagttgaagacttcctaggtgccttgttcaattctgcagctcttaccgtcaaagattgaggggt

SEQ ID NO: 42366 - DNA, 167 bp, Glycine max
  unsure (1)..(167): unsure at all n locations
  Clone ID: PAT_MRT3847_138257C.1
tacggctgcgagaagacgacagaaggggttgagagaacanattgctgagggacaacctaggacacttaggcccttggaagaagataatggttatttgtggaaggggatatacagcattggaagggagagcttttgcaaaccttccagaaggtcataagcttgtatgt

SEQ ID NO: 42367 - DNA, 175 bp, Glycine max
  Clone ID: PAT_MRT3847_138258C.1
cgttgcgtgaaagccgcgccagtagtaatggttcggtcgtaaaagggcgcccagagatctatgtattcgggtgcatataaagcatgtgctgacgagacgtaagtagatggcccttagatccacgtggcagtttaaagatccatggctgcgcccgcttttataagcccaaaaagga

SEQ ID NO: 42368 - DNA, 536 bp, Glycine max
  unsure (1)..(536): unsure at all n locations
  Clone ID: PAT_MRT3847_138259C.1
taggactataatatcggtaagttctgtacttgtacagttnnnnaatatccattacaactgcaacagtacaattacaattgtttaataattcttaagctaaggtgtcaatcccatacccttatacaagcatacatacattcttctttgtaattgatatttattcgtgtaagtagtggctgtagcattattttttttttcttctgtaattttatttattgcttaacctgtttcccggctgggccctccctctctcgccctctctcagcttctaaggcaggtggaatgtgagcagcttggcaggaccttatattatggtatgataggaaaatatctgaccagagggctctaacaatatccgttactagttagtgttgatcttgtccttgtcaagagaggccttgcctcttcatgcttcatgcctagctgtatatttctaggatctttttgtctatagannnngttatcgtttaattactgtttactttaagttttttttccctactttgatagatgtagattttacatttagcatttat

SEQ ID NO: 42369 - DNA, 270 bp, Glycine max
  Clone ID: PAT_MRT3847_13825C.1
tttaatagtaatatacctgaataccggggaaaaattctctcaactggaaaatcatctggttctattattctttccggagccctggtaaataaccctttattccaaccaaaggggacctaaataaagaaaggccccccccacccttaggacccttttaaagggaaaaaaaagtactggatgccggcccacttccagagggggtggcaaccctaaaaattggcttagccttaaccaattatttaacccctggtccaaatttttgggcctacc

SEQ ID NO: 42370 - DNA, 400 bp, Glycine max
  Clone ID: PAT_MRT3847_138260C.1
gttgcttgaaattgcacacttacccatggttcataacggctgttaaagcaaaggcttgtcccaaagtgcctggacatcatttccttgacatgcgagggcatcctctgaacatgatcgtttcagtaaagaaacctacaataccttatatatatgtgccttaaatttttgactaggatactttggataagcttcatctcctactcttggttgtccaaaggtgtatattgcttccaaacttttcaacaacaagtgtgctcagccagcatacacattattgacccaaagaggattgcaagctctccttccaaactatgcccgtgggctataaaagtagctttgttattttcacttaaaccttttcttacaatgcccctgataacatagaacactaaggggggaa

SEQ ID NO: 42371 - DNA, 262 bp, Glycine max
  Clone ID: PAT_MRT3847_138261C.1
aggtccggttccggaataccgggggcaccccagggttccgtcaacgtttacgctcttgcgtccgccaacgctttcaatggatttaaaaccagctaatcaccctcctttatggtgctttgtttgcataaaagttgctttatgaagatgtactccctcctggcgtcatgaatgtaccagctccgttcaggtcctaccgctggggctgccattgctaggaccatgggcatacataggcttgctttccctggcttaagccacgctg

SEQ ID NO: 42372 - DNA, 225 bp, Glycine max
  Clone ID: PAT_MRT3847_138262C.1
gttacgcctgtggtgccgggccgggaattccggggcgacccacgacgtccggggctgctgcttttagattaacgaagagggccagaaatatgttatactaatagcagtggtataggccatgaactatatggggaatctactaccactggacacccgattgacaagcgcgaaggcattgacaagcgtgaaattgataggcctgagagggatcgtgctgataatgaa

SEQ ID NO: 42373 - DNA, 785 bp, Glycine max
  Clone ID: PAT_MRT3847_138263C.1
gaaaaattcaattcgtccttgtgaattactccattgcaattacaccacacagcgcatgttgcagttgttgaatttgggttacggctaaacaccttcttcttcttcttcttcttctgcagttacgccactgcaattcattccaattccaataccaaataataatcatcatcggcaccattcccattttccatggcaaaccctaaaaccaaaagtcaccattccctgggcggcgaggacgatcccgactcgaccgaatcgcggtgggtcttccaggaggacgaggatccctccgagatcgaggacttcgatgccgcagatttgcgccaccagtccatgttcgattctgacgacgaggacaatgccgagcagagactcgttcgcaccggtccccgaatcgattccttcgacgtcgaagcccttgaggttcccggcgctcacagaaacgactacgaggatgttagtgtgggaaaaggaattttgttggcttttcaaactctcggtgttgtctttggcgatgttggaacgagtcctttgtataccttcagtgttatgtttaggaaggctcctattaagggaaatgaagatattcttggagccttgtcgcttgttttgtacactttaatcttgattccgttagtgaagtacgtccttgttgttctgtgggccaacgacgatggggaaagtggtacttttgcgttggactcgttgatgtgtcgaaatgctaacgggagtcttcttcccaatcaggtggcgatcggatgccgaataggaagccctttagctaa

SEQ ID NO: 42374 - DNA, 369 bp, Glycine max
  Clone ID: PAT_MRT3847_138264C.1
gattggtgctgttaccaactttacttaaacagcaacttttgggatgggggtttaaacaaaaaaaaactagggggattttcttacaaaaaaagagaagcaacccccggggggctatacccgccaaaaaaaagaaaaaagaaagccaactgttacaaaaaggtttttatggaaaagggggggagaaaaaaaaaacatgggcccattaataaaaaaacaaagctctggggccctggatatgaggaccggccaaagaaggaaaaaaaaaccaaagggctctaaaaccaaagggatttgagcggggggggggaacaccaaagtatcccggagctgaggttccccacacaacctggggggggaactggaggaaga

SEQ ID NO: 42375 - DNA, 329 bp, Glycine max
  Clone ID: PAT_MRT3847_138265C.1
caacagggacttagtcctttacaaacacaggcaatacttaatggcttttttataaaattcgatggaattcactggcaaaacaaaaaaaaaaatgggtttaataaaattaatcttcggttagttttggatttttatataaacaaaagtttttggggattgaaaaacttacaatagaatcaaaggttttaaaacacactggaaaactaatggaataatttttttaatatttttttaaaaagaaggcccaaataagggttaataacacatagcacatttaaaaacaaaacctcaggctgggcaagggaaattactcttagttttcatcctta

SEQ ID NO: 42376 - DNA, 239 bp, Glycine max
  unsure (1)..(239): unsure at all n locations
  Clone ID: PAT_MRT3847_138266C.1
tggattgagggagtgaactgcatgtatgctccttggataagttggatgctcatgcttaaatcagaacccatcatcgaaacattcatactatgatgctacagagttcttggcctgcgcttatcactcgtaatatgngctgctcgacataaaactatatcggacaaaggcccacaactaacaagaggtatgtatcatgagaggcaaaccactactaatctggcgtctgatatacggaacta

SEQ ID NO: 42377 - DNA, 194 bp, Glycine max
  Clone ID: PAT_MRT3847_138267C.1
tttttgaaaaaaatactttaggtattataaaactggagtcgtgagacacaactccatacacggcatggaagcaacatccattctcaatttgaatgggcgctgtttcaaagaggaaatttttttggacaaagaggatggaaatgtataagtacagaggcacttactcctactgtggagaagcattagagactatg

SEQ ID NO: 42378 - DNA, 271 bp, Glycine max
  unsure (1)..(271): unsure at all n locations
  Clone ID: PAT_MRT3847_138268C.1
agaaaaaggggaatggcatggctgcagntagcaganaagcatcaccannntgangggaggtgctaatttgatctcaccgcncccacgattcttctcaaaatgnnccccctatggtttgaaagtnggaataccagagngtctaaacgggattnggaagggggtgattcccacggtcctaagcttgantctgaaatcggtgatttccaganactncgcgncantcgaacccttaaacncaanaagctcggtattcctancaaacntagganta

SEQ ID NO: 42379 - DNA, 175 bp, Glycine max
  Clone ID: PAT_MRT3847_138269C.1
ggccaaaagccccttcaagcttgaacatcccttgggaagaaggcaggctgagtctgctcgcattagagacaagtatgctgagagaatacctgtgattgttgagaaagctgaaataagtgacatcccagacatggataagaggaaggacgttgtcgcagcagatgggactaggggc

SEQ ID NO: 42380 - DNA, 364 bp, Glycine max
  Clone ID: PAT_MRT3847_13826C.1
ggagaaggtcaatttcgaagcctctcgaatccaaactcaacagaacattcatttccctataaattcgacgtcgtttcgttccgctctcactccaagaaaacgttttgcagaagattccaatcggagctcagaaaaaaaagaaacctaatcgccgatcgcgtcgaaagtaacgtagctgtggttccttttttttttataatttttttgccgtttgaagatagtcatttcggttactgctgcgttttgtgttttctggtgttttaattctgtgcaattttttaattctacatgtttgattgtttatttttggttgagtgatttgtttgttttctatgacttctgcgttctggagttgaaatgttgt

SEQ ID NO: 42381 - DNA, 579 bp, Glycine max
  unsure (1)..(579): unsure at all n locations
  Clone ID: PAT_MRT3847_138270C.1
gttacccaaatttataggatatgatttcataatacaatattctccaggaaaagagaatattcctgctgatgcactatccagaagctttgctatggcttggtctgaaccttcaaatacatggcttcaaacagtggcagctgcaatgatgagtctttgatgaaaatctatcagctctgtagcaacaatgctgggaagagtggcgattatgtattacatcatgatgtgatcatatggaaagggagaattatgttgcctaatgatagtcaattgcttaagatgattatgactgaatctcatgcatccaaggtgggaggacatgctggaaccactagaacaattgttagaatcaatgctcaattttactggcctaagatgagggaggatattatgaagtttgtacaggaatgtgtcatatgtcaacaagccaaagtcactcattccttgttgcctgctggtcttcttcagccattacctatccctaatatgatctgggatganatcgcaatggatttcatcaccaatctaccattatctcatggttactctaacataatggtggtagttgacagactatcaaaa

SEQ ID NO: 42382 - DNA, 244 bp, Glycine max
  Clone ID: PAT_MRT3847_138271C.1
tattttgcgcatatttttaatataacaaaaggggggctaattaagttgtcactccctacatgagtggctctcaattggaaagggtctgtgctggccatgatatcaccgttactgaaggtttctgcacccataatacaacaggtgcgaaccataaagttcgtagaatgggatgatttcagcagaaacctcaacgcagaagttcaatgctaccgtgggtgcgctcctgatgacaaggctacatgga

SEQ ID NO: 42383 - DNA, 507 bp, Glycine max
  Clone ID: PAT_MRT3847_138272C.1
cttcacttccgctcgggctatattcgaagggccttctgtcgcatctaacaagaccgggaagagacagataagctttctgatcgaacattgttgcggcatcagataacgcatacatgttcggaaagggccgcacagaaaaaggcttcaacgaccagtttgtctcaaaggaatatgacaatcatcccatcaactggtcagaataggagcgagcgaggcttgataataatatgctgcggaaactcgatttgcgcatgtgctatactgggagttatttatattctcaaatacatggatctagacaatgtcccagctgccagagccaatggtctagaaagggacctcaaactgacgggcaaccaggatacaaagtgttctatccttgctctacgatggatacattctggttcatgtagccttcaatatgatagatgaaaagacaggccgacccaccatatacctgcctactagcattgttatttggcgcctcatttccacccttttctatct

SEQ ID NO: 42384 - DNA, 1628 bp, Glycine max
  Clone ID: PAT_MRT3847_138273C.1
cggctaattggtgtagctttttatcactgcggcagaattaagcataaagatgtacaaggtagcaaacgcctcagaataccttgtgatcactggggttggaatcacagacataaagcttgcaaagaaagcatgggttctcccaggccagtcatgcaccgttttcgacctctctccggtgaactacaccttcgaggttcaggccatgagcgccgagaagctccctttcattctccctgcagtcttcaccatcggtcccagagtggaggacgaagacagccttctcaaatacgccagactcctctcctcccacgacaagctctctcaccatgtcaaggagcttgtccagggcatcatcgagggtgagacgcgtgtcctcgctgcttccatgaccatggaggagattttcagaggcaccaaatcgtttaaacaggaagtgttcgagaaggttcagctggagcttaaccagttcggccttctgatttacaacgccaacgttaagcaacttgttgacgtgccaggtcatgagtatttctcttacttgggccagaagactcagatggaagctgccaaccaagccaaagttgacgtggctgaggccaagatgaaaggagaggttggatcgaagcagagacaagggcaaacgcttcagaatgctgccaagatcgatgcggaaactaagataatatcgacgcagaggcaaggagatggtaagaaggaggaaataaaggtgaggacagaggttaaggtgtttgagaatgagagagaggctgtggtggcagaggcaaattccgagcttgcaaagaaaaaagctgtgtgggctcaaacggcgcaggtggcagaagtggaggccgccaaagctgtggctctcagagaagcggaattgcagagagaagttgagaggatgaatgctcttacaaggactgagaagcttaaagctgagttcctcagcaaagcaagtgttgagtatgaaaccaaggtacaagaggcaaactgggagttgtacaagaagcaaaaggcggcggaagcaatattgtttgagaaggagaaagaggcggaagcgcaaaaagcattagcggaggcagcatttttcagtcggcaacaagaagctgaagcagaactatttgcaaagaaaaaggaggcagaagggcttgtggcacttgggcaggcccagggggcatatttaaagacacttcttggtgcactgggaggcaactatggcaacctaagggactacttgatgataaatagtggcatgtttcaagagattgccaagactaatgccgatgcaattcgtggacttgagccaaagattagtatttggactaatggtggagatacaaatgatggctatggaagtggtgccatgaaggatgttgctggtgtctacaagatgttgccacctttgtttaagacagttcatgagcaaaccggtatgctgccacccgcttggatgggaaccctgcccgataatggttcttgagcctctgcttattaatacctccacatcatcaaatgtgtgctgctcgcttttcctcttttttattttgccgattggatgcatgttttgtaaataaggtttcttcaagctcaagctaaaaaaaaaaaaaaaaaaaaaaaacttcagttag

SEQ ID NO: 42385 - DNA, 609 bp, Glycine max
  unsure (1)..(609): unsure at all n locations
  Clone ID: PAT_MRT3847_138274C.1
tgagccaggaggatgggcaagccattgaagtggatcttcattgacccgnaggctttcacagagaatggggagtgggccatccggcaccgaccggctaaaatgctcctggactccgtggctcctgcagaggaggcgggccaccagaaggtggtgttctacctgcttatccagcgcaagcccctcttctacgtcatcaacatcatcgccccctgtgtgctcatctcctcagtcgccatcctcatctacttccttcctgctaaggcgggcggccagaaatgcacagtggccaccaacgtgctcctggcccagactgtcttccttttccttgtggctaagaaggtgcctgagacctcccaggcagtgccactcatcagcaagtacctgaccttcctcatggtggtgaccatcctcatcgtcgtgaactctgtggtcgtgctcaatgtgtccttgcggtccccccacacacactccatggcccgtggggtccgcaaggtgttcctgaggctcctgccccagctgttacggatgcatgtgcgcccactagctccagctgctgtccaggatgcccggttccgactccagaatggctcttcctcagggtggcccatc

SEQ ID NO: 42386 - DNA, 735 bp, Glycine max
  Clone ID: PAT_MRT3847_138275C.1
cggccgctcaggcggcgaccggtctcctcaaaacttccattatatccgctgcctgatgactaccttcgtaaatgcctcaccagtattgtctagtacactagtaggtctagtcctccttcccgagcggtgacgagtcactctcttgctccattaggaatgcctgccttcggatcggcatgctctgtgcttctccggaaaaatgctcaaaaacaggagaactctcgacagattacactatccacagagtctcgacagtccgcatctccctccgacttcgcggccgctatgaacaatcttccgtctgatgacctacttctgacaaaatcgtagctactgctgagagggcgagtactctctgactcgatcgataacgtgaacagctacgatccacgactacgatagtcttccaccgaatcggcagagcattgatcttcgccggaaaacagttctaagactggagagccctcgacaattacatgattcagcagacatccactcttcgtctgcagcttcgactcctcactggtatgcacatcttcgtgaacacgctcaccgggaaaactattactctgcatgtggagagatctgacacgatcgataacgtgaaggccaagattcgagagaaggaatggcattcgccgagatcagcagcgtcttatcttgcatgagaagcagctcgaagacggacgcactctctgcgattactatattctcaaggtatccgcgcttcacctt

SEQ ID NO: 42387 - DNA, 297 bp, Glycine max
  Clone ID: PAT_MRT3847_138276C.1
gcactgcgttatcgcacgaccagcttcatgaccaactgctcgcgcatcctattcactcttgcagctgttaacattccgtaaccttgaaatttccagatcgagaaccgtatctaggcgatttggtcagtcgcatgattcgaaaattatctttgaccgacaagttccacttctgttaccttgtcacggcctgaacagattggattctcgatatcacattgtaaccccatccatctggattaagactccgctgaccatcaatgatgtcgtcataggcttcaggtaaattatctcatgtat

SEQ ID NO: 42388 - DNA, 290 bp, Glycine max
  unsure (1)..(290): unsure at all n locations
  Clone ID: PAT_MRT3847_138277C.1
acttgttcaaacactccanaacctacatttacttacaaattcaataaaactacaaggtcggcattctttataaataaaattttactcttaaaatcttttttttttacacaaaaaaatcattccttctctacatactaataattatattaaattactacaaacaactcacacatttattcaacttcaaacaatcaaccatacatcatttaccacaaacctcttctattccaaacattaatactttcaatataatctaataaatattaaaatgcattttccaaatttctttt

SEQ ID NO: 42389 - DNA, 271 bp, Glycine max
  Clone ID: PAT_MRT3847_138278C.1
ggtgatccccaacttcatgtgccagggcggcgacttcaccgccggaaacggcgccggaggcaattccttctacggcgcctagtacgccgacaacaacttcgtgaagaatcacactggccccggcatcctctccatggcgaacgccgggccgggaaccaacggatctcagttcttcatctgcacgaccaatactgactggctcaaccgaaagcacgttgtgttcagacaggttgtcaaggggatggacgtcttcctggatatcaaaaaggtc

SEQ ID NO: 42390 - DNA, 191 bp, Glycine max
  Clone ID: PAT_MRT3847_138279C.1
ctaacaatatgcttgttcctaacacttgggacaatgaaagggatgggtttttcttcgtggagcagatccttcttaaagctcttgcctggctgcactttcctgcgtaaacactgcagatttaaactctttacgccactaattcctattcctcctccacttcttgagaactgccacacactaaattatcttgt

SEQ ID NO: 42391 - DNA, 172 bp, Glycine max
  unsure (1)..(172): unsure at all n locations
  Clone ID: PAT_MRT3847_13827C.1
cggccgctcgagccggnctggncgggtcatttcggactcgttgctcactttctctgttctccacaatcctctctctctctctctctctctctctctctctctctctctctctttttccccgtctcgttgggttcaggaataaagaatttccataggacttcaagaagacagg

SEQ ID NO: 42392 - DNA, 2047 bp, Glycine max
  Clone ID: PAT_MRT3847_138280C.1
ccacgcgtccgtggttttgtaacacctataaaagcagaaccatctaacttgattttagcatcaactgatggagctatcaaactcacttagccggcacaaaaacaacttaatagaaaatgccttccaagaggcttcaatggagatccttagtacttggttgtttcaaggccaccaagaaccaatccttggaatctccaaacatagtttccaagaagtcatcttcaagtagaatcttcctttctgatttaagcctaagcgattattcatcagtttctatcatgagtgatttatccaattctcttgtgggatcaaatcttcgtattttcacctaccaggagctctcagaggttacacacaacttcagcaaatccaactatcttggggaaggtgggtttgggaaggtttttaaagggtttattgatgacaatcttaagcctggattgaaagctcagactgtggcagttaaggccttaaacttggatggaaaacaaggccataaagagtggttggctgaagtagtctttcctgggacaattgaaacataggcatctggttaacttaattggctactgctgtgaagatgagcataggcttcttgtgtatgaatacatggagaggggcaatctagaggaaaagcttttcaaaggtaactcatacatgcatgcctttgctctcattatgaaagaaaaaactggcgcagaacaacaactaaaactttttctctatacaatgacccctttcatgatttcatacaaaatggtaacccttttaaaatgcaacttacataacagccttgccttggctaacaagaatcaaaatagcaattggggccgcaaagggacttatgtttcttcatgaagaagagaaaccagtcatatatagagatatcaaggcctcaaacattctattggacgctgattacaatcccaagctctctgatttcggtttagcaatagatggaccagaaaaagaccaaacacatatcacgactcatgtgatgggtacacatggttatgctgcccctgagtacatcatgacaggccatttgacaaccatgagtgatgtatatagctttggagttgttctcctagagctcctcacaggaaagaagtctgtggacaagaaaagacccaccagagagcaggatttggtggaatgggcaaggccattgttgaaggattcccataaactagaaagaataatggacacaagacttgaggatcagtactcaactgaaggggctagaaaatttgcagccttggcttatcaatgtcttagccatcatgcaaaggctaggcccaccatgagaaccgtggttaggaccctagagcctctattggaactgaaagatatcccagttggcccatttgtgtatgtggtacccagtgaagaagaatcaaccaaagtgaatgaaaaagtaacagaaaatgagcatgttgagatcaaccaaggtgagttaaaaaccaaagaaaaagaagaagaagaaaagggagccaaaaaagaaaagggtcccccccggcaacgaaaaagtcgtcgcaatagacgtcgtgttaagccactgaggtctcttactgcttactctgacactgctctgtataaaactcttggtacaaatctgtactctccaaaacaatcccaataaaaagatggacatgaaccagtgtttgcatgattcatcttcaattcttggtgataatacaatcatagctatagatagggagattaaaaactttggtcaaattccttgtatatttttaccttaaagttcccgaattaaacaacatgtagataatgttttcaactttaaacagccccgttaaaaatgtggcggattttttttaaaaataaataaatcacgtgacaatatttaatttgagaacttgatggtaaaaatataaggaatttgatgttttgttatgtaaacccaaacatcataggagaagatagggaaatgtattattgtatgtcaaacagctcaaagtttttttgttttttgtgtagtttgattttaatgttttctcttacagaaattccaacatgttttttt

SEQ ID NO: 42393 - DNA, 1141 bp, Glycine max
  unsure (1)..(1141): unsure at all n locations
  Clone ID: PAT_MRT3847_138281C.1
gcatggcacgccgtaaccgtaagcctcggnacattcggctcgagcttgacaaaccatgaagtgaatgttatactatgcctttgagaagtttgtctactcactaagaagtctacctcaccaggaaaagtaagtcctgtggaacaagnaaaatacccaccagagagcaggatttggtggaatgggcaaggccattgttgaaggattcccataaactagaaagaataatggacacaagacttgaggatcagtactcaactgaaggggctagaaaatttgcagccttggcttatcaatgtcttagccatcatgcaaaggctagacccaccatgagaaccgtggttaggaccttagagcctctattggaactgaaagatatccctgtaggtccttttgtctatgtggtgcccagtgaagaagacaaaaccaaagtgaatgaaaatgaccatgttgagatcaaccaaggtgagttaaaaaccaaagaaaaagaagaaaagggtcaccaccggcaacgaaaaagtcgtcgcaatagacgtcgtgttaagccattgaggtcaaccaaggtgagttaaaaaccaaagaaaaagaagaaaagggtcanccaccgcaacgaanctcgcgtcgattcggctcgcgtgtgcttaacacgacgtctcttactgctcactctgacactgctctgtataaaactgttggtacaaatctgtactctccaaaacaagcacaataaagtgatggacatggaccagtgtttgcatcatccatcttcatttcttggtgataatacaatcatagctattcatagggagattaaaaactttggtcaaattccttgtatatttttaccataaagttctcaaattaaacaacatgtacatagttttttcaactttaaacagctccgttaaaaatgtggtggaattttgataaaaataaaaaacaaatcacgtggcaatatttaatttgagaacttgatggtaaaaatataaagaatttgatgttttgtttatgtaaacgcagacatcgtaggagaagatagggaagtgtattattgtaagtcatacagctcaaagtttttttgttttttgtgtagtttgattttgatgttttctttgcagaaattccacatgtttttttttgaaaa

SEQ ID NO: 42394 - DNA, 145 bp, Glycine max
  Clone ID: PAT_MRT3847_138282C.1
ccatttttacgcctatgctttcgggtgtttttaggacacacacgactatatgagtgagggctctggagccactaattaatgaagaaccaacaagcgttgatccaaacacgcgacaaagaagccaaaaataattaagaatcagaga

SEQ ID NO: 42395 - DNA, 328 bp, Glycine max
  Clone ID: PAT_MRT3847_138283C.1
ctcgagccgaatcggctcgaggctgcgagagacgacagaagggtcttcttcaatttttaagtatatgtctcagctcagcgtgcgtaccaaatgtcctattcaaggaaacaatggctagcttactcagcctctgcactacactgccagttgccacacgtcttagccctaacattattttatacccatcttctcatatccattcaattttatttgtttttacacatttttccatggatgtcaagtcccggatgattctttattcggctaagagttagaacataaaaaagaacaacgagatttaattcctcacaaaatattctctacccct

SEQ ID NO: 42396 - DNA, 504 bp, Glycine max
  Clone ID: PAT_MRT3847_138284C.1
tacggctgcgagaagacgacagaagggacttcacctcatcagctagaatgctctctttttttgcacaccaaatcaaggtgcacgcgcttcttcattcattggtgatgatatcaaaatcacaggaattgcatcaccaccgagatcctcagtcctttctttgcttcttcagcccaaatctctctttgagagcatcttcatggaggacagcggcaacctcatgaagctgaatgggattttcatcaactcgtttgaagaactagaaggagaggcgctagcaacactcaatggaggaatagtggttaaagggttgcccccagtgtatggtgttggatattagagtggcttgatgaacaaagtgagcggtcagtggcgtatctttgtttggggaataggacaacaacaagaaagaaaataaaagacatggctttggggttggtagaatggtggtgtagttttttgtgggtggggaagttgaaagtggttgacagagaagagaagtaggat

SEQ ID NO: 42397 - DNA, 1175 bp, Glycine max
  Clone ID: PAT_MRT3847_138285C.1
ggttaaggaaaaattacaaatgaggcaggaaggagcaattaagagggatagaacaaaggcatactctcagtctaagaagaaatcaacagagagagcgagtccaaattcaagagctgctaagtcagtaattcctctcaagaaccgcaacctagacagcaagagctcgggatggaacatgttagatctctggatggctgcaaagccatgggagagcaggtcaatggtagaaatgtatttggactcacctgacatgactccagtgaccagtaaaagtgatcatcttgttcttccctttaattcggatcaacaaaatggctcagtcaaatcaagaagcaatggtgtgacaaccaggatttcaactaattctcttacaactagtcaatcaactccatcatcttcagccataagctctgaatgcatgcatgatgatagtcctatgtcaacctcatgcacatctggatcaccatctcgaccatctaacaacaatgttacggtggaagcaacagaggaaagaaatgcctgtaaaccaagctacatgaatctgacagcatctaccaaagctaaactgaaaccctataggtgtttttctcagaatgcgaagagaatctttatggatgattgtgtgtcactaagtggagttactagaagcagttctggtttctatccttctgctaatacatggaagaatctctatgcaacacctctaagaacaagttatcaaaaacgatatacaatggaatataagtagttgcttcatgacaataatgttctatttcaattggcccaacagcttgttgttcattggtaccttaatgtcatcagatgaatgtgtgtacggaagtcacagataattgctaattgatactgtagataacacaagttgtttggtgtgaagatggaaagcaccccgtttcaattgtaatgtgtttctacggcaatttataaatagtatcctctttgttttggggtatattctgtattcatgttgatttttggaggaacatttataattagtagctctaagttgtactatctgaaagactgaagtacaaaatatgagctttaccaagagacttgattttgacttaagcttttgtttgaatgcatgtttgcatgttaaatacaagggcaagtggtttgtatgcggaatatagccaaaaaaaaaaaaaaaaaaa

SEQ ID NO: 42398 - DNA, 248 bp, Glycine max
  Clone ID: PAT_MRT3847_138286C.1
gtttgtcttaaatggtgggcctgcgagatacttgttttgctagccggactttttccaaatccaaagttggagacatcagtcctatctatatgcttgacaatctctacattacatttcaccataccttatgggtttggggctgctgctagcactagagtttcgaatgaattaggagctgggaatccacaagcagttcgtgtggctgtttcagcaacgatgttccttgcagtcacagagggtctaattgt

SEQ ID NO: 42399 - DNA, 310 bp, Glycine max
  Clone ID: PAT_MRT3847_138287C.1
tgctctctttctagattgtgccttcaccatctaatacctgccttgagccaccgctcagatcatgctcgacactgatgatgatcctcttcaaaacggtggcacatactatatgttgcctgttatgacaggaaagggcggcgcaatagaagtagattcaactggaacagaaatctgccctctcactgttgtgcactcacccaatgagctcaatcaggggattgaactagtctttacatcttcattacatgccctgcgtatcgcctaatgctatcctttgagcattaaatgaggttcatgagcagttataacg

SEQ ID NO: 42400 - DNA, 211 bp, Glycine max
  Clone ID: PAT_MRT3847_138288C.1
cccctcccctttaagggacaaatcaaagcgacaagggctgaatctcaggggatcggggcaaaaaggccactttgccatttacaaaaccccggggggtatttaagtcgtctgcaaaggattttacccccccctcgatgggaattgcgcttcaaggggtttcgtagggctaatccgcctcacaaggggcaccaaccgcacctgcctttggggg

SEQ ID NO: 42401 - DNA, 196 bp, Glycine max
  Clone ID: PAT_MRT3847_138289C.1
ccttttctactatcttactaggcaggcagaacgacctactgaatctaagcacatatatgcattatataggatgacaagtatactagaaaagctttcgacccaaatgcgcaaaagacaatcttggacagctttagacccaagagcgcaacaaacatgtgggaacatcacgcccatagcagctggctacatcccattc

SEQ ID NO: 42402 - DNA, 2771 bp, Glycine max
  Clone ID: PAT_MRT3847_13828C.1
atcttcacggcttttttcattttctttgtcaccgtaagcatgacggcccgaggccctccaaagcctctcgaatccaaactcaacagaacattcatttccctataaattcgacgtcgtttcgttccgctctcactccaagaaaacgttttgcgacaagattccaatcggagctcagaaaaaaaagaaacctaatcgccgatcgcgtcgaaagtccctaagcttacatcctgcttctagatagttggtaatcttatctgagggtagtagctagtaccatgggagaagtggcagtaatgcactctgagcctctgcagtttgagtggcaatgacattagtgtgaatatgactgagaaggaagtgtatcctccagaatcaaatgtggagcgcttacctggagaagaatcgagtcaatcaacagaccacaaaaatatcaatgacttgcaagagagaggatatatggagtcatggatgtcagcattaccggagaagatgccgtatcagggccccatgttgcaatgagatttttgattgccgccattgtcataatgaggcaaaaaatgatatcaacattgatcagaagcatagacatgatattccacgacaccaagtcaaacaggtgatttgttcactttgtgggactgaacaagaggttcagcaaaactgtataaattgtggtggtttgtatgggacaagtacttctgtggaaacatgcaagctttttgatgatgatatatctaagcagcagtaccattgcagtggctgtggaatttgcagaactggcggaagcgaaaatttcttccattgctacaagtgtgattgttgctactcaactaattctgaaaaacagtcacccttgtgtagtaggatcaattgcatcttgattgcccggtttgttttgagtatttgtttatatcagcaaacgatgtcactgttatgccttgtggacatacaaatccataagagcttcctgaatgaaatgagagaacatttccagtattcgtgccctctctgcttgaatatcagtctgtgacatgtcaaaggtttgggagaaatttgacatggagattgctgctacacgaatgcctgagcaatatcaaaaataaaatggttttggatcctgtgcaacgattgtggtaaaacttctcacgttcagttccattttgtggctcaaaagtgtccgaactgcaaatcctacaatacacgacaaacatgaggctgagcaagtggccacgattattcattggtttcgtcaaaagccttcacttgagttctcttgatgttgttgtgattcgtgaaggcagtgaaaatgcatgtgtgtccattgggtacgtggatgtgcacgtgggaatttgaatttggagtgcacgatgagccacattcaaagggatagaataatggttctttttcttatatgttgatttggagtggggtagtgtaatttgttggggcgccactagttggaatagggcccccgagtgttagagttcgtgtttgttttagcttagcaatttggctaaaagtgtttctatttttttgggtctcaattgataagtattctagttaaattactattaagtgaaattcatgcttctaattatttttattattctattcaagatatttataatcctgccgatgtcttaacgtggataatgatttcatttttgaatattgataacctagtcccctggagtagtgttaatattctttttggcagtgaacacacagtccactgtcttgtttcctagttaatgaagtgaagggttataatttgatccaaaggaatctgccaaggtgcagatgatgttgagtttttatgttcgtggttgttgctactcaactcttctgaaaaacagtcacccttgtgtagaaggagcaatgcatcatgattgcccggtttgttttgagtatttgtttgaatcaagaaatgatgtcactgttatgccttgtggacatacaatccataagagctgcctctgcgtgaggcgggcacgttccccggtgccgccccctcctgctttgtgcagtccgtgtatatacactagttttgatgtgttctcctcttggagtagtgctgattggagctgcattaatcgattttgttgttgctgatttcaattggtctgcggcagtatagaagaaatcaacgatgcattggtgtttacctggcttgatggggtgactgaatatgcctttagaagttttaggattatttctaaatgtgttcctacatgcaggtccctaaagcttacttcctgcttctagatagttggtaatcttatctgagggtagctagtacctgggagaagtggcagtaatgcactctgagcctctgcagttcgagtgcaatgacattactgtgaatatgactgagaaggaagtgtatcctccagaatcaaatgtggatcacttgcctggagaagaatcgagtcaatcaacagaccacagaaatatcaattacttgcaagagaaaggatttatggaatatggatgtcagcattaccggagaagatgccgtattagggccccctgttgcaatgagatgtctgattgccgccattgtcacaatgaggcaaaacatgatatcaacattgatctgaagctgacacatgatattccacgacacgaagtcgagcagtgatgtggtagactagaactttagcacaaatatttacatctctgcagtctgcactctaggcaggaacgatgacatgtttgaagggagttccttttttttcccctcaattttgtgtctcaatctctttttttta

SEQ ID NO: 42403 - DNA, 389 bp, Glycine max
  Clone ID: PAT_MRT3847_138290C.1
caaaaccaaaggggcccaaatccggggggggaaacccaattaatcccctggaaccacccccttgggggggggaggggggggcccccccttccctaaaaccaaatccaccccaaaatttttccacccccttagaacccccccccggaaacccaaaactaatccggggccccaaagggggaaagggcacccattggggacccccaaccccccttaaattccagaaaaaacaggggcccggatacccatgggaaaaggaagggcggaaaaagggggaaaataaaaaaagcccaacgcctggggggggccccaccgcccgggggggggaaaaccccaaaaaacccaaggccctctccaaaaaaaccacggtttttaaaaaaaaaccccccccc

SEQ ID NO: 42404 - DNA, 443 bp, Glycine max
  Clone ID: PAT_MRT3847_138291C.1
tcgacccaacttccgaacacccttgtacaccacaccaaattttattacataaaaaagcataaaaccacaaatgtacgttttaaaaaaaaggataagccattttcaactcatattttcacactttattaaaacctttcatcccttttcactcatacctttttttctaataccttccctattcataaaaacaaactcccaactattcacacttaaatttcttacaccacaccttttcaatttttcccacactttcctcaaataaaaaatcattcctactccacacattttacttttatttaaaactcacttgtcattccctcatcttcctctcctcaaatgttaactttcaacaatactttaccctcccccaaaatattaacttccttaaattaattaactaataacaaaactcaaactaatgctaaaataaactcacaaatcaa

SEQ ID NO: 42405 - DNA, 350 bp, Glycine max
  Clone ID: PAT_MRT3847_138292C.1
ttttttttttttttttttttttggcagcaaatctgagactaccgtttcatctctatctttccccacaatatacacactattggcaactctcattttcatataccacatataatatatatatatatatatatatatatctaaataaacaaatccaaatttaactatttatttttaacattttattgggtcaccattattaacgaacgcatacagaaccattgctttctttcttatgatccaacaaggccagcccgcgtgttttaagggtattaaggatcactcatgctggcatgactatggatggacaacttagtggaaaagataacttcatcaacaatgcttgccttttt

SEQ ID NO: 42406 - DNA, 250 bp, Glycine max
  Clone ID: PAT_MRT3847_138293C.1
tgagaaacaaggacaatcactgcatggaggtcataaggcttaaggtacagtttactgttgcagacttttggacaaagttcttttcttggctgttataaaaactatatttggttttaaacagaaacactggttttagtacaaatcatctttgtctactttcatttttctttattattttcatgactgaaaaggagctttggaaatcactgcataaggcttgatttatttgcacaactttctttagggttgc

SEQ ID NO: 42407 - DNA, 469 bp, Glycine max
  Clone ID: PAT_MRT3847_138294C.1
tacggctgcgagaagacgacagaaggggtacatagtatagatacggatacccggttagtgtatgtatatgtacgtgattcatcacttttatattgttataagacacttttttaaaaaaagaatctgttatttggtaattggtacgttgaattcaatacaaggtacacaggattattgacaaagtctttgtttggatatatgttacttgagaaaccacgtcggctataactgttgaaaacatgtcccatatatgtaagcaaacacgtttaaaattctttaactatgattttgactgcctctgccagtgacatgattagaggtctgcctatatgagaatttggaccaatgacatgcagaaggaatttatttgattgcgtttttctatagtatgaaatgaaataaatggaatttaatttccagaacacattattgactaatttcataagatccttgaagggcttttattaaa

SEQ ID NO: 42408 - DNA, 612 bp, Glycine max
  Clone ID: PAT_MRT3847_138295C.1
gatatcaccctttttgtttctctctttgtcattgaaaccttttcacccccttcatatatccttaattcagcaatggcgagccacgacaaagcccaaggatctagcacaaccaaaaagggcatctcgcgaagcaacaaagctggtctccaattccctgttggtcgtgttgctcgataccttaagactggcaagtatgctgagcgtatcagttctgctgctcccgtgtatctcgcctctgttcttgaatatcttgctgctgaggttttagagttggccggaaatgctgtaatggacaacaagaagactcgaattatgcctcgccatatccaattggcagttaggaatgatgaagagttaaacaagcttctcggagatgtgaccatcgctaatggtggtgtgatgcctaacattcacagcatgttgcttcctaagaaggttgggacctcgacctcaacctttatgggtgctagtgtcaatgacaatgatgcttaaatgttttttttttttgccttaagtttgacccatgttccccttttgtaatatgggttctttatgattgaataattcataatgtcaagattggcataatatgataacaaattgggttgatgc

SEQ ID NO: 42409 - DNA, 303 bp, Glycine max
  Clone ID: PAT_MRT3847_138296C.1
ggctcgagggtcattattcaacataaggatgccgttcactcttgaattaaaaaaaaaaaaaacaaaaacaacgagggagtctgcttttttttttatttatttgtatcgttggtctgtgattctctttgcttcatttgtggggtgtttgggggaggctggcggctcttttctgtttgtttgtcccggcgatgatttgtgcaccactgtttgtggtccggactctattctagtgttaggtatgtttcgaattttctgcattctggggggtttggttgttacaacctacatttttatgcttgctgt

SEQ ID NO: 42410 - DNA, 333 bp, Glycine max
  unsure (1)..(333): unsure at all n locations
  Clone ID: PAT_MRT3847_138297C.1
caggaccggcccggaaccaaaatcccgggacgacgagctcattagacggcggccgcccacacaacacgggggggcctagaagagggagaggggggacacacggcaaccngacanccagaggaacaaacagggggacacccaggggaggagaacaagaagcacacagcacccaggcaagaagaggacaaaccacaagccgacaaccaaaacacaggccacaacaaaagggcccacccaccccaagaccaccacaacacgccagggggagccagaaggaacaacaacccccgggacgcacgacaagacaccaaaaccaggggaaaaacaacaaac

SEQ ID NO: 42411 - DNA, 425 bp, Glycine max
  unsure (1)..(425): unsure at all n locations
  Clone ID: PAT_MRT3847_138298C.1
ttcttttttttnataaatttttttatttggtggttttttttttttttttttttctttaaaaaccaatggttgggacaccccccggtgaatttaatgggtaaataaaggaaaaaggaattggctccccttttttgttttttatggggagggctaaaggcggacccttttactacaaaagggttcccctttaaaatagccattaaaaaagccaagactgattttttacaggggcccctttttccgggaaaatttacatcaactttagataaccggggggggggggggggtccccttaaactttaggaagaaccattaccttgaggccgggggggaccacctggggggggggggaggcaatccattggtggggggcgccccctatttgttatcacgggggtctggggaaaaacaaccccaaccaattt

SEQ ID NO: 42412 - DNA, 231 bp, Glycine max
  Clone ID: PAT_MRT3847_138299C.1
caacattgccttgaaccattctcacacctttaacgtccctaaggcaaacatccagggctgagttctgatcattgagaaccagcccaatcttatacactgcgcattgccccttgaccactgttctagccccacatgacaagacaccctcaacgagagttatagaaaccgaagagtatagatcaccagagctcttcctaggagcaggtaaacacccacgtggctgtagcattg

SEQ ID NO: 42413 - DNA, 1254 bp, Glycine max
  Clone ID: PAT_MRT3847_13829C.1
gggaaaattgtaaactaacctttgtcaattgtccattatctgcaaagttttaaaaatcggtgtttaattggacaaactgtgaacctgttcgatcatatttcaactcctgttggatcatcaatttaactagtttcaaactatgatccaaacccctgttcaatctctgcttcagtttttgaaacattggattgttgtgcattgtgataagaaaccaagccaagagtaaggcagaatgtagtttgcggttaaagtaataagatagttggaaacttggatggataggaatgatctatataggtctctgagagaaaattttaggagacttgatcggttttggttctacgtagaagaagtctcttgcaggaaaatgcaatttgcatccgaaggggactacccagttgcagaaagctcctgctgcatggatactattactctattgaagggaagaatggccaaaccagtatatctctgccttatccatctctgtttgtctttgttcaccctctactttgggcaaatgctttggaatcatttgtgatgttgttaaagcttaatgtgggatatcccttttgcattattcataggaaatatccttttggtttctttgccagtttatgtacagtgcaaaggctggcttgatgcgactccaattggttgacgtcacctgaatactcaatacatactatcaaagcaacgatgcgttggtgtttacctggcttgatagggtgactaaatatgcctttagaagttttaggattatttctaatgtgttcctacatgcaggtccctaagcttacatcctgcttctagatagttggtaatcttatctgagggtagtagctagtaccatgggagaagtggcagtaatgcactctgagcctctgcagtttgagtgcaatgacattagtgtgaatatgactgagaaggaagtgtatcctccagaatcaaatgtggagcgcttacctggagaagaatcgagtcaatcaacagaccacaaaaatatcaatgacttgcaagagagaggatatatggagtatggatgtcagcattaccggagaagatgccgtatcagggccccatgttgcaatgagatttttgattgccgccattgtcataatgaggcaaaagtcagtcaattccccaaatctagtatttgatgatagttgtttgattcggatatttaatttatggttgttgtcataaataatatagttccatattattatttatatttctacccatccagagtagtct

SEQ ID NO: 42414 - DNA, 449 bp, Glycine max
  Clone ID: PAT_MRT3847_1382C.1
aattcggctcgagtacggctgcgagagacgcagaaggggtctctggatctgtttgtagttggtgtgaaaaatataatatgctgatcttctttctctctctcgtgaatagaggtgaaagttgtgttgcattgtgaaatcttcttatgggtgaatgattggagttcaatttcatttggagtggtaatggctgatgtgactgcagctaaccgggatcaatgaatttagtcttttattatatgcatccatcacttagtaaatcaaaatcagaatttgaattgacaatttttattcaattaggttgtactgtgttcaaaattgggtgtgttattttcatgcagatctggtgctaatttttcactgtgttcaaaatttggtatgttaaaactaagtcaggatatcatgaggggttgaattgaaagccatacactggacaaggttttaaagatatg

SEQ ID NO: 42415 - DNA, 244 bp, Glycine max
  unsure (1)..(244): unsure at all n locations
  Clone ID: PAT_MRT3847_138300C.1
anccngcaaacgcagaatccttctcgattttaataagcaattaaaaccaacttgccaaccttttcccaacttccacaaaggtatattataataagcatgttaaggtgaggacaactccaaattgagaaggattctgcgtttgcagttgaaaagttaataacttatgctggttcagcgtaatttatttagtgtcttccgtgtccttattatttnctgtaatctagattttagatgttattgggat

SEQ ID NO: 42416 - DNA, 105 bp, Glycine max
  Clone ID: PAT_MRT3847_138301C.1
gtcgttcatgataaatttgggcaaaattccaacattgagctatagttttaaattctatatacaaattccaacattgttattttaacaattaaagcattatgtttt

SEQ ID NO: 42417 - DNA, 728 bp, Glycine max
  Clone ID: PAT_MRT3847_138302C.1
gaaagaggaatccaagtcatgaaactttggcttctgatttaacaaagtgccaaaagtatcaccacaagataaaaactacaagggctctgcttctgctgttgcaggaacagtccaaaaccaaaagagtttgaaaataaatactatacttttttttttgaatctcataagttcataacagactcccttctccaccgctctagactagactctaaaattatctctctctctttcctaattttttttctttttttctccctctatttttattttaccttttacttttttgccttttatggaaccaactgtacacaagggaatgcactacagcatacccatttccacccaacacaacaacggtgcacccctcactcactcactttcctaactcctcaactatttgttgttgttgttgttgtttctttcgttgaagatttgatcagcaaattttgctaggtagctctgtttctcttgtgtgccaccttgacctttcaatttcacccactgatcctcatacatgaattgcatagacagaactttccaatccatcaccacttttcctaaggtactcaaccacgacactcctaacaccatatccaaacctcccaactccaacaccagagcatccaccttcaccacaataggtcccaattggatgttgagcccgtagcaaactccctcagatacaactttgtggcccatccccaattaatgtgcttcgcaacgctggc

SEQ ID NO: 42418 - DNA, 240 bp, Glycine max
  Clone ID: PAT_MRT3847_138303C.1
gttgctctaactggagcacattcacttacgaacaccaggaaaccacagggcccttgtcgccccttctctttcccttatttaggagccctgaactcccccagagtctatccattcatgcctcttgtatgttgatgccacttcttggaagaagatgagggcaatgagttagggctccttttccccttccctcccaccagattgctctcccacctttcatttcttcctccaggctttactccc

SEQ ID NO: 42419 - DNA, 214 bp, Glycine max
  Clone ID: PAT_MRT3847_138304C.1
tgtcgccactgccgcgagtgcagtgctagctagcaacgccatggccattgaagtgttgctgggtggtgatgacgggtctctggctttcgttccccacaatatctccgtggcctctagggagaagatcgggttcaagaacaacgcaggtatcccacacaacgttgggttcgactaggacgaaattactagcggcgtggatgcagggaaaagctca

SEQ ID NO: 42420 - DNA, 286 bp, Glycine max
  unsure (1)..(286): unsure at all n locations
  Clone ID: PAT_MRT3847_138305C.1
gacatacatagaaataaagctgtcttgcttttgggctggctctgttttctcgtctgtctttctttccattttcatctctctgctgcatcagcttgttgtgccacctcaatccccagaaacaacactgcatacccatttcatgctnttctatattcgtcacttcttctctctcttcttttgtccacgctcatgaatatggtcgctgctggtctaaggtgatttctttacgtcatactttgatattatttattatcttggacttgggctttcatcacttttttttttt

SEQ ID NO: 42421 - DNA, 293 bp, Glycine max
  unsure (1)..(293): unsure at all n locations
  Clone ID: PAT_MRT3847_138306C.1
ataaatattaattattaatttttatttnnntaataaaatggattgannccacnacatttttgcgagtatnggttaatgcnccccaaaaaaccttatatctcctgtgtaccattgactgctgcaattaacagactttnatttttgtgtaattgtnaacgggctaagaanaaaaaagttaaagntgtatcaagtaaaaganaaanaaaagtagangtaaaattaaatgtatacaaattgtttcatgttgtatgaaaaccgatttcgtangccatgatntnnaggtaatagttaaa

SEQ ID NO: 42422 - DNA, 483 bp, Glycine max
  Clone ID: PAT_MRT3847_138307C.1
tacggctaacagaggtaggcggttaggggcagtgaagagactagagaagttggtggaagaaggagaaagggagttccaagcagaaatgagagccattggaaaaacccaccacaggaacctagttcgcttgttgggtttctgtgccgagggttctaaaaggcttctggtttatgagtacatgcctaatggttcccttgaaaaccttatctttggagctcagagtcagagacgtccagggtgggatgagagagtaagaatagcactggagatagcaaaagggattctgtatctccatgaagagtgtgaggcaccaatcattcattgtgacataaagcctcaaaacattttgatggatgagttctggactgcaaagatatctgatttcgggctagcaaaacttctgatgccagatcaaaccagaaccatcacaggggctagagggacaagagggtatgtggctcctgaatgggacaagctgaacat

SEQ ID NO: 42423 - DNA, 453 bp, Glycine max
  Clone ID: PAT_MRT3847_138308C.1
ggggcccaacagcctaaaaaagtttaaacaagggcctttttttgaaaaaaaaaccgcacccggggggccccccaccctcaaaaaacgggacccccaaaaaaaagtttggggcggggacaatgggaaagggacaaacttgcattttaaaaaaaaaaaaatttttggcccttatgaaaaaaaaaaaccccaagggttttttggggaaaaaaaaaaaaaaccaccccccccccttttttttttttaaacaagggggggaaacaaaaccttcaggcaaaaaaaatttaaggggggggaacccaaaaacaccccccttttggggggaaaaaaattttttggacccaaccctaagttttcctttttaaagagggggggggaacccccccaaaagtctaacccaacccaagagttgcctttggaagaaacccgggggcaccttaagggtcccattccaaa

SEQ ID NO: 42424 - DNA, 667 bp, Glycine max
  unsure (1)..(667): unsure at all n locations
  Clone ID: PAT_MRT3847_138309C.1
ggttttcctgatgcaaatgattttatcagttaaactagtgcattaaagctcttttatagtgtgtttggttgagcctcccgcctgggaaaatcatgcccaattctcccgttaaggtcaaagctactttgtatttcttcctatgtttggggtttggaggtagatccaaacacccacttattatttgtattttaagtgcgtttggtaaaagcaaaattcttttgtttcaagaaattttcattagagatccttttaaagatcaaactcggtttgactcattacacaatcagacaccctcattcattgtacggcatggcagatcatgtatgtcaggctatcagtaatatttggtctgtatccaagttgtgggaatctctgttatcattattacttgacgatgataaccaagtgaacctgttgaaacctctggtaattgcaatgttggggattgtggtctctgttttgtgctcgacgtcttggcatatcaagaaaagaaagcgacggatctgtaatggatttgttcccgaatccgagcttgtacattggttattgttcgggttggctgggacttaggtgaaagtccatgatgacagtttccagcgaacaatgacccgttttctccttaaactatttagttaaaannttttaaaatgtttaatttaatttgtca

SEQ ID NO: 42425 - DNA, 813 bp, Glycine max
  Clone ID: PAT_MRT3847_13830C.1
tgataatttcttccattgctacaagtgtggttgttgctactcaactcttctgaaaaacagtcacccttgtgtagaaggagcaatgcatcatgattgcccggtttgttttgagtatttgtttgaatcaagaaatgatgtcactgttatgccttgtggacatacaatccataagagctgcctgaatgaaatgagagaacatttccagtattcgtgccctctctgcttgaaatcagtctgtgacatgtcaaaggtttgggagaaatttgatatagagattgctgctacaccaatgcctgagcaatatcaaaataaaatgggttggatcctgtgcaacgattggggtaaaacttctcacgttcagttccattttgtggatcaaaagtgtccgaactgcaaatcctacaatacacgacaaacatgaggctgagcaagtggccacgattattcattggtttcgtcaaaagccttcacttgagttctcttgatgttgttgtgattcgtgaaggcagtgaaaatgcatgtgtgtccattgggtacgtggatgtgcacgtgggaatttgaatttggagtgcacgatgagccacattcaaagggatagaataaaggttctttttcttatatgttgatttggagtggggtagtgtaatttgttggggcgccactagttggaatagggcccccgagtgttagagttcgtgtttgttttagcttagcaatttggctaaaagtgtttctatttttttgggtctcaattgataagtattctagttaaattactattaagtgaaattcatgcttctaattacgcaaaaa

SEQ ID NO: 42426 - DNA, 1346 bp, Glycine max
  Clone ID: PAT_MRT3847_138310C.1
caatcatttcacatgactctctgtttattactgttttctgtacttgctagtgggtagttagaggtacataaaagacaaaataataaaccaaaagggggtatgaggtgagagctagaaactgaggacttagctagtagttagagatgcctgagttttgcgtgacaggtggtactgggttcatcgcatcttacctggtcaaggccttactagagaagggtcacacagtgaggaccaccgtgagaaacccaggggatgtggagaaggttggttttctgactgaactaagtggagccaaagagagactgaagattttgaaagcagatctattagtggaaggaagctttgatgaggcagtgagaggagttgatggtgtctttcatatggcgtcccctgtgcttattccttatgatgagaacgttcagcaaaatttgattgatccctgtataaaaggaactttgaatgtgcttaactcttgtgtaaaagcaactgtgaaacattttgtgctcacctcttcttgctcttccataagataccgtgatgatgtgcaagaagtgtgtcctcttaatgaatctcattggactgatctagagtattgcaaacgctataagctgtggtatgcatatgcaaagacaatagcagaaagagaggcttggaggattgcaaaagaaaatggcatggatctagtggtggttaatccctcttttgttgttggtcctctgcttgcaccacaaccaactagcacactgctctcgaaacaaagcgttgtcaatggcgtggtggttgatccctcttttgttgttggtgctctgcttgcaccacaaccaactagcacactgctcttgatactaagcattgtccccggcgtgaagggagaatatatttgttcaagagtagtagttctatggtcgcaaatcattgagatgcttcgtgccaaatacccttcctatccgtacgaaaacgagtgagtcaaaccatgcaaatcaattaccctgtgtagcagccaggaaggagataataacccgcacagcatggacactaccaaaattactcagttggggtttcctccattcaaaactcttgaacaaatgtttgatgactgcatcaaaagttttcaagacaagggcttcctatgacatctgttgttacctttcgtgttggtgtgaggtgtcagtgtcatatgacccaaactaactagctcataaaaccaaataaaagaatttaactttatcttttatctatgtatttattccttctttcttgtttccacaacttacattattattagcttcatcgattcatgttacaaaagatttaactcagctaatgtcgtgctttacttttggtcc

SEQ ID NO: 42427 - DNA, 565 bp, Glycine max
  Clone ID: PAT_MRT3847_138311C.1
tgttgtcctctgcttgcaccacaaccaactagcacactgctcttgatactaagcattgtcaaaggcatgaagggagaatatccaaatacaacagtggggtttgtacacataaacgatgtggtagctgctcacttgctggctatggaggaccccaaggcatctggaaggcttatttgttcaagcacagtagctcactggtcgcaaatcattgaaatgcttcgtgccaaatacccttcctatccgtacgaaaacgagtgtagcagccaggaaggagataataacccgcacagcatggacactaccaaaattactcagttggggtttcctccattcaaaactcttgaacaaatgtttgatgactgcatcaaaagttttcaagacaagggcttcctatgacatctgttgttacctttcgtgttggtgtgaggtgtcagtgtcatatgacccaaactaactagctcataaaaccaaataaaagaatttaactttatcttttatctatgtatttattccttctttcttgtttccacaacttacattattattagcttcatcgattcatgtt

SEQ ID NO: 42428 - DNA, 413 bp, Glycine max
  Clone ID: PAT_MRT3847_138312C.1
tttgtatttgacattagttggtatgagtggtgatatttggacacccatgagttacaaacacggcgaccaatacctatcatttctctctatctctctcttcacatcacatcaccaatcttatctgtcacttatctctctcaaagcgcctacatgaccacaccctagggtgtcaaaatcttctacttgtcgtatatactcgtatgttctggttaagacacttctgactattcatggttaaataataatatgaatataccttccataatttaaccaatgaaaaaaaaattcaaattatggctaatccggtttaccctaactatccatgggggattttgagcccaccggtatgtgccgctattcaggatttaaaacattgggtttgaatattttacaattgcctgactatttgggat

SEQ ID NO: 42429 - DNA, 613 bp, Glycine max
  unsure (1)..(613): unsure at all n locations
  Clone ID: PAT_MRT3847_138313C.1
gtaacatgaatcgatgaagctaataataatgtaagttgtggaaacaagaaagaaggaataaatacatagataaaagataaagttaaattcttttatttggttttatgagctagttagtttgggtcatatgacactgacacctcacaccaacacgaaaggtaacaacagatgtcataggaagcccttgtcttgaaaacttttgatgcagtcatcaaacatttgttcaagagttttgaatggaggaaaccccaactgagtaattttggtagtgtccatgctgtgcgggttattatctccttcctggctgctacacctgtaacaccgtgatcataccataaaatgttggtggtgctttgtagcaagaatgcttaggtcaattaatttatagcgaaataatggtacatttggtgaagaggaaagaaaacaatgataagaaaaagaatanaagaccttttaaattttgtttgattaaaaaagaaaagggagaaaaaaatgacttttaaaaacaaaaaatcttaatttcactttttcgtccttcagatatcgtaactgtacaatttaagtttccttacttttaaatagctcaaattaagctttagtatcacaattttgc

SEQ ID NO: 42430 - DNA, 439 bp, Glycine max
  Clone ID: PAT_MRT3847_138314C.1
gatgcgatgaacccagtaccacctgtcacgcaaaactcaggcatcttacctggtcaaggccttactagagaagggtcacacagtgaggaccaccgtgagaaacccaggggatgtggagaaggttggttttctgactgaactaagtggagccaaagagagactgaagattttgaaagcagatctattagtggaaggaagctttgatgaggcagtgagaggagttgatggtgtctttcatatggcgtcccctgtgcttattccttatgatgagaacgttcagcaaaatttgattgatccctgtataaaaggaactttgaatgtgcttaactcttgtgtaaaagcaactgtgaaacattttgtgctcacctcttcttgctcttccataagataccgtgatgatgtgcaagaagtgtgtcctcttaatgaatctcattggact

SEQ ID NO: 42431 - DNA, 440 bp, Glycine max
  Clone ID: PAT_MRT3847_138315C.1
ggtttggtgctaatatgggcatggcataaattttgattttagaattaaagagttttgatgggcaatgcttttggtataaattataatctgacaaacaattttagaacctctagttctgacaactattctaatttttattcttttcattcatatggcatggtcctagtagatctatattttttgtttctctgcttctaaacattgacttctgtacagattaaaatacacacttctggaaaattattctgcatgcatggtggatgaacacattttctatcaaatagccatatttgtttttgtggttattaacttgcgtatttttttatatgattgctaaccagacaagcatgttccttcactatatttagtgatttttttttttaaatactacattttttaagatttgttttaacatatattaatgttttatttgtacctgg

SEQ ID NO: 42432 - DNA, 5354 bp, Glycine max
  Clone ID: PAT_MRT3847_138316C.1
ccctcgggtcggccgggggcacggtggaggacggtggcggagagaggacgacgagggcgtggcgggtggtggttcaggggaagggcgtcgggtgcggtccggtttgttatcttttaaagacttgtcgggtcgggtcaggacccggtaatgggatggggatttggtcgacccatttttgcttggggaaagtgaacgacttgagggaaacggctgacgctcagttaaagaatatttggattttgttaatcccgggcctgcgagaagacgacaggagggggtagcaccttcgtaggacccttatctctctctctctctatctctcccgaattattgttcgttcgacccttttacttagtattccctgtttccggtattcgctcccttttttctgcattctggttttacttagatctctgtcccgcaccagatctggtgcagggtgagagggttgggttcattaattttgtatcaatcttccttctgagcggtaggcgtggggataccagagtcttttcgggaagcaagagagggttctctccgttttcaatagatctctcactgtcttcttttgagggggaagccggggcctcggcctcggcggctttcaaagcccccaccttcacagccctatcaacaaaaaaccctaaccctatttttttcttcattttctaattcttttttgatcgtcgccgccgccactagagatgcctgccctggcttgttgcgtggatgctgcagcacctcccggctatgcatttgccggtgacatctcttttccggcgccggtcgcccttactggcgtacctccggccacgacagacgacagcaacaacaaccgttggtcgccgtccctctccgctgcgctctacaacgtcgacggctggggcggcccctactttgccgtcaacaccgccgggaacatctccgtgcgcccacacggttccgacacgctgtcgcaccaggagatcgatttgctgaagattgtgaagaaggcctccgatcccaaatctcttgggggtctcagcctccagcttcctctcattgcccgcttccctgacgttctgaagaaccggttggagtccctccagtcggcgttcgattatgcaatccaatctggagggtacgagtctcattaccaaggagtttaccccgtgaaatgcaaccaggaccggttcgtggtggaggatatcgtgaaattcggttcacccttccggttcggtctggaggccgggtctaagccggaactccttctggccatgagctgtctttgcaaaggcaaccccgacgcgcttttgatttgcaacggcttcaaggacgcggagtacatttctcttgccctggttgccaacaaacttgccctcaacaccgtgattgttgtggagcaggaggaggaggttgatttgatcgttgaattgagcaagaagctctgtattaagcccgtgattgggcttcgtgcgaagcttcggaccaagcattccggccatttcggtgggacttcaggagagaaggggaagtttgggctgaccaccgctcagattcttagggttgtgaagaacctggacctcgcgggcatgctggattgcctgcaactgctgcattttcatattggttctcagattccctcaacagcgttgcttgctgatggtgtgggagaggctgcgcagatctactgcgagttggttcggctcggggcgaacatgcgagtcatcgatattggaggtggactgggcatagattacgacggttccaaatcgtgtgactctgatatttccgttgagtacagtctcgaggattatgcagtcgcggttgttcacgcggttcagtgtgtgtgcgaccgaaggtccgtgaaacacccagttatctgcagcgagagtgggagagccatcgtgtctcatcattcggtcttgattttcgaggcggttggcaccagcagcaccaccgggggaggagcttcccctgcattgtccgctcaatatctggcggaggagctgtcggaggattaccgcaatctgtcggagctggcttttagaggggaatatgaaacgtgtctggtgtacacggaggagatgaaggagcgatgcgtggaacagttcaagcaggggacggtgtgtatggaacagctggcagcggtggaaggattgtgcgagttggcgaggaaggcggttggggcgggggaatcggttcggagatatcacgtgaacctgtctgttttcacgtccgttccagacgcgtggggaattgaacaggtgtttcccattatcccaattcaccgtttggacgaaaagccttcggtgaggggtattctctcggacttgacttgtgacagcgacgggaagattgacaagttcatcaacggagagtccagcctgccgcttcatgagatggaaggaggaagaacttactatctgggaatgtttttgggtggggcttacgaggaggcgctcggtggagtccacaacttgttcggcggccccagcgtggtcagggtgtcgcagagcgatggccctcacagctttgcggtcacgcgtgccgtgccggggccatcctgtggagatgttcttcgagtgatgcagcaccagcccgagctcatgttcgagacactcaagcaccgcgcgcaggagtatgtcagccacgacaacgcagcagcgcttctggctgctggccttgctcgcacctttgacagaatgccttatctgctgtctctgtcttcctttgtggctgacgatgttgccgctgctgttcctgctgctcaagatctgggggagcagtggtcttattaatggatgtgcttcaattcaaatagtctcgcactagtcatcattccctttgtttctgttgcttgcttggttgttcttcttcttcttgttgatcgtcgtggtcgttgaggtcttcaattttttttttattattattccgttttcgctgtttttagtttagtcctggatgcaatgcaggataaagacagggtcagtcagttattgttctctgcattttgttcccaaatgaaatgtctatgactttcgtcgtcaagttctagggtaacaaattttattgttgccttgcttgttattattatacttagaataaaaatgttctcgcatggacaagttcttttaaaaaaaaaagggaatttacagacccccctcccaggtatcaatttgtctcttgctttcttcttggcagcgttgtgtcgggggcgcctctgtggtgggggccggagcccccgcctccgcagccctagctacagattccccttgccctacctttttcgtcggtggcggcttcttctttggtcgtcgcccccgccacgtcggatccctgccccggcgggtggcgtggatgcggctgctcctcccggctgcgcctgggccggtgtcttctccttgccggcgccggtcgcccttactggcgtacctccggccacgacagaatgccttatctgctgtctctgtcttcctggtcgctggccccgtctccgtcgctctctcccctcttcctgttccccggacccttttgccttctacccccttgttccgcaattcccgtcctctctctctgctccctgtttttcttcattctgctgttccctagctcgttctcccccgcctgatcgggtgccgtgcgcgagggttgcgtcaattttttttctatcagtcttccgtctgcgcggtaggcgtcttggtcccagacgccatgccgggcacccagagggccatccatctcttgtcttctcctttttctttctctctcttgcgcctctttgccgcggcctcctctgcccccgctttccccgcccttccctccttgatcctttttattcttttttctctcattatctatttctccgtttcaccctctctttgttgatttgcttggctttctctcgcttctcttgcccatccttcttcgtggggggcgggagcatttcccgggtatgaattgtttgccggtgccggttgtgcgtgcttcccttgcgtattccagggctcctcgcggcacgaaagagggttactctttttcttcgtttcatcatggacgctcagagagctctactcgacgaactcatgggtgcagcgcgcaacttgacggaggaagagaggaaggggtacaaggaagtgagttgggacgataaggaagtgtgtggattctacatggtgcgcttttgccctcacgatctctttgtcaacacgcgcagtgatctcggaccttgccccagaatacatgacccgaagttgaaagaaagttttgagaaatctccaagacatgatgcatatgtaccgaaatttgaagctgaactttctcaattttgtgagaaattggtgatggacttggatagaagagtaagacgtgggcgagaacgtcttgctcaagaggtagagccaacaccaccaccaccactgacagccgaaaaatctgaacagctatctgtgctggaggagaaaataaagaaccttctggaacaagttgaatctcttggcgaagcggggaaagttgatgaagctgaagctcttatgagaaaggtggagacacttaatgctgagaagacagccttaacgcaacctcaaaatgataaggtgttgatgcttggtcaggagaagaagatggcactctgtgaaatatgtggttcttttcttgtggcaaatgatgctgcagaaaggactcagtctcatgtcacaggaaagcagcatgttggttatggaatggttcgcgacttcataaatgagtttaagactgctaaggagaaagctaatgaagaggaaagattagctcgggaaagagaggtggaagaacggaggaaacagagggagaaggagtctgagaggagacgaagtgattcaagtgatagggataggcatcgtgataaagatcacaatagggagagggataggtatagagatagagactcagatcgtgaaaggtctcgggagcatgatgttagaggttatcgagatgggggaagggggatggattatagggtgagaaatggaggtagagacaggtaccgtgatcggagcaggtcacgctcccctgttaagcatagccacagaaggtcttcttgaagtccaatttgctcaaattagtggaatttcttgatagatgtcagaattttattaaaaaaaaggtagtatttaatatcccaagacttacataaatgtgcttttggagagtttttttgtcatcatcaagggtgaatttactcttttcccatctcagagctttgttgagactatacaatctccctttcgtcaatattattaatggagaaaagggttgaggtaggtatttccctgttgtaatttttcttacgatttgttttgccccttgatacaagtgatttatgacgattcatctcc

SEQ ID NO: 42433 - DNA, 662 bp, Glycine max
  Clone ID: PAT_MRT3847_138317C.1
ggcccagtcgcaccttcgtaggagccttacctctctctctctctctctctctctctccattccgtagtatccctctgttcgacccttttacttagcattccctgtttccggtattcgctccctttttttttctgcattctgtctggttttacttagatctctgtcccgcaccagatctggtgcagggtgagagggttgggttcattaattttgtatcaatcttccttctgagcggtaggcgtggggataccagagtcttttcgggaagcaagagagggttctctccgttttcaatagatctctcactgtcttcttttgagggggaagccggggcctcggcctcggcggctttcaaagcccccaccttcacagccctatcaacaaaaccctaaccctatttttttcttcttcattttctaattcaattttgatcgtcgccgtcactagagatgcctgtcctggcttgttgcgtggatgctgcagcacctcccggctatgcatttgccggtgacatctcttttccggcgccgatcgcctttactggcgtacctccggccacggcagacgacaccaacaacagcaacaaccattggtcgccgtctctctccgccgccctttacacgtcgaccgttggggcggccctactttgccgtaaacaccgc

SEQ ID NO: 42434 - DNA, 590 bp, Glycine max
  Clone ID: PAT_MRT3847_138318C.1
tttttgaatatctcaagatcattaattttcatttccctgctttgttattaacacatttgtataattatttaatgcttatggattgttattcgattcatattattataaatacataaaccaacgaagtctattagtccatacaggaacacattttacactttaacagcctacttttctgagcaaccgacttaaagctggaaaaaccagtaacttccctgcctgtaaccaaggtggtgatgctatacgtgccttcgaaggcatatataggttctatgtcacataatgcctttgccactagaaaatcagccaaaattccattgccaccaagcaattctctccccaaggcagctgtttctcttgccctcagggtaatccacgacttccccaagctagcatgacctggagtcattttaccactctcgtacaacttgcacagacgccaaccaacaagaatcattgcttgaatgttacctagcatttgaacaagtttttgatgcctgatttggaaaactactaatgcagctccaaaatgcttcctctcctttaggggcctatgacacatattatagatccccatcgataaaccaata

SEQ ID NO: 42435 - DNA, 281 bp, Glycine max
  unsure (1)..(281): unsure at all n locations
  Clone ID: PAT_MRT3847_138319C.1
ggtgaaggaaacaccaacaccaactatcccataccatgatcctcattctcaggtgtgaaaaatcctttggccaaataaaagctaaatcttatttacatcaataaaaaaaaactgaattaatacacagtacctattgaaaataaaatggggtgaatgaaaccaaaagtaatgcnncgcnnntattcaccaaaaaggttcatgcatcatctgcattctggatacgaccacgcgtcccacccacccaaccccacaccccacctcaactctnnctctcctttcca

SEQ ID NO: 42436 - DNA, 1254 bp, Glycine max
  unsure (1)..(1254): unsure at all n locations
  Clone ID: PAT_MRT3847_13831C.1
ctcgaatccaacccccgcgccctcattcgcgtccgaactcgacgtcgtttcattcccctctccaagaaaacatctagctgaagattccaatcggagctcagaaaaaagaaacctaatcgccgatcgcgtcgccgtcgcgccgaaagttcgttgttgttctgtgaaattgccggttttaatttttcgttttgtgataattctgagaattagtaacaattattgtggtttttttttctgttaggtaacgttgctgtggttctttttttttcttttttcttttttataatttcgttgccgttttgtaggtgaagatagtcgttttggttgctgctgtgttttttgttttctggtgttcgaattgtgtgcaattttgaattctacttgttagttgtgtaatttgtttgttttctatcacttttgtgttctggagttaaaatgttttctaatgagttaagaagcgtttgcttttgtggtacgtagctgtacaatacgatgccgtgaattccaaggtttcggtttggtttagtttaatttacgaaaaccttgggtttctggcatgaattgttgtctttattggatgatctacggtggcattatgtaggtcgtaatatcataaaaattgagtaagaagcgaagccttgattcaaacggtggcatgagggttcgcttagttcgaaatgaactgcacaaggtgcagttcttctatcctatggtccgtatttaattttcggattttgttattgaaattatgattatgccaattcttaattttgtgcactttggattatgacattccatatcctcgtattatgttggaatgttggaaaattgtaaactaacctttgggtcataatttggnttncccccaacttnttaaaattncccctgcaaagttttaaaaatcggtgtttaattggacaaactgtgaacctgttcgatcatatttcaactcctgttggatcatcaatttaactagtttcaaactatgatccaaacccctgttcaatctctgcttcagtttttgaaacattggattgttgtgcattgtgtgaatcacaggccttttgtggcttgtgataagaaaccaagccaagagtaaggcagaatgtagtttgcggttaaagtaataagatagttggaaacttggatggataggaatgatctatataggtctctgagagaaaattttaggagacttgatcggttttggttctacgtagaagaagtctcttgcaggataatgcaatttgcatc

SEQ ID NO: 42437 - DNA, 377 bp, Glycine max
  unsure (1)..(377): unsure at all n locations
  Clone ID: PAT_MRT3847_138320C.1
tctagctatgtcgatcgaactgtccaaggtcctgtcactgcaaaggaaaagctagaaaagtagaaggaaacaaaacaaagaatataatgatttgaaaaaaataatgctaatgaatgatacgaaacagacccgaacaaagttgcccggcgttgtttacgaactctggtgggaatcgtaggactggcatcacgtaaagcttggtaacgcctagcaaccgtatcgacaatatagtggttgcgtaggggtcttgtggagtgacacatcttagcaaatgtagcgagatgccaaatattggttagaggcgagtaacaaaacacntgccgccagtaacaacccaacgatatggaaaccgggagtagcggggttagcgtgggtgg

SEQ ID NO: 42438 - DNA, 261 bp, Glycine max
  Clone ID: PAT_MRT3847_138321C.1
ggtcaataaaagacttttaattccacctattggaagaacaaccttgtccaccggcccaagaaggggccaaaacccctaatttaatttccttccctatccggctgcatggaaaataaaccaaacttttccggatttaccatattaaaatgggaatgttccccccaaagaattgaaaaaggaaaaggcctttttaatcctataatgggacctactagttggtggcataatcaccatctttaactactaataactgtccaatat

SEQ ID NO: 42439 - DNA, 294 bp, Glycine max
  unsure (1)..(294): unsure at all n locations
  Clone ID: PAT_MRT3847_138322C.1
gtaagntcggaattcggctcgagatttaactatagcctttacattatcctctactaggtacttttatatttcgctcccacttaatatctactctcctctgcctagaagcaataatactatcactatttgtcataacttcaacatccacattaaactccaactccataatctccataaccatcccaattaccattctagtttttgcagcctgcgaacaccagtaggtttagccttactagtgaaaaatttcaaatacttacggaacagactacggtacaaaacctcaacnttctn

SEQ ID NO: 42440 - DNA, 483 bp, Glycine max
  Clone ID: PAT_MRT3847_138323C.1
gaatagaccaatcggctagatattaatttaggttttcgtccaagtttacatgtatagattttaatgcttgacaaactgccaaaaatactcataacgatgctatgattgatgtgagaatacaaagaatggcaactgaaatttctaatggctaagcagataaaaaaaaaaaaaaaacccttaatcaaagttcaaaagaattacgtttttctatacctaactggtcatttatccagctcaccagaatgtcccaagattttcaagacaaactatccctccaacagataagtattgatcttgttcaaggcatatctttatattaaaaaaacaacaccaactggaatgatgtttgcggagactcttcatccattgctcttcaaatattgagcagtctgctttctcatcttttcttcaatgctctgccagtaactttggcagctgcaatgcaacatctttaattttattatactgggaactgtctcacac

SEQ ID NO: 42441 - DNA, 148 bp, Glycine max
  Clone ID: PAT_MRT3847_138324C.1
ggctgtctcaatgatctctaccccatctgctaccactgtcaaccgtgccggagcccgcatggctgctccattcactgacctcaattacatggctggctttcccaccatgaagaccaaccgtcacgttacctccattgttagcaacgcg

SEQ ID NO: 42442 - DNA, 271 bp, Glycine max
  Clone ID: PAT_MRT3847_138325C.1
gggtgttttgacatttgaggatgaaaccacctcttctgtggctcctgctaccctttacaaagctctaattacggatgctgacaacgtcatcccaaaggctgttgacgccttcacgagtgttgaaaacgttgtgggaaatggtggccccggaaccattaagaagaacacttttcttgaagatggataaaccaactttgtgtggctccaaatagaagcgattgatgaagctaacttaggatatagctatatcgtacttgggggagaaggggtg

SEQ ID NO: 42443 - DNA, 1061 bp, Glycine max
  Clone ID: PAT_MRT3847_138326C.1
ccacgcgtccgggcaataatttctctgattgtgaattgtgatgcgatcgaatcggagcatggagggaggcaacagaaaagggtacgcgtggccagtatctgctggattcaacgccgctcgtgcagccatttccgttaagctccctcttcaccagtttgtcaggtacgggatggtgttattgttcaatgtcaccatgtgggcttgttatgtcaacagccttaaagctctctcctctcttcaggcaactgtcaccaatttcgctaccaatttcatctcttccggtttagccggtttcgtcttctttcacgaatcgctctctttccagcacattgtcacctacctacctggaagtgttaggtgatgtaaaggcactgcattttcaacttgggtgacctcaaactcaagtactcaacaacccttctgcaagttggaaagatcagagatcgagagatgggaaagagcgtgggggagttgggagtggaggagttggtgaatgcaggaggcctaagagtggaagaaggcaatgaattgtaccatgctttgagggatatcctttctgagtttcagtctccttcacacatatggcgccaaattgtgactcggagactgctcaaaccatcctatccacactccttgcatcagcttctctactactctgtttatcactctcaacattcttccctcccactctattgcttgccttctctagatcaatccaaacgctccaacctaggccgtctcatggaaaaacatggacctgagcttttaggaccttcctacaaagaccctattactagttatcctctatttcacaagttttctgttcaacaccctcagctttactggtcccttgttctcaaggaactttcagtttcctttgttgaacctcccaagtgcattttagatacttttgacccttctaaacatggagggacttggctccccggttctgtccttaacattgctgattgctgtttgcaacccagttacacccccacaaaacagatgacactttaccatcgttagagagatgaaggtttgatgatctcaggttaatcata

SEQ ID NO: 42444 - DNA, 437 bp, Glycine max
  Clone ID: PAT_MRT3847_138327C.1
ggaaagcaaggtgatttgaaaaaaaacatcttaagtaaacatgattttaaaggaacctggtttttggaggagtttttttttttttttttaaaccagtcaaatttcaaaaccagccggatcccttgtaggcgttattcccctcaaaggtttgtcccttccaaaatttggggcgcccccatgacggatggttcccgctttaaatttcttacagggtggggacctaaaaaagggggcggttataagacaaaaatcccaaattttattatccccccaaccccctttttaaccttccccccaatcctagggtcccatgattccaaccgtagccggtttcacccgcgaaaaaattgtgcccccgcaaaaacactttttcgcttttgcaactttttgtgcttttcccccctggaaaaataatgcccccaccaagggagggtttg

SEQ ID NO: 42445 - DNA, 168 bp, Glycine max
  Clone ID: PAT_MRT3847_138328C.1
tgggaaagcaaaaaacaggtaacgctgcctataagagagaatggagtactctaatggattccctataaaaagagatgttactcttcaggaacttaccaaaaggctcgctgagtttgctgaaataatatgattgtatcattattacaatccctttaatcatattatacc

SEQ ID NO: 42446 - DNA, 307 bp, Glycine max
  Clone ID: PAT_MRT3847_138329C.1
tcccgatcgacccggcgtcctcttctgcaggattctggaaaatgccagttttccttttccgcccttgttttccataaaacatgtttggatattgtgatgaggagtactgtctgaacagtacttcgtatttttttttaattgccttgtttgccttcaacttccttgattttcatagtttacatgggtgtgtgtaggggtgtgtgtgtgtatgtgtgtgggttagggcttttttcgttgcatgttatggttctgttgacatatgatccccacaaactgttgtagtgattggccaggccttgcttttttt

SEQ ID NO: 42447 - DNA, 1975 bp, Glycine max
  Clone ID: PAT_MRT3847_13832C.1
ggaaaattgtaaactaacctttgtcaattgtccattatctgcaaagttttaaaatcggtgtttaattggacaaactgtgaacccgttcaatcatatttcaactcctgttgaatcatcagtttaactcgttttgaattatgatccaaacccctgttcagtctctgttcggtttttgaaacattggttttctgtgcattgtgcgaaccacagacctttagtggcttatgataacaatctaagcgaaaaataaggcacaagctagtttgcgattaaagtaataagatagtgggacacttggatggataggaaggatctgtataggtctctgcaagaaaatgttaggagactcgaggcaggtgaatgactatatagtttaggttgtacatagaaatctcttgcaggaaaatgcaatttgcatccaaaggggactacccagttgcagaaagctcctgctgcatggatactattactcttttgaagggaagaatggccaaacgacatatctctgccttacccatctcaatttgtctttgttcatcctctactgtgggaaaatgctttggaaccagttttgatgttgttaaagcttaatgtgggatatcccttttgtattattcacaggaaatatccatttgtttggctcgaagtttatgttcagtgaaaaggctggcttgatgccactcccattggtagatgtcacatgaatactcagtactatcagtgccaacatttccatctttcttcttccagcctttgctttgtcttggttggtatagaagtgacaatccagccgcactcttaacgtggataatgatttcatttttgaatattgataacctagtcccctggagtagtgttaatattctttttggcagtgaacacacagtccactgtcaagttacctagttaatgaagtgaagggttataatttgatccaaaggaatctgccaaggtgcagatgatgtggagtttttatgttcttccttttggtaagtttcagttcttggaggagtcaaatgctgaactgcgttttaaggttggagtgtctattgattggatcagtatagttggatttggttcagagagttcttcaaggattcaagtgaccattcaatgctattggtttctatttactgcttgaggctgtcaagtaccccagtgccaccttatagtaatatgtggaattcttgtatatacactagttttgatgtgttctcctcttggagtagtgctgattggagctgcattaatcgattttgttgttgctgatttcaattggtctgcggcagtatagaagaaatcaacgatgcattggtgtttacctggcttgatggggtgactgaatatgcctttagaagttttaggattatttctaaatgtgttcctacatgcaggtccctaaagcttacttcctgcttctagatagttggtaatcttatctgagggtagtagctagtaccatgggagaagtggcagtaatgcactctgagcctctgcagtttgagtgcaatgacattactgtgaatatgactgagaaggaagtgtatcctccagaatcaaatgtggatcacttacctggagaagaatcgagtcaatcaacagaccacaaaaatatcaatgacttgcaagagagaggatatatggagtatggatgtcagcattaccggagaagatgccgtatcagggccccatgttgcaatgagatttttgattgccgccattgtcataatgaggcaaaaaatgatatcaacattgatcagaagcatagacatgatattccacgacaccgaagtcaaacaggtgatttgttcacttttgtgggactgaacaagaggttcagcaaaactgtataaattgtggtgtttgtatgggcaagtacttctgtggaacatgcaagctttttgatgatgatatatctaagcagcagtaccattgcagtggctgtggaatttgcagaactggaggaagcgaaaat

SEQ ID NO: 42448 - DNA, 317 bp, Glycine max
  Clone ID: PAT_MRT3847_138330C.1
acgagtctttttgcaatagcaggggaaaaaagatttagattttgtttacctttgaaaactatcctgtctctataatgggtaccatttttgtgagcttgcacatataaatttaagagtagcttggatttccccgtcttgatcttttagaatcccttgacaaattttttcatgatttgtttaagctgcacatccccaatgtaagtattcttcatgttttcctcatgacctttgaggcttgattctcagcatctcaccttatttctcctacggttagttatgacttatgaaaggtctatcaagagataatttatcagagc

SEQ ID NO: 42449 - DNA, 1244 bp, Glycine max
  unsure (1)..(1244): unsure at all n locations
  Clone ID: PAT_MRT3847_138331C.1
tctatctattcctgagactgagtctgcccataccataatttacctcatagtgtcgacatggtttgcgaggaagagttgttgattgaaaaagtgtgctcgatctatgaacaaatctcaagcctcgagagtctcaaaccttgcaagaatgtcgacatgcttttcaccaaactagtcctgacatgcatacccccaagcccaatcgaagtcacaaagctaaacaaaaccgttcaagacattcgatcccaccttataaaactatgtggtgaagccgagggacatttagagagccactactcaaccatcctaggctcataccacaaccctcttaaccaccttaatattttcccctattattccaactacctcaaacttggtctccttgagttcactatccttagccaacactgcacccatgttccaaccaaagttgccttcgtgggttcgggaccccttcctcttacctcaattgtgttgcaattgtgttggcatcgaaccaccactttccacaactatgacatggacccttctgccaattccaacgccatgcgcttggtttcctcagaccctgacttgtccaagcgcatgttttttcacaccaacgacatattggaagtgtcgaccgctttgaaggagtacgaggttgtttacttggcagcacttgtggggatggacaaggaagggaagaaccgaatcattgatcacttggggaagcacatgaaccctggggcacttcttatgctgaggagtgctcatggggcaagggcttttctctaccctgtggttgagccttgtgatcttcgaggctttgaggttctctctgtgttccacccttccgatgaggtcgtcaattcggttgtcatcgcacgtaaattatatcatcctgtgcctatgcactctcttgatcagcaagcccttgttggctctatgatcctacctaacaagtgttccgagattcaagccttcaaccctctcaaccatgggaacatgattgaggaattggccgttgaggagcaactctcgtgaactgcatgcttttcttttatttatctactccttgtcttgctttagatgggagattactggggtcatgtggtagcaacttatagttacataaatatttccacttaattgtgtccgactgttttgtatcacatcgagcaaaacttaagtgttttacataatgttgttcttaaatttgcaataaatatgaaaagagattattatgtgttgtaangnaacncaat

SEQ ID NO: 42450 - DNA, 117 bp, Glycine max
  Clone ID: PAT_MRT3847_138332C.1
ctttcattggtgtggcctagctgttatctcaatgagaaagccgtcatctcggcaattgcggactttgcgcattggggttcccttgtagcttgtaataaccttctgttatgctacttc

SEQ ID NO: 42451 - DNA, 1866 bp, Glycine max
  Clone ID: PAT_MRT3847_138333C.1
ggctcgagggtaacaagaaagaaaaataaaaaaaaaccaaagaaacagaaatgttggagtcaaaagactcgacgatgaagctcttcgggaagacgatccctgcgccggagatctccgccggagctccggcattgtcttctggtgatgctgatgctgttggtgttgttcagaaccatggttcttcaagtgtcaatggggatggtgaagagcacgagattgagcaggacataatgggagaggaaacaactgagagtgagaaggaagatgaagtgaccaatcttgatactgtctcaagaccaggggaagtgtctattaacccctctaccaagaaggaggatcttacattgaaaacttcaaaaaagaccgaacaagaacaaggtgaaaattcccaagataaaacactgagaaagccggacaaaatactgccttgcccccgctgcaatagcatggataccaagttctgctactacaataattacaatgtcaaccaaccccgccatttctgcaagaattgtcagagatactggactgccggtggagtgatgaggaatgttcctgtgggtgctggtcgcaggaagaacaagaattttacttctcagtatcgtcagataactgttcctgaagcagcactcttgagttctcagccggacttgccaaatggagtcagtcatccttccttgaactgtaatgccacactccttgcatttgggtctgatacacccttgtgtgaatcaatgacatctgttttgaaccttgctgaaaaagcagtgaacaattccacaacaaatggatttaatggctcagaagaactagaaattccttttgcttatgttgctggagaaaaagtgaatgatgattccaataaatcttctgacatgtcaacaaagccaatggaaggtgaaaccaccaataggtcccaagaacaagtcatagagaattgtcatcccttcccacctcatgctccctactttcctggtgccccttggcctttcccatggaatccagcactgtggaactccccggtaccatcaccacctgcttttttcccacaaggatttaccatgcctctctatcctgcagcagcttattggggtcttactataccgggtgcatggagcatcccatggctagcgcaaccatcattaccaaatagcacagtgtctaactctggtccagaccccattgcccgaaccatagccatgtcttgattgccacgtcccaaaaagttaacaggaggaagtggggtttcaacaagaggactcttattgctgttcaaccatattgcaatggaaagtgagggaaagtgagataaggcttctagacccaaccagttactgttgatgtctccttgatccattagccaacaaagaatagtgggtttcctcttgggggaatgtacagggcagtgggatatgcctaaggggaaaagcaaaagtggtgaggaaaagaaagtgctctatggatgtgttgaaagcaaaatgaaatgacaatgtccaagataattagcttgatgcagaagatgtgattcaaatgtgaaagctaatgaagatagggttttgcgtgactcttgtggtagtttcaaggaacaatcctaacaaaaagaaaagcgtgagccatatcagcaatactcacaagatattgtcaaacatatttcttttaacacactttatattatgagtttaatatcatattaacagtataaaataattttacattattatttaattataatttttgagggtatctcacaatagattgtggctcgacaattttactccccttttgtttcgatgcctttcttagttcttatttcttgtacataggtgattttatgtggcctagagagacacaatgtatttgttttcc

SEQ ID NO: 42452 - DNA, 235 bp, Glycine max
  Clone ID: PAT_MRT3847_138334C.1
cgtaagctcgaattcggctcgatgttacagatgcagcgaagcataatttcaatgcatccatattaaaacccacaacggtactggtacatctgagcagcaaacacaacaacagaaaaagaccacatgtttgatctcatgtatgcctatcgtgccttcgtctctttgagacgtgggtgatggtatggaagaaggtgaattgctcggaacccgagatgattaagcagccctttcgatg

SEQ ID NO: 42453 - DNA, 192 bp, Glycine max
  Clone ID: PAT_MRT3847_138335C.1
aagtaaatatgacaataccataaatatttatggggaggggaacatgactgaatacggttacaaccttccgtttgtggaaagaaacatccacagccatgaatgtgcgttccatttaactcatgtaggataaagaaggatactatatgtatccatcgggatattattacacttgtagcgtttcttgcactgcgt

SEQ ID NO: 42454 - DNA, 306 bp, Glycine max
  unsure (1)..(306): unsure at all n locations
  Clone ID: PAT_MRT3847_138336C.1
ttgangcgnganntgacgtgaaggttaacgngcnagcggaanaggatgtagttgcacgnacagaacatgtntgctcaattgttgcctcttgctttgcctgntccgncgatgcctngnatgngnaggcccaggaggtatgggnggcggcttgntcctccccctccatgggtggnctgggggtncccccnntgcactccttatggcgtgcctaccgtgggcagcngtttttgacgggtttngngtgancttggcccctgtgaagngcnatgtaggatcttcgaagttttgtgtagaanaatgtcttgt

SEQ ID NO: 42455 - DNA, 488 bp, Glycine max
  Clone ID: PAT_MRT3847_138337C.1
gcacgcgatgctcggctcggaattcggctcgtgaaccatctgagcagcacgtattttctataactaccaacagaaccaaacccggacaagttacagacaatatggctgctgcagtcacgggcacccagaaccccgtcgtcgaggcctctgctgctgaggagaagaagcctgtcttcgtgactgccgctgagaccgtcactgctgccaaggagaacgtgttctacatgtttggcggcggatcgatgatcgaggccaagaaggacgactaccaggataacgaccgctctggctgcgcataggcgcaccttgagaaggccactgtgggcggtgatgatgatgacaaggtacaggaggacgaagccgatgtgcacttacagcccgatgtgcacctcaccgagctggtcgacactgataccaacgatgaggccgatgagccgacttttcagatgagggccaagctcttcaagttcgaccgctagagcagggaa

SEQ ID NO: 42456 - DNA, 1972 bp, Glycine max
  Clone ID: PAT_MRT3847_138338C.1
ggggagcgtgctattggggaattctgccgtgaagatgatgagctttttctcaattcaaatgctcagggcatggcattttctgacaaaaataaacagcttcaattgcctgggaaccacattgaaaatcacatgcatcaaggccagcctaatctggggaattcttttttaagtggtataaagcagcgattactttcattcatattccagggactatggaatgaagaaagagatgataccttgaggatccaaaggctcaggaagaaattttacttccactttcaagattatgttgatttgattatctggaaggtgcaattcttggaccgacaccatttactaatcaagtttggtagtgtagatggaggggtgtcccgaaatgctgatcaccacccagcttttgttgctgtatataacatggatacaactgaaattgtatcattttatcagaattcaccagacgagctttatctgttgtttgagcagttctgtgaccacttccatgcaacatcaaggaattcaatgtatatgaatttcatatcttctcattcaaataatatccacgcactggaacagctccggagcattaaagataaggcaagcagctctgcacagtttgtgaagaatatgcttgccgctttgccctcccacttgttagtcacagcatccttctccttacttcgatgattctctgttcccgtctgatgatcaacattaccattgaacttagtatgcttgtatgtttatgattttgagaccttcgtattctaataaaattaacgtcataccagatccagggagcgttaaaagataaggcaaggaactctggacagtttgtgaagaagatgcttgcctctttgcccttcagctgtcagtcacagagtccttctccttactttgaccaatctcttttccggtttgatgataagctgatttctgcaactgatcgacataggcaatcaactgaccatccaatcaagttcattttaaggaggtatccgtattctctcaaatttaagatcaaaccaggtcctgaagctggcagtatggatggtcgtgcaaaaaagatctcttcgtttctttttcatccaattttgccccttgctctctccgttcaacagactttgttcttgcagccttcagttgtaaatattcactttcggagatgagcgtagatttatagattacaaaaaaatgagattagatttacttgtcttccactgaatcaagaggatttattttcagtcggtacttgcaagccaaaatgtatctcgatcagattctaatgattgctgtgacaatcgactctcttttaaattttggtcattttattttatttaaaaattttaaactaattaccgaaaaatttatcattttaaatatattggaaaagtattatatgcaaaaataatcctaaaacattgtgattcttcactttagtactttttaattctcccccgtcgttgcagctgatttctgcaactgatcgacataggcaatcaactgaccatccaatcaagtttattttaaggaggcatccgtattctctcaaatttaagatcaaaccaggtcctgaagctggtagtatggatggtcgtgcaaaaaagatctcgtcgtttctttttcatccaattttgccccttgctctctctgttcaacagactttgttcttgcagccttcagttgtaaatattcactttcgaagatgagcgtagatttatagattacaaatgagagtagatttacatttacttgtcttccactgttaccgtctttactgaatcaagaggatgtatattcagtcggtacttgcaagccaaaatgtatgtcaatcagattctaacgattgctgtgacaatcgacgctcttctaaattttggtcattttattttattttaaaattttaaactaattaccgaaatttttatcatttaaaaaatattggaaaagtattatttgcaacagcattctaatt

SEQ ID NO: 42457 - DNA, 604 bp, Glycine max
  Clone ID: PAT_MRT3847_138339C.1
ttgctctcccttttcagatcctctcctcgatttgcaaacgctcatcaaatctcagcatcaccatcaccaaacctgtaatcgaagcagaaattccaaaaatcccagcatcaacatcacaaactaacaacaacagtacaatatttaggatcaagaagccaaaactagattccgcgatggtcgttgattgtgtgcaagagagtcatgtcgagaacatgggaaggtgattgtgggtgcggcgttgcgacagctaacagatcggtggccgcggagttgcgactgctaacatatgggcgaccggggcgttgcggcgcaagtccattatgctcactctgcgtttttctccgaacttttgcctcgttcttgaaattcttttcctttcactcattgcaggttagatgaagagaggaatcccaattagtttaaaactggaagtgattgcataaaaaaaaaaaacagaaagtgacaaactagtgcttccaaatatacgattatcacaaacccactcaatctggggtccttttcagatgtgattcattcccatctcatttttttttttatttccagccaacaattccttttcttggtttttattctctctctctct

SEQ ID NO: 42458 - DNA, 162 bp, Glycine max
  unsure (1)..(162): unsure at all n locations
  Clone ID: PAT_MRT3847_13833C.1
ccccgggcccctgcaaggaanaaaggcaactgcctctactctctgactgctctgtcttgcacactctaagtaagattggagaaaaacctgaagatgactgctccagagagctggagctctccagcagatccagaactgacagtgagcaagctcttgccaaaa

SEQ ID NO: 42459 - DNA, 741 bp, Glycine max
  Clone ID: PAT_MRT3847_138340C.1
ccacgcgtccgggaaaaaagactccttcaactagtactgcattctttcttttcttcaaatggtagcaagaggcatcaagagcaaaagacattgttaatttcggagatggcgagttacgaggctattaagaactttgatgatgatgatgatgaagatgtggagatggcactcctccataaccagatctctgaatcaagatctgccactgtttctcccaccattgcccaaactaccccgcttcaccttcacatcaacaacattattgaggaacaacacataatcgcaaggcaccaacctcaaccccaacccaaatctccccgtctagtttctcttgatgtttttcgtggtctcaccgtcgcgcttatgatacttgttgatgatgctggcggactcattcctgcactcaatcattcaccatggaatggtttaacgctagctgattatgtcatgccatttttcctatttattgttggtgtttcgcttgcactcacatacaagaaactgtcttgcggagttgatgcatctaggaaagcaagtttacgggctctaaaacttcttgtgttaggccttttccttcaaggaggttatttccatcgggtgaatgatctgacctatggagtggatttgaaacagataagatggatgggaatactacagagaattggggtagcatatttggttgccgcactgtgtgaaatttggctcaagagtgatgatactggtaattcaggaccatccctg

SEQ ID NO: 42460 - DNA, 2453 bp, Glycine max
  Clone ID: PAT_MRT3847_138341C.1
tcccggggacatagactggggcccaactcctctaacatttaccgtgtgttgatgtggctatttaccaatcccgatagtcgaaaattttctccatcttctctcatttttcatctcacccttcctctatttccatcatttcgtgacaacaacaacataaccctctcgcccccaacacacacctcttctttttaagggtttatcttaaaccaggatttttggcactaatttctctatgggagaagcaccagcattgcttgttgatgacgtgcaggatggggctctgaatggccttgaattgaaaaatggaacttgcaaaacaactgctactgttggcgataagatgtatgtcattggtggagctgatgatggaactttgtccattgaagttcaaatttttgacggtagtcttggagaatgggttcgtcccactgtgcgtggcaccaaacccgtgttgtgcaatggcctctcagcagtgcctttggaagaccgaatactgattcttaagaagggttctaagcctgatgatcggatatggttcctggagattgacacccaatatgttaggcagcagcaaaaaattttggggactgaggtagttgcatggagtaaaggtgtgataggcaatgctgagaagcctgttgttattagtggtccttctggagtaggcaaaggaacactgatatcaatgcttatgaaggaatttccatctatgtttggtttttccgtgagccacaccacccgtgctccaagaggtatcgagaaagatggggttcattaccattttactgagaagagtataatggagaaagagatcaaagaaggaaagtttcttgagtttgcttctgtccatggcaatctgtatggaactagtgttgaggctgtcgaactggtagcagatgcagggaaaagatgtattcttgatattgacgttcaaggtgcaagatctgtgagggccagttctcttgaagctatattcatctttatctgtcctccatcaatggaggagctggagaagcgccttcgtgaccgagggacagagaccgaggaacagatccttaagcgactacgtaatgctgaggctgagattgagcaagggaaatcttctcaaatatttgatttcatcctatacaatgaaaaacttgaggagtgtcatgagagacttaagaaactattgggacttgacggtttcgtcactgctccacctaaatccggccctatagagattgatttaccaatggatcattcagtgtccaaaattgataacaaaatcatcataaactgcatctcctcaggagagaaggaatcaaagaatttgatcattttgggatgtttcctcactaaaagggggtgcacctggacggacaagaggcctaaatttccaagccattggcctctttctcaaatggcttgaatgggatagatcaacttagctaacattcaatgcacttggccaactaacttggtattgaagaaatgggacacattgataaggcattagattcacttcttaaacatttttttaagctttttgtatgaatttctttgtacattctttgattattatgacttttgagttgacttgaaagatggcaattgctaaattattattccctacataggcaatgagattacttgtgtcttttgtgtgtcaaggaaggcaaaatatggtgtacgtttctctattccccccaccccaagatctgttatagtaagggaattgaatggagagttggcaattgaatacttcaaattcaaagatgtctgtcagatattaggtgttatactaggcatggctattcattgattcaagccatatgttttacacattaaatttgttggatacatgttttatgtcattaccatgttcattagattctaacagctatatggcgttagttatgctaacaaccatttatttttggcaacgacatattcactatggaggctttgccccatttaactcaccattagtgttacatcctccaaagggctcaggagtagggagtgctttcagccccacataatggctgtgacacgaatcaatttcgtatctctgagcattgagacagtccaagagccttgtcaagttgatcaaccattaggtggtccagaaactatttttaagtttataattgcgtaagggtctgggcagaacagaactgataaagatactgtgataattggacgcaggctcgaataattgaggaatgatgatgatataaaattactaaatactatgtgaattgagctctcagaagaaaattgtcgataaaattttgtataaaatagttaattatgtgggaaagatggtttttttcttataaaagaaaagtttaagtgagttaaaaatcaaaagtttatcaggaataaggtagatattaaggcgttcaaaaaatgtttataaaagtttttacagattattccccaataacatcttcccataattattgttt

SEQ ID NO: 42461 - DNA, 2074 bp, Glycine max
  Clone ID: PAT_MRT3847_138342C.1
ccttttcgttcgattttttacatcacccttcctttgtttccatcatttcgtgataacaacaacaccctctcgcctccaacacacacctcttttttttctttttcttttaagggtttagcttaaaccaggattttgggcaccgatttctctatgggagaagcaccagcattgcttgttgatgacgtgcaggatggggctctgaatggccttgaattgaaaaacgtaacttgcaaaacaactgctacagttggcgataaggcgggttcgtcccactgtgcggggcaccaaacctgtgtcgtgcaatggcctctcagctgtgcctttggaagaccgaatactgattcttaagaagggttctaagccagatgatcaaatatggttcctggagattgacacccaatatgttaggcagcagcaaaaattttggggtctgaggtggctgcatggagtaaaggtgtgataggcaatgctccacacacctctttttttttctttttcttttaagggtttagcttaaacgattttgggcaccgatttctctatgggagaagcctgttgttattagtggtccttctggagtagtcaaaggaacactgatatcaatgcttatgaaggaatttccatctatgtttggtttttctgtgagccacaccaccctttctccaagaggtatggagaaagacggggtccattaccattttactgagaagagtataatggagaaagaaatcaaagagggaaagtttcttgagtttgcttccgtccatggtaatctgtatggaacaagtgttgaggctgtcgaactggtagcagatgcagggaaaagatgtattcttgatattgacgttcaaggtgcaagatctgtgagggccagttctcttgaagccatattcatctttatctgtcctccatcaatggaggagctggagaagcgccttcgtgaccgagggacagagaccgaggaacagatccttaagcgactacgtaatgctgaggctgagattgagcaagggaaatcttctcaagtatttgatttcatcctatacaatgaaaaacttgaggagtgttatgagagacttaagaaactattgggacttgacggtttcatcactgctccacctaaatccggacctatagagattgatttaccaatggaccattcagtgtccaaaattgataacaaaatcatcataaactgcatctcctcaggagaaaaggaatccaagaatttgatcattttggatgtttcctcactaaaagggggtgtacctggacggacaagaggcctaaatttccaagccattggctcgttctcaaatggcttgaatgggatagatcaacttagctaacattcaatgaacttggccaactaacttggtattgaagaaatgggacacattgataaggcattggattcacgtcttaaacattttttgtaggcttaattatacaattggttccttaattataattaaaagttcaatttggtgtctcaattattaaaaaatttaatatggtccctcaattactaaaaagttaggtcctctaattatttgaaaacactataatcataccctttttgtcagttacactagtttgattgatgtgtttgtaaactaacagcaaggttacaattatagtgtttttaaaaaattaaaagtcttaattgaactttttaataattaagggacctaattgaacttttaattctaattaaaggatcaattgtataattattattattttttaccctcgtggcgttctttgattgttatgactattgaattgacttgagagttggcaatcgctccattattattccctacacaggcaatgagattatgttattgtgtgcaaaggaaggcaaactatggtgtacgtttctctattcccccaccctaagatctgttgtatgaagggggcctacaaaatgaatacttcaaattcaaagatgtatgtcagatattaggtgttagagtaggcatggctattcattgattcaagccatacgttttacacattaaatttgttggatacatgctttatgtgatgaccatgttcataagattctaac

SEQ ID NO: 42462 - DNA, 390 bp, Glycine max
  Clone ID: PAT_MRT3847_138343C.1
gagagatggcaattgctaaattattattccctacataggcaatgagattacttgtgtcttttgtgtgtcaaggaaggcaaaatatggtgtacgtttctctattcccttactataacagatcttggggtggggggaatagagaaacgtacaccaagatctgttatagtaagggaatatgaagggggcctacaacatgaatacttcaaattcaaagatgtctgtcagatattaggtgttatactaggcatggctattcattgattcaagccatatgttttacacattaaatttgttggatacatgttttatgtcattaccatgttcattagattctaacagctatatggcgttagttatgcttacaaccatttatttttggcaacgacatat

SEQ ID NO: 42463 - DNA, 172 bp, Glycine max
  Clone ID: PAT_MRT3847_138344C.1
ccacgcgggcgcagtctctaatatttttctcactgtcttgtctctccttatatactgcatagagagagatggcagctccgacatctggtgctgtgtggaatggcttggcatcttccttcttgagtggaggaaacaagagccaaacccttctggccactgttattggaggcaa

SEQ ID NO: 42464 - DNA, 541 bp, Glycine max
  unsure (1)..(541): unsure at all n locations
  Clone ID: PAT_MRT3847_138345C.1
cccacgcgtcctcccactcgtccggctgactattcacctttttgataggtgatatantgcatgtttgaaaaancatgtcaaaaangtgaatagtcagncgtgggaagatgcctnaacatgaattggaaaaactaatcgtgcttcactgaacatgttgcaaaaccatacttgtcaatggtggtcagggcgggcactatcatggaggagcaaggcaaggcacagtggaggtgaggcatggcacaaacctatatcgcgttgcattttagaatcaaggttggactggtcgcgatagatgtttttgaatcttttgctatcgcggcctctattatacatgcctcaattggcctcatgattgaaacttcttgtgagattcttgaatacattgaaaaggggagtgtcgtacctgctgaaacaagatacttggtgatggatgaggcttatagcatacttgatggtggactaggtcctgatatccataaaaatttgagaccattaacaagatcacgaaatctgaatctaatgtcagaagattactacctat

SEQ ID NO: 42465 - DNA, 1474 bp, Glycine max
  unsure (1)..(1474): unsure at all n locations
  Clone ID: PAT_MRT3847_138346C.1
ccccacgcgtccgaaaaatagctagagcgtatataatatatcatatggtatatgattatctttatatctcattttcttttatcttcataatatacacttatctctcataaatacatcccaaatttcttctctgaatttttgtaggatggaactggtcttcagttcaagtctgtgatgacagggaagtatctttgtgctgagtccggaggaggaacaatcctagttgcaaattgcacagatgcttcgggttgggaaacatttagattgtggaggataaacgaggatactttcagattgagggtgtttaacaaacagtttgttgggttagatgggattaacgttgttgctgtttccaatatttgcacttattctgagacatttcatatagttaaggaaagtgacaattcaagtcgaattcgaatcaaagcttctaatggatacttcttgcaggctaagacccaggagctggtgactgcagatgtttcagaggtgagagaatgggaagatgatgacccaaccattttttgtgatgacaatagctgcaaggttgcaaggggaattccaagtcacaaacggttatgggcccacaaaagctccccaagttatgaaggaacattggagtacttttattgtggaaaatgattttaaattcatagccagtaatggattaaacgctgccagaattccagtaggctggtggatagcaagtgatccaaatccaccctggccatatgtgggaggttccttgcatgcactagacaatgccttcttgtgggcacagaaatatggattgaaaatcatcattgatcttcacgcagcacccggttcacaaaatggctttcagcatggtggttcaagagatggttctcaagaatggggaaaaacaaacaaaaacattctccaaacagttcgtgttatagaattcctaactgcaaggttcataactctgtatattggtcttaaactgttttgtacatcatctacaccttttaaatttaacatgctactatatatatgattgaactcataaatatttgaaaaatattttatgcacaacaaattttacaactaggaaaaaaagtatgaaatgcaaatgatgcgataaaaagaaataaaaaatatttttatatggagtgaatggtcaagaatggttatatcaaactgtataatatttttttttgaggggaacacttcccctcactatcacccccctcccaaattatccctccataaaaattatgattatacttgagttaagttttagacccttcttacatttcaccccacaaaggaaggggggaggttgtagcttttattagaagaaattagaaacataaagtgtaatggaagtcttgcatcatcctcttctgttcttttgattttggagagcgggaaagggtgaagcaaacaattgaaaaagtgttttgtaaaaaaaaaaaaaaaaaaaaaaaaaaaaaaaaaaaaaanaacgcga

SEQ ID NO: 42466 - DNA, 359 bp, Glycine max
  Clone ID: PAT_MRT3847_138347C.1
tcgttgacgcgtgggtggagcaacactttacatggaaattatcacagttcaaatggcaagatctacccttacaattcatcatacccctgttggccaaaccaaggcagtgtcttcacagattcaagctccatatcttttgctgattcacctgctgcgaaacctgcttatagctccaacaacatagtccctcggttcaggcgccagcaatcatgctccattgagttcaatttcagtgatgtgactcagaaaaagccatcatccacagccttggattctctcaagggcatggaaggttataatagtgaagtaaagattactcttgctcttggaaattaacattcgggggttcggggcaaacg

SEQ ID NO: 42467 - DNA, 315 bp, Glycine max
  Clone ID: PAT_MRT3847_138348C.1
atggcattaggggtcatggcagctcgcccaggcgagctgttgcttcaacctgaagtaaccttgctcgcctgggcgagcaagtcagacacaacactagttgacatcaaactttggggatggtcattgttcctccttacactctcgcctagcctttttcttcttgttcttgttcccaggcagcacaacaacttgagggctaggatgaggaggaggactacgaatatcaggggtaacaacaatgatgttagcagaagtgatgctaaccttttggcacatggcagaaaaattgagagaatccatcccgatagagcataa

SEQ ID NO: 42468 - DNA, 358 bp, Glycine max
  Clone ID: PAT_MRT3847_138349C.1
gtggcagtgagacgggaggcatagaacacataacagctgactttaactgacataacaatgcatgtggcatagaaaggagagggttcatcgccgaagctcctgcatggctctcctgagctctggtactcagcgccgccaccagatcctatctctcagctccctgggctaccgcgcctgtgcttccgatctgcgaggctactatgacacggaggcaccaccttgaatcagtaggtacgactgtgtttacatagggggatgtctatttgcgctgattgactctatgggcttgcaacaagtatcacttgcagctcatgactggggagccataatcagttggtattttttaatgtcacatcct

SEQ ID NO: 42469 - DNA, 1113 bp, Glycine max
  unsure (1)..(1113): unsure at all n locations
  Clone ID: PAT_MRT3847_13834C.1
ttcgggtgcgagaagacgacagatgggagaaggtcaatttcgaagcctctcgaatccaaactcaacagaacattcatttccctataaattcgacgtcgtttcgttccgctctcactccaagaaaacgttttgcagaagattccaatcggagctcagaaaaaaaagaaacctaatcgccgatcgcgtcgaaagttcgttgttgttctgtgaaattgccttttttttttttttccgttctgtgataattctgtgaataataacaataattgtgtgtgttttctcttttaggtaacgtagctgtggttccttttttttttataatttttttgccgtttgaagatagtcgtttcggttactgctgcgttttgtgttttctggtgttttaattctgtgcaattttttaattctacatgtttgattgtttatttttggttgtgtgatttgtttgttttctatgacttctgtgttctggaatgcgtccggtgatttgtttgttttctatgacttctgtgttctggagttgaaatgttgtctaacgagtttagaagccgttgcttttgtggtacgtagccgaacaattcaatgcctgaattccaaggttttggtttggtttagtgtaatttacgaaaaccttgggattccaaggtctttattggcattgtgtaggttcactaggttgtaatatcataaaaactgagtcagaaatgaagcctcaattcaaacggtggcatgagggttcggttgagttctaaatgaactgcacaaggtgcaggtcttccttccaatggtccttgtctaattttcgggttttgttattgaaattatgattatgacaattcttaattttgtggactttggattatgacattccatatcctcgtattatgttggaatgttggaaaagtgtaaactaacctttgtcaattgtccattatctgcaaagttttaaaaantcggtgtttaattggacaaactgtgaacctgttcgatcatatttcaactcctgttggatcatcaatttaactagtttcaaacttatgatccaaacccctgttcaatctctgcttcagtttttgaacattggattgttgtgcattgtgtgaatcacaggcc

SEQ ID NO: 42470 - DNA, 498 bp, Glycine max
  Clone ID: PAT_MRT3847_138350C.1
ggaagaagacactacttaactaggcggtgtgccactcttactatgttttggtgttagatctgtgaatcatggagagcccattcgtctgtggcgagctctagttccttgccgggtgacggcattcacttttccttctatgccatacactgagctctgccggtggcgcataacatccccctgagagctgcccgtactagactatacgccgagcaatgtatggcacctccttaagctccactctcatgcgcatcctcttcagataggctctatacggatcaagccatccgagacttacgaaccgctcatgcactacggtacctgctgatggcagaattacgagtgagtgtaacaactggaacagttactgctaacccatctcagcttacatggaagcccttggatgcgcccgagtcgtcaacagataccattgatgggtagccactgagtgtggttctggcagctacttcatgcgccacggatatgctattgacatgtaca

SEQ ID NO: 42471 - DNA, 251 bp, Glycine max
  Clone ID: PAT_MRT3847_138351C.1
tggattctcagggcagcggtcttcacgttccgcttcttcgatcattccaattctcaactacacatcggtccggaatgggctttgctggctctaacattgtcgtcgtcagctctccctgctcttgtggctgatgtgcccttggatcggagggatcaagtgccgcattggaaggtccgagagctggatcatgttgatcttagattgcttcggggtcaccctaatgggcctcgtgtcgatagctagtctctctc

SEQ ID NO: 42472 - DNA, 502 bp, Glycine max
  Clone ID: PAT_MRT3847_138352C.1
tcggcccgcgcctcttcttttctctgtttttttcttttgttttatttttattattttttttttctaccttctatgaccccgggataaaaaattccgatccattcttaatgacccaaggttaatgtcaagaatcattaggagtgccacactcccacaagaagggggaggggatttttaaacaaggacatgccggcttgctactcgtggaaaaggactaaatgaaccgcctcccatatactaaaggttttggaaggcgaagggcgttgagaccaaaagataaatacacgcccccgaaaaccggtgttgatgacccatggacaacactgtttcggggatggatacatgtggctgtgcggacgccagagacctgttcatgtttgggagggtgctctttctcggtctcacccactttatcgtagtagtcctttgccaacacccgggctagaaattgtgctctacgggcttgctataaatttttatggctaaaaaagctaggcgggtt

SEQ ID NO: 42473 - DNA, 218 bp, Glycine max
  Clone ID: PAT_MRT3847_138353C.1
cgtccgcgcacgcgtgctctgagaaaccctccactctttattccaaactctcctcctacccaaaatagagtcaaggtcatcatcttcttcagcttcctctattcttttccttgcatcaattgtatctgcttatttctattcatcataagcacctgtttccaaatgatctttttacgacaatcttctcctaatgtactcctgatgaccaatttactacc

SEQ ID NO: 42474 - DNA, 979 bp, Glycine max
  Clone ID: PAT_MRT3847_138354C.1
aagtctccatcaaaagtgaagctccacccacccatgctaaccaaattcaaacctgccccaccctccccatgttgatgtcccatgcacccccaaaaaggttatctctatcacgtgccattgctaccacggccgaaccaccttgctccatgttttctttaccctcatctccctctcctctctctccactcctcctctaaccttgttcaaggccctcaacctttaccttttcgctttcctcgaccacacctgtctctcgtcgaacctggcactaagtggtcgggtcaaaggcgcttgatactaaagttgaccatggaccaatgggcttcttcgaactaggatattagtggaagggattggagaaggagatattcgacaccacactcaatttatagtttccctcttttgattcgatggtttcttgaaggaggtgtgtgatatatggtgggaagacgaaggtggtggttggaagaagacattgttagggttcttgacatttgggggtgactatagctgcgaaagaagctattggaagaaaaagttcttagggtttgaaaactgttgttgctatagtgtagacgccacagttgtgcaagaatgacgatttaggatttcaaaaagacgacgtcgaagaaaagaagtcatcaccgcctctgctagttttggatgttgttgatgtttcaatacttggtgtcgattgcaggggagaaggaaaggatgttggtgtaggagaatgcgaggttgtggaatatggggttttgtatacgttatgaggttgtcatggcgttgctttgcggcggattgaggtagtctggttctgtcggcaagtgtaatttgctcaatagattattgttattgtttaaaggggcgtttgcttcatgaaatcttattagattcccaaaaatgtagagatgggaatatatttttctatatttgttaaaaggtaataaaaaaatatttgcaggcataactaattcccaat

SEQ ID NO: 42475 - DNA, 925 bp, Glycine max
  Clone ID: PAT_MRT3847_138355C.1
gtttagtcacggtggtggcgtgtgctaaaatggcgcgcgcgagcatcgatttcgtaacgtaaccctacctataagaagagaagtacgatgtggaagtggttgttctctcgggagccagcgccgccgccgccgccggtggttctggtaccgccgctcttcgacttccctcccctcgccgcgcgcaaccgcatgctccattcctcctacgacgtcgttttcggcaagctcgccctcacttcgctcttcgaggactacttccaccaggccaggaacttcaccaccagaatcatgctcaagccgatcgaggatcctcacgtcgatctcattgcaaccgtttcgggtcctcttgatcacaagccaaaagacagtattgccggagatgcattgtttcgctggcaaagtgatgttaatgatcctcatacgtttatggacctttatgtatccacgtctaatccgattttgcagatgagatcgtgcgcttactatcccaaatatggatttggggcttttggagtgtttcctctgctgttgaagaaaagagaatcctcccaagattatggcttgatggggttgagatatggttctggaaatctatcctttggagtcacacttttgccttttgccatgaaagatgaattaccaaaaagtgcatggctggtaagcaagatgggaaggttgactgctggggtgcagtatgagccacaacaaggaaatgcaaaactttcaaatttgatgaactggagttgtgccatgggctatggtgttggatcaggcagccccttgtgtccatccttcaatttcaaccttgagcttgtcaaaagctctcagtttattgcctcgttctatcaacatatggttgttcaaagacgggtgaagaacccccttgaagagaattccgttgttggaattacaaactacattgatt

SEQ ID NO: 42476 - DNA, 496 bp, Glycine max
  Clone ID: PAT_MRT3847_138357C.1
tacggctgcgagaagacgacagaagggggtggtcagtttagtcacggtggtggcgtgtgctaaaatggcgcgcgcgagcatcgatttcgtaacgtaaccctacctataaggtagaactgttattgaaccaaaattaaccttgtgttgtagcgtttctttcactctcactcactcgctgaattgaaatttgaaatcctagaagagaagtacgatgtggaagtggttgttctctcgggagccagcgccgccgccgccgccggtggttctggtaccgccgctcttcgacttccctcccctcgccgcgcgcaaccgcatgctccattcctcctacgacgtcgttttcggcaagctcgccctcacttcgctcttcgaggactacttccaccaggccaggaacttcaccaccagaatcatgctcaagccgatcgaggatcctcacgtcgatctcattgcaaccgtttcgggtcctcttgatcacaagccaaaagacagtatt

SEQ ID NO: 42477 - DNA, 285 bp, Glycine max
  unsure (1)..(285): unsure at all n locations
  Clone ID: PAT_MRT3847_138358C.1
gcncgangtgttactngtaggtggtcacttgtactctctaatgtngaagnattatnggagacccaataanctggacaacctngaaatacggggcataagcattnngtgatgtgaaatatggtgcagaagcattcagggnngggcttgtgttcgctatngtgtgtnactgtnagtgnnagtgntactantaggtngtcacttgtnccattgtctgtnactatgtatntatatcaataacttggacatngtcacttnncagatgaccattaagtngcaagattnctg

SEQ ID NO: 42478 - DNA, 392 bp, Glycine max
  Clone ID: PAT_MRT3847_138359C.1
gcgcgccgtcgctgaacactgaacactgattactcactccttcatggccacttcgctgctatctttctccatttcgcccacaacctcagccttcagattcaaagcctccgccatggctaccaccatcgccgcccctgctaccaaggtggctcccgccgtcattgtcggcggcggaagagtgggcagggccttgcaggacatgggcaccggccaagacctcctcgttcgccgaggagagtccgtaccactcaatttcgagggccccatttttgtgtgcacgaggaacgatgatcttgaatctgagcttcaatctacaccttcttctagatggggtgatttggtgttctttcagaacggaatgctggagccgtggcttgagagcaaaggtttgg

SEQ ID NO: 42479 - DNA, 167 bp, Glycine max
  Clone ID: PAT_MRT3847_13835C.1
attagaggtgccattatttacatcagcttccactctcttcagtgcttgttccaatctctttttaccatgccaaaaccagaaggattaccatgcggggtccagggattccatgcaaataatcaagggcaagcgcaccaggcgacaaaggcttcaatcccaactaaggt

SEQ ID NO: 42480 - DNA, 1322 bp, Glycine max
  Clone ID: PAT_MRT3847_138360C.1
ggtccgggacccctcgtcgacccacgcggatcgacaaacacagctcaacaactgtgtctgcccaaaagtcatgttgatgttcttcttcttctccttgttcgcctccacttttcactgaacacttattactcactccttcatggccacttcgctctctttctccatttctcccaaaaccactgccacaacctcagccttccgattcaaagtctccgccatggctaccaccatcgccgccccttctaccaaggtggctcccgccgtcattgtcggcggcggaagagtgggtagggccttgcaggacatgggcaccggtcaagacctcctcgttcgccgaggagagtccgtacctcccaattttgagggtcccatttttgtgtgcacaaggaacgatgatcttgaatccgtgcttcaatctacaccttcttctagatggcgtgatttggtgttcttccagaacggaatgatggagccgtggcttgagagcaaaggtttggaagatgcaaaccaggtgttggcttattttgctgtctctaaaattggagaaagccctattgatggtaggactgataccaatcctgaaggactcactgctgcatatggcaagtgggcttctgttgtagctgctagattaaatgctggaggcctctcttgcaaggttcttgacaaggaggcgtttcaaaagcagatgttggagaagcttatatggatttgttccgttatgcttgttggagcacggcatggaggggtttctgtaggtgtcgtggaaaaggaattccgcactgaattgtccagccttataacagaactggcatcagcagcagcaagtgaaaaggggttaacatttgaagaagccatggaagagcgcttatgtgcatattctcgagctgtagcccactttcccacggcagttaaagagttcaaatggagaaatggttggttttgttctctctctgagaaggctaatgcccaaggcaagccagacccatgccctttgcattcccaatggctaaaagagttgagaattgtatgaagcttgaactctagtgtgtgtgtgtgatgtgtgcaaggttaccagcttgtaagagttatgtagacttagggtgtgtttgacctattcaactctccccttccttttattttattgctttggagtaattttaatgtttattttaaaagaattttttattattattaaaaaaattaattaaaaaatattataaattattgataactaacataatttgttttaaatattgaagattttgataattaaagaatattataaattatttataactaacatctttccattatgagtt

SEQ ID NO: 42481 - DNA, 505 bp, Glycine max
  unsure (1)..(505): unsure at all n locations
  Clone ID: PAT_MRT3847_138361C.1
tgcgtgcctccgcagncgtccccccangctctccctgtgctaactgacctgcactcttggacangagcgggtgccgcaaatcgagaaggattagtatgggaccctgcgcttggcggaccccatggcatccatccagaacccgtaacatattgtggcctctctcagtggtccctgggacctcttctttgttttcatggggactatcaagctgacccccaggctcagcaaggatgcctacagtgagatgaaacgtgcttacaagagctatgttcgagccctccctctgctgaagaaaatggggatcaattccattctcctacgaaaaagcattggtgcccttgaagtggcctgtggcatcgtcatgacccttgtgcctgggcgtcccaaagatgtggccaacttcttcctactgttgctggtgttggctgtgctcttcttccaccagctggtcggtgatcctctcaaacgctacgcccatgctctggtgtttggaatcctgctcact

SEQ ID NO: 42482 - DNA, 563 bp, Glycine max
  Clone ID: PAT_MRT3847_138362C.1
gagcttgtacattcattatcatatgtgtatcagaggagcaccactgccatttctgtcgttgctccaatttgctatgctcatctggctgctactcagatgggtcagtttatgaaatttgaagacaaatctgagacatcttcgagtcatggtggttctggtatgcctgctcctcccgtccctcagttgccaagattgcaggaaaatgtttcgagctcaatgttcttttgttgaaggatctgttgcagttctagggatagtgataactgataacagtgctgtttataagacttcataggatagtttttttgtttgaaccgttgactatgggcgccattggtagtaggaaaggattattatacatgtaaaaaggcattttgcttatgcctttacatgtgtttagtctttaactattttgatactgttgcgagcgaagtctttcgctattttgaagattgttaaggtttatgtgattcctatggcgctcttgatcattttctattttagttgtggtttgcatgaatcaaaagattaaatgggtatattactgttcactgttcttattt

SEQ ID NO: 42483 - DNA, 240 bp, Glycine max
  Clone ID: PAT_MRT3847_138363C.1
gccccaaagggacccccccttaaaaaacggtccagatccttacacccacaaaccaattttaaaggaaaggaaccccgggaaacccccaggttggaaaaaaaacggcctaaaaacccccattccaggggggggaaaactgggaaaccgcctggggcccgtcaaaaagggggggttgggccaattccccggggggcccggagcccgggggggcggggtcccccccggggggaggggggggcc

SEQ ID NO: 42484 - DNA, 285 bp, Glycine max
  Clone ID: PAT_MRT3847_138364C.1
gggctccttattgactaataagaagtaatgcatttgagggtctatgaaatacatagccttgaaatgggccccacttggcaagggctcaacctattctgcatggactatgttcgttacatccacccttcacgattgctaggcgccaagacgcgtcaccagctgcttcagacaataagtgagccttgcatgtgcccttaagcactctgagaactgttcatggaagaccactgcttatcgtcgcagtcatgctcgaaataaaatggcggcggccaccggataggcacc

SEQ ID NO: 42485 - DNA, 379 bp, Glycine max
  Clone ID: PAT_MRT3847_138365C.1
gagagagtgttggtacgaaaaatgtcgaagctgatcttcgtgttcctttcgcttattcctcgtctctgcacctccttctcccgagagagaccctcagatcgacgcgtcctcgttttgctcgatgacttcgcgatcaaatcctctcattctctcttcttcaactccctcaaatctcgcggcttcgatctccaattccacctcgcagacgacccccaaattgcgctccagagatacggccagtacctctacgacgccctaattctcctttccgccagcattgaacgtgagttttccacttctcacccccccattgatatgttttttctttttccttttttcctgaaaactatggagatcgtgatttgtgttaaattgtttc

SEQ ID NO: 42486 - DNA, 464 bp, Glycine max
  Clone ID: PAT_MRT3847_138366C.1
gaattcgtctctagtctctctcttgtgcggacacaagtaagtactgttccgtcaaacccttccttattcatcaatttcgcctttccctatttcttctctcgcttctgctgattatgattatggttattattattagtatcatttcaattgtttcatgatttcttcgattttcgattctttcttggatgcattggagtattgatttcaactttgatgaatagctttctcacttttcattccaacacatcctgatgcatcttacattgcattcctttttctaggttgaatcatttcatattacgttgcaaatatggttagatttgatttttggaatgagttattcgtaattgaagtgcgcctttctttcacagatgtgatgtgatgatgatgcatagtagtattcttgcgattcaatgctggttttttttttttttttgtgtgattgtagttttgatggggattta

SEQ ID NO: 42487 - DNA, 343 bp, Glycine max
  unsure (1)..(343): unsure at all n locations
  Clone ID: PAT_MRT3847_138367C.1
acgatcgcattaacccctgagcctttacacggaactctagggggtgtcttgtaaggaagaagaggggcctaaattccgacgttctttcccatttcaaccacaggcacactgacacgcacttaaatccatctataaccaatgtcatgagtctgtccgcgtgataaatttttttggctgaaaggaaatcgagaactcaaataaaatcctccattccaaaccaaatgcatgggtacaagcgcctgggcggaacaaagcgaaaaccctccggggtcttctcggttccggcacggnccggagcaagaacaaccagctggtgttcgtcgaaggagatcattcccaggag

SEQ ID NO: 42488 - DNA, 394 bp, Glycine max
  Clone ID: PAT_MRT3847_138368C.1
gctttatattttgatagagggcctataaaataattttaataagtaaaaattaaataataggttctaggtaatccaacaacaactgttcttttccgggctaacattgagggcataaaggtcacaacacaatttttcattaaggttatacttgtcaacatatacgtttttttttaaaggtgactggttggaaaaattagaaaacacaaaaaccaaccacatgccacaaaacactgcttcatagtagatcacttaaagtcacagttccaacctagaagtcatctttatatattgggtctatgtcaaaagactatagcttttgatattttaggtgacgtttgtttggtggaaaatgattggaaattgaattatataatataggcttttagctttgtgc

SEQ ID NO: 42489 - DNA, 4029 bp, Glycine max
  Clone ID: PAT_MRT3847_138369C.1
atggcgacgaacagccattttccggcgatttttccgatcctcgacggaagaaattacgatcagtggagtaggaagatgaaggcgatcctcggctatcaggatgtgtgggatctagtgcagaacggattaattccgttgccggagaacgcaaacgctgcgcaacaaacagtttacagagaatcgaagaaggaggattggaaaggtctatgcatcctccatcagtgtgtgaatcctgcaatttttgagaaaattgcgagatcggagacgagtaaagaagcgtgggatattcttgcgaattcctacgccggtgatcagaaattgaagaaggtgcgacttcaaaccctacgaagacaatatgaattgctagggatggaggagagtgaatcaattgctgcatatttcactagagttcaaacgatgacgaatcagatgctgtactgtggtgaaacgttgtctgatgaatcaatcgtggagaagattttgcgatcggtgtcatcgcgatttgatcacatcacggtggcgattgaacaggcgaaagatctgtcgacgatgacgatagaagaacttcaaggatctcttgaagcgcatgagcagagaatgaatgagaagaaaactgtgaagcctagtaccgagcaagcgctggcggcacaaacaggcaacaaatctggtggaaatcaaagaggacgtggtagaggtagaaacaattacagaggaggaagaggaagaggtaattacaataactcgaattctgctaaagtaaactctagtgaaaacagtagcaataataaacaaggaaataatcatactgaaaattatagaggaagaggaggtagaggttttagaggaagagggagaaaatttgataagagttatatacagtgttataactgtgggagatatggacattttgctgatgagtgctacagcaatgtcaatggaaatgatgctaaaatggctgaagaagaggaggagacagaggaaactctattaatggccattgaagaaaagaagagcagtgatgaaacagtgcaaatggtgtcaattaagaaggaaggtgagaatggtgagtactgggttctggacacaggttgttcaactcatatgacaggaaggagggagtggtttgttgaacttgatttcacaatcaagagtagagtaagatttgctgatgatagaaccatgaaggtggaaggtgtggggaaggtgatgataaggaaaaaagatggttcactgtgctacattactggtgttctttatgtgccaggaatgaagagtaacttgttgagtattggacagttactagagaagggatacagaatggtgcttgaagacaaggctatgaaggtgtatgatactgaacataatctgttgatgaagggaattctttctaataacagaatattcaagattgagttgggtatgttgttgcagcagtgtttagctacagcagttgacaaagaagaatggttatggcatttcagatatgggcacttgaattttggtgatctgaacaggatgcagagcaaagcaatagtgaaaggcctgcctcatatccatgttccaaaggatgtatgtgcagaatgcatggaaagtaagatgtcaagaggtgccttcaatccaaatgtgccaagtagatcaaaaagaaagctgcagaggaagaatgaggtgttaggagtattcaaaaaattcaaagtactagtggaaaaacagagtggacagaatatagagattctgaggactgatggtggtggggagtatgttagcactgagtttgatgaatattgtgagaatgaaggaataacacatgaggttacacctccatatactcctcaacataatggagttgctgagaggaagaataggacattgcttaatatggtgagaagcatgttaaaaagtaagaacatgcctaagatgtggtggggagaggctgttaacactgctgcatatattataaatagaagtccaacaaagaaaatggagaatattacccctgaggaagcttggacaggtgttaaaccaaatgtatcacattttagagtatttgggtctgtttgttataggcatgtgcctgatcaacttagaacaaagctggatgataaaggagaagtgatgattatggtgggttatcattcaactggtggttacaaactagtgaatcctgtgaacaacaaaattgtgataagtagagacatagtatttgatgagggaaaagcgtggaagtggagtgaaaagagagagagttctactggtgtagaacaaaatctgtttgatgtgcctgctggtgaaactgagtcagacattgagggtgaaacagggccagttgaagataatgatgatgaaggtggtagtcctgagatgccaagaagatcattgagacaaaggcaggttcctgcaaggttaaatgactatgagataatgcctgatggtgcaattgatgatgaaggtaatttagtgcactttgcactacttgctgaaacagaaccagtaactttgcaggaagcaatgaaaaactctaagtggctagaagctatgaaagaggaactcagatccatagagaagaacttgacttgggaattggttgaattaccaaaaggaaagaaagcaataggtgtgaaatgggtgtataaagtgaaagttaatcctaaaggtgaagtggtgaagtacaaagcacggttagtagctagaggattcctccaaagacatggtgttgattatgaggaagtttttgcacctgttgcaaggattgaaactgtgagagttgtggtagctcatgctagtatgcagaggtggaaagtacatcaacttgatgtaaaatctgccttcttaaatggagaattggaagaggaagtttatgttgagcaaccagcaggttttgtgaaacaaggaagtgagaaaaaggtactgaaattgagaaaagccttgtatggcttgaaacaagctccacgagcttggaacaaaaagatagataagagtttaatcaacatggggtatgtgagatgtatttctgagcatggagtgtatgtgaagtcagggggtggtgatatagtaatactatgcctctatgttgatgatttgttggttactggaaacaatgaaactaaggtaactgaatttaaaaggaaaatgatgagtacttttgaaatgacagacctaggagagatatcctactttctaggaattgaatttcaaaatactagtgatggtgtgctactgtcacagaaaaagtatgtttctgatgtactgaagagattcaatatgcaacactgtaatggtgctgcaacaccagcagaagcaggattatggcttgataaaaatgttgatgagccagaagttgatgctactgagtttagacaggtggttggggcactgagatatctctgcaacaccagacctgatattgctttcagtgtaggtctgattagcagagttatggacagacctagaacatctcaccttgctgctgcaaaacgaattctaagatatgtcaaagacactatggcatatggaattcttctacctagtaaatgcagagaaaatgagaaaggtctctatggtttcactgatgcagattggggtggtgataaaactgatagaaagagcactgctggctctgtatttcttcttggatcaggtcccatttcctggagttcaaagaaggaatctgttgtggcattgtcctcatgtgaagctgagtatattgcagcttcaatgggaggttgtcaggccatctggttggataatttgatgcaggaactaatgataaaaaaggaaagtgttgtggagctatttgtggacaacaaatctgcaattagcttggccaaacatccagtagcacatggcagatccaaacacatagagactcgttatcatttcttgagagatcaagtcaccaaagggagattgaagctgagctattgcagaactgatatgcaggtagcagatatcttcaccaaggcagtgaagagagaaacttttaagaagctgaggaacattctgaatgttgttgactgtaatgaatttgtttag

SEQ ID NO: 42490 - DNA, 2535 bp, Glycine max
  Clone ID: PAT_MRT3847_13836C.1
tctcgggtgcgagaagacgacggaagggggaaggtcaatttcgaagcctctcgaatccaaactcaacagaacattcatttccctataaattcgacgtcgtttcgttccgctctcactccaagaaaacgttttgcagaagattccaatcggagctcagaaaaaaaagaaacctaatcgccgatcgcgtcgaaagttcgttgttgttctgtgaaattgccttttttttttccgttctgtgataattctgtgaataataacaataattgtgtgtgtttcctcttttaggtaacgtagctgaggttccttttttttttataatttttttgccgtttgaagataggcgtttcggttactgctgcgttttgtggtttctggagttttaattctgtgcaatctgttaattctacatgtttgattgtgttatttttgggtgcgagatttgattgtttcctatgacttctgtgatctggagttgaaatgttggctaacgagtttagaagccggtgcttttgtggtaatttactgctcgattctgtcaagtacccccagtgctaccttgtagtaatatgtggaattcttgtaaacacattagttgcgctgtgtttatctcttggagtagtgctgattggagctgcatttctcgataactgtgtcgctgatttcacctcatctccggcagtataaaggaaagcaacgatgcgttggtgtttacctggcttgatagggtgactaaatatgcctttagaagttttaggattatttctaatgtgttcctacatgcagattggatcgcccaccactctctccagctccaaagtcaccggactactgcctgcttctaaatagcttataatcttatctgaagatagagatatcatcatgggagaggtggcagtaatgcattctgagcctctgcagtttgattgcaatgacatgaagcatatcactgagaaagatgtatataatctattgtcaaacgaagagcacatacttggagaagaatcaagtcaatcatcaaatgacaaaaagatcaatgatttgagagagagaggatacatgaagtatggatgtcaacattaccgaagaagatgccgtattagggccccctgttgtgatgagatttttgattgccgccattgtcacaatgaggcaaaaaataatatcaacattgaccagaagcatagacacgatattccccgccatcaagttaaacaggtgatatgttctctttgtgagacagaacaagaggttcagcaaaattgtattaactgtggcgtttgtatgggcaagtacttctgtgggacgtgtaagctctttgatgatgatgtatctaagcagcagtatcattgcagtggctgtggaatttgcagaactggaggatgtgaaaatttcttccactgccacaaggggggctggtgctactcaactcagctgaaaaacagccacccttgcgtggaaggagcaatgcatcatgattgccctgtttgttttgagtatttgtttgaatcaagaaacgatgtcactgttatgccatgtggacatacgatccataagagctgcctgaatgaaatgagagaacatttccagtatgcatgccctctctgctcaaagtcagtctgtgacatgtcaaaggtttgggagaaatttgaccttgagattgctgctacacgaatgcctgagcaatatcaaaataaaatggtttggatcctgtgcaatgactgtggtaaaacttctcacgttcagttccattttgtggctcaaaagtgtccgaactgcaaatcctacaacacacgacaaacatgaggcggagcaggtggccacgattattcattggcttcatcaaaagccttcactcgagagctctcttgatgttgtcgtgacttgtgaaggcagtgaaaatagatgtgcatccattgggtacgtggatgtgcacgtgtgggaatttggagtgcatgatgagccacattcagagggataaaataatggttcttatgttgatttggagtggggtggtttaatttgttggggctcccctagtagttggaatagtccagagtgttagagttcttgtattatatttgttttagccctatcgataagtattctagttaaattactctttaagtgaaattcattcttccaattatttttatttttctatacaactaatccagattatcacttatgacaataataatgtaactacattttcatcgtccggtagtggcaatccaagtgcatcctttattgaggaaaatgcatgtgggaattgtcattcaattgcaggcaggccgaaccccatccaaaagaaaaacggtttatcccgttgatgtggtgtcgagggtagtgtagagtcagcaattgtcgtgttggttattttgtgttgggaaaacccttttagtgttccagtgttcactcctgtaatgtttgtttgggattaatgccaactttcaaattagctgttactttatatatttgtagaatcgtaaccctgttttaaaagttgtgttaagaagtaaccttcatctcgtatgg

SEQ ID NO: 42491 - DNA, 4143 bp, Glycine max
  Clone ID: PAT_MRT3847_138370C.1
atggcgacgaacagccattttccggcgatttttccgatcctcgacggaagaaattacgatcagtggagtaggaagatgaaggcgatcctcggctatcaggatgtgtgggatctagtgcagaacggattaattccgttgccggagaacgcaaacgctgcgcaacaaacagtttacagagaatcgaagaaggaggattggaaaggtctatgcatcctccatcagtgtgtgaatcctgcaatttttgagaaaattgcgagatcggagacgagtaaagaagcgtgggatattcttgcgaattcctacgccggtgatcagaaattgaagaaggtgcgacttcaaaccctacgaagacaatatgaattgctagggatggaggagagtgaatcaattgctgcatatttcactagagttcaaacgatgacgaatcagatgctgtactgtggtgaaacgttgtctgatgaatcaatcgtggagaagattttgcgatcggtgtcatcgcgatttgatcacatcacggtggcgattgaacaggcgaaagatctgtcgacgatgacgatagaagaacttcaaggatctcttgaagcgcatgagcagagaatgaatgagaagaaaactgtgaagcctagtaccgagcaagcgctggcggcacaaacaggcaacaaatctggtggaaatcaaagaggacgtggtagaggtagaaacaattacagaggaggaagaggaagaggtaattacaataactcgaattctgctaaagtaaactctagtgaaaacagtagcaataataaacaaggaaataatcatactgaaaattatagaggaagaggaggtagaggttttagaggaagagggagaaaatttgataagagttatatacagtgttataactgtgggagatatggacattttgctgatgagtgctacagcaatgtcaatggaaatgatgctaaaatggctgaagaagaggaggagacagaggaaactctattaatggccattgaagaaaagaagagcagtgatgaaacagtgcaaatggtgtcaattaagaaggaaggtgagaatggtgagtactgggttctggacacaggttgttcaactcatatgacaggaaggagggagtggtttgttgaacttgatttcacaatcaagagtagagtaagatttgctgatgatagaaccatgaaggtggaaggtgtggggaaggtgatgataaggaaaaaagatggttcactgtgctacattactggtgttctttatgtgccaggaatgaagagtaacttgttgagtattggacagttactagagaagggatacagaatggtgcttgaagacaaggctatgaaggtgtatgatactgaacataatctgttgatgaagggaattctttctaataacagaatattcaagattgagttgggtatgttgttgcagcagtgtttagctacagcagttgacaaagaagaatggttatggcatttcagatatgggcacttgaattttggtgatctgaacaggatgcagagcaaagcaatagtgaaaggcctgcctcatatccatgttccaaaggatgtatgtgcagaatgcatggaaagtaagatgtcaagaggtgccttcaatccaaatgtgccaagtagatcaaaaagaaagctgcaggtgattttctcagatgtgtgtggcccaatacaacatgaaactcctgcaggtaacaagtattttgttacatttattgatgacttcaccaggaaactttggatttatttgattaagaggaagaatgaggtgttaggagtattcaaaaaattcaaagtactagtggaaaaacagagtggacagaatatagagattctgaggactgatggtggtggggagtatgttagcactgagtttgatgaatattgtgagaatgaaggaataacacatgaggttacacctccatatactcctcaacataatggagttgctgagaggaagaataggacattgcttaatatggtgagaagcatgttaaaaagtaagaacatgcctaagatgtggtggggagaggctgttaacactgctgcatatattataaatagaagtccaacaaagaaaatggagaatattacccctgaggaagcttggacaggtgttaaaccaaatgtatcacattttagagtatttgggtctgtttgttataggcatgtgcctgatcaacttagaacaaagctggatgataaaggagaagtgatgattatggtgggttatcattcaactggtggttacaaactagtgaatcctgtgaacaacaaaattgtgataagtagagacatagtatttgatgagggaaaagcgtggaagtggagtgaaaagagagagagttctactggtgtagaacaaaatctgtttgatgtgcctgctggtgaaactgagtcagacattgagggtgaaacagggccagttgaagataatgatgatgaaggtggtagtcctgagatgccaagaagatcattgagacaaaggcaggttcctgcaaggttaaatgactatgagataatgcctgatggtgcaattgatgatgaaggtaatttagtgcactttgcactacttgctgaaacagaaccagtaactttgcaggaagcaatgaaaaactctaagtggctagaagctatgaaagaggaactcagatccatagagaagaacttgacttgggaattggttgaattaccaaaaggaaagaaagcaataggtgtgaaatgggtgtataaagtgaaagttaatcctaaaggtgaagtggtgaagtacaaagcacggttagtagctagaggattcctccaaagacatggtgttgattatgaggaagtttttgcacctgttgcaaggattgaaactgtgagagttgtggtagctcatgctagtatgcagaggtggaaagtacatcaacttgatgtaaaatctgccttcttaaatggagaattggaagaggaagtttatgttgagcaaccagcaggttttgtgaaacaaggaagtgagaaaaaggtactgaaattgagaaaagccttgtatggcttgaaacaagctccacgagcttggaacaaaaagatagataagagtttaatcaacatggggtatgtgagatgtatttctgagcatggagtgtatgtgaagtcagggggtggtgatatagtaatactatgcctctatgttgatgatttgttggttactggaaacaatgaaactaaggtaactgaatttaaaaggaaaatgatgagtacttttgaaatgacagacctaggagagatatcctactttctaggaattgaatttcaaaatactagtgatggtgtgctactgtcacagaaaaagtatgtttctgatgtactgaagagattcaatatgcaacactgtaatggtgctgcaacaccagcagaagcaggattatggcttgataaaaatgttgatgagccagaagttgatgctactgagtttagacaggtggttggggcactgagatatctctgcaacaccagacctgatattgctttcagtgtaggtctgattagcagagttatggacagacctagaacatctcaccttgctgctgcaaaacgaattctaagatatgtcaaagacactatggcatatggaattcttctacctagtaaatgcagagaaaatgagaaaggtctctatggtttcactgatgcagattggggtggtgataaaactgatagaaagagcactgctggctctgtatttcttcttggatcaggtcccatttcctggagttcaaagaaggaatctgttgtggcattgtcctcatgtgaagctgagtatattgcagcttcaatgggaggttgtcaggccatctggttggataatttgatgcaggaactaatgataaaaaaggaaagtgttgtggagctatttgtggacaacaaatctgcaattagcttggccaaacatccagtagcacatggcagatccaaacacatagagactcgttatcatttcttgagagatcaagtcaccaaagggagattgaagctgagctattgcagaactgatatgcaggtagcagatatcttcaccaaggcagtgaagagagaaacttttaagaagctgaggaacattctgaatgttgttgactgtaatgaatttgtttag

SEQ ID NO: 42492 - DNA, 450 bp, Glycine max
  Clone ID: PAT_MRT3847_138371C.1
ggctcgagacatgacagacacaacatgatccttgccctgaaggatattgggccatagaactagctattggtgctggcagcctgttgattctattaaagcaaaaatcctttgtgtagcctatatattggtttgttcaaaacctggcttatggctgatatattctagtccgactagtcttaacagtggtggttatggatgaggtacagactctatatgacatgctttgtggcaatatctgctgtcctatgactatgacatacctgtgggaattcattgtgcaaaagcttattttgactggattgcataagattatggtagccttgattgcaggaaacttaccattcaacgagaagatacagccgacagtaagcggcctgttgccgaagcacaccaatgtggtgtggctaatggaacacatagcgcaagtaatggtggtccaactgcatcatt

SEQ ID NO: 42493 - DNA, 664 bp, Glycine max
  unsure (1)..(664): unsure at all n locations
  Clone ID: PAT_MRT3847_138372C.1
tggtacgcctgcaggtggaggtggnataattggaaaaagaccggtccggattcccggtcgacccacgcgtccgctctctctccgccctcgcaacacaatctcctcctcacagtttcgtcttctcgatctcaccactgcaatcatgagtgacgaaggagaaagaacttgtcctctctgtgctgaagagatggatttgacagatcagcagttgaagccttgcaaatgcggttatgagatctgtgtctggtgctggcaccacataatggacatggctgagaaggatgacactgaggggcgatgccctgcatgtcgttctccttatgataaggaaaagattgttgggacggctgcaaactgtgagagattgatgaagactcagaaagcgaagtctaaatcatctgatgggcgcaagcagctcagcagtgtgcgagtgattcagaggaaccttgtttacatagttgggttgcctctcaatcttgcagatgaagatcttcttcagcggagagagtattttgctcagtatgggaaggtcttaaaagtgtcaatgtctcgaacagcagctggtgtaattcaacagtttccgaatgatacttgtagggtatatataacttattcaaaggaagaggaagcggtttgttgtattcaaaatgtacatgggatttgt

SEQ ID NO: 42494 - DNA, 491 bp, Glycine max
  Clone ID: PAT_MRT3847_138373C.1
ggctcgagtgacgaaggagaaagaacttgtcctctctgtgctgaagagatggatttgacagatcagcaattgaagccttgcaaatgcggttatgagatctgtgtctggtgctggcaccacataatggacatggctgagaaggatgacactgaggggcgatgcccagcatgtcgatctccttatgataaggaaaagattgttgggacagctgcaaactgtgacagattggtgaatggagttaatattgagaaaaggatgaagactcagaaaacgaagtctaaatcaactgatgggcgtaagcaactcagcagtgtgcgagtgattcagaggaaccttgtttacatagttgggttgcctctcaatcttgcagatgaagatcttcttcagcgaagagagtattttagtcagtatgggaaggtcttaaaagtgtcaatgtctcgaacagcagctggtgccattcaacagtttccgaatgatacctgcagtgtata

SEQ ID NO: 42495 - DNA, 2347 bp, Glycine max
  Clone ID: PAT_MRT3847_138374C.1
cccacgcgtccgttcgactttgcctctggctactttcagattttcatgtcttcttctgcccccgctgtgcttgttatgctctatgtgtccccttacgcaggtaacaaggactgtgctgattcctctgttagacactttttgagttcctgtcgcaatattttgtccaaggcattgcacggccagtgtgcgcgtgtggtgttggagttttgtaaattgcttaggagagtggggtctcacgaccctttgtatctcttttgtcgtagtacttttgggtccttgttggaaactgctggagtttcctatggttccggttcggataatgttaaagggctggttttgattcaggatattttcccctttgtttgtgagcttgctaacagcttgttgagggatctggacttgagtattgtgtccccctcggccgcagggcctttgtcaaacgatgttggggatttttctgcattcttactgtctttgaggactggaatgaaggagcaacaggctgtcaaggattctatggctcaagacaaacaccacaagctcacagaagagattgaatatcttcatggtttgtacgttcagttgttgaacaaaattgatcagtgccttcaaaaaatggaccagagtttggctggccaggaaatgatggagggggataatctttatcctgcttggtctcattatctttccatcttgaaggagttgtatcaaatttcaaagctttatgatggtgctgaagaaaagctttggggtgttttgacgcggcaaagaagtgtgctatgtctgctgatagttcgatatgcgaagagaactgatgagcatcagtggattctggagcataggtatgtaaccaattttgagtctagaaggcatttggccatgatgatgttcccagaggtaaaagaggactatgaggagttacatgagatgcttattgacaggtctcagttattgactgagtcttttgaatacatcgcacgtgctgagcctgactccctgcatgctggcctgtttatggaattcaaaaatgaggaagctactggcccgaccggcccaggtgtattaagggagtggtttcttctggtatgccaagcaatattcaatccacaaaatgctcttttcgtcgcctgcccaaatgatcaaaggagatttttccctaatcccgcatctaaggtacatcctctgcaccttgagtacttcagcttcgctggtcgagttattgcattagctttgatgcatagggtgcaagtgggtattgtttttgatcgtgggtttttcttgcaattggcgggaaactatattgctatagaagatataagggatgcagatccttatctgtatactagctgcaagcaaatattggatatggatgctgatttcattgattcagacgcattaggactgacatttgttagggaggtggaagaattaggacagaggaaagtggttgagctctgccctggtggaaaaaaccttgcagttaatagtaagaacagggacaagtatgttgatcttcttatacaggatcacttcgtaacatccatatctgagcaggtatcacattttgcgaaaggttttgcagatattctttcaaactcaaagctccagcagtacttcttccaaagtttagaccttgaagaccttgatacgatgttgcatgggagtgaagataccatttctgttgaagattggaaagcgcacactgagtataatggctataaagagacagatattcacatatcttggttttgggagattgttggaagaatgacagcagatcaaaggaaggttcttttattcttttggacatctgtaaaatatttaccagttgaaggtttccgtggtttggcttcccgtctctacatatacagatcccttgaacctggtgatcgcctgccttcatctcacacatgctttttccggctgtgtttcccagcttattcatctatggctgtcatgaaagatcgtcttgaagtcatcactcaagaacacattggctgcagttttggtacttggtgaatgaacacacctgcaatctgaatagaagtggttttgactgcacataaaattatcgttgtacatattataggatatttctcgatcttcttttttgcttcacacgtgttctctttctttttaatgctgatttattaactattggaccgttagaagaccttaaaccgttacctaacttaaggggtttgagaataacaataattttagcttataggttaggaaaaggtagattttttgagttttgttgccagtgttagcaataacttaaaaatttatgaatgacccccttgcaggtgagtataggaaccaattaaattcaatcccaattggc

SEQ ID NO: 42496 - DNA, 528 bp, Glycine max
  unsure (1)..(528): unsure at all n locations
  Clone ID: PAT_MRT3847_138375C.1
gccttgagagattaacgggaagcctgtgaacattcctgaagggcttgagctgcacactgggattttcagtgccgctgagccgaagaggattgntaattatgtcccctcgctgcacgaaatggggagaaaggccgcgccccacacatcccccctccctcttaggggggggggggaanaannccnaacncccccccccaccaaaaaacacccctnncnctcggggggccggggggggcgccccttccctccccacccgccccacccccatctaccacctccccgcgcgcggccccccccctcntcccccccccccccccccccgcccacccccgcccgtcgcctcctctcaccccccccgcccgcccccctcgcgccccccccccccgcccccccacagcccccgcctcctcgcccgcccccccctccccccctccccccccccccccccccccccacctcccccccccccccccccccccgccccaccccccccccgagcgccgcgcccgccccccccccccccccccc

SEQ ID NO: 42497 - DNA, 379 bp, Glycine max
  Clone ID: PAT_MRT3847_138376C.1
gggagtgcgcggttatggtctggtttcgaggaccagtgcctccagaagaagagaaggaaaaagagagttaatagctgaaattcattcatatgatgccgtttgcgccgtgatggtctggtttcgcggacctctgcctcccggagttgggctgttggtgctggacgaaatcaggaatcgggattcttgtctcccttgctaccagcagcaatcttgcagcatcattcttcaggatcaggattatcaaacggaatccttaaggtcaaagaaaagttctttgctttcttgctctttgcactgagttatcaaaacgagacaactacttgggtgttgcaggtcaaaggaacattctttgctttcttgctctttgcactgagttatc

SEQ ID NO: 42498 - DNA, 355 bp, Glycine max
  unsure (1)..(355): unsure at all n locations
  Clone ID: PAT_MRT3847_138377C.1
ggcgggggggctgccggtgttccttttattactttcctccttttttcgaaataaacaagatttcattaatgtagngcacgccggcgtgcggggcggggggggttccagggtttgcaatagataactttttctttcccataaaaggcatctaaaggctggtttacatatccaaataaaatcaactcaaatcactgaggctttcttagggggtttggtagccttgggtgggggtttaggttccttggaagccccctcggtcttcttgggcaacaaaacagggttaatggtcggaagcccgccaccatgtgcaatcggcactccagcaagcagttcccccaactccccatcgggtcct

SEQ ID NO: 42499 - DNA, 240 bp, Glycine max
  Clone ID: PAT_MRT3847_138378C.1
gagaacttgagcttgattgtcatcaatcaccaagtgatacagcccttcaacttgatcagaagaatgcactcagacttgtgaaattggagagtacgactcaaaaaatgacaaagcttagactctgaaataagattgaatgtaaattgttttgcagttgttcattacccacaacttcatcctttgactcagttttctgcagttgttgtgtagcatttgctacagcttgaacacctttcccat

SEQ ID NO: 42500 - DNA, 1068 bp, Glycine max
  Clone ID: PAT_MRT3847_138379C.1
accagtttcagtccaccagcttgtagaaaacacagatgagacctactgtattgataacgaagctctctacgacatctgctttaggaccttgaagcttagcacccctacctacggtgatttgaaccatcttgtatctcttactatgtctggagtcaccacttgccttaggttccctggtcaactcaatgctgatctccgcaagttggctgtcaacatggttccattcccccgtcttcacttcttcatgcctggatttgctcccctgactgctcgtggaagccagcagtaccgtgccctgactgtgcctgagctgacccagcagatgttcgatgccaagaacatgatggctgcttgcgatcctcgtcacggtagatacctgactgttgcagccatcttcagaggccgtatgtcaatgaaggaggttgatgagcagatgctcaacatccaaaacaagaacagcagctacttcgttgaatggatccccaacaatgtcaagactgccgtctgtgacattcctgctcgtggattgaagatgtctgccaccttcattggtaactccactgctatccaagagctgttcaagcgtatctctgagcagttcaccgctatgttcagaaggaaggcgttcttgcattggtacactggtgagggtatggacgagatggaattcactgaagcagagtccaacatgaacgacttggtctcagaataccagcaataccaggaggctaccgctgatgaggatgctgagttcgatgaagaccaggaagaggttgaacaggactaaattcactgttcattttatccatcttctgccatatgctctgcccatgacatcatcatgtggtgtcctagtcacagcatatttcagttttttacctcagacaaacctttgctgaattttttattgtttgcaatttgtaactagggtttgttgcagttctttgctttcatgtctactggtttattctagtcgagaccttaagatctgtgtttgcatgcatttgaaacccagttatttatacaagcctgttttgtacctgctgatccgacatgtgcctgcatcca

SEQ ID NO: 42501 - DNA, 356 bp, Glycine max
  Clone ID: PAT_MRT3847_13837C.1
acgacagatgggtacggctgacagaagacgacacaaggatacagggggagggagaacaacagaagggggcgcgctgcgagaagacaacagaagggcgaataatagtacgtgtttgtgagaaaactgataactgtgtatatatctcaacagtggctagtacttgtgatcatatggtcattactggtgacgtattgacgaacaactacaccatggatgaatgtgcaatttcttcggcggatatattaacgaccaacacggcggggggcactccaaccagggggggcgtgtgttcaaattcctgttccggcgggggagccacaatcgccttttcttcgggttcaaccacttttttttct

SEQ ID NO: 42502 - DNA, 431 bp, Glycine max
  Clone ID: PAT_MRT3847_138380C.1
tactgggacttgtaataattcttatgacacatgataggccatgggcaccagctccgcattcctctctccttctgctcctcttgctgctccacctcgccatcgccgctcacggtatcagcatcagctacggcacgctcggcgacaaccttctaccgcccgcggctgtggcgaacttcctgaagatgaggaggatcatctacggcgtgacgatctacgacgtgaatccggacatcctgcaggccttcgccggcagctgcatctccatgacggtgagctgggctatcggtgagatcgccaccttatggactatcgactctgcgaggcagtgggtggccacgcagatcaaaccctttcaggctgggacaggggtaaatacatcctcgttcgcagcgaagtccccactggggcgacaccgacatgattcgcgggct

SEQ ID NO: 42503 - DNA, 193 bp, Glycine max
  Clone ID: PAT_MRT3847_138381C.1
tatcatgcaaggggacctatgcattggaagcggtagagaagttaatgttaaatctggccttccagccacaacaagtactgagaggttggaacaactggatgatgatgagcacattcttggaattaggattattggaagggaccacaggctgaggaactattttggcattatcaccgtgcatccggaggtcatt

SEQ ID NO: 42504 - DNA, 196 bp, Glycine max
  Clone ID: PAT_MRT3847_138382C.1
gacgacattccaaaacacaaacacatacattgtagtatcacttgtgtctcggaacttgttcgtttgagttatggcaagcttaaaggttgcatgtgtggatttgacgtgcctggctgtgatgagtgcaccaatgatggtgcaacccgtgtcatgcaatgcagtttctgtgaatctagcaccgtgcctaacttacctg

SEQ ID NO: 42505 - DNA, 332 bp, Glycine max
  Clone ID: PAT_MRT3847_138383C.1
ggctcgagcaagaatgatcatcactgacgtagcatatatagctacacatatgtacataaagctctgagattagatcttatcaactcggccatggataattatgatcgtgatcttgaatctgcgaatactgataatcatacactcgcacccactgatactcaacgctacatcgaatacagacaagctgatggtcatgaacagcttaccggatatactgaaatagaagaacgtgatttacgtgacactggtgaaccatgccatgatcaaccacggcatatgctcgctcaccattcccggacatcacgaggtgatagtgatctggatgggagcct

SEQ ID NO: 42506 - DNA, 731 bp, Glycine max
  Clone ID: PAT_MRT3847_138384C.1
gtccatttaataaaccatgtgggaagtgctgacgggtagaagagatggcacagtatcgaacagtaacgaagccttggccaatatcccagcacctttcttcaacttcacccaactcaaagaaagctttgctggcaaaggtctcactttgcacgatctggttgtattatcaggggcacacacaattggaatagggcattgcaacttgttcagtaacaggctttacaatttcaccgggaaaggtgatcaagacccttctttgaacaccacttatgctgaattcttgaagacaaagtgccagagcctgagtgacacaaccacaacggtagaaatggatcctggaagctctaccaagttcgatagtgactattatccaaaccttctccagaataagggcctattccaatcagacgcagcccttctaacacaagagcaatcagaagatatagctaaagaattggttgatcaaaacaagttcttcacagaatttgcacagtcaatgaagagaatgggagccattgaggtcctcactggttctgctggagaaatacggaacaagtgttcagttgtcaactcataaataaatcatgtcctaatcaagagctgttttgtggttttaatttcctttcaattgtttgagttgctaattatgatcagttatcaaatacctctaaaccctcatggaaaggttattactgttatcatcaaattccaataaacgtgaattaagtatc

SEQ ID NO: 42507 - DNA, 185 bp, Glycine max
  Clone ID: PAT_MRT3847_138385C.1
gcctccgcttattcttttgaattgaacaacgtgtatatctctgcttgcatatgagcgtgtcacgtctgaaatatgcacacagaaattaaatgatgttcatttccggtccaaaaaaaaaaaaaggaaaacaaaaaaaaaaaaaaaaaaaaaaaaaaaaaacatcaaagtgtaatggtgctgttttg

SEQ ID NO: 42508 - DNA, 333 bp, Glycine max
  Clone ID: PAT_MRT3847_138386C.1
tttttaagaagcaaaagaaattatcttaatattattaaaaggttttggatatcagtggttttatattaaaacaataaaaacaagtctaatcataaaattacaaggaaatttgcagaggatttttcttacctcaaaatcagttgcaccatcccccaccatagttaaagttttgaaaccattagcctgaaaatcagtttgatcagctttacaagcaatgcaagtagttaaaaaaacaaaactcaacaagagggctgaaccttcttgatttgttggacagcaacagcttttcctccactccttgaagtaggctcatttttatcgaaccccagaaac

SEQ ID NO: 42509 - DNA, 1412 bp, Glycine max
  unsure (1)..(1412): unsure at all n locations
  Clone ID: PAT_MRT3847_138387C.1
gggccgctcgaggcggcgggccgggaaccgtgaaaacgatttgttggatatttatttctcctgctgcgacgactgccacgggttcagcagttcccccattttaagttagattattatcacacctcgtgaacacagattgcagttggtgcggaggatcgatctcgccatgaatttcaattgcactgctaacaaggagcaaaagaaaaccgtagaccaatctatcttattgtgctgcaagttctttgtctctgaatcacgcaacaatgccactctcaatgcaatagaacgagctgcaaggtcaaacccagaaactgtgattgtgaacatgtttcatgatcgagcttataacagggcaaggtacgaccttgtgtcgtatgttttgcatgactgcacaggaaatcccatatacagccccttgcatcaaactgtcatagccatggctgaggctacattcaatgccgtcaaccttgaattccatgaaggtgctcaccctcgcttgggcgcagtggacgacattgttttccatccacttggtcatgcgtcgctcgacgaggcagcgtggctcgccaaagcagtggcagcagacattggcaaccgattcagtgtgccagtgtttctgtacgctgcagcccacccaacagggaaggaacttgacgccataaggcgagagcttggatattacaggccaaattctaggggcagccaattgggccgggtgggcaatgcccgaaacgcttcctctaagcccagatgaagggcctaacgtcgtttcaagagctaaaggcatcacaatgattggtgcacgcccttgggtcacactctacaacgttccaattttgtgcactgatgtgtcagtagcaagaaggattgcaaggaaggtgagtgctcgtggcggtggcctccccactgtgcaaacgattgcgcttgtccatgaggactcaactgagatagcctgcatgcttttggactccaagcaggttggagcggatagggttcaaaatagggttgagatgctggccgcacaagagggactggacatagaacaaggttatttcactgacatttctccagaaatgatcgtagagaaatacatgaaattaatcaatagtgctaacaaatcgtgatcatgcatgtgtgtaactcattgaacttgttgatgagtaatcataaatgatcgaaggctgtaattttcagtaagtgtaaaacaaaggttatgaattgtgattccaaaatggttggctgggataacaaactaagggtaacaaatatatctatctgtatttatatatcaaaataataaccgttcgctcaactatctatccgtatttatatatcaaattaatgacccgtttttcggtcaaaaaaaaaannnnnnngnnnnngnnnnnnnnnnaaanaagggggggcgttnt

SEQ ID NO: 42510 - DNA, 487 bp, Glycine max
  Clone ID: PAT_MRT3847_138388C.1
tgcaaatacggagtcccggaaggcaacagcagctgtgccaactgccgttgatccaacgagaaagcgagaaagaaagtccgtaggcgactgagcggcatggcgtgtcggactttcgacaaggttgttcgtggactatgcatctttgcttatgcttccgaagcttctctcaatcaatttgcctccgtagtctgtagtctgtatgtccctcgataagctgaatttgctgcgcttcagccttggctcctcctctcttcatcccgcacggaacctcccgctcaaccttccccacactcaatcgtatcaatcaatcaacccacgcccggggaatgcgtgtgttcgatggcaaaagcgggaacagcaacaacagctgttgtttattgccacacgtatcagcatattagtattatttgctggactctgatgcttactgctgctgttccgactgccgtaagtactgctggtggattctgcagcatgtaatgctatg

SEQ ID NO: 42511 - DNA, 792 bp, Glycine max
  Clone ID: PAT_MRT3847_138389C.1
ggtccggaattccccggtcgaccccgcgtccgcgacgactggtacatgatcagtagttccccaattttcagttagatagattatcacacctcgtgaacacaggttgcatttgctgcggaggatcgatctcgccaatggatttcaacaaggagcaaaagaaaaccatagaccaatccatcttattatgctgcaagttctttgtctccgaatcacgcaacaacgccaccctcaatgcaatagaacgagttgcaaggtcaaacccggaaactgtgattgtgaacatgtttcatgatcgaagttataacagggcaaggtacgaccttgtgtcatatgttttgcacgactgcacaggaaatcccatatacagccccttgcaccaaactgtcatagccatggctgaggctacattcaatgccatcaacctcgaattccatgaaggtgctcaccctcgcttgggcgcactcgacgacattatcttccatccacttggtcatgcgtcgctcgacgaggcagcttggcttgccaaagcagtggcagcagacattggcaaccgattcagtgtgccagtgtttctgtacgccgcagcccacccaacagggaaggaagttgatgccataaggcgagagctcggatattaccggccaaattcagggggaagtcaatgggtccgggtgggcaatgcccgaaacgctaccgctgagccctgatgaagggcccaacgtggtttcaagagctaaaggcatcacagtgattggtgcacgcccttggatacattctacaacgttccaatct

SEQ ID NO: 42512 - DNA, 349 bp, Glycine max
  Clone ID: PAT_MRT3847_13838C.1
ctttaatctgattctgcaacaacatgaacctgagaatcggccacagggtgctgtgtggagtgacaaacagggtagatctagacaccgccagttataatcacacggtgatcgacaaccatgatgaatacgagaggctaatgctgctcacacagatgagctacctgaaaacattctttctgtacactgttattaccgacatctgaactaatctagaacggccggctcccagaatcaagtgcacggtctatgatcactaatgggggcatccatgttaccagatcggggaactcaacgaggactgcatcatgctatgcgttttgtggaaggtattgcagatggactcctcaat

SEQ ID NO: 42513 - DNA, 380 bp, Glycine max
  Clone ID: PAT_MRT3847_138390C.1
aacctgaacaacgggtcgcgtcgggcggtgcagcacatcagcacatcagcggggggaagcagctcagcccgcagctatgcaggggaggggcgcactgccgggccttacgggcaccgggcgcggcggcggcttcctcccgtgcggcagcctcggcaagcgaactcccgctggccgacgcggcgccaccagcgtcggtccgtgttcctgtaacctattacctcgctcgagtgaattgcctgctgtcagttccacgagttcaattgtctgacactgacagcatcggttggctcttgctcatcgttcgtgcagctggagtgacgcctttcgtcgttgcaggagtcgagttcggcaaaagaatcgtgagtgctactagaggctag

SEQ ID NO: 42514 - DNA, 491 bp, Glycine max
  Clone ID: PAT_MRT3847_138391C.1
gtagagcattatgactgggacaaattaactggctcccttcgtgtagcgactgatggtaaaagcactgagagacatcggagtactagtttccaggccgacgacgaccggactggaggttacagacggctggagctacgtcgggattgcgagatgcgatacgtgatgacagatggctcagtgaataatgtgcaccttgcgacgagcgatgtcgacgcacaccgtggatcctggataggagccttatgcagcttcaaagaactggtcatagaggtttgctgcatagtaccatgacaagaactcctagacgtgttggatgattacctgaatcggcgaagacttgtttacagaacaattgatgggaccactagtctggatgaccgtgaatcaggtataatggactgtaatagtcctgattgacactgtgtcatgtccgtgcttagtagtcgagctgctgggagaggccttgaccttgagtctgctgacacagttgt

SEQ ID NO: 42515 - DNA, 275 bp, Glycine max
  unsure (1)..(275): unsure at all n locations
  Clone ID: PAT_MRT3847_138392C.1
tgaagagatgctacaggggaacaagacccatanagatagtgatgtgggtttagcaaaggtgaatggggagttgcccatatcttctaacagtgttgaagaacctggtgcaaagttggattccaaggagaaagtagatgagtggatgttgcaccaaggcaatctatggcctgaaactgatgcgtcagatgatcccgtaaaggccatgaaagagccactgtcaaggaaagtaccaataccatcaggcagactcatcttacagatgatggttgtggcta

SEQ ID NO: 42516 - DNA, 1077 bp, Glycine max
  unsure (1)..(1077): unsure at all n locations
  Clone ID: PAT_MRT3847_138393C.1
tgccgagggctagtccacacattgcactgctcaaactcacctccatcttcattgtcattgcctcagcacctgagctgtgtggaagcagtaagactttcactctagtaaattactgcaaggagacaatatggcccggaataacgcgcagtgacaaccacagtggcgatggcttcgcattgaaatctgggcactcaactgtatatactgctcctgatggatggagtgggaggatatgggctagaacaggctgcaactttgacaacaatggccatggcaagtgccaaactggtggctgtggcaccagcataaactgtactgtccctggaagccctccagcaacaagtgctgacttcactcttggtgaacctgatttctatgatgttagccttgtggatggtttcaacttgcctatagtagtgaaagctattaatggcacagggaactgcagcactgttggctgtgatggagatttgaggcagaactgcccttcagagcttgcttctaaggacaatgacaaagttattgcttgccagttcggctggagcgtcttcaatactgatgattattgctgcagagggacttatggaaaccctgcaacatgtttggcttcaaactactccaagatcttcaaacaagtgtgccctgcagcatatagttttgcacttgatgacccaacaagtctaataacttgttcaaaagcagactttgttgtgatattctgtggatcaaggaatcagacagcttgttcctatcaagacaagcaggttgtatgtaatcgaccaaataaagcctataaagccatacctcagagctggtgggtcctgatgctcctcccattgacatacgtgttcaatttaaggatcacaccttagccgattatgcaattgaagaacttctctttgttacaatttttttttgttgttgttgaaattctctttgttacaatcattaattcattttaacaacattgattatctttgagctaaacacagagaagatgcttctcgatgtattttcttttacctaaacacattgagatttggatgtcctcaagcattaacgcnnnntataaagaat

SEQ ID NO: 42517 - DNA, 325 bp, Glycine max
  Clone ID: PAT_MRT3847_138394C.1
tctattaaacattaatttattcttatattttttattttattttttttttttggcaagcagtggcttctttggcagatctagcaaattacttcaacccttaaagctaaatattcaacaaaacttttatttgaagactaacttccatggtttattctctttaaccttgactctttttctagctgcaatttttcaaaatggcaggctctttgtagttgaactcaaagggagggacttaaaatgatctgatggcacgatatcttgaggctaattggccctttttaccatttttctcatgttgttctgcaagctctgctggactaattgc

SEQ ID NO: 42518 - DNA, 492 bp, Glycine max
  Clone ID: PAT_MRT3847_138395C.1
attgggtttttattgttatgcccattaatcaaaatgtctaattaggccaacttcgaggcccaagtgagccactcgttactacttattaatttattcactaagttgcattttttttttcgtcgcaattgttgatcgagtctgactcatggcggaggtaagtttccatttttctccgactctgattctcatcgctgaataacaaactcgacgatttcgttcaattaatccccgtttgcatttttttgttatcttattttcaggttccgattttattttttttatgtttttgaggagtagcatgttaatctgttattaaatttatttatattgtctttccgatctatagaatcattttaccactggctatttgcccatacaacaagtgaggtagtgaattgcttcttttccctctgcgtaaaaagattagcattttcgaattttattgattatggtgcttgctagttaataatcttataaggttcaaccattcaa

SEQ ID NO: 42519 - DNA, 343 bp, Glycine max
  Clone ID: PAT_MRT3847_138396C.1
gctacttcatgatactatgttctagtgggaatatgattttgtggaaaagcaaaagcaatctagggctgctagatcaagtgcaaaggctgaatttcaagtgatgaaaactacaacttgtgaaccatttggttattattatatttttttataagcatttggttaaagtaattgctcacagattttaacatttgtgaatcacagtcagtgtttttaatggcagatggtggaaggtcaaaattccgccatataaacacaccattgttgcctattgcaccaccatataaaacttcgtaccccattgcccagaggctcttcgctatgcgaaggtatgggggagggatgt

SEQ ID NO: 42520 - DNA, 357 bp, Glycine max
  Clone ID: PAT_MRT3847_138397C.1
gaacgtaaatttttattattttatgactattataataacctggagctatggaggatcaaattgatttcgaacactactaggacagagggaatacttgattcggctggtcatgccggtatagcggtacttgaaaatcacaacgcatgctcacaacttggcaaacatgtaaatcacagagccttacgctgcctgatcatacaaaatgccaagtaactattttaactatacaaagtcctgtaaacaataacaataatgcaccatttttacttttttgcagatttgcaaactgcgactgcaccttaatcctgcatggctctcattttcacactttctaaatacagccatgtgccggtgtga

SEQ ID NO: 42521 - DNA, 432 bp, Glycine max
  Clone ID: PAT_MRT3847_138398C.1
ttgtttttttttttttttttttttttttttttttttttttttttttatctctttttgtttggggaaaatatcactaagccggtttatggaatagctaacaaactcccaacatgatcacccgttttcacggaggacaaattttcaggcacctagcaatttttgaagaaaaattttaggaaaaaccactttttttcgatgaactccagccttgatccatttgttgggagtttgcacaacccccttatttgtgacaatgccctaaacacaggacactcaattcccagaacattatcacatcaactgggccactcttcaaatccctccaacaaatcgcatcttcaatcccctttttagaatcccggacggagggcttaaagccgtcaacaaagggttaaacacactgggacccttattgggggtagcccaaaaatg

SEQ ID NO: 42522 - DNA, 1025 bp, Glycine max
  Clone ID: PAT_MRT3847_138399C.1
tagatgtcagcttcagtggtagtatgcagaaaattctcgcacatagcaccattcaggcaagtttctacttcctgaaatacattatgtaggaatatgatggggtcttcaatgtcacacattttatgttttgaaaatctatagtgatagcatgatggtatattatcacatattttaagtcttaacaaagtattctgtattctgtatgcttgaaatttgttttatatccaggtgaaaacttatcgtatcaattccgatggagcagacgtgattcaacatatgattgacaattttcagatataaaattttcccatgttgccagcttccaatagacagggcaatgtctttatttttttagacggattcgtcactaagatggcttagagaacattagaaagggaaccatcaaattatgataggataaaaggagaagtataattgtaccctaaggagaatggtcccatttaaaattggttgtagttgtagatgagatatgtatagaaatcttaagataagatatgtaccatttgaataagatatctatctaattcataagataaaataaattatctacaacttcaatttaagtaaatcttaagataaaatatctatttaaatcctaagaaaatatttaataactaaattaggtctaaaaaaacacattaaagtttaaacagttctcaaacatacactcttgcccttgaccttatcaaatctaatagtttagacaaggataatcagcaaaatctttaaaattacactcttttattttacaaaattatgtttggtttgtaaataagccactaggtcgacttttttttcctgattgaaaggggctaacgccccaaagaaagaaacaaactaaacagaagagcctcaagctgaagcattagcttgtaacattggtaatgacggagaatttggaatttgaatttgtacgagttcttaagctttgtatttgttatatttgttatgtacataatataacatcaataaattttgcactccgcttatgacattgtaaatag

SEQ ID NO: 42523 - DNA, 790 bp, Glycine max
  Clone ID: PAT_MRT3847_13839C.1
ccacgcgtccgcaccattcctccgttcttttctagccttctagggtttagcgatctaaacacactaaccctcttctgttgtgttgtgcacgcctctctctctctctctctctgcatagcatggaggaaactccgtcttcagttccagcgacggcatcatgctggagcaacgtggtcaagaagcagccaccacctccaccgcagcagcacaccgagcgagtgttggtggaaaccagcgattcccccaatgccatctccgtagccgtcgtggacgccaacgcagtcatcgaatccggcgaaaagctccacggcctcgccgacaagttcatctccatccccgaagtcatggaggaaatccgcgaccccgtttcccgccacaaactctctttcctccccttcaccatccaaaccatggaaccctcctccgaatccatcaacaaagttgttaaatttgctagggctaccggtgacctacaaactctttctgatgttgatatcaagctcatagctttgacttatactttggagggtcaaattcatgggacaaaacatatcagggatgcccctcctcctgtgcaaatggtcaatgtgaagaggttgcctgagaaggacttgcctggatggggttctaacgtgcccaatttggatgagtgggaggcgttggaacatgccgaggacgcgtccaattccaattccaggatccttcctttgcaggaccttagcttgaacattgattctcaagatgagcattctgtggatggttccgtggagcctgtgagtgaagctgattt

SEQ ID NO: 42524 - DNA, 413 bp, Glycine max
  Clone ID: PAT_MRT3847_1383C.1
gctgattgcaatatggaacatccacaaattaacaaggttcataagcttcttctcacagcatttgttttgttcttccttgcaagtttgggtttgtctttccctttagagcctccaggaaataataggcaatggcacatgacttcagatgttaagcaagtggcaggaaaatcttatgactatattatagtcgggggaggcacttgtggttgtccattagctgctacactatcacaagatttctctgtgctactcatagaaagaggtagttcaccatatgggaatcccttggtgatagataggaggtactatggttttccattaattaagaccgatcagtacatgtcagtggcacaaagtttcacatcataggatggagttggcaatgtgagaggaagagttcttggaggatcatc

SEQ ID NO: 42525 - DNA, 314 bp, Glycine max
  unsure (1)..(314): unsure at all n locations
  Clone ID: PAT_MRT3847_138400C.1
gaagaacgactattcttgcangtacagatgcatcaacttccttacaaacttgctataactcagccaactacacactctgaagcacagttaaaagaaaaatatcaattaaggcttaaagtgctacaagagaatttgagagaaacttctaacagtattaatctctgcaccttaaacttacaatattttaacaattggccatatcaacttcaatccctatgttgagcttaatacatcttaaaacttacatctaatgtttttttaagagatcaccgtccaatcaaattaatttttttttttcttcaaacacaattttt

SEQ ID NO: 42526 - DNA, 1877 bp, Glycine max
  Clone ID: PAT_MRT3847_138401C.1
cgaaggctgaccccgctcatccacccctccaagacgcgatccatggcacatatgaacgtaagctcggaattcggctcgaggtttaggatgtatacattcaaagtgaagccttgttcgagggcgtattctcatgattggacagagtgcccctttgttcatccaggggaaaatgcaaggcggcgtgatccaaggaagtatcattacagctgcgtcccttgtcccgagtttaggaagggatcttgcagcaagggcgatgcctgtgagtatgcacatggcatttttgagtgctggcttcaccctgcccagtaccggactcggctttgcaaggatgagggtggatgcacaaggagggtatgcttctttgctcacaagcttgaggagcttcgccccttgtatgcttctactggttctgctattccttctccgaggtcctattcagctagtgcttctgcattggagatgggttcagttagtccaattgcacttggttctccatctgtcttgatgccacctacctcaacaccacctttgactccatctggagcatcttctcccattgctggatccatgtggtctcaatctaatgtttctgtccctaccctgcagctgcccaaaagcagattgaagaccgcatcaactgcaagagacattgatttagatattgaactgcttggactcgagtccgccgcgtccgcacattggcgtagacaacagctaatgatggatgagatatctgctctttcctctcccaactggaaaaattccatgcctaatagtccatcttttcgtgttcctttgaatgatcacactggggagttaaataggctttcaggggtgaagcctgctaaccttgaagatatgtttggatcgctcgatccatcaattttgtctaaataccatggaatctcacttgatgttgcaggacctcagttacagtctccaaccggaatccagatgcgccagaatgtgaaccagcagctaggaggctattcatccagcctttccactttgaatgtgattggatcgcggtccttcaggcttgatcagtctggcgaagcagcctcggtggccttgaatccaagagttgctgcctttgcaaagcggagccagagcttcattgagcgtggcgtggtgaaccatcattctgaacttccttctccaaagccctctaccttctctaactggggctcacctgttggaaaattagattgggccgtaaatggagaagagctgaataagctgaggaaatctgcttcctttggatttcgaggcagcgacactcctctaacaaagacttcaaccaaaatgtcagcaaatgttgatgatgagccagatgtgtcttgggttaactcacttgtgaaggatgctccaccggaatccggtgaatctggtgaatacagtgtggaagatcagcgaaagctactgcaatgccacaatggaacagatgcgattccagcatggttggagcaattgtacttggaccaggagcaaatggtggcatgattgcaatttcgtggcttgcggtagcaactccttttgcaactcaacagtttatttatttgatgaattttttgaattttatagaatttagttagatgacaattcgcaaaagggatcttaaaatagcctaccaaggctataggatgtagaagttgggcaggaagcaagttttctgcttcagtaactcattgattccatttttttttcctgatctattttctttcttatatgttatattgagttgtaagtaggaactttccattgactgaattacagcattgtagtggggatatagtattcaatataatgagactggagatgtaataattttattaattccaattccaattctcaatttgcatatcacaaaaattaaa

SEQ ID NO: 42527 - DNA, 177 bp, Glycine max
  Clone ID: PAT_MRT3847_138402C.1
acgagcggagagggacacgtggcgggagatggggagcggaatgagggagggatggagcggggtgagtgtggcggtcgggggaagggttttcgtgatcgcggagtacggggacgcaccggtgaaggtctacgacgaggagttcgacacgtggcgctacgtgaaaggggggaggtttcc

SEQ ID NO: 42528 - DNA, 827 bp, Glycine max
  Clone ID: PAT_MRT3847_138403C.1
tggcgaagcagccacggttgccttgaatccaagagctgctgcctttgcaaagcggagccagagcttcattgagcgtagcgtggtgaaccatcattctgagattccttctccaaatccctctaccttctctaactggggctcacctggtggaaaattagattgggccataaatggagaagagctgaataagctgaggaaatctgcttcctttggatttcgaagcagcagtagtcctctaacaaaggcttcaaacaaaatttcagcaaatgttgatgatgagccagatgtgtcttgggttaactcacttgtgaaggatgctccaccagaatccggtgaatatagtgtggaagatcatcgaaagctactgcaatgccacaacggaacagatgcgattccagcatggctggagcaattgtacttggaccaggtgcaaatggtggcgtgattgcaatttggcggtggctctttcttgctttcttgcaactcaacggtttatttatttagtgattttttttaattttatagaatttagttagatgacaatttgcaaaaaggatggtaaaatagcctaccaaggctataggatatagaagttgggcaggacgcaagttttctgcttcagtaactactacccgttactgggttcattgattctattttttttcccaatctattttctttcttatatgttcaattgagttgtaagttgtaactttccattgaccgaattacagcattgtagtgggaatatagtattcaatataatgagactggagatgtaataattttattaattccaattctcaatttgcatcacccccccaacc

SEQ ID NO: 42529 - DNA, 124 bp, Glycine max
  Clone ID: PAT_MRT3847_138404C.1
cgccgcgcagtgcactcgccaaatccctcaagggatccactcgctgcctgcgagatggggtcgacatccaccatgcgtcgcagccggcttttcgccaatcaggtcatgcgtattctgatggtgg

SEQ ID NO: 42530 - DNA, 416 bp, Glycine max
  Clone ID: PAT_MRT3847_138405C.1
ctgcgagaagacgacagaagggtacactaacattttaatttaaaagtatataaaatttgaaatcatctaatcgtttttatttatttattatttatttagtgtagttcttgatggatgaaccaaataagaggcttgaaacagtagctttgaattgagagatacatagtgaatgagaaatcaaaccccccaaccccattaggaatttatagtagatgtgtgataagttcttgaaagcatatgctaagggaaggaaggtactatccacatttgcaaggtacgatcgcaacggctcgtattataatgagatagaacgtgttaaattggcattgaataagagaaaacttgaacactaactgtacgcatacattatatgttctaacatgttctcaagctggagcatatatattaattatttt

SEQ ID NO: 42531 - DNA, 503 bp, Glycine max
  unsure (1)..(503): unsure at all n locations
  Clone ID: PAT_MRT3847_138406C.1
cggcatggcgctagacctactacatctgggaatcggatgaatttaattatctggtgtagaagttcggcttttagagagttgaagaaatatcggaaagatttttctagctggtgtggagaatgcagacgcaagaagaaggagaaagagcgcctattagttatggccacccaacaggaattaatgaacaggggaatgcaatcggcctcgggaacttgcacacacaaattgtccttgtatagttgattcaacattgagctttttttactttttctagattctggattgtttttagtgaaactagaacgcctgtgcaaaagcacaggaaacaacccagcagagtcccatttccgtgagtcattttttcgttaaaaaaaggtaaaatacaaagagagagaaaactgaacattgcatagaatgaagacacttggaagtttagaatggtggctggacagttgttataatactattgatgaaatgtgatgtaggttgaaagtnatacaaaa

SEQ ID NO: 42532 - DNA, 386 bp, Glycine max
  Clone ID: PAT_MRT3847_138407C.1
aagcaaagcaaatagtaaaaatggcgaacgcaccctgccttcgttgcagctctcttgctcttcactgctcaacgcacacttcttcttcctctcactctcagagcctttctctttcttcacacacttctcgcctctcctgggaataaatatagtactaagaaatctcctgggaaggtgaaggccgtgtatgctaatgaattttgggcgcctgagaggagttcacgtcagggaatttggtctatcagagaatagtacgttgtgggggagctgtggatgatgatatgtctaacatcatagttgcccagcttctgtaccgtgcggcctgcgggccctgcaggggttgtgtcgtcgaccttcattctcgcccagcttctggggcatgtggt

SEQ ID NO: 42533 - DNA, 229 bp, Glycine max
  Clone ID: PAT_MRT3847_138408C.1
acacaacaacgcaacgacgaacacgcaacttacgcttacgatacatacataatgcacgcaatcagaactatcattcttgtttcaacacttctctccgcggtgatcgccacatgtgatttctcaggatacatctccagtgctattggaacccggatctgctcaggatctaactcattctctctacaaggaactaactgtcctggatatgagcatgatgcaattagtttca

SEQ ID NO: 42534 - DNA, 437 bp, Glycine max
  Clone ID: PAT_MRT3847_138409C.1
cacatcaataaataatattccaactcattcacttccatttctttctcacatcaacccttttcacaaaagcaaggctataaatataggaagcgagggcgccataatcatattcctaaactcacatgcacagacaaccaaaaaccaaacacatctatacaactaacactcacacatatgaccaacattctacttatcctagaacggctcattgctgcttctgatactcttaacaacatccattttgccaacactgccccaatacttaatccatacctaaccacatttgtctaaccagaactaccctataatatacaacccaccaattgttgtccctcaatacccacacacatcatagattacaagtatcttacctccaaccaacccttgcgtatactaaccgctactcatctggtcaacaaagactatctagctaaata

SEQ ID NO: 42535 - DNA, 370 bp, Glycine max
  unsure (1)..(370): unsure at all n locations
  Clone ID: PAT_MRT3847_13840C.1
cgcccacgcaaccgcaaaaaaagacaacccagagagcgcgnccaaanaaacgccccncnccgaaaacccccagggcgnngcgacggacaccggccccgacgccgcgccgaccnncgagccgcggcgcagaaaaggttttttttcaggggatgttttcancggccaggccgggattcaggaaagaaacgcctcctgggggggggactggctggaacactatattcaaaacagaggggcagatgccaagtgacaagaccgggggtggaggggatgatgctttcaacaccttcttcagagaaactggggctggaaagcacgtgccccgagccatatcttgagatcttgagcccactgcgatcggagagagtag

SEQ ID NO: 42536 - DNA, 2548 bp, Glycine max
  Clone ID: PAT_MRT3847_138410C.1
cggcgatgatatgttcttcgatgctgtcattcgagttagtgaaagaattgtcatcggacattatttggtagaccttgcgtggtcccccctcctctgatgctcctccgcggctttcggcctcatccacgatgagtggaggcggcggcaagggcgggcttgccgacggtattctaccccatttggtcattcgagggtatccacaatgtggtcatccaatatgttcttttacgaaaggctcgtctgtgcgccttgccgatccacgtcgacgggtactggctctcagcgttagcggtcaaccggcaccaaaaccattgaagtcttggggtggtgggactgctgaatctacaccttctcctctggctcgttcatctagcttggtttgacttgaatggtggactcttgcccctgaccttcagaactcctcccgtccgtactccccgtccaagtcatgtaactcgtgcggctggagctgctgctgcagggtttagtcttcacgctgatgactcccctcacgcaagatgaattcacactctctccaatgatgtcagagcttctgtgacttcagatcgaagctttctaccacaatcaactatatatagttggagttgtgggcacttttccaaaccacttttaactgctgcagatgatagcgaagaggtatcagccagaagagaagagagggaaaaatttgcattggagcacatagcaaaatgccagcactctgctgttagcaggctagcaaatccaattgctaaatgggacataaagggtacacaaacagcattgctgcaacctttctctcctatagtgatagctgctgatgagaatgaacgtatcaggatatggaaccatgaggaggcaacactactgaacagttttgataatcatgattttcctgacaaaggaatttctaagctctgccttgtaaatgagcttgatgagagcttgcttcttgctgcttcatctgatggaaacattcggatttggaaagattatactctgaagggtaaacaaaaacttgtcactgcattctcttcaattcatggtcataaacctggtgtgaggaatctgaatgcagttgttgattggcaacaacaatgtggttatctgtatgcatcgggtgagatatcatctattatgctatgggatgttgataaagagcagcttgtcaattctaaatcttcatcatcagattgcagtgtctcagcattggctgcatctcaagttcatgggggacaatttacagctggtttcatagatggttctgtccgactttatgatgtcagaacacctgatatgctcgtttgtggattaaggcctcatacacaaagagtagaaaaggttgtggggattggctttcagcctggattagaccaaggaaagattgttagcgcttctcaggctggggatatccaatttcttgatataagaaatcatagcagtgcctatcttactattgaagctcataggggttcactcacagctttagcagtacatagacatgccccaattattgccagtggttcagcgaaacaactcattaaggtctttagcctggagggtgatcaactaggcaccattcgatactatcctaccctaatggcccagaaaattggttctgtaagctgcctcaatttccatccataccaagtattacttgctgctggtgctgcagatgcatgtgtttgtatttatgctgatgacaacactcaagctagatgaatccgcattttttccaatgatttcatcggttgtctccagcttagaagagtgcatcaaacatctctcaggattaccatgcatattttcttgtagttggataatcccgtgatgatgctttaatccctctccgctgtgaatacatctgaaaatattggtaggggtacattctgctgatagtgtatgcaagatattcattagcctccatgcttagagggttgcactcgacaggaagaaagtcatgcttattgattggaggcttcggcaaataatgtcaattcgtaaatgtgtaaatatcattttctccataattatttttcgttcctgttttgcgtgctattcccatccttccttgatttgtaaaatttttagtcagaatacataagctagtttgctgacaaatatgggcgactggctcctgaaaatgagccatgtcatgattgtagtttctgttgaatcgggggacccttgtttttaaccaacatgtaattaaattcaagtttgtccaagtgtgcaatttctgtctcagtgttgtttttaattacgtggaccatgtttttctcccctcacaccggatcatcacaacatcaggggatgtcctagctactaaatttggatggcttgtagtactaggccttgcagtctatctacatcatatcccttatggtatgagttgcatatatcatttgtaatattggagtgtcagtagggaattaagtatatatatatgtggacaaaaaggtaataaaattgttgaatgtagtcattatgtcataactatatgtatagcttctttgtgtcaatgatacaaattggaaatattttatcc

SEQ ID NO: 42537 - DNA, 317 bp, Glycine max
  Clone ID: PAT_MRT3847_138411C.1
gagagagaggtagagtgttgatactggagcggaggcactcgaattaggagagtgaagcaagaagaagatgaagatgaggcagaagaagatgcattgagaagacggtgtctgaggaaactgatctgatgctgtgactgggactatgtctgcctggaaatggaacgacggtatcaactgaagctgctgatgtggtatcatgaatcaggactagaggtgtctctgagactgcgactgatgaaacatgcacgcgtaatttaatgcttaagctctgacgcacagaagctactgctgctgatggtgcagatccacgtgagaag

SEQ ID NO: 42538 - DNA, 500 bp, Glycine max
  Clone ID: PAT_MRT3847_138412C.1
ggctcgagtgaaaagaggcagattttttttgacaggacccgtaaactggatcgaagaagggcataaccgtccttgggaaggaactagagggccccgcgctgaatagatcctctccctcaagcaatacacactggactctaaagttcaacgtcaaccccatagtatactactggttgttcttgccgcaacttaacttatgcccagctctctatggccagctatcatcaattgatacatgccatggccaaactccgcccgacagccccacgcgccggtccttctcccgcgccccgtatgccggcgcccgcctgcccgacctggcgctactactcgaccgccgcggtcactccgacatggtacgggagacggagcgacgagagctgcaggagcggcgcgccgactgaccctactcgaagccggtggcggcgctggacatgacgcgtaacatgggctttgttgtgcgataggaggacagctcgactgcaccgtcaaggagaacc

SEQ ID NO: 42539 - DNA, 534 bp, Glycine max
  unsure (1)..(534): unsure at all n locations
  Clone ID: PAT_MRT3847_138413C.1
atgccgcgtcgtagctcggattcggctcggtttatcttcgattccatggttgccttccatcttgtgcttgtctttcccgttggcttcttcatgtccctttttctgtcgtcttccccgactgacttcttccagtgtcaccctctctcttccatgctttggtgtattgacatgcatttttaatccccgtactaccaggctatccggttttctctccaaccttgttacatctttcacccccttgaatctcacgaagccgtatctcttaccccaccttttattgtttcttgcaataaaaaacctctcggacatccccccattttttaaactcataccataagtctgattcattcatctcctcaggaaatcttgtgaaaaagaaggaatgaatatcagatgcatccctccaatttgtttttcgcctttccacctgctggccatatccatttccggcatggntctgccgggatcctactctcatncactctntatctttttaaccccccccccccactctctccctgttnctctctctct

SEQ ID NO: 42540 - DNA, 457 bp, Glycine max
  Clone ID: PAT_MRT3847_138414C.1
gcgtgtctcggtacgtccgattattcccgggctactagtcggtggtcggccgtcgtccttttttttttttttttttattttttacttttgtatgtacatttatgaggtatgtttcaggttactgttctagtattcaaagccatacatcactctaaaagcatgttttgtgaaactagatctcgaggctgattacgtgtaaaacacttcattggcaacacgtgtctaaataaatggtgccactagccgcagtcaacaatgctttctttgttgatcggaatcgtgcggcacatgttttggccttggagcgattagaaacagttgccacatttaccataagcgtacatatacctagtccgttgatctgttcagaaacctgatgtaagcaattctccaggacgccgaatacttatggccctaataagccccaaagtccagtgtaagttcccatccccaagct

SEQ ID NO: 42541 - DNA, 484 bp, Glycine max
  Clone ID: PAT_MRT3847_138415C.1
tggttaatcgggagattgcgaagcggaacaacgatgaaaagctgagggcaaaagcattggccgtgaaggtgcgttatctggaggaggagcgtgactaacttaacgcgcgactgcgccactacgagtgcaagtatggcattatcagggagcaaccatatgagcaacaaaaacggaatgctattgacgcagaatcaatgcagtgcatttcctctaccgtactcaacctgtaagacgacagtagcggtcccatcgattcatcgtatacaacaaacgtagctgattgtgcaactctgtcgaacactgtatgctatcaacctgatcaacagcagcggtaacaaattcaaccgaatgatgttgaaaatgatgcggcagcgttggcagctgaacagctccaaatccatgcacaacaatttgaagcggtccaagcattgaaacgtgaagcgaatgaacgagtgcaacagcttgagctagagctgaccacaat

SEQ ID NO: 42542 - DNA, 247 bp, Glycine max
  unsure (1)..(247): unsure at all n locations
  Clone ID: PAT_MRT3847_138416C.1
actatagcgatagcggaccggcccgcgaagtaccgggcccgaactacccggtcgaccacacaccatttttcaaaaggctttttccagngccagcaacgacgaaggtttcgattgggggttgggatccacgaaccgggtggggcccgatccgagtcccctcaaagggcccgggttcctcgctatgaggcggggcccaaggactcaacagccgattttattgggggacatccccgccccgtctcacccc

SEQ ID NO: 42543 - DNA, 207 bp, Glycine max
  Clone ID: PAT_MRT3847_138417C.1
tttaccatgttccttcactgatttttccagtccaataaccagttgaatttccttgttgttgttgttccacttgatcagcagcacctgcagcagcagaaagctgtttgacgtctccaaaagggaacaaaactctgccaccacccctctcttgatcatatgatctattatttccgatcccattaactgaagaaaagttaagactaggtt

SEQ ID NO: 42544 - DNA, 346 bp, Glycine max
  Clone ID: PAT_MRT3847_138418C.1
ccagagaggttcacggcttcactttcacatcaccaaacacctctctcaaggctagctagcttcaatctctttccttctgcttctttttcctctcctcactgcatttattttcttttggacttttccactcatgcaccctcttatcccctctatttaacccctcttattttcttcctctcaacatattcacacacccctctttattctatacaccaccctttttttcttcttcctcctctttttgttcttcctccttccccttttcaatccttccttcaaccatggttggcttaacccctgaaaaaaataaaaaacaaaaacgtcatcttggaccggtttccattaa

SEQ ID NO: 42545 - DNA, 411 bp, Glycine max
  Clone ID: PAT_MRT3847_138419C.1
gtcttttgttttatccaaaatctaataaaagtcttttttgatagagaagaaacaacatagtgcagcgcggactgtactcatctaacaggaacaggaaatcacagccttctcatagactgactgctacaggtatcttcgggaggaaggatatccaaacctatgcagggatacagctggctgagaagaatcttttagctatcaaaaacagccatacccattttcagagaaatgcccaaatctgagaccaaatttagttgccggtatggctcgaacgaacatggagcaagatactgagatgaccctgaccgaaagggattcaccaccgccgcgaatgaatcaacatgtatcttttgtgaggggaacttaactggatgagaagagtgcttggggaatagaaggattgcggggaag

SEQ ID NO: 42546 - DNA, 447 bp, Glycine max
  unsure (1)..(447): unsure at all n locations
  Clone ID: PAT_MRT3847_13841C.1
tcctctagatcggncgcttgaagttttgttttttttttttttttttttactaattcttcaatcttatccataccacgcgcttcacatgcatatctaggaataaacaataacatctgggtgctcttaaaaaatcttaattgccacatctatcactgaatgcagtaacattttttttctttggggaaacaccaggaccgtttttattttaacttaaaacctactattttttaagacgaatgggcttaaaattaaagagattagaaaagaaagacttcaaactcaacctccaaaaccaaccttttttttaaagagcaacttcaacctatttcacttaaacatgcgggacacacacgttgtttttgacaattgcaacaccagccttaacatcatgcccatgtgtcttaagcacacaaaaacccctttgctttttgaagatccccctccccc

SEQ ID NO: 42547 - DNA, 630 bp, Glycine max
  unsure (1)..(630): unsure at all n locations
  Clone ID: PAT_MRT3847_138420C.1
gcagaatgttggaaaggtgcagaaaagaaaagcacctgccaagcctgcaaaaccagctcatgtcaagcctgcaaaaccaacacctgttagtgtcaagattgcaaaagcagctcctgtcaagactgcaaaaccagttccaaaaccagctcctatcaagaatgcaaaactagcaggtaaatctaagcaaccatcaaccaacactgattaagaaggatgttttgtatgttctaccattggatctgcacaactaaagaatactgctgctacaccagctgcaacaagtcctgttggccattatacaaaaatgtcttatggtattgcaaagtcagctaacacgggaaaacttaaggatgctgtattgcacaacaacaatgataaagctaagaaaaagatgaagctatctgaaaggacaacaccctctgcaaacgcagccccatcaagcattcataagctgaaaaagttgtgtgaattgataaaagggtcaatctatgcatgatgtgattgaaagtaaaataatgcaatcaaccagattgataaaattgtgcatgagcttggcttatccaaacaaagcanaatcaaatggacaagcaaatattcagaagggtgataaggaaaaatatgatgcgaaag

SEQ ID NO: 42548 - DNA, 359 bp, Glycine max
  Clone ID: PAT_MRT3847_138421C.1
cttacgcgtccgttacgcgtgggcaccaccgacgtcgtaggagacaacaacaacaacaacacgttccattctcgaggagagagtggttgggttccatggagaaggagttggcggaattgtacgaagcggcagaataaggcggatgttgcggacatctgcggcgacggcaaacattacgaaagcctatgcatcgatgcgctcgagcagctgaagaagtttgccggtgattacaggattttgcgtgacaccctggtgggccaacatattcaagttgtgacaaagcacccgaagctgaaaattaaggcctctgctatatgcctaattgagatatggcaaggcatagttatcaatgtaacaag

SEQ ID NO: 42549 - DNA, 233 bp, Glycine max
  Clone ID: PAT_MRT3847_138422C.1
atgggagcatttagggacgatgcatataacgttaaggaggaactggaagtccccgaggaatcccgcactcaagaccattaggatggtggacacgcgtcaggggtaacaaaaagtggcgattaatatatgaacatggtggcgtacagacttatggaactcgtgaacacggaattgcacctacctatccacaaagattgtctttgggactagggaggtcgggccggattacgagc

SEQ ID NO: 42550 - DNA, 265 bp, Glycine max
  Clone ID: PAT_MRT3847_138423C.1
tatagttgtcccgattcaatattccaaatcatgtttctggtatagtttgtatttatttttggcttaaatataattttcatatttaatatatatccaaattttatattccatctctaataaatttttcctttacataatatactctttgtctaccaaatatttgataataagagtatttattttaaaattaaattcaaagtaaaaaatatatactgttctctcaaatctgaatggctacctccaaattaaaaccctactttctccg

SEQ ID NO: 42551 - DNA, 674 bp, Glycine max
  unsure (1)..(674): unsure at all n locations
  Clone ID: PAT_MRT3847_138424C.1
ggagggttttcggtgcagagaatccaaacgcttctatggacgaaagagaaaatagagttaaaaaggttactactcagattttgcagagcctggagctgagctgagaaaacccccaaccccaacctcaaccttaacctctcctcactttcttttcaaccaggttctttctttctcacaaatctgattcattttccctataatttcccacttctactattttctctatttcttttattccctttatctctgatttcccgacgatccctttgcgttagggtttttcgctcgcttcttttcaattagtgatttaactatacctttgattgagatattggattggattctgtattgtgtaaaacaactctctagcacgattgtttcgctttctccgcgtctattttctagatcacagtgctctttgatggaccagaatgttttcgttttcacttttcaatgcgaccttttgatcatctatcctccgaatttgcgttaggttttttcgctcctttttcttcttcttttcaattgcctcaccgcaattactgatttagctatacctttgattgatattgaataggattctgtattttttaaaacaactctctaactcgattgtttcgatttctccgcgtggatntactagatcgcagtgctctttgattatctatccttcg

SEQ ID NO: 42552 - DNA, 292 bp, Glycine max
  Clone ID: PAT_MRT3847_138425C.1
ctcacgcttccgaaaaggcctgtgctatagttgataagcataactgtgtgaggactaaagagagagactgacaaaaacggccttgagccaagcggtaccgacctgaacggctatgatcataacctacataacatacttaaacatatgctcgaatttgctcactaatagtctcaaggaaccctacatggactaatacctctctcgtgagaagctgcattctgctctctccaaatgggtcgacgccaagcctgaaaatcctactattcgatcagacaccccatagcagtgatct

SEQ ID NO: 42553 - DNA, 1157 bp, Glycine max
  Clone ID: PAT_MRT3847_138426C.1
ccacgcgcccgcggacgcgtgggcggacgcgtgggtgaggattgcaattgccaagaatcctgcggcgttgtgctgtttgctgccccttgtctgctctccggacgcttgggttccactgggatgttttgcagctttcttattttttcttggatctccttgatttggatgaggaggctggcatgatccagaagtcaactaaccaaactgatcaaaatgagaatgtatttacttattatttctttggcttttttgggattcagatttgagaagaaaacagtctattccaaaatccctaaatcaaatggcggaagaagaatctggactaccaatagtcaatttgcatgcatctcattgtgcagtcatgaacttagggctccaatttttttttatatttagtagttttggaaggattgaaaaataaaattaaggattttctttccccatatgactacaggtgatccaccccaacagaagacaagtcaaggaaatgagaaaaagaaagaagatgagaatattactcaaggcgatccacctcaataggagagaagtctaagaatcgagatagaggaagaactcaagaatattacaaaaggcgatccacctcaacgggagagaagtcaaaaaattggcataaagaaaaagttcaagaaaatgacacaagaataacatgcgatgatgatgaagagagatcaagtctgaaagcaagcaggggctattctcgttcttcaacttgccaagtctgctcaacttgttactgtgaagggtgcatcaagtgccgctttgaggattgcaattgccaagaatgcagagactttatgctatatgctaaaccttaactaggctctgcaaagtgccatttctgaattgactcatttggcacctacatgaagacatgaaaactatatgatgttgcggagaaactttggacctctttattactgtttaagaaagttgtgactttttttcttttcctttggggaacttctagatggtaccatcttggcctttcatttgatcaaatcagaactagttctctttgaataatattgagcttgacatggtactcaacttaaatttttcttttttatattatctttttatacaattgtgtattggaggtggattgatgcttatgtctacagctgtttctgatcgtc

SEQ ID NO: 42554 - DNA, 218 bp, Glycine max
  unsure (1)..(218): unsure at all n locations
  Clone ID: PAT_MRT3847_138427C.1
annaaaanntttaaaannnaaaaacgggaacaaatttattcccattagcaaggaggggaaatatttaatttgactgactcacctggataaagcggacttagaaaattatttctcatttggacgacggaaaacccatggaaaacacagggcctataaattgttaaaaaaaacaaaaccaaaatacctttttatttttaactagataagcccccctaaat

SEQ ID NO: 42555 - DNA, 616 bp, Glycine max
  Clone ID: PAT_MRT3847_138428C.1
gacgtcgcatggcacgaccgtaccgtaagccttggtactcctctagaagacggccgcaccttttctttttttttttttttttttgtttttttttttctattgctttttttttggtatatatatttttgcttctttctgtatttttttatatgtcttgtcttgatcattattttcttctgttcgtattatcatattttattatttctctatctcctccaccacggacagggccgccaaaaaatgccgaacaaatgatattcgccaccctaacacacaaaataaacctaacccaaactttggggggagggccacctatgacctacctctcaagaacacaaccaattcacagaaggggggggtgcggaaaaagatcaacagccatagcctttacgggacggaatgccaaaaaaaagggcggggactgggccctgtgccgtgcatatccggaactgaacacggggccccaaacaaagttgggggaaaaaactttccccccccgggcgggggacggggaagaaagctcaccccccttggccaccaaagctccagggtgaggggccccccccccacgcccccgggggactgtttgagttctaaaagctttgttcgcggttgg

SEQ ID NO: 42556 - DNA, 193 bp, Glycine max
  Clone ID: PAT_MRT3847_138429C.1
gaagtatcgcctccatcactctggggtttggctttttccttctttgaacaacaaaaccccaatctgtttccttagccttcaactcactagggcaaggatcaacaccttctttttactttcatattctctcctctttcattatccatctctacaaagttctttcactcaaacatatccttaagatacctttact

SEQ ID NO: 42557 - DNA, 243 bp, Glycine max
  Clone ID: PAT_MRT3847_13842C.1
ttctagcgtctctagcgctgtccagttcagatttctctcaatgtcttcggagtaacacgaagccttgtaccgcgaataagacatgtacgacgacgacgtacgattctcaggaggacgaagagtacgaagaagacgacgacgaagaaaacgtgccctctccctcaagcgctttcgttttcaccgtcggccgtcccggttccgccgtctccaacggcggcggtggctctccaatttggaagccca

SEQ ID NO: 42558 - DNA, 419 bp, Glycine max
  Clone ID: PAT_MRT3847_138430C.1
ggtcaaacacggcatggaaagaggatggattaatgatataaaaagcacacaacacttgcacgtgggatacttctacggactaaacggataaacacatacggggattcaaaaagataccaaaggtacaaatataacaactgattaacaacacgcttaacaaaataacaaagaaaaatcctacactaaagcgtaatgagactgacaggggaaaagccaacttggagatttccataggcaaagacggcgtgataggccctcatgaaaacatcggcaagaatacacaaagcgaccctttggaggaggaacatcaaaaccaataaacccactaaggctaaacttatgtaatgctcttctccagattcttaataatatactcgactctggatgtggaggaacaaaaaggatctcatttcacaatt

SEQ ID NO: 42559 - DNA, 200 bp, Glycine max
  unsure (1)..(200): unsure at all n locations
  Clone ID: PAT_MRT3847_138431C.1
attngaaattntgataaacngngatcacaggttngngtatccttacaaaccggacacaaaangcaatncnnctacttngnnttgnagacnttctcaacttcctcctantnctttgtgcacgatttcttaagggacagaaaatnactctctgtgctggccacagacttcgtgaatgattttcntttcnagacnacatagga

SEQ ID NO: 42560 - DNA, 1163 bp, Glycine max
  Clone ID: PAT_MRT3847_138432C.1
ctttgatcttccaattttcacagaatatctctatcctttgaaaataaaatggttacacacgctcttccttttgtacactgtatctggatgtcttttgtttccgtgtatttctgacttgtaaatcaaaagcaaccccatattttgattattttcaacccataaatctctcttcccttgttttgattttctcgtttgaattctcttccttgctttttttctcctttctcacatcatcataccttgaagtccaccttggtttttgcttccctcttcaattttcctaactggtgggaactgtgtagttatctatgtgttctaaaatagttccccctcgtttctctttttcccatgatgtccctgagctacaaaagcagcaagatgttccacgcaaagacacaatgcttcttgagtcgaatcatgactttgagttcagcactatcagaagaagccttgagtttgaatcatcttctgcagatgaacttttctctaatggggtaatccttcccattcagatgcagaaaaagcgaaacactactaggaaacacaccctttgtggagaagctccatatatgagacttcctcctcttccatgtaccccgtctagcgttgacaaaataaagaaagagagcactagagaagttctagataagaaagctcactccacctctttctggggtttcagtagaagcaaaagtctcagttgtgatacaaagaaaagtttgatgtgttattcacctcctttgtcaaggagcaactcaactggttcggtgccacagccaaagagagtgagttcaaccaggcagcattcagcagctaagccactatcatcttcaagctcttctaccttaaatttgtatcctatacaaaggtctcgttcaggtaagagttatggaggatcttatgccaatggtctttggattagtcctgttttgaacctaccaactccctgcatttctaaaggaagtggtagtctcttcgggttgggttcttttttacgtgttgggaaggccaagaaaagcaagaagtgatttgttcatgttagttcgtggttaatcttgctagttggcttatcaaattcatcattgtttattctgatcagcgatcatgctagaaagacacaagtaattagcatggtactaaatgaagttgataatgtttatgcc

SEQ ID NO: 42561 - DNA, 247 bp, Glycine max
  unsure (1)..(247): unsure at all n locations
  Clone ID: PAT_MRT3847_138433C.1
agggggagcgcttgagaacaagccccaatcaancaacaaaacaatctctctggtcttcctctaactttcaagtttttaaagtaataagatgggagagacattcctatttaactcaaagtcagtgaacgaaggaaaccctgacaagctctgcgaacaaatctccgatgctgtcctcgacgcttgccttgaacaggaaccaaacagcaaggttgcctgcgaaacatgcaccaagaacaacttggtcatg

SEQ ID NO: 42562 - DNA, 177 bp, Glycine max
  Clone ID: PAT_MRT3847_138434C.1
cggcgttctagtgtgcgcttgtttgttgttggagctagaacacattcttttgcagatcggaactacccatgcttttttttctaacctgaaaagtgtttgctctgttgtgaactgtggttccggaagctcctgcaagtccgaaaacggctgcgaaggctccaaaatttccccaaactt

SEQ ID NO: 42563 - DNA, 229 bp, Glycine max
  Clone ID: PAT_MRT3847_138435C.1
gttttatgtggatgaggttcttcttgccctggagtatttgcacatgctgggatttgtatatcgagacctaaagccaaaaaatatcctaatacgagaagatggacacattatgctgacagattttgactggtcactcaggtgacgtgtcaaaccaatgtaattgaagccatcttcacctgactcagaaaaaacagacatagccgtggccgaggctaattgcatacacccg

SEQ ID NO: 42564 - DNA, 212 bp, Glycine max
  Clone ID: PAT_MRT3847_138436C.1
aaaaaaaccccagggggggaattcccctggtttaagggcccacattagttaatacccttttgccggggctttttttgggggggaaaaaaaaaaaaggcggggggggactttcccacccaattttaaggcccaaagtgtttctttccggctttcgggcttaaagcccaacctttttcccgcaaactataaattaatcttttgggcaaaagagg

SEQ ID NO: 42565 - DNA, 353 bp, Glycine max
  Clone ID: PAT_MRT3847_138437C.1
actattggcgaatggtaccctcagccgccgggacgatactccgctgaaattaaggtgcgcggaggcgcgacctaaatcataatcagagccaccagaacccaacccgctctcagtgagaatggaaggaaaatcagggaacttacctcagtggctcacaagacgttcaactttcccgagaccgctttgaactttatgctgacaaggtcaacactagggggggggggggctatataacacgctgaggatttacagtacaatcttcttgaaggtctacctgtgcacagcgcttgctgtgatatcttgaatctctttatggagactgagactaaggtattcgaatactatcggattcg

SEQ ID NO: 42566 - DNA, 567 bp, Glycine max
  Clone ID: PAT_MRT3847_138438C.1
ccccccccccccccccccccccccccccccccccccccccccccccccccccccttcttttttttttttcccttaagaaaaaaaatatttttgaccccttccacctggtttccaaaaatccccccagttggtttgccccaaggaaaaatttgccccccaggcaaaaaggtttttttggcccaaaaaaacaccaaaacctccccaaatcccctgcccaaaccccccagggcaaaattgatttttgccttctttgatttgactgaggcttcaggatctttttttggtgcctgaaaaaccagggaatcaagtttttccagggcccccaggctttcatcaacatctttgaaggccgttttccccttgcccctgtcaaatgcgtcccgccccccctataaaaagattgggcccctctaattacctttcttccccctaattccctaaataattaatctccccccaagggaatccctttaaacctggatatcatcaagggggggggctttgacccccaatcctgaaaccagttcgttgttctgggttgtttaggagtcttttgaaatttgcttg

SEQ ID NO: 42567 - DNA, 204 bp, Glycine max
  unsure (1)..(204): unsure at all n locations
  Clone ID: PAT_MRT3847_138439C.1
gtttgatcgttcggtgacatcaataaagtgaaattaggcgtgatcctctaggtgagtgtgctctggctatctgaaaatggacacacctcttttaattgtcgtaatgatgtgtgaagtgtgtgttattttaaaaaaaaaagaacaaatncaaaaaatgcattacctgaggggggcgattcataaggggatgtggctgccccgaaa

SEQ ID NO: 42568 - DNA, 297 bp, Glycine max
  unsure (1)..(297): unsure at all n locations
  Clone ID: PAT_MRT3847_13843C.1
cccacgcgtccgcgctctgataacatcattatgtttttcttggacaantcttatgcatggcttctgtgttatatctataccactcattcttcactccatgctacttcaataattatcaaatactttttcttgcatatctttattaacattacatttttcaatttttatataatcctttttaaccattatattctataaattattactaatatattttttccttttcaatcaaatttttttccatcaattccgaaatttttaatatttcatcaatcgctttttttatttttaattttt

SEQ ID NO: 42569 - DNA, 140 bp, Glycine max
  Clone ID: PAT_MRT3847_138440C.1
gctgagatgaacccattcttctatggggaatatgggggtgtggatgtcctaagctcgactccaatgttactgtgcctgatgtcaacgaagatcattttctaatcaaacttgtttctgctgcttttaaccctgttgatccc

SEQ ID NO: 42570 - DNA, 218 bp, Glycine max
  Clone ID: PAT_MRT3847_138441C.1
ccactactactacgattgtaatatacctatacttaactaccacagtcatgcatcttatgttggtgccggtcccacaagacgcggcgaagcgcatatacacgctcaaaaaggtcatggatggcgaaatcagcatgagcgcgcatccagcgcgcatgtggcctgatgacaagtactcgaggcataaggttacgatccataagagatatcgattgcttttg

SEQ ID NO: 42571 - DNA, 573 bp, Glycine max
  unsure (1)..(573): unsure at all n locations
  Clone ID: PAT_MRT3847_138442C.1
tttatgattttactataccgtggaataagtggtcaagattctgagaagataccatttggattttttgatagaaatggagaattcatagagacttatataacagcaaacaagagaattgatactggtgggaatatgcttggctgtttctgcttcttgcagattgtaatgcctgacctaaatcaaccctctgaagagcataagcctagaggcagggaaagcatttctgaatctaaagagttggcatatatactgcaagagatgaagaaacctttaaatggtatacgattcactcgcaaacttttggaaaatacagctgtctcagaaaaccaaaaacaatttcttgacactagtgatgcatgtgaaagacaaatcttggcaatcattgaggatacaaacttangaagtattaatgaaggcactttgcagctaaatatggaagaatntgttctgggaaatattttagatgccattgtcagtcaagtcatgatgttgataagagaaaagaacttgcaactgtttcatgaaattcctgatgaaataaaaatgctttctctatatggtgaccanattaag

SEQ ID NO: 42572 - DNA, 193 bp, Glycine max
  Clone ID: PAT_MRT3847_138443C.1
tgggggattcccgatgctgctgacacctctccaatccaactacaaagctcgcaccgttccttacatattcccctccgagaaccctcgcaagaccactccctccgagatcgctaggattggtctcttccacaactctgtcccctcttcccaaaagcgtgcagacagcgatactactgtgcctgatgctagcatc

SEQ ID NO: 42573 - DNA, 468 bp, Glycine max
  Clone ID: PAT_MRT3847_138444C.1
ctgcttgggggggggggggggggggggggggggggggactggccaaaaagtaaaggaaatactgcaatataagaacaatcgaaatctagatagcggataagacattccgaatatgtttgcgcggctaaaaggctgctaggggcaaaagagctaaaacgccagtagggtagtaacgaagcgtaggcgggtggagcccgcgtaaaaggatgataccactgggtgtagtaaagggacctgcgcttggggaatgtacaaagcaactggtcaggtgcttggtagcgtagaatggcctgatgcagagtccccactaaattgcgttagggcacagagacgggttggtgttaggtatcataaggaggccgggctggccgtaggacctgggcccgggggcacaaggttaggcgtaaggaaacctgcgactgtggggggaataacgggcgcgatacgtcccgtgccacagggtaaaaa

SEQ ID NO: 42574 - DNA, 255 bp, Glycine max
  Clone ID: PAT_MRT3847_138445C.1
cagttagttacatgttcaatggcggttcagagctccacttccagcgaatcgcaagcttcggagaacgttatgcatcgccatttctttttatggagagagtttctgtggggagctgttgcgggtgcatttggggaaggaatgatgcatccagtggatactgttaaaactcgattacaaagtcaagctattctaaatggaattcagaaccagagaaacatattgcagatggtgcgatatgtgtggcaggttgatgga

SEQ ID NO: 42575 - DNA, 253 bp, Glycine max
  unsure (1)..(253): unsure at all n locations
  Clone ID: PAT_MRT3847_138446C.1
gaagggaccctctacgttggttttgncgcgnccaatcaaagcgacaagcgggttattcaccgaggtggggtacaaaggtgatgtgtttgtgtccccaataaggctgatncacttccagcaaaacgtatgtttatggaaatgcccttgccatttctgctcttattatccaaaaccccggagttattacaaattcaaattctgtttttggatctatacctcctatctcttttttatttttctccaaatcttttta

SEQ ID NO: 42576 - DNA, 244 bp, Glycine max
  unsure (1)..(244): unsure at all n locations
  Clone ID: PAT_MRT3847_138447C.1
attagttcggggccgcgggctatgctcttatctcttgggatnntatgctgtgatcatcatgggaacttggtttttcgtggtgattgtgcattttcgtgcgttctcttgttcgtagagcagacgatccttgctcgtggtcctctccnggttggtgttgttgtttgttaggggggggtcacatttctttgcgccctgttctttgtgttgttgtgtttgtcttctctgctccttgtgtgtcgcctgt

SEQ ID NO: 42577 - DNA, 945 bp, Glycine max
  Clone ID: PAT_MRT3847_138448C.1
gcccatcttcatttgaatcaaagaagaaactctcctcattgcgtccgcttctcctcactctcttttctttctttctttcttttattctattcctctctagcactcccttgtgttgaaacatcttcaacctgagagtttacttttgtttggtttttcattatagcattattattatggctcagaagtacttgcacgagctacttgaggaggatcaagaaccgttctttctaaacaagtatatttccgataggcgaacccagatgaagaggccttccccgaagacgagtctgcaagtgaagaaacgcaaatcaaccaatccaaacacaaacttcccgagaaatctctgcaaaagcgcttgtcttttctctctcacagacaccccagacctcagaaaatcaccactcttcgaattcacttccccagtcaaaagcccttgcaaatcaccaaacgctatttttctacacatcccttctagaaccgctgctctgcttctagaagccgctctcaggatccagaaacactcctcacatgttacttcaaagcccaaaacaaaagcccattccttcggcctcttcgggtcactgtacaagagactcactcaacggaaccagaaaaagcatgagatagagagtggtggaggcgttaagatttccgtgaaggatgttttgaagtgggattcttctgtggggcgaagaaaagtttctaaagccaacgggaaatgcaaggagcaagaagaaacagtgaatgtgaatgtgaatgtgaatacgtgttcttacaatggtagtagtgctctttggtcagagagcaatgaagataacaaatcactagacatggaaacctcaagtagtggctactactctgaagagattcacttcgtaaccaatcacaaacagtactccacgtgcttctgcgaaagcccgttccgttttgttctccaaacaagtt

SEQ ID NO: 42578 - DNA, 191 bp, Glycine max
  Clone ID: PAT_MRT3847_138449C.1
cacatcacgggatccggggattttcggttgagggcccagggatcaaacataaataatacccagaaaggaaaaaaatatgcaaacgaaaatccaaataattatgacgctatacataattataccaacagtacaacgccacatttaaggggggggggaaaattaggaaaacaatgacaaaactttaaataaaa

SEQ ID NO: 42579 - DNA, 105 bp, Glycine max
  Clone ID: PAT_MRT3847_13844C.1
cacatattccgagttgacaaagagctatacaatactacagctcgtgtcgacaatcttggagactgttatactttagcttggccaggaagatttatctgtccacta

SEQ ID NO: 42580 - DNA, 157 bp, Glycine max
  Clone ID: PAT_MRT3847_138450C.1
gaacacaatagagaatctactaatggaaagcaagacttgcactattgaatacaaatacccagccatttcatttttcacaaaaaaggaaggggcccaaaactacgaatgattcataaacggcggtacataaccgcacaataacggggagggggaaaga

SEQ ID NO: 42581 - DNA, 222 bp, Glycine max
  Clone ID: PAT_MRT3847_138451C.1
ggcacaagtgagtttgttgatcgagataactagaaacagtgtgatgaaaatgaaggtccttgctttcttcgttgctacaattttggtaccatggcaatgccatgcttacaatatgttccctctcgaattgaacacgggcaatggtgcccttatcccggaggtaaattccccaatttgaaggcttccgttggaacaaaacacaaccttgggctttaaaacaat

SEQ ID NO: 42582 - DNA, 1675 bp, Glycine max
  Clone ID: PAT_MRT3847_138452C.1
ggaattcggctcgaggtcctgttggagaacaacattgtctttctcttctgtttctcctctcattgatgttgcttcttccccttttcttacccttcagaaaaaaaaaaaccaacacacttcaaatccattcttagaactcacaatttctcactgaaaaacaaaaatcactcatcacccttctgttccaaaactgcagatctcacacctcttattattatctctatgcaaaatgaacatgtcagatataatatcttgtttcaacgagaacgcagtgaatgtgtcacactcttcatgttctagctactcaaacaacgcttgcatatctccaagtgttacaccttcatctcaaaattcagtgtcttctgtctacaaaaccaccctctcaaaccaaaagcagcttctgatcacagtcacgtggtgcaagagccactccaaccaaggactcaacgtaaccttcggcgaagagaacaacaaccctttggcaccatctttcagactcaacaccaattcacgctttttcaggaaaaagaaaggaagcaaaatgttggaatccgaagactcaaaagttgaagtcttctgggacctctcgaaggccaagtatgacactggccctgaacctgttgaagggttttacgtggcgattctcgttgatgcagaaataggcctcattctcggtgaagatgtggccaagaagttcaaaacaagaacccttttgggcaatgtttcgctgttatcacggcgtgagcattgctcgggtaacgccgtttacgcaaccaaggctcagttttgtgacactggaacttggcatgacattttgatcagatgcagtggcgagaatgaaggactcaaagctcctgttttgtctgtttgcattgacaagaagacggtgattcgtgtgaagaggctgcagtggaatttcaggggcaaccaaacgattttcgtcgatgggttgcttgtggatttgctttgggatgttcataactggtttttcaaccctgcttctgggaatgctgtgttcatgttcaggaccaggagtggcttggatagcagattgtggttagaggagaagattgcacagaaagataaagatagagttgaattctccttgttgatctatgcctataagaacacatgagggaactcattcttcatatcagatcacaggaatccttcacggtagacaactgtgctttatttctctgtattcttccttgggacctgaatggtactgtatattaaggactcgaagtcgagactactttttcagataagggaacttgttcatgttgatttttttaacaccttttattttttccttgtgtatttttgttttgttttgttttaactctttgtttttagtttcccctttcttcttgaaaggatacatactaattattttttatgataggaaacagaaagaaaataaattgagtgatattatcagaatagttagttgagcttgtaacctttatttctctgtattcttccttgggacctgaatggtactgatactttgtttgactgtttgagtagtgtctagtactggattctaccaaagatagagaagaaaaagaacaataaaaatgggttagaaggtttctttattcttattttgtttttcaggatagagaatcgaacaaagtgtttaagacatgaatatcagtgaagatttgct

SEQ ID NO: 42583 - DNA, 565 bp, Glycine max
  Clone ID: PAT_MRT3847_138453C.1
gagaatgaaggactcaaggctcctgctttgtctgtttgcatcgataagaagacggtgattcgtgtgaagaggctgcagtggaatttcaggggaaaccacacgattttcgtcgatgggttgcttgtggatttgctttgggatgttcataactggtttttcaatcctgcttctgggtatgctgtgttcatgttcaggaccaggagtggcttggatagcagattgtggttagaggagaagattgcacagaaagataaagatagagttgaattctccttgttgatctatgcctgtaagaacacatgaggggacccattcttcgtatcagatcagaggtatctttcaccacaataaatatttaatgcaactgtatattaagcactccaatcactacttgttaatgtttgattttttttaacaccttttttttcttgtgtattttttttaactctttgttttttgtttcccctttcttcttgaaaggatatatatactaattatttttttatgataggaaacagaaagaaaataaattttgagttgcataaaaaaaaaaaaaaaagaaccc

SEQ ID NO: 42584 - DNA, 253 bp, Glycine max
  Clone ID: PAT_MRT3847_138454C.1
ctgagggtctcttggaccgatcagagatccccgagtacttgaccggagaagtgcctggagagtatggtgttttcatctctctagtttccttttctttcatgctacaactctcattgacatgtgaactattgaaaacttgatgttactgaatgtttatagtgttcaattcttgttgctttgtttgatttgctgatctgcatgcctgcagttatggttatgacccgtttggtcttagcaagaagccagaggactt

SEQ ID NO: 42585 - DNA, 435 bp, Glycine max
  Clone ID: PAT_MRT3847_138455C.1
accagacgttcgagcacgcaccataatcagcattgcatatagactaccatcaggggtggacggacatacaatgatggaagcaaatgcactgcggctcatgctactcgatacaccgccctacttgctgaagcggccatctttatccgaaacgctattgcatgagtctgcagtccggaacacgggcctataaaagagggccatgcatccatctatatcatcaattcacacgatgacagagaacccaacttaggcctagccatattagaaagcattgatcatgcaagcgccacatgcaacgacaacggcattgtacttgctagaggggcagacaccatccagaatatcagatgctagtacaagtgaagagcgagcacacatggagaatcggctgtctaactacactgtggcttacgaagctctaggatacgctcaacc

SEQ ID NO: 42586 - DNA, 1709 bp, Glycine max
  unsure (1)..(1709): unsure at all n locations
  Clone ID: PAT_MRT3847_138456C.1
atgaagatgtagaagtacaggaaccattggaagagagtgttgatgcgaatcaggaagtgggtgggtttgacttatctcctcggagggataaagcaattccaaagcggaattctcagcttaaacacaaacactctgcatttcgtgcatctcataggggaaggggagttgaaatatctagtccgaaggaagtgaaggcaaccaaatcatggagcaaacatgatcctgtgcctagtgctgaagttaaaaaagttcgggaatccctaaaatcaagttctttggagttacgagcgttggttaaggatcctcttccccatgcattgcatatatctgatgttgtaagatccaaattggcaactagtgatacaaaaactgagccactgattgaaaaccaacatgaagatgtagaagtacaggatccagatgtttgtcagagtattgtaccttttcagcctaatgatgtcaatcttgggaagaagtcttttgttcattgtagtaatattcatcagcccagcttgatggaacggaacagaagtgctcgtacctttgagtgggaggattcaatagacaactcacaacaagcaagacagccaaggaggaggaaaaggaaatggagttcgttggaagaagagacactaagggctggtgtaaaaatgtttggagaaggaaactgggcaacaatccgaagtttttacagtaacatatttgaaaatagaagtggagttgatctgaaggacaagtggagaaacatgatacggtgacactaacgcgctactttcatgtgtatatcttggtaatgacaattttgacagcagcttctctctatgcaatcaagctttgttaaaacaccatccaaatcgtacagttagtgaggaccaactggtatccaaggccctttcaaacacatcattcatccccgcgttttggtttcaatggctcagctgaaggttcccccattatggtatgctcggtacgaaaagaaatcatggcaatttcgaggtcttaattgtattagttaacattgaatttcgtatgatggtgttttttgtttcatctgtatattcaattattccttgatacggctacgagtatgatagctatgtaaatttttaatccaacgtatgcttttgtctagtaattaagtcgtagaatttttcaaaaagactgggcttcgctccgtgcctctctcagccccggttctgacttcagaggcggtggggggctcaaggtggcctggaggcgcttgacaccgtgacacttgtctgctccgctcgtgtgtttatcccggtcaggtaatgacaattttgagagcagcttctctctatgcaatcaagcttttttgaaacaccatccaaatagtacagttagtgaggaccaactggtatccaaggcccacgcatgggccttttcaaacacgtcattcatcactgggttctggtttcagtggctcagctgaaggttggatttgaaattgcaggttttgatgatgcatgcatatagcattaatatatctataagttttgtggttgttacctgtttcatgttttaaagtagcttgtaatcattaagtagagtaaggtttcttgtcatggtgtcaacaccttgtaatgaactcctgcttctctttcgcccaaggagattttaattttcttgctactaattttgaataaagaaatcgaaggatagaaacttcnnaaaaaaaaaaaaaaaaa

SEQ ID NO: 42587 - DNA, 461 bp, Glycine max
  Clone ID: PAT_MRT3847_138457C.1
caactacgcatacgaagtatgcaaggactgtaacgatgtcctttaaactattcggccgaccgttgagtgaaaataaaataggggaaagtagcatgtcgaaaaagcccgcttgctggaaagcggataattccaaaaaataatgggtgaagtaggttacttatgaatagaatgttaatttcaaatcggagtcaaaggctgggttacatgatcaaatgttttaaccgcaatcgaatatttgtaagagcttgtgagactaaaagaaatcgatatcaagagttacctcttacagccactattacactagatgtaatatgtatgactaaacgagttctaagggtaaatatactagttgtagtagtaactgtgggattgcctaagtcttcaaagagatatggtaacggaggattaataataacagctactaaaataggagtttttagtaatacgtctaaagtaatgtt

SEQ ID NO: 42588 - DNA, 678 bp, Glycine max
  unsure (1)..(678): unsure at all n locations
  Clone ID: PAT_MRT3847_138458C.1
tatgacgtncgcatggcaccgcccgtacgtaagnnctcggnannattcggcttcgagggcgtagataatgatatgantagaatgtagagagaaatcaagaacatgactgtgaccaagccttacggtgggtctggcttgccacttggggctccgccatcgtctccaacttgtatgaagagactatacacccgctttactcgacgtgaagaataggcgatacctaaatatcctctgcggaacttcgaagtggagaccaacctggatatgtcaactactgtacttgcagggaatgatgcaaacactggacacttagtcatcacctctgttgggaggctagccatgaggtaacctactcggaccattattgacatactaaaacgtggatgagacactggctattattagatgttttgcactaaaacttcctagaaaacagaagaggcaggggctactatagaggactcgcaagacacgcggatcttaagtctttaattgcataaaatgcgctaaatggatcaaccatgtgtaatttccctgaagcactgaatctttttcacggcatgctatgatgaactgtttctgaccttggtgatggaatatggacctgaggcattgtaccgagttaaaagcattgcgctactatgaaccagagaatgcctctcatctacaagaaactgc

SEQ ID NO: 42589 - DNA, 189 bp, Glycine max
  Clone ID: PAT_MRT3847_138459C.1
atcacgaggaggagatttgcatagttgttgctgactcacccactgagggtcagtgggagggggggagtgggaggcaggtccgataggatcgtccgcgcgagaaacgtgggtgtggcctccatggcacgctatgtgaggcggcttgtgtgtgaggacacgaggcggagggatgcaacacaatgcaatctt

SEQ ID NO: 42590 - DNA, 259 bp, Glycine max
  Clone ID: PAT_MRT3847_13845C.1
tatggatatatgatatataaaactatctcgaatgttcggtaactccttctaattgattttttaacgatgatttggagtgagatacttttaagcttgatcagacaaagaaaattataatctttaagcgatcatgatggaagagtgggtccccacaatcttcttccctatcttaactttttaggggaagataatgaaagattgtgttgtgttgtgtcacagtgacttcagtcctttctactaagggtgtgtttgacttaag

SEQ ID NO: 42591 - DNA, 342 bp, Glycine max
  Clone ID: PAT_MRT3847_138460C.1
attggacaggggtttttttttacgggactggcacaaagcagcatgaaaaggcttcatttttattattatatcaatccaaccccgcgaaacaggttaagggctatttatttgctacgtaaattttgggttgcaggaaacacctggggcttaacttaaggacttgttcagtggtcacccttgaaataccaaaagcaaatcccaagggaaaccttttgataaatctttgcaaggggaacttctaggaacttgtcttataaaagtaagaaagttgttcccaccctgtaatttggtgactttgtagggttactcaacataaggaacaggtattcttttggtgccagg

SEQ ID NO: 42592 - DNA, 263 bp, Glycine max
  Clone ID: PAT_MRT3847_138461C.1
gctcgagaagacgacagaaggggaggaagaaaaatggtgaatgcactcactcacagtcagagtcagtttgtgttggtgctattgaactccaattgcagagggagcaagagtagtagcaacaccgtcttccgaaaaccctttgcgaaattttcatccctcaccactaaaatttgccacgcctcttaccaccgtttcgctgacacaaagcacacaacccttctggttgagacttaccatctccatcacagcctcagagccttact

SEQ ID NO: 42593 - DNA, 426 bp, Glycine max
  Clone ID: PAT_MRT3847_138462C.1
ctccgaacagaacatactaggaagactaccacaacatactcctcctcactccgactgccaccgcgcccagagatgattgatgatctagatctgcgtctctttgccgattttcttggcgtcttcatctttgtactggtcatactccatctttttgtcctggctgacccaaagctcgaaggaaactaggaatgtacactgaggtgctctgcaaatgaaaatgactttgatgcaatctagaactgcagattgggaatgagaacgtgaatcttactaaaactttcataaacatcaaacgagaataacatttcaattttcgctatacttatgcatgctccctgtatatgtatgttttgacagtaggaactttcattgatagactaatgaaaacactgaatttgctttaagattataagagtttgcatgact

SEQ ID NO: 42594 - DNA, 322 bp, Glycine max
  Clone ID: PAT_MRT3847_138463C.1
ggaaggcattaccgaaagtcatgttacatttgcaaaagcctttgtggaagggggggttcaagaatctcttgatgatgcttgcatcttatgccttgaggatttttgcaaaatttatcctgccactgtaactaattgaaagcatgaattccacctgcactgcattcttgaatggtgtcagataagcttccaatgtcctatgtgttggcaacctattctctagagggatactacatagtaagaactgcttgaggcaatatatctagaaaggagctatatggataccccatttaaaactgctgcgagttttcttcatccaacactt

SEQ ID NO: 42595 - DNA, 433 bp, Glycine max
  Clone ID: PAT_MRT3847_138464C.1
aagaataagggattttcaatcacagataaaattgaatcattatctaactacaagtcaaaaaatgattgaggcgccacataaccttcactccgttcccaagagccttagctctcaaaatcagtctcattgagacagtttgcatttttcttttattgggtgcagttcaagattagaaaaagttaccttaatccaaattgagcattaagttgaaaacttgtaaagcaaggatctctatacaaaacctactaggaaagtagccaaacttgaaggggagcataaacgaaggaggccacataagtgagacttttgagcaaaaatagttattttaaaagcaattatcaaaccattagaattatatggtatattgaaaaattttccatctttccgcagtggtttaaaaattttacctttccttttttattgcaggggttga

SEQ ID NO: 42596 - DNA, 127 bp, Glycine max
  Clone ID: PAT_MRT3847_138465C.1
ggtcaggaatgtgcaaaaaccatcacactgcggcctttactaatggaatgttaccacaccacacgcaagaggcatacacgatcacttttcactaatattactcccccaacacgactaaaccaaattc

SEQ ID NO: 42597 - DNA, 327 bp, Glycine max
  Clone ID: PAT_MRT3847_138466C.1
aattcggctcgagctcgagccgaatcggctcgagtaaggatccgctaatccatttagatcagatgggtgtatacagattcaggacaaagatacaaaggaaaacacttactccaaaatggcacgaggaatttaaagttcccatcataacatgggagtctgataacgtgctggttattgcagttcgtgacaaggaccatttctatgatgatatccttgggtttgtttcattttataaacttcgtattttgtaaaatatgtatgtgtgtgcatgcacatttaattataacaattgtcttaagacattggttaagaaaacaaaagggaaaa

SEQ ID NO: 42598 - DNA, 1449 bp, Glycine max
  Clone ID: PAT_MRT3847_138467C.1
atcatggcttcctcatgtggatgcgccactgcatgaatctgttggggataaatagattgtcctagatctggggtcaataaagagcttactgcatcctcaacaaaagcatggcttgagaaaatgggaatcaagtatatatagatgtggacaaaggtaataaaatcattgaatgtagctattagatcataactacatatttgtatatataccttgtgtgagtgaaatgacaaattgttatttaactataagttttcttttctattgtactgctaaatttgatttgtattatgtacaagtgcatttttcctggtttcatcaaagaattagaacaattatggctacaactttgtatgttgcatacattagaggatcattaattcaaaaaaggatattcaatttgcatggacttatatatgtaggatgcatgtcatttgatgctattgttcagatttcatttgatgttattatttaatttgcatggtctgatttaatttataggtaccagagatcaatgtaaaaaaaatgcatcaataaaacgaagaaaataaaaaaaaaaacttagacatacaaagacggtttccgaaaacgtcataaaatgacaacataatatagacctacaaagacgcttcccataaccgtcgtaaatttgcataacatacaaagacgtttcccataaaacgtcttagtatgcaatcttgacatgctatctaagacggtcataaaaaccgtcttaaattggcacctattaagacggtcatggtaaccgtcttcatatcgcaaatttatctgtagactttaagacggttatggaagaaacgttgtaatatttagcacatactaagacggttcccataaccgtcgtaaaatagcttatacattttacgacgttggcattaacgacggttgaaaaccgtcgtgacatggccataagaaccgacttaaaatccaatttttctagtagtgctcactcttgccatactatatatatatataactaaacccacatggacatgttataaaacacaagaattattacttgtacgtttttgcaacaaaaatgatttgaatgacatttttggctcttttaattgctttatttttaactcacatacttttcaattagcagaacaccccatccttcccttttctcctagggttaattagtactacccttgcactttcaaattcaaccaaacatataggagataattaatccagattcaaaaaaaaaagattgctagggttatgctatatatatatatatatacatacataaatttcaataataagaagaaatcatttcctaattataaaaaacaagggttagaaaaataaactaccttgatcgaattgctttggggacaatttcagcccacttgcatatattgttttaagtcatagttactgacaattatgaaactatatgtgtggaacatgttcactcatcac

SEQ ID NO: 42599 - DNA, 1551 bp, Glycine max
  unsure (1)..(1551): unsure at all n locations
  Clone ID: PAT_MRT3847_138468C.1
tccggttactcggatgaattgttgtgggctgccacttggctgcacctagcaaccggcaatgaatactacataaagtatgtagtggacaatgctgtgtatatgggaggaactggctgggctgtaaaagagttctcttgggacaacaaatatgctggtgtgcagatccttctatcaaaggtgttactagaaggaaaggctggtgcttactctgctacactaaagcaataccaggccaaggcagaatattttacctgtgcttgcttgcaaaagaatgatgattacaatgtccaaaaaacaccaggcggcttactatacgtgcgtgaatggaacaacatgcaatatgtttcttctgctgcattccttttagctgtctactctaattacctctcagcaacaaaatcacagctcaactgtccagatggacaaactcagcctcaggagctcctcaattttgttaagtcacaggctgactatatccttggtaaaaaccctgcggatgtgagctacttggttggatatggagcaaaatatcctcctcatgttcaccacagaggtgcttccattgcttcaatctttgctctacactatgaggttggctgcacccaaggatttgagacgtggtataaccgtgctgagccaaatcctaatgtcatctgcggtggcctcgtgggtggtccagataaaaatgatgacttctctgatgaaagatccaattatgaacaaactgagcctacaattncaggttctgctcctcttgtaggcatcttcgctaaactgcagaggctgtgtggtattcataatataggtgaaggttacaaccataatgaatcaccagtgccccagcaaataacaccaagtacaaatccagggaaagcaacagtgtccaagacatcatcagaatcagaaggtgccccagttgaattccttcactcaataagtagctcatggactgttggaggagcaacttattaccatcacagggtgataatcaagaacacttcttcgaagccaatctcagatcttaagttggtgattaaggatctctcaggctctttatggggactctcgccaacagaagaaaaggacacctatgaacttccccaatggaacaaggtcttgaatcctggctccgaatgtatatttgtatatgttcaaggcggaccccaggctacagtctcgattaaaagcttacattgatcgatcattttgtagaggccacattcacaaaaggcacacttttttcaacacgcacgtgaaatatgtttgacagttaaacttacgtcgctccatgattgtaattttgccatatcaatttgtcaacccagtccatccatacctttcttgtccacaattgtaatcagtttctcgaagttccctatttgatcctacaaacaatctaacatatgtaaaggtcatttgtgaaattaaaatcttatgaaaatgtatataatatatcttcattgccagggaaaaggtttccaacgaggaaccccgacaatgtagttttcataacgactaacaagagaatctgggaaagaaagtcacacacga

SEQ ID NO: 42600 - DNA, 777 bp, Glycine max
  Clone ID: PAT_MRT3847_138469C.1
gaattcgagctcggtacccggggatcctctagagtcgacctgcaggtgttaatttgatagtgtagctgtgtaagcatttttacatattaggtcatgaatcaattctgaagttaagtgaaatgtttcatttctcttgatgacctagcaaatgacaaccacacattttcatgtttttaagtgatagtcagctgattggaattgtaaaagatacattgagtagcacggagtaaggattttgatgcctcacctctgatcactgaggctccttctgtgaaattattcataaaattggatagttaatgaattcatttattttggttttaggctctattcataattccagcagttgtttttggtccttgctcactattgttttatagtagtcactatgtttgactttatgatcttgttattgattgacctaccaatgactaaatattagatatgaactcaggtaccattcttttggcttgcaggttgcaagcatatttgttcctacagttgtggtgttggcattattgacactattgtgttggtaagattagcttgactagttttgcatattgactaaagctggtttctgatgtgtagtcggaatgcttatcactacttctgtctaaaattgtaggtatatagctggggctcttggagcataccctgatgaatggctgccaaaaaatggaaatcacttttgttttgcccttatgttttcaatatctgttgtgggtgattgcatgttcatgtgcactttggtttggcaacaccactgctgtcatg

SEQ ID NO: 42601 - DNA, 222 bp, Glycine max
  Clone ID: PAT_MRT3847_13846C.1
ttgtctttttcatgacaaagaattctgcttaggggccgtgtacatctctttcggcgggagggagaaataaaacgagccaaaaaccgtgatgggcgccgacaacgagtgcaacccacaaacgcccacggaggtgcgggaccagaacaccgtgccgcaaaggtaccggtctcaacccacccatgaagagcttaatgacacaacctccgctcgaagaacaacgga

SEQ ID NO: 42602 - DNA, 201 bp, Glycine max
  unsure (1)..(201): unsure at all n locations
  Clone ID: PAT_MRT3847_138470C.1
cggctcgagcaaaggngctttttgaagagaaagagaaaaggctccgctgaagaacaagancngcaaacaactgcgcgaaagctgccgcggggagcgggacagggcaaagccctgcctggaggccaggcgggggncacaggggcacacactgtggcggccccgggcccttctgtggccgcgtggtcgccgctgagggggggg

SEQ ID NO: 42603 - DNA, 354 bp, Glycine max
  Clone ID: PAT_MRT3847_138471C.1
cccactcgtccggccactcgtccgaagaacatgcgggggatgtttcttcttttggccggatgcaaaaccatgctgctctcatgatgcccatagacgaaggaactctctctaaggttgcgcacgatatggttgaggaatgatatgaacgctctgagcaggaagcatacttcgaggaagaatctctaagcgcatcacgcaatggtggctggggcctggactatatggaaagaaactctctggctaacataaagggctttactcacgtgcttagacgcatgactggttaaaacggcaaactgagcatagcttctattagtggtgcagatatgacatctggtctcggaaccagtgggg

SEQ ID NO: 42604 - DNA, 440 bp, Glycine max
  Clone ID: PAT_MRT3847_138472C.1
ttagatttcatctttaaactaattgacattaagtgaagttgctcaatagatatataagttgcatcccaagaattgagggaggcaatgtgggatgttccaacatcctcttccatagatgcttgctagaataggaaattaggcgatttaccaagatagattgtaggctttaataccatattagatttcatcttaaaaccaattagtattaagtgaagttgtccaacagatatataagttgcacaccaagaattgaggtagacgatgtgggaccttccaacgacagctttcactaaaacctctatttcttgaccaatgattagtaaacttggaaatttggtaatagagaagccctagtgtttttggaaagttatattttggaagttggagctcttctttggcttagtcttgtgcttgccacctatgaagcacggacacgggga

SEQ ID NO: 42605 - DNA, 548 bp, Glycine max
  Clone ID: PAT_MRT3847_138473C.1
aaccccaaaaaaggggccgggataacaataaagggcccaaaaaattaaaaaaacccccccaaaaaaaaaattttttcgggaaagccaaaaaaggggggggcaaaaccccaaaaggaaaacggggtggcatttggcccaattaaagaaaaaaaaaacccgggccgggctttgggggccccctggttcccccggaccccccccccttttttgtttggggccccccccaggggttaactaaaaaaaacgggaaattttttggggggaagccccttaaaccccgggggatctttttaacaaaaaagggaaaaaccccccccccccccgggggggggggggcttcaaaggttggaccaaaaaaagggaaaaaaattcccggggggaaaaatttaccgggccgcctggaaaatttaaaggcccgggggaaaaccccccccccaacccccaaaaaagggggagggattattccgcccgaaaaaggcctttttgggaaaaaaatcggcaaaaagaccccggggagggccctttggccccccattttggattaaaaa

SEQ ID NO: 42606 - DNA, 193 bp, Glycine max
  Clone ID: PAT_MRT3847_138474C.1
gtaagatgtatgatggatacgtgccgaccataatatccacgtggataatagaccttatgcgctgaaacacacaggcgaccaattgcaaccacccgaacatcctaaccatgtgatatgacaacgactgaccctttagatatgatgcgctactacgctcttgacccttattacttgatgatccccatgctgctaa

SEQ ID NO: 42607 - DNA, 270 bp, Glycine max
  Clone ID: PAT_MRT3847_138475C.1
ctcatctatggacttaagtggcatatctaaacctccaaaattcatgtgaatcctactttttggtaattaaaaatgaagtttttaaacctcttgaaaggcagacttgtcaatcctgctcctgtccttcatcatggggcctggccatcctgccaccaacccaaaaccttttttttcaaagtaaccgccaccattaccaccattaccaaaaccaccattgatgtatcacccaccttgggaacacattacctaaccgttagtgtcccaaactcc

SEQ ID NO: 42608 - DNA, 434 bp, Glycine max
  unsure (1)..(434): unsure at all n locations
  Clone ID: PAT_MRT3847_138476C.1
gcgacaacgggaccacggtgttcgacgacgtgctccgtgcggggcagctgctcatcgtaccccaggctacctcgtcgccaccaaggcgcagggagaaggcttccagtaccatcgccttcgagaacaacccctgacacccatggtcagcccacgttgccgggaagaactccgtcctgagcgacttgccggccgccgtcatcgccagctcgtatgccatctccatggaggaagctgcagagctcaagaacggtaggaagcatgagctggctgtgcttactcctgctggcagtggcagctaccaacaaggtcaagctggcagcgcccaacagtaggcacaacctcagagtgatctgcctgaataagtactcgtagactgtaataattaaacaaagcttgctcatggttaaactgcngtgttgattagtctttcaact

SEQ ID NO: 42609 - DNA, 431 bp, Glycine max
  unsure (1)..(431): unsure at all n locations
  Clone ID: PAT_MRT3847_138477C.1
caccaggaagattaaagcaacttggtagaaaatactaatcattaaccataattaagaaaataagaaagtaaaagtaatgtttttactaataaataaataaatagtacacatattaatcggaattggtaatgccaaaattgcaagccactttttttgggtacaaaattgttaggagagtaattcaatttacaaaattgttatgaaaagttcttagatcaaagaagtgctataaagagcttgcatctatgatgtacaaaattatatcttattgttttgatctaaagtttgtaggtattattaggctcttatgaatttaaggtattgtctctttaactatttcactgactattacaattttatatttttataaaaaacgtcttgatgctataagagaaaagagtgtntataaataactattgacttcaactttt

SEQ ID NO: 42610 - DNA, 228 bp, Glycine max
  unsure (1)..(228): unsure at all n locations
  Clone ID: PAT_MRT3847_138478C.1
tcgcgagtgttgaagataacacgaaacaaaaaccatcatttagttgccatccatcttccaccggtgtccactcccaacaccgatttcggcacggggccgncaccgggccccaacatcacgcttccttcgggccccttcggcgaggccttcttcttcgccgccgccggcgccagccccggccccatgaccctcgtcttcagcttcttcggctccgacgccggcggcgac

SEQ ID NO: 42611 - DNA, 254 bp, Glycine max
  Clone ID: PAT_MRT3847_138479C.1
cgacgactccgattctcgacaaataccgccaacaattcggtgtctctgttcgtgatgtccaggcggacaagttcatcaacgcctacgctgctttcttgaagcgtcagggaaagctccccattcccggttggagcgacaccgtcaagaccggtcaccttaaggagcttcctcctcaaagcatcgactggtactacatccgtgccgccgttgttgcccgccacatctacatgcgcaagactggcagtatcggccgc

SEQ ID NO: 42612 - DNA, 458 bp, Glycine max
  Clone ID: PAT_MRT3847_13847C.1
cccccaatatatggcatttttattagatttttggagccagaaagatccaaatgcctaaaattggttagaggcttcattacaagaccaattgtaggaaacaaaattaataatgacattcagccttttttttgtttctttaattaaatagaaaaaaaaggtttatcttaaaaaagtttgcctttttatttgtttttttaaaggaaaacattttgtataaataatattattaacaattgatattacctttctatacttccaaagttgtttgattttgtttttaggtaaaatcaacttaacaagtttgtccggttcaaatcttgggggcgatcacttaaaatgttatttttcccaattatgatttcctaattcattggaaagcttacaaagagttcctaaattaatttttttcttacccggcgtttttaaatttgaaaatgttaaggtttctttttgtttat

SEQ ID NO: 42613 - DNA, 145 bp, Glycine max
  Clone ID: PAT_MRT3847_138480C.1
ctggcagttaccggtaccggtaattcccgggctcgacccacgcgtgccgctgcaaatccaaatccaattccaagtccaattcccaatgcttctcaaaccctgaattcctcatattgaaagatgagagaaatcttgcacatccagg

SEQ ID NO: 42614 - DNA, 330 bp, Glycine max
  Clone ID: PAT_MRT3847_138481C.1
ggaccccagtacccacccaaagtgtgctgtgaggctttcaagcaatttgcttgccctttttcaaatgaggtcaatgacatgacaactgattgcgccacagttatgtttagctacatcaacatctatggcaaataccctcctggcctatttgccaatcagtgcaaagaagggaaccaaggtcttgatttttttcttgttacaccaaccaacacttcttccaacaccattcatgtggctgctcctcctcactttttctcacttgctaccatttctgctttcctgggattcttgttccacttgttctgaaaggatgaaaatgtgaacaaactg

SEQ ID NO: 42615 - DNA, 562 bp, Glycine max
  Clone ID: PAT_MRT3847_138482C.1
gtccatgggcaaactgtattcactcaatccatgggcaaactgtattcactcctttcattatcaatacacatagtcaacaaagccatgaatgccacaattttctcaagttgcaattgagttgctgttttggcctgtgcggagacatcttctgattgtcctgtcatgcttactgccacagggagtaaatcaggtctaactcccttgacatggtccagaaatttttcaatacttggatgtccaccttccatcttttcacacatttcatacaaatgaatcacggcctcttcatcttctttccttttccatccacttaagagtgctttgtctctccttgctgtgttgacaatgccctgcagtacactagtcatttggacaagtaatgaaaaagattatacagaatgttaaccagataaaatatatcacttgaagcaccctgtgaggggttgaaaataatgaaaccttcacaaagggcttcgcaccgaatccggtcccaaaccttggtcacaatttttggaaaaagtgttttccttaacattttttaaggtggaaattgggctttcat

SEQ ID NO: 42616 - DNA, 304 bp, Glycine max
  Clone ID: PAT_MRT3847_138483C.1
gaactagtaaaccataacagttaaaatttggatatagatcaagcatctgcaatggtcacctcaacttccacaccaggttctactcgtcactacgaaaaatgctccctcacgtgtggggaactgtacagggatacactctcacttcgagaccacaataaaatgattgacctctgctggtcccctcatgacgggaagcatattacctctatcacgataaaaacctggtgtgggaagtgaagggaccattgcagatgcttgatctatatcccaattttaactgttatggtttactagttccctcgtg

SEQ ID NO: 42617 - DNA, 1394 bp, Glycine max
  unsure (1)..(1394): unsure at all n locations
  Clone ID: PAT_MRT3847_138484C.1
cccacgcgttcgcccacgcgtccgcccacgcgtccgaaaaaaaaacgccacaaaaaaaaaaaaaaactcagaaagaagagagagaaagggaagaaagagaaagaacaaagaaggggaaaaataactgataactgagataacaataccatagatatagagagatagttccgagctccaattcccagaaaataaaaattaaaactttgcttcgctttttctcttcattgtttttcttcctcttctacccctttgatctcatgcaatctcccctcatggatccctttgatttgattcgcaaagggtttggctgaagctatctggaatatttgtgttacatttttggaggtccatctatgttttagtcattttgtccatattcttgtcaataatgagcttatccaagaaaggttcccaaacagacacaaaactgagctccttaaacaaagcaacctatttgaatccaaatgcagcagagtttgttccatttgccctcagatcatcgccatctggaagcaccagctcggtagatgcagcagcgaggtttactactgctggatctcttgggaaagcagttttagatcgatcagaatcatccatttcaaataattccgatgatgaggctcaccagtactggcgttgtcagcttcctgatgatatcacccctgacttcaaggtcatgggagaggacgaatcccaaggtcttaacaacctctctttagcaggcttatctataaatgatgataatgaatcctcaatgtttccttcttctaagggaagtagatatatactaaatgagcagctggaactgtctccacagcaccttaatggcaatacttttgctgataaattaaggttttccaattcaacctacagggaggagccatcttcaggaagcattttgaactcatcagcaaagccttgggataggcaaattgggaataccgatttgcacgttaccagtggtcaagaggaacttgtttatgatgaaaactctggacatggattcttaaatgatgtttttgcagggaattctcttgtgaatgatacagatttgaaccctttggagtttttagcttctctattccctggttttgcttcagaaagccttgctgaagttttcttcgccaatgcatgcgatttacatctgaccattgagatgctcactcagttagagattcaagttgatggtggcttcaatcagaatccgagtccaaagactctgtcatctcccaatctgagtgcaatggactntccagctcttacatcatcaaatgggcagaatacttcaaaatatgctgcagataatgttcaacaaagtggcattccatacatatcatctgataaagacatgctcatgttcaaatcttgctcttctattccatctagaggttctg

SEQ ID NO: 42618 - DNA, 457 bp, Glycine max
  Clone ID: PAT_MRT3847_138485C.1
gtcattactatattttatgaccctgaaagagtcatgtggaactcctagctaataatctgttatgtaacaatagcacaactgagtgaaatttcgtatattagtatttctggcatatctagtgaagtctttgaattcttgctggacttatatgatgtgcctcatactctttcagtttttcattggccttgtattttttcttagcgacatagaattggtttcaacatttgaaagatgcctctgaagtctcaataagaatccaattcctgttaagtattgagtccaacatttggttccatatcttgaacgtgatttccacatttcatagttatggcttctgcattccaaacatgatttcttccttctcaacaaaatttccaaacatggcaaaagtgattctcctattaatttttttttaatggccaggtatacgtgggatcttactctataggcatgggag

SEQ ID NO: 42619 - DNA, 687 bp, Glycine max
  Clone ID: PAT_MRT3847_138486C.1
ggctcgaggaaagtttgtagagagagataggggtcaaatcgagcggcgaaaggttgggtgtcttctttagtaggctcgtggtgcttgctggtgttggttttaactaagagcctttcaaaaaaaaaaaaaactcagaaagaagagagagaaagggaagaaagagaaagaacaaagaaggggaaaaataactgataactgagataacaataccatagattaaaactttgcttcgctttttctcttcattgtttttcttcctcttctacccctttgatctcatgcaatctcccctcatggatccctttgatttgattcgcaaagggtttggctgaagctatctggaatatttgtgttacatttttggaggtccatctatgttttagtcattttgtccatattcttgtcaataatgagcttatccaagaaaggttcccaaacagacacaaaactgagctccttaaacaaagcaacctatttgaatccaaacgcagcagagtttgttccatttgccctcagatcatcgccatctggaagcaccagctcggtagatgcagcagcgaggtttactactgctggatctcttgggaaagcagctttagatcgatcagaatcatccatttcaaataattccgatgatgaggctcaccagtactgggcgtgtcagcttcctgatgatatcacccctga

SEQ ID NO: 42620 - DNA, 280 bp, Glycine max
  Clone ID: PAT_MRT3847_138487C.1
tcaaaaccaaactttcattcctcaacccccggcacaacacaggaggaagggcagaagataaaagaaggccgcgaaagaaacaacaagtaggaacggggagagacgcaagcgacccacccacacaacagagagagacacgcacaaacccagcgcacgcgcccacatggcacgcgccaacaagcatacctccagacagaaagaagggagcaaaccccagacagacggcagagggaggcgaaccgcctaacccaccgcacaacaagggagaaggaagcacaaa

SEQ ID NO: 42621 - DNA, 788 bp, Glycine max
  Clone ID: PAT_MRT3847_138488C.1
aaaaaaaaaactcagaaagaagagagagaaggggaagaaagagaaagaacaaagaaggggaaaaataactgataactgagataacaataccatagatatagagagatagttccgagctccaattcccagaaaatgaaaattaaaactttgcttcgctttttctcttcattgtttttcttcctcttctacccctttgatctcatgcaatctcccctcatggatccctttgatttgattcgcaaaggggtttaattgcttgagatctcgtaaaggttttggctttcgtaatggaagggtttggctgaagctatctggaatatttgtgttacatttttggaggtccatctatgttttagtcattttgtccatattcttgtcaataatgagcttatccaagaaaggttcccaaacagacacaaaactgagctccttaaacaaagcaacctatttgaatccaaacgcagcagagtttgttccatttgccctcagatcatcgccatctggaagcaccagctcggtagatgcagcagcgaggtttactactgctggatctcttgggaaagcagttttagatcgatcagaatcatccatttcaaataattccgatgatgaggctcaccagtactggcgttgtcagcttcctgatgatatcacccctgacttcaaggtcatgggagaggacgaatccccaagtcttaacaacctctctttagcaggcttatctataaatgatgataatgaatcctcatgttttcttcttctaaggaagtagatatatactaaatgag

SEQ ID NO: 42622 - DNA, 2601 bp, Glycine max
  Clone ID: PAT_MRT3847_138489C.1
ccggaattcccgggtcgacccacgcgtccggtccacgcgtccggcggcggcgaaggtttggtgtcttctttagtactaatttttgtggtgctggtgctggttttagctaagagcctttgaaaaaaaaaaaaaatactccgaaagaagagagagaaagagaaaagagaaaagggaaacaaaagaaaagagagagagaacaaaggaaaaaaaagaaaactgataactgagataacaatactgtagatatagagagatagttccaagctccaattcccagaaaaaaattaaacctttgccttcttcactttgccgcttaccccttctgatctcatgccatttccccctcatggatccctttgattggattcgcaaagggtttggctgaagctatctggaatatttctgttacagtttttaaggtctatctatgttttagtcatttttgtccatattcttgtcaataatgagcttatccaagaaaggttcccaaacagacgcaaaattgagctccttaaacaaagcaacctatttgaatccaaatgcagcagagtttgttccatttgccctcagatcatcgccatctggaagcaccagcttggtagatgcaacagcgaggtttgctgctgccggatctcttgggaaagcagttttagatcgagcagaatcatccatttcaaataattccgatgatgaggctcaccagtactggcgttgtcagcttcctgatgatatcacccctgacttcaaggtcatgggagaggatgaatcccaaggtcttaacaacctctctttagcaggcttatctataaatgatgataatgaatcctcaatgtttccttcttccaagggatttagatatatactaaatgagcagcaggaactgtctcaacagcaccttaatggcaatacttttgctgataaattaaggttttccaattcaacctacagggatgagccatcttcagcaagcattttgaactcatcagcaaagccttgggataggcaaatcaggaatactgatttgcatgttagcagtggtaatttcattttgactctctctctctctctgattcggtccttttgccttttattttgctcccgcttaaatttaattttgattcctaatcatcattttcccttctttttattctctgcacaacaattcgagattccaaccatcgatctcaattttcaaccttaacctctaagaatgtcttacgcttatctcttcaaatacatcatcatcggtgacaccggagttggaaagtcttgtcttctacttcaattcagcggaacagcgcttttcagcttgcccatatcttcttccatctggtgttgtaatttgtgccaagggttgtcaagtcttgtaaccagccaatcaagttggaaatatgcgatacggctgttcaagactcatccatatctgttaaaaggtcttattacatgggggcctttaattgcaatcgcatctttatgatattacgtgctagggatagatttaattatttcgctactttgatggggttgcaagacagcatgcaaatgcaaatatgctattatgctgatttgcaacaagtgtgatctttttcatacaagggcagttagcacagaggaacacgagaaattccaaagaccatgattagaactttatggattggcaaaaagtgtgctgattgttatagaggattcgtaaaaacagctgaaagcatatactaaaagattcaagatggagtttttgatgtatcagatgagtcttatggaataaaagtaggatatggtggaattcctggaccttctggaggtagggatggcccttctgcttcggctggaggttgctgcagttgaagagaacctatcagaacctatctgcatcaatgtagtcctttatgtcttctcttcttttattttgggtttggatatgaagatatatatgttctacttccattcataaaatcagataattgtataatgttttctttttaatcttgactttgtttctttgacgtgaactgattatttgtctagatttgtgtgcatagttaattgatctgttgtttcatttttgaacaagaggaacttgttaatgatgacaacgctggacatggattcttaaatgatgtttttgcagggaattctcttgtgaatgatactgatttgaaccctttggagtttttagcttctctattccctggttttgcttcagaaagccttgctgaagttttcttcgctaatgcatgcgatttacatctgaccattgagatgctcacttagttagagattcaagttgatgggggcttcaatcagaatcagagtcaaaagaccctgtcatcacataatctgagtgcaatggactttccagctcttacatcatcaaatgggctgaatacttcaaaatatgctgcagataatgttcaacaaagtggcattccatacatatcatctgataaagacatgctcatattcaaatctgcatcttctaaaccctttcttatctccgttgaacgttgctctcacccagtcagaagattggcttctcaggattctggtatatggaagtatgataaaaatggttctggtgatgctttcactggctctagtagg

SEQ ID NO: 42623 - DNA, 484 bp, Glycine max
  unsure (1)..(484): unsure at all n locations
  Clone ID: PAT_MRT3847_13848C.1
gccaagtttgaatgctttttagctgttaaaacatgctattatggatancgacgaactaaaccgttgtccaaattataagagaagaatacaaaagaaaatgttgaattggtgataaagacaattggtgggagcatagccttccaaatctcaatgaggcgttttgtcatggagtatataatggaaaaccaaaggaaaggatcacaaagaatcctgtcaaatcagaggaattagaaagatgcccatgttttgtggtcctagtgtttccaagagatgctgcttagctcaatctccaaaagattcatgctcctctaagtgcattgcaccttgcaggtgatggcaacagccataacttacaatatttttttaatctctctcttttctttctttttctttgtcaatgcaacgaatagtatcagaatgattgcaaaaaaataattaaattgtaataacagagagcagtgcaaattgtcatggttagaaatat

SEQ ID NO: 42624 - DNA, 418 bp, Glycine max
  Clone ID: PAT_MRT3847_138490C.1
acgacgaactcaatgcattttatgatacatgaggaaacgagtattttaaacacaagcaaacaaaagggttagcgtctaatcatcctccccgtcatctgaccccaatatgccagtttcaggatacagagcagcaatgaataaaaggagaacgttgaacaacactatgggctagatttcattgattggtaccccctggtaaatgtaaaaatggggtaaagctcccttcccaggaatcatttcttccatcgccgacaaaacaaaacccaattgagccggtctccccacaatatagatcgtacgctttcacgaatccgaataaaggacctgttccgagcccaagggcttccctgaaccctcttcctgatggaataacaacttcaatactatgtacgacatggacaaatattacatggttacc

SEQ ID NO: 42625 - DNA, 789 bp, Glycine max
  Clone ID: PAT_MRT3847_138491C.1
tacactaaaaaaggggctttctacttaagcacacaatgtttacttacatgctatcaactgtgtacaagaaccggaaggaaagattagtaaattgtgccagagcaaattaagacccaaaaggaaagattaaggaaattgtgcaagagcacatgtaacagttttttacacgggctccaccaggattcttcattaaaatgtttccaaatccttggggttcctatcgtaaaaattaaacatcacatgtccactaagacaacaacatgtcctatacgcaccttgatcttgctcattttggatttcaaaataactatcgggcttagctgtcgctatcttcttctgatatgtcaaacaagaacttcgaaagtgatgcaattcgaggaagttgatgaagcaactctgcaaaaaagtctttcctggacatgcctagtgtttgcttgctcccaaaagcatctctgaagtcctcttcagcaggcttgacatccattttaattttgttgttctgcattgattcaagatcatggctaagttgaatacgtttttcatcatcaggtccttcagcaacagcactttccttgtcatgtgaactctgcaatcctgcagggtccttctgtagaagacagcagagagaattgacccttgtcatgagtgatatttcatcttcctctggcattacctgattctcttttcttccaccctaaacaatttcatttccgatttcctgtaactctgatcttccaccacaaaaggatggatttccggaagttatttgttcggaaagcaatgttcaat

SEQ ID NO: 42626 - DNA, 614 bp, Glycine max
  Clone ID: PAT_MRT3847_138492C.1
ggctcgagctttttggtcatctagtgcttgctataatgaattatgcataaggtgataatactttttataatttgtgcccactggcaagcattctccatcgcagaaatagaaacttcagaagtaaaagagtaatactgtaaagttaccttttcttggaaaggctgattgacaatttcttgatgcatctggaaacatcttagaaactccagaagtaaaagagtaatactgtaaaacagttttctcaaattaagcaggcccttgattttaagtataatgacagatttgctggaaacatgcattaatggcaatggcatttactctattaccattggtcgaatttgattatcaactagtcatgtttctgttgctgcataaacaacagcagtttgcagtatataaattatgtgattcatcataggctattgctatttttaagttttacattcttattatctaagatctttatctgactataatcataatttgacatgtgtttatcactgaatgtgctgctggttttcttggagtatacccaggattcatgataccaccattttactcaactatttcaaaatacaaggccaagtgctgatgagctccctgaagattagctc

SEQ ID NO: 42627 - DNA, 144 bp, Glycine max
  Clone ID: PAT_MRT3847_138493C.1
cgggtccgacccacgctgttcgcccacgcagtccgcccacgcgtactggtgtattcaaaaagcacactgaaatcagaaggtggaaaccggtagccattaccacttgtccactttggcggagtggctgctcacactgtttttact

SEQ ID NO: 42628 - DNA, 1690 bp, Glycine max
  Clone ID: PAT_MRT3847_138494C.1
gtttgtttgttcaaactattttcttctttttttctctgacgcgtggaaatgatatgcacgcacgcttctgtgggagaggaagtaggaaatagcagagtttagactttagactttagagtcagtgtacgcagaagagtaaaatcgattggcgatgatggagttgaaagagattcagagactcgaaggccacaccgataaggtttggagcttggcctggaacccgaccaccggtcacgccggtatcccactcgtcttcgcttcttgcagcggcgacaaaaccgtccgaatctgggagcagaacctctcctctggcctctgggcctgcacggcggttctggatgaaacgcacactcgaactgttcgatcttgtgcttggtcaccgtcgggtaagctattggccactgcaagcttcgatgccaccactgccatttgggaaaatgttggtggtgattttgagtgtgtttctactttggagggacacgaaaatgaagtcaagtgtgtgtcttggaacgcggctgggacgttgcttgcaacttgtagtagagataagtctgtttggatatgggaagtgctgcctgggaatgagtttgagtgtgtgtcagtgctgcaaggacactcgcaggatgtgaaaatggtgaagtggcatcccacagaggatatcttgttttcatgtagctacgataatagtgttaaggtttgggcggatgaaggtgatagtgatgattggcagtgtgttcaaacgcttggggaacccaataacggtcatacttccactgtttgggccctctccttcaatgtgagtggtgacaaaatggttacgtgtagtgatgatcttacactgaaggtatgggaaacagaaagtgtagggacgcaatctggtggtggatttgcaccttggacacatctttgcactctttcagggtatcatgatcggacaatattctcagttcattggtcaagagaaggtatctttgccagtggagccgcagataatgctatacggctttttgtggatgacaatgaaagtcaggttggtggtcctctctacaagttgctgctgaagaaggagaaggcccatgacatggatataaattctgtgcagtggagccctggggagaagccggtactagcctctgcaagcgatgatgggacaatcaaggtgtgggagttgacatcatactagttttccacatttgctgtatgagtagcagatattttatactggaggagcctaatagaagtgctagatgtgcaggcatcctcatagctatttttcttttcttagttatatttactaaaattttacaacagacattgaatattatatttttttaggggagtcagtagtgtgactgtaaattgtaattactgtcacaactaaactttacatttttgctcaagaatggctcataaattacttatcctaaggtgaactagtatcgtctccctcctgcccttctccgagttgtagtgatagagaatgaaaaagaaggatattactcactaatctctgtgtggcaacttgttgtcagaatggattagaataggtaatctaattgggcacccccgtgcccaaaatttcctgatgggtcgcaaagctagttctcttcaagatatttagaatcagtgaatgataaggactctttcctttttctttctctaaaaaaaaaaaaaaaaaaaaaaaaaaaac

SEQ ID NO: 42629 - DNA, 265 bp, Glycine max
  unsure (1)..(265): unsure at all n locations
  Clone ID: PAT_MRT3847_138495C.1
ccactttgcttcagctatggagtntcgttgccttccattggtttnntntctcaatctgatcctgatgacagctccatgntgcnatacctccagaagtttactggganaggntgcttccaaatancccantgcccanagcaatcntanantttctanaccttgatcaacttccactatggtatggtgntaaggnaacccaatcgacagntcaaatatccctgtatnangctangaaaacccantcagcagancagttccncctatg

SEQ ID NO: 42630 - DNA, 602 bp, Glycine max
  Clone ID: PAT_MRT3847_138496C.1
aggaagcaacatccattctcaatttgaatttccgctatttcaaattggaaatttatttggacaaagaaaatggaaatgtaaaagtacagacccacttactccaacagttgtgaagcattagagactatgagcttacagccattcctcggctccacatcttttagactgttggccaattcttcgaggggccacaaaacatgcaccactcttaaggcagtcaatgaccaaagttcttctggaagctttgacaatttataacagttatcaatgaccagatgtcgaagtcgaggcattgcatctttctctaatctccattgtcttacatatatttgcctcatatgaagcaattgaagttgcgggaactctccactgccaatatcaagaagaatatcatcgatgcctgaatttagtttcaagatttgaaggttggtaagtcttcctagtgtcttcattaaagggtggggattactgaatgctgctagtatcaaggttatcttgataagatttgatggaaacgcattggtgtcggatggaagttctagatcttcaattacttttaggctatgaagattgttgaggtggtgtagacttgataacatggc

SEQ ID NO: 42631 - DNA, 432 bp, Glycine max
  Clone ID: PAT_MRT3847_138497C.1
cgggatgcttccgtagaaggaccgcattcgcggcggaccaccgtgccgctcggcaccggcaacgccgatctcgccgagacgatccggctgatcgagcgctccggctacgagggtcagtatatcctgcaaaccgcacgcgccgccgacggcgaccacgcgggcgcgctcgccagatatcgcgacatgacggtcggctggatcgaggacgcgatgcgatgaagctcgagctcgacgatcgcgtcgccctcgtcaccggcgccagccgcggcatcggccttgccattgccgttgcccttgccgccgagggagcgaaggtcgcgctggctgcgcgcggctcggatgcgctgaacgcggcgcgcgcgaccgtcggcggagacagctcgatccatatcgccgacgtcaccgatcccgccgccgccgcggcactggtgg

SEQ ID NO: 42632 - DNA, 226 bp, Glycine max
  unsure (1)..(226): unsure at all n locations
  Clone ID: PAT_MRT3847_138498C.1
gggcactaacattcccatcaacaagccgattttgcataaatatgctgatgaagatgtctcgcttggagcatggttgattgatcgtgaagcggagcgtattgatgaacggagtatgtgctgagaaaggcctccagactgtgagtggaatgcacacgccggtaacgtatgtgttgggtcagttgattggagcggcantggaatttgcaagtgagtggagaggattaaa

SEQ ID NO: 42633 - DNA, 525 bp, Glycine max
  Clone ID: PAT_MRT3847_138499C.1
ttttagaagaccaaattgaaggtttattcaagcaataaaatagtgcatcctacaacaaaataatggatggctatatgaaatagcatttcggttattttggcagccatttagcaataaattggttcagcagtttcagttatgtatatgctcccatgttgttcagcactccctacaatgagaactgcaaatgtaatttattttggatagagaatagctgatctagtagcaccaaaatcattggtaaggccactatatttgcttctctttgagatgagaagaaatctactggtcaaattgtgatgatgaaaatggaaggtacctgcaaaaacactccaacaacatagtttgcggagtaataatgtattgaaagatgtgcttacccagtgccttcacatgtgatcaactttttggactaaattgcggccaagtcataatctggatgtaaatgagtcactgctaggatacttgagttcggttatgaagtattcctgttcgatgcaggagcttctgattaaaaaatattct

SEQ ID NO: 42634 - DNA, 332 bp, Glycine max
  Clone ID: PAT_MRT3847_13849C.1
accacacgttctgacactcgtacgcttctccatgcatgttgctcgaatgtacttatttggacgaggatatacaattttgtgcattgaaaagaagatgacaaaaagtggtaagggggagggcggctccccttgctaaaaaaaaaaaaaaaaatcttgcgtaatgctatttcggctgtttaacaccatcacaaatatactatttttgatttaaccattgcttctatgaatgacttagattataattcggatttctaaatctaactaacagatgatttgtcgtgtaatttggtatgctacattattaagctttattcaaaaactttttattttta

SEQ ID NO: 42635 - DNA, 561 bp, Glycine max
  Clone ID: PAT_MRT3847_1384C.1
cccacgcgtccgcccacgcgtccgaccaccttcctcttcttctccttcatccgtcgtcggccaaatgcccaatctcgccgaccctgaaatgttggcctccatgacccgcgccatctccgacgtctcccagacccgatccgtcctcaagctcatcggggcccgccccacccacgagcaggtggacgacgccaaggccagactcgccgacctcgaggcccatctctcccgccagctccaagagatcgtgggcctccccaggccccccgagatcgacgagccccgctggcgggcccatgtcgccgagaaagaaaatgccattaaggaatccacggagaaagagaagcgcgtcctcaagtcgctgattcagctcgaccagatgcacgattcctacgagaagctcctcaaggacgccgagaagcgactcgtcaagatttacgagggcgatggcgaaagcgacaacgacaacaacaacgacaacgagggtgaggtaaaagaagaggttgaggagatactgcatgaggcccacggaaaaggcatcgagcgggtggatctttccgggaa

SEQ ID NO: 42636 - DNA, 357 bp, Glycine max
  Clone ID: PAT_MRT3847_138500C.1
tgatttcgacagcaaaaactactaataaagatgagtttgaagaacaacatgggggtgctaaatgtgtgaatgttgcttcttttcacttgtggtggttacagcttcactcatagaactcatcttcttcaatagtgatcattcatcaagttatgatgatcatgactattcaaaaccatgctgtgatctctgcatgtgcacacatctcaatgcctattcaatgcacttgttaagatattaggctgaattcatgccactcagattgtaagagctgtatgtgcacactctcacagccaggacagtgtcgttgtcttgacaccaactacttctgctacaaaccttgcaagtccaaacatgact

SEQ ID NO: 42637 - DNA, 237 bp, Glycine max
  Clone ID: PAT_MRT3847_138501C.1
tacggctgcgagaagacgacagaagggggcggaacaaatcatgtaattattgaagatatataaatcgcagcacatttattgcgaggtgaactcccatatatcattcttcgttaatttcttaacccatctttcaagcattcttataccacaaggattcctttttctctcttcttgaaaccatcttttccggcatttataacatgaaattacactcttaatttaaaatttttaactcca

SEQ ID NO: 42638 - DNA, 419 bp, Glycine max
  Clone ID: PAT_MRT3847_138502C.1
tataccatgtataaaacatccttttaagtgttccaggtacacgacatttaattgcttaattcttaaacacatcttatatcctttaattgaaaaagttaactaattgttttccgcagtaattctgcaattcaagaaggaacaagttttcattcgaaatttaatgacatttaaacgatacagatatccgataatgtacatggttactactttctattagatggcataaaaggccataaaatatggatgtttgtgacaaaatatatgcttgctagtttcataacatactaacgtctacaaataacttcattacgcttcacaatacccaaattacacacagaagattcttgatgaagaatgttatctataggtggctctacgaagcccatgttagccctaatcatgaagagatcaccttcatg

SEQ ID NO: 42639 - DNA, 877 bp, Glycine max
  Clone ID: PAT_MRT3847_138503C.1
tttctctatataagtttgttctttcattttcaaaattttatcacatgctaacattattgttttcaatgtttcagaattgttttacaaaaatattggaggagtgtcttataaggctgatgtctatagctttggaatgcttttgatggaaatggcgagtaggagaaggaactcaaatcctcatgcagaacattcaagccaacattacttccccttttggatttatgatcaatttaaagaagagaaaaatattaacatgaacgatgcttctgaagaggacaacattctatctaaaaagatgttcatggttgcactttggtgtattcagttaaatccaagtgatcgtccttcaatgagtagggtagtggagatgcttgaagggaagattgaaagccttgaattgcctccaaggccttcttttcataaaaatcaaacatatgtacatgatgatgatgatatcgtctctgaccaaacatcattcactaattccacttattctgatagttatcttggttaaagcataactagtgattcacaagagagtagtactttacaaaaacaagtaatctaactcaaattaagtatagtgttgatgagtacggttggaatagtgccaaagcttggtccttggaaaagactgattttgttgtagttattcaatagtgtaggataatgcactatgatctagtggtgtagatgattatggtctcccaaaacttcatcttagtggtaaagtagtctggcatcactacaattcctcaacgagtttttgttttattttgcttcattgtttgttttgttgtcattttttttcctcaattgtaaattgacatatgtttcattttaaaggtacgaatatatatttggatgtaatgtttta

SEQ ID NO: 42640 - DNA, 1273 bp, Glycine max
  Clone ID: PAT_MRT3847_138504C.1
tcgccaaagattctctccaaaacaaacttttcctcgcaaaattagaaggcttcgtggttcctcccgtttcctttcttttaaagcaaaaaaatatatataaaaaaatactaaaccagtatctgccgtggtgctgaattacaagcgcacacaatatatcctctcatttcttggattcattctttctcttgcacaaattttttatccatttgacacaacttgaggtcgatccgattcgggtcgtgcaacgaggaagcttggaatcaaaagttgttctcgctaggggtcttcaattcgtcttgtgtgacgcggaggcgaagatttcaatcgccgagaaggaaagtgtggtggcggagttgctgaaatcggcggcgccggagaaagatgcggcgctgatcgaggccgctctggcgagcctggtggcgatttcggcgccgaagcggaacaagttgaagctggtgaacctcggagcggtgaaggcgatgacgaggctgttgacggaggaagatttgggccccgcggcggtggagcaggtgttgaagattgtggagtcggtgtcatagcggagggaggggcggagcgagatactcggagaggcgacggcggcgtgtgtggcggcggtgctaagcaaggttctgaaggtgtcgagcgcggcgacggagcacgcggtgacgacgctgtggagcttgtgttacctgttccgcgatcgcaaggcacaggaggcggtgacgcagaacaatggcttgaccaagattctgttgctgatgcagagcaattgtgcgccgcacgtgcgacaaatgtgcaccgatttgctcaagatttttctggcgaactccaagtcttgcctttcgtgctacgacaccaaaaccacgcatatcatgccgttttgacgctctctccctcacaatcacaccacgtagtaattaaaattgcttgtaaaatgtaaatcaaaccaaattttgtttgttcatagacaaatttaaaaaaaaaaccaatatcacaaagggaaatattcatttcgagctccttacgtttagtgtcaattgtgaatcttaatggtcttgcactcttactagtgtgtgtgcaatgcacgaagcttgccaacgatttggacactgtgtgtaatttttggttgaggatgagcctaatttacatttgccaaacaaattattatttgtttgtttgcattcgtggagagtaattcaatttgggcagtatcttttctcactttagaaaaagtaggcaggcaactaaagagtgggcgattagtttttcc

SEQ ID NO: 42641 - DNA, 537 bp, Glycine max
  Clone ID: PAT_MRT3847_138505C.1
gtaattcgatatactttgtgaattataatctcactgatttgaggatcagacatatcaaacagggcaagggttttgttgtcaaagtggagcaaactatttgcaaggaaccatgtaataaagaagcccaatggtgttaagacttctagtgatggtcataaagagatgatgctttctcggagtattggtcaacttatgggctctgaatcatggcattcaaatattgatgttcctgaagacattcttgctctctcaagtgaatgttcgaataatttcaggaaaataggatcttcacaaggtgtgaaattgttgcctcccagcttggatgattctaataaaaagtccactcttggtgtatcttcatctcaatctagagaacgcagaaaagtgcaattggtggaacagccgggccaaaagtcagtgagcagaagctcacaagtgacgatagcatggcctgtaagtcaaggccgtcccatgtctgctgatgatattcagaaaacaaaaatgcgtgctttatttatgcagagtaagtatggaaaa

SEQ ID NO: 42642 - DNA, 907 bp, Glycine max
  Clone ID: PAT_MRT3847_138506C.1
gcaattccagcgaaaaactaactaactaaatgttaatttcaatggaaacatcgaatcgagtgtctatgtcttcaaccaccttcagtctctctcagatgcagcaactccacgcgtccgccaggttgagatcttccttcctcaagaagcttccggagcctcttcgtcgcgccgtcgctgattgcctctcctctcccctcacctccgccctcgaaccttccagaacccttcgggactatctggcagaccctgcaaccagagacttggcttacaatgcaattttgggacatactattgcagagagggagcgaagtcctgcagtagtctcaaggtgtgtgacacttttcaaacgctatcttctaagatataaaccaagtgaggagactttacttcagatagatcatttttgttcaaccattattgctgaatgtgatattaatctgaatcgaccatggtcaagatctttgaatcaccaaactggtgctttagcaatatccacaaatacatctcctttgcctgtatctagttttacctctgaggcaatcctgaaatcactgagttatgtgcgttcccttgtggctcaacacattccgaagcggcatttccaaccagcttcatttgccggaccaccttctgcgttgggacaatcactgccaacattgtcatcattgttgagtaaatccttcaattcccaactatgtccagcaagtgtcacagaatcagtggagaaggattcagtcacttcatctatttctaagttatcaaaaattgaaaaaattgatgaaaaagacaaacttgggttcattgctcatgatattctacaatggcgttggcttgagaaacagcagtcatcatcaatgaaagctgacagctctacttgaaggagacattggagctaagatgaaggggc

SEQ ID NO: 42643 - DNA, 408 bp, Glycine max
  Clone ID: PAT_MRT3847_138507C.1
ctgcaaagtagaatagcttgcaggacaggaaaccacgtcagttttgcttgtttggacaatggtgttattgagtaggtaccctgattggcaagcacgtgcaagggaggaagtctttcaagtctttggataccaaaaaccagattttgatgggttaagtcgcctaaagattgtcactatgattttgtacgaggttcttagattataccctccggtagctgggatgactcgatctattgaaaaggatgtgaaacttggaaccctaacattaccagctggagtacatgttttacttccaacaattttgattcaccatgatcgcaaattctggggtgaagatgctaaacagttcaatcctgagagattttccgaaggagttctaaaagcaacaaatggtagggtttcattttt

SEQ ID NO: 42644 - DNA, 1121 bp, Glycine max
  Clone ID: PAT_MRT3847_138508C.1
ttaaggtctggcacattttgttatatatttcctcgggatatttctaaaatgaatatcacaaaaagtattgaagaatagctaaactgtagcctttttttgttcattcaatcctcaaacctgtgggacacataatgaaatctactgtgtgagtcaattgattttattcaccttgatacatcgttggccactgtaggagggcttatgggaaatggttcttactagtggatggagcaaaaaagttgggggaaaaaagtctcacattaagggatttttactactgtgaaagcaattaaaaatcaacttacctggtgctttcttcatccagaaatttgacctgattgggcattgtgataatgatgagatatttgaatacaaacaagattattttatacctcaaaattttcaatcgtgttcttggtcaatctgacctaaaaatggatgttgaagtccctgttgattgaaactacctgcagttttccctgttctcttgaaagataaaaattgtaaactctattcgtaggattcttgtaacatatttaatgtggaaatgaaaagtgcacaaatactgctgtcccccttcttctggggattcttgtaatgctgttagttttccaaccactagctgttatagagccaatttgagaagctcgagcatgatttagtttttcacattctttgacgtgttatacaaccttttgtgtcttctggattcagttttgaggtagttctttttattcgaagtttctaactgttggatgaattttccaagttcaagtttcttacccttctagttgtttgctgcgtgtctttgcacctttctattttggttagcttgttatccaaacaagataattgtttacaaagtattaggatactcgatagaagttcaatcccttttatatattaggatttgtttaccctacaaaaaaagaaaaaatatataagaaatgatgtctcttttgtccaaggaaaaactcatagacaataagcctttaaaaaggcgtagggaagagaagagaataagaaagcgttggtgtgcattgaggggattgtccaagttatgttttgcagcttaatcagctgagctcattaaaagggataaagatctggacacaaaatat

SEQ ID NO: 42645 - DNA, 551 bp, Glycine max
  Clone ID: PAT_MRT3847_138509C.1
gtaattttctcccataaaagacaaataatttaaaaatcgcatgaaagtaagacacggtcaattgaaaaagaatctcattaaaattttaaaagtttttcacttgctaatatttttgttgatcggtcatttctgaaaagtgaaattttgcttttacatcgcgcagagaattatatgttgggattaaatgaaaaaaatatatgttgaaaaaaaaattattccttagttttcggtcgagatatatatctcagtttacacgtaaaaaataaaaataaaaataagaaggaaattgcaaggaacaatgcatcgagcttaacttgagaaaattttccaaagacgctttttagcatgatggagttgcaataagaacgaacagttccgttgataaaataattggatgcctaatctctcataaaaattttctgacagtctatttcaatgaataaattaaaatcgagaattttctctctctttttcttttttctacaaaatcacatttaacatgagaattttcaacatgcctctaatagtttaacccgaatcctctcattctc

SEQ ID NO: 42646 - DNA, 256 bp, Glycine max
  unsure (1)..(256): unsure at all n locations
  Clone ID: PAT_MRT3847_13850C.1
caaaaacatgtacagtcngtcctngccntgcttgcnancangaccaggatgagggccttgaagntctgtncatttgcttcatgntctcaggcgntatccaagtcttggnttatggagctatgnctgcagacnaacggncatgaccttcaaagggtttgggattgcgacagaaggaccttnaaaatgttgattcntatacagatgaagaggttgancgctnctttgaaganttttatgaggatgnncacacagagnt

SEQ ID NO: 42647 - DNA, 1517 bp, Glycine max
  Clone ID: PAT_MRT3847_138510C.1
gaattaatgaattaattagagataaatgtgaaaggaacgatccatcgacacaacactagtttgcgggtagcgagtagcgatgcattggtgcgttcgagagagtcgatgatgacaaggcaaggcacgtgtatatattcgcagtcgcaggtggtctgattacgccaactacagtacaacgaggtaatagtcgatggttcttcagattttggtttgaagcccaaaattagttttagtgatatggggactgcatcatctatgttaactcaatacgacatcgaggaagttcaggaacactgcaataatttattttcccagcaggaaattgtgtccttgtatcaaaggttttgtcaacttgaccgcaatgccaagggatttatttccgcagatgagttcttgtctgttcccgaatttgccatgaatccactttctcagaggctgctaaagatggccgacggcttgaattttaaagactttgtggccctcttatctgcattcagtgccaaagccagcgcacaacaaaaaatagagcttattttcaaagtatatgattcagaccgcaatggaaaggtgtctttcaaagatatgctggaagtgctaaaagatttgtcgggtccattcatgtctgatgaacagagagaggaagttctcagccaagttctaagagaagcgggatacacaaaagactcctacttgacattggatgacttcattaaggttcttggtcaatctgacctaaaaatggatgttgaagtccctgttgattgaaactacctgcagttttccctgttctcttgaaagataaaaattgtaaactctattcgtaggattcttgtaacatatttaatgtggaaatgaaaagtgcacaaatactgctgtcccccttcttctggggattcttgtaatgctgttgttttccaaccactagctgttatagagccaatttgagaagctcgagcatgatttagtttttcacattctttgacatgttttatctcaactcgaagatgccttctgcttagcccgactgaaattcacagttatgcacattctcagtcagaaaactcacaccacccacgacaatacctctgatatccaaccttttgtgtctcctggattcagttttgaggtagttctttttattcgaagtttctaactgttggatgaattttccaagttcaagtttcttacccttctagttgtttgctgcgtgtctttgcacctttctattttggttagcttgttatccaaacaagataattttttacaaagtattaggatactcgatagaagttcaatcccttttatatattaggatttgtttcccctagaaaaaaagaaaaaatatataagaaatgatgtctcttttgtccaaggaaaaactcatagacaataggcctttaaaaaggggtagggaagagaagagaataagaaagcgttggtgtgcattgaggggattgtccaagttatgttttgcagcttaatcagttgagctcattaaaagggataaagatctggac

SEQ ID NO: 42648 - DNA, 285 bp, Glycine max
  Clone ID: PAT_MRT3847_138511C.1
ttcgggaacagctattcctcttaagcttgctactgagtttccacactgcataccttaggtcttccgaattcgaagttaatttgcaagatgggtaaggaaaaggctcagatcaacattgtggtggttggacatgcggaccctgacgaggtaaccatcattaacgagctgaagaagcctgctgtggagaaagaagctccagggcatgccatatgattacatgcacgttcggcctcggaggggaacctttaaaactatggttactataacacctggtaccctaatgta

SEQ ID NO: 42649 - DNA, 246 bp, Glycine max
  unsure (1)..(246): unsure at all n locations
  Clone ID: PAT_MRT3847_138512C.1
gaaagcaccaagggccaaaccccncaggngagacagaanngagagngcggggaggcangagaaannaaggagggnanaccangagngccaggngannnnagcangnaagggnggcaccagangcgccttttttatttacgcgggggagggccccgcccccacgacgcnggaagaaaagaagcacaggacaaacggggacaaaggagccgaacnnnnacaggagacanggaagaggnngaacncaac

SEQ ID NO: 42650 - DNA, 143 bp, Glycine max
  Clone ID: PAT_MRT3847_138513C.1
aaaaaaaaaaaaaaaaattcatagggattagattcttgaagtattaactagactcatactgttattaagcaacgattgaaagatataggattccaacaacgacatcgaaggcataattctaaatcacttgaattacgataagt

SEQ ID NO: 42651 - DNA, 272 bp, Glycine max
  Clone ID: PAT_MRT3847_138514C.1
ttgcttttcatgtattaatttttcttatatgactattataatctgttggacctggttcaaataagttactaatataaccgatggatttaatttagttttaaattttcctgtaatttcactttttttcttatttttgaccaatattgcattaaaatttaattttcaatgaataactttgttacaaataaaattgcttctatttatctcaaatttcattacccttcactattggtttcttttaactttcttttattctttattggtatttcaat

SEQ ID NO: 42652 - DNA, 600 bp, Glycine max
  unsure (1)..(600): unsure at all n locations
  Clone ID: PAT_MRT3847_138515C.1
ccagcgtccgagacaatctaagtatgcttcacctctttaggtggacttaacccacataatgattatcctcactcttgggaacaaaacccactcaaccacaacacccacttggtcatgggagaaaccatacaagtatttctttcacctttccaggctacccaagtattctttcactctagcctcttcaggctaccatcttagaaactttttttaggctacccatattccatgggttctccctatcacttctctcacaactaaacttaaaccacatggttaatttgagatacatacacagctttacaacactcatagtgatgaatcttctttgagttctaagttgtatgcactcttattacaaccatcttgaactcagaacatatatggagtgaagagaggacatgaatcttgttttacttagtgtaagggtgtctcttaccttctctctcatgttttacaattgtccttttataagccccacacatatcaanataactgtatntnaaagatgttatgacaattnggggtgacttcttttttgaagtagacgaactactttaaactttatagctaccaacttcttttntatcagcattctga

SEQ ID NO: 42653 - DNA, 575 bp, Glycine max
  Clone ID: PAT_MRT3847_138516C.1
acgcgtccgcagatgatgaagatgcactggttgactcttcagatgtgatgcccgatgaggaggtagatcctgaagaggctgaattgaagaaggaagctttgaaggctgcacaagaagcagtttctaagcagagaatgttgacaagtgcttttgacactgaatgcttgaggctgcgccaagctggtgaaactgattcacttccaccagatgttgctggagcgagtaatattgatttgcaaaccccctccaccatgccagtggcatccactgttcggacacctgaattatttaaaggggttcttaaagaatatcagctaaaaggtcttcagtggcttgttaattgttatgagcagggtttaaatggtattctagctgatgagatggggcttggaaagaccattcatgccatggcttttttggcccatttagctgaggaagaaaatatatggggaccttttctggttgttgcacctgcttctgtattaaataattggaatgaggaacttgagcgcttctggcctgcactgaaaagacttccatattggggtgggctttcagataggacaggactttgg

SEQ ID NO: 42654 - DNA, 213 bp, Glycine max
  Clone ID: PAT_MRT3847_138517C.1
ccgaactcgaatcttatttccaagcacaacagcacgctttcttccactcaaccatgtggtcactcccggaaaaactatacgccaatcagtaacggtctgcacgccgactcttgttcatcatcgtatcaagcatacgacgtcgtcgtagttcgcgctggcgtcattagtctaagcatcggtcgtcacttcctagtatcttgcgacctttctgtc

SEQ ID NO: 42655 - DNA, 174 bp, Glycine max
  Clone ID: PAT_MRT3847_138518C.1
ctatatatacacagcggtcaaataaatacaactaattcctcttatccctttctcactccttcctaattgtatcttctacgtttcacaccttcctttaccccaaaccattcttcccttgttttaaaaccttccatacacaaccaatcatgtccatactacttctttgtccctatc

SEQ ID NO: 42656 - DNA, 164 bp, Glycine max
  Clone ID: PAT_MRT3847_138519C.1
gaatctctgaaaccacaattcacaaccgaaacagtttgcatctctctcacataatgagaacaatatcaaatgtgctcccttctcttcgtcttcgtcttagtctcaagcagcagcatagcttccaacctctcaacccccagcaactgaggcaagtcctcctgcag

SEQ ID NO: 42657 - DNA, 1406 bp, Glycine max
  Clone ID: PAT_MRT3847_13851C.1
cggaattcccgcgtcgacccacgcgtccgggtgcccaagtgtgccagatttgtggtgatggtgttgggaagactgtggatggtgaaccgttcgttgcgtgcgatgtttgcgctttccctgtctgcaggccttgctatgagtatgagaggaaggatgggaatcaatcttgcccccagtgcaaaacccggtacaagaggcacaagggaagtcctgcaattcttggagacatggaagaggatggtgctgctgctgctgatgccagtgacttcaattatgattcagaaaatcaaaatcaaaatcaaaaccaaaagcagaagatttcagagcgcatgttaagctggcaattgacatacccacgaggagaggaggttggtgctccaaattatgataaggatgtttctcacaaccacattcctctgctgaccagtggacaagaggtatctggaggagttgtctgcagcctcacctgagaggctctcaatggcatctcctgcagttggtggtggaaagcgtgtccataatattccatattcatctgacattaatcaatctccaaatatcagggctggggatccaggattgggcaatgttgcatggaaagaaagagttgatggctggaagatgaagcaagaaaagaatgttgttccaatgagcacaggccaggctgcttctgaaagaggagctggagatattgatgctagtactgatgtgcttgtagatgattctttattgaatgatgaagctcgacagcctctttccaggaaggtttctattccatcttctaggataaatccatatcgtatggtcattatgctgcggctggttatcctttgcattttcttgcattatcggataacaaatcctgttcccaatgcatatccattgtggttggtatcagttatatgtgagatttggtttgccatatcttggatattggatcaatttcccaagtggcttcctgtaaaccgtgaaacatatcttgacaggcttgcactgaggtatgatcgggaaggagaaccgtcacaactagctgctgttgacatttttgtcagtactgttgatccattaaaggagcctccacttgtgactgccaataccgtactatctattcttgcagttgactatccagtggataaggtctcctgctatgtgtctgatgatggtgctgctatgttgacatttgaagcacttgctgagacatcggaatttgcaaggaaatgggttccttttagcaagaagtatagcattgaaccccgtgcgcctgagtggtatttttctcaaaagattgactacttgaaagataaggttcatccatcatttgtcaaggatcgtagagcaatgaagagagaatatgaggaatttaaagttcgtattaatggacttgtttcaaaggcacagaaagttcc

SEQ ID NO: 42658 - DNA, 436 bp, Glycine max
  Clone ID: PAT_MRT3847_138520C.1
gtcgaaaattaaaattttctccccaacaaaaaattcccaaccctagctagactctcactcactcacgctcgcagctacgcctccgtcgtacgaggcccctgccaccgacatcgttgggccgtcgccgttgagccctgaccgccgtggccacgccggctggtttggactccgattttatttttctgtttcactcactttgtgtgttttgcacaggtcaaaggagagaaaacaaagcccaattgcttttcaccttcgtcctgcttccaattttcctttgctttgaaatcgcaagtcgtgactacgtcgtttggagcatctgcgtaaagtttacccattctgttgttctccgagtacgattagttctaattgaaggtgtgatgttaagttttaatctctgttttgtatggtctgattgttgaatcataatttggttgat

SEQ ID NO: 42659 - DNA, 335 bp, Glycine max
  unsure (1)..(335): unsure at all n locations
  Clone ID: PAT_MRT3847_138521C.1
tcgagcccaagacattactatgttatgcgaacacatgtacactcggtgccacattgtatggaagtttttcgagagctctgagtgtgtgaggtcagaatgtgagctcatcaatatgcagtgctgctataaagtgcttttcaccattaccggacaaggattatggcattctcgctttacaataatctcactaaaatatgacagttacctgttggcttcttttcatttcaatccaatgagttggcaaacctatntnntgttttttggttaattctttaatactgactataataatgctcatttgaattctttacctttcaattttttgttcgctctga

SEQ ID NO: 42660 - DNA, 117 bp, Glycine max
  Clone ID: PAT_MRT3847_138522C.1
gccatgcttccctccaatcgtaggctagggcgctggtgcatatattgacacaaggctgcctgtggctccactaggaaggacgaatagctatcaagatatcctatacccatctcaaca

SEQ ID NO: 42661 - DNA, 348 bp, Glycine max
  Clone ID: PAT_MRT3847_138523C.1
aattaagtgaatttttttatttataaaacagagttattatctaacagaaaggaggacacgataatcccatcctccgggctacaaaatgagatatgcctgacctctagggagaagccaactgcaatttccctgaccatcattattgtggtaactgttgacacacagagcaaattgacccaaaaattcgggtgtacccatgaaataccgattaccacacgggctcagattgatctgaacttgccattctcatcatggagggtatttgaggcacaatcagcactgttcgagttttcggtggaggtaaccaaagatggctttgaaccggtaaccgctatctccaagagggct

SEQ ID NO: 42662 - DNA, 678 bp, Glycine max
  Clone ID: PAT_MRT3847_138524C.1
ccaacacacccaattaagcccttaacacccaccaaacaaacatgccattccttccaagtagcttatttggtccccaatatgaccaccctccccatcactacattgcaaaaccattccaaacccaccctactcctccaaatcactacattgcaaaaccattgcaatttggacccacccaaaaaacatttcacttaccaatttcaggagggacatcaccaattgttgtcaatgcatacgtggaatggaaggagacccctacagcacacgtgtacaaggcacacgttccggggcttaggcacaatgaagtgagggtagaagtggaaaatgggagagagctatgcatcattggtgaaaagtgggtggagagggaaacaaggaatgggagggggcaacttttggagcgtgctagaggcagattcattcaaaccttgatgctacccgaaaattccaacgttcatcgtatgaaggcttatatggaaaatggtgcgcttgttattaatgttcccaagtactaataatactaagtggtgaatattgacactcccctggtggtgtagtgtaaaatatatgaaataagagtaaaaaaaaaaatgtgccgttgccgcggtactattcggaagaaacacggttatatgaataataaataacttaggtacttaaaaaaaaaaaaaaaaaaaa

SEQ ID NO: 42663 - DNA, 271 bp, Glycine max
  Clone ID: PAT_MRT3847_138525C.1
gggggtggggggccaacatgaaacgccttttttatgaaacgaatccctttgtttgtacccttgtttcccccaaaacaattgaatttcggattcgtagttggaatatggggtccccactatcacatgattttaggggggggggcctctcccctttaaagatttatttaaggggcaggggaagaccccttgggggaaaaatttttaaacctgaagcaatttacagttttgtttttaaagggtgggggaaccacttgctttattggaaagtttt

SEQ ID NO: 42664 - DNA, 288 bp, Glycine max
  Clone ID: PAT_MRT3847_138526C.1
gttaaacatatggcctcacattcttttacttataatatgatcacacttaacaatcatgaagggccgctacatacaccatgtggtactcatgtctacacgataacataggttttgaagtgcaagttcttgcatggatcatcatcttatatatgatcctctgatgacttcctataacgtctcacttgtggatatgcaccatctaaatgtatcattgagatcatagttcacagtaagtttttcatatacgattaatactgtttataatggatgtgacctagagctataaac

SEQ ID NO: 42665 - DNA, 644 bp, Glycine max
  Clone ID: PAT_MRT3847_138527C.1
tcgatctatggctaggaatgtaccaggtgccgtacaccgtcgcccgtttctccacaacgcttcgcatcttaacaactaacttcaacgtctgcgcgtcctcaccacatgtcttcttccctgcggatccggctagtgattccacatccatatcccgcagccttccaaccgcggccaatagaactagccaaggccgtatttaccctgttacgggtggccgtagttgaagcctagcatttagccggtgcagtgcaacaacaaggtagtgtaaacgttttcggttagagggccgataaccaagccatatggtgcgcacttgcaaacgggttactggtttaataagcaaagccacccgctaataaaagcccagttgggagcggtaaaaatagtacacccactctactagagtgatacttatagcaaatagtggcattaaaacctaacgctgcgagtgcggcgagtgctgtgaacactgcaatgacactacctatcaatatcaaggtaccaatggcacatgcaatattatgttgtctaaaacaactggcactaggggtggtacaacgtacgcaccaaaccctttaagccacaactaacatagcacaaaattctctggtagccagcataggaactacaggcaagtcacaaac

SEQ ID NO: 42666 - DNA, 192 bp, Glycine max
  Clone ID: PAT_MRT3847_138528C.1
cttcgcccaaatatggaaggcacattctgtaacataagataccttgtatagggctgaattcgggagggagcttccctgtttcttgatactcgggctgcatctgcttattttggctaatgcttatcaaaaaaaaaaaaaggggggccgtcgtgatcaaaactagctcaccaattgcaggttacgtcgccgctc

SEQ ID NO: 42667 - DNA, 238 bp, Glycine max
  Clone ID: PAT_MRT3847_138529C.1
gaataagcccggttctgatgggggtgataaagcgcaacttgtccaaatctatggtccaaaaataaaatatgaaacatgtgcagctgccggctatcaatgtatacgtacaggctgtacggggctaatcaatccatagattgtactaaagcctgctgaaaaagaatgaatctctcttggccttggttatcttattcatatacacattcttgataactcaagacatcaacgaggagctaca

SEQ ID NO: 42668 - DNA, 299 bp, Glycine max
  unsure (1)..(299): unsure at all n locations
  Clone ID: PAT_MRT3847_13852C.1
acgagaggaccctgtgtagtgtgtagtctccagacaaacatggcgaaaaaggcaaaagggtctcactctgcttcttctgcctctgcatcttcccgcaaactagtggctgaggattaatatcanaaaacgggagggngaanannttcanagaaagaaatcaggtgccgnnngcgagaaacttaattgtcaagaaagaaaacccccaaagcaaagcaaaagaagaacagataccagaagtggnntttgaatggccttattgaaaaaaccccncaaaaaggaaaaaacccttnccgaccagn

SEQ ID NO: 42669 - DNA, 405 bp, Glycine max
  Clone ID: PAT_MRT3847_138530C.1
cccccaaaattgggttaaaaaaggccaaaaaatggttaaaaaaacctttaaaacccaattggggctttttttttcctttaaaggttccttttaaaccattttgaattttcccggaacttggccaccaagtggacattttttggaattttaaaggtttcttcaacctttgaaaaccttcccctttttttagggttaaacccttccaaactccgaaaggaggcattcttcaatcttgattgaattaattcaggaaaaaaggggggaggaaacctggttggaaactttaacctttaaactacttgggtaaagggtgggaaataaaacccccggggggctaatttgaaaaaaaaggaaagcagcttatttttgatctcaagaacaaggggggggtgcccccacaggatt

SEQ ID NO: 42670 - DNA, 475 bp, Glycine max
  Clone ID: PAT_MRT3847_138531C.1
gctgtcatatcaaacggacagacattctttttgatgaaattttcaacaagttcgtggatgttcaacagagagaaacatttttggagcttctggagccctatattttgaaggacatgcttggatctctacctcccgagattatgcaagaactggtagagtattatagcaccaaagggtggttacagcgggttgagcaatgtgtacttcacatggatatatcatccttggattttaatcaggttgtcagattatgccgggagcatggactatatagtgccctggtgtatgtcttcaataaaggattagatgattttagggcacctctggaggagttgtttgctgtcttacaaaatagccaaaaggaaagtgctactgcgcttgggtatcgaatgctggtttatctcaagtactgctttacaggtcttcccttccaccaggccgtggaagtattcctccctcacgtttaccatctctt

SEQ ID NO: 42671 - DNA, 333 bp, Glycine max
  Clone ID: PAT_MRT3847_138532C.1
tcgttaacctcaatgtatgagacggttgttgctggatagcattccacaccagcttttcctgtctaggactatcaatcaaaaaccgagaaagataggtgccactttgacacggagaatgggccctcatttcgatgtggcttggggtccaatggagacgatagggattagagtgtctcttgatgaggtataaactccaaatggtcttatgtttggtgtgtaaaagcctgaatataaagattgccttgctttgcgcacagccacaggaaccattcatctgtaccgagctatagatccagttttgtgctaaacgcaattttaaagctaatgttgatt

SEQ ID NO: 42672 - DNA, 397 bp, Glycine max
  unsure (1)..(397): unsure at all n locations
  Clone ID: PAT_MRT3847_138533C.1
gctattatttacgcattataaacttgtgatactagnctgaagtataatcgtaacaaatacaactgacataactaactaactaactaattacgtagttaaacagagatattaaccagactactgactaactacataaactaccatgaaaagatttaagattcctgaattaatgtctaaacccaatgattcaaagaaaagttaaaaaatcatgaaaaaaaaagctgtcttggggaagaccacactgacacaacgattgtatttctgaaataagatgaatttagcaggcttcagtagaaaatcatttctagcttgagaagtggatttgctaattttattgtatttatttttctcctgctaatttgcttatatggttgatgtttttttaaaaaaataatgt

SEQ ID NO: 42673 - DNA, 1961 bp, Glycine max
  Clone ID: PAT_MRT3847_138534C.1
aataaatcaagtgtataagatgcaaaccatgttatttccatatgtgcatctatttgatggcaatttctgttgtcgctttaacaatttagattgagagttactactagttaaggattttataggttagatggtttaaattttacattgagcagtttggaacatgttattatgatcacctttgattgccccacagtgtggaactttattgcagattcagtgtatgcataaatctatttgtgcagatgttttgaattgtttaaagcaggtgcctactcgtgaagattcttaccaggttaagttttggggatttccagtggtgtaaaagaaaagaacttatggaccgactcaatggttctgccaatctaatgatagtgtccgatcttgatttcacaatggtagaccatgatgatccggaaaatcttgctcttctcaggttcaatgcgctatgggaagcttattatcgtcataattctcttctagttttctccactgggagatcgcctactatatatggagagttaagaaaacagaaacctttgttgactcctgatataacaataatgtctgtgggaactgagattacatatggtgaatccatggtacctgatgatggttggaaacagtatctagatcataagtggaatagggacatagttatggaggaaacagccaagtttcctgaactaactttgcagtcagaaacagaacaacggcctcacaaggttagcttttatttggaaaaagggaaagccccgaatgtcacgcaaactctctcaaaacgtttggaaaaccgtgggttagatgtgaaaataatttatagcaatggtatagctttagatgtattaccccaagctgctggaaaaggacaggccctagcttttctacttgaaaaattgaaggctgatgaacaaggaccaatcaacactcttgtttgtggtgattcagggaatgatgctgaactgttcactgtacctgaagttaatggggtcttggtcagtaatgcacaggaagaattgcttcaatggtatgcagaaaatgcaaggggaaatccccgaataattcatgcaactgaaagatgtgcagctgccattgtgcaagccattggtaacttctctctaggtccaaatgtgtccccaagagatattggagatttaatgtccaacaggaaagttcatagtcctagccatgaagtggtgatgttctacatattttatgagagatggaggcgtggtgaagttgagaatcctgagcagtatatacaaaaattaaaatcagtctttcattctacaggaaattttgtccatccttcaggaattgatcaacctatgcaccaaactatagataccttagcaaaggcttttggtgacaagacgggcaaagactttcgagtgtgggttgattgtatatctttagcagaggttagtttgggttcgtggctggtcaaatttgacaagtgggagttatctggtaatgagtcacggggttgttcaacaaaggctctgatgaatgcaaaggttgatgtaccagatgagtatacctggatgcacttacatcatacttggttggacgacgtaggaggacaggatgatgtgtcttggttgttatagtttcgaatcacttctgttaaaaagtactctttgctgtcaaactattcagccaaggcatgaggcacggcaatatgcactcaaaccttacatagcaataaggatttttcattttataacagttttcactttaatgaagagagaagccatgaaccgaaacactttgcaaggaaagtaaacctagatgtgcaaatgtggcaatggagagaagaaatagctgctcaaaggttgtgtttggtttctagatagaaaaaatacgtttgtcattcgaaggcagcatgaacccataatacaaagataatttatatcattcattattctagctagatattatattaaataaaaataatttaaacc

SEQ ID NO: 42674 - DNA, 436 bp, Glycine max
  Clone ID: PAT_MRT3847_138535C.1
ggcaaatgagacggttctggtgtgggtttctctcatttcattaaaaaataaataaataaatcaagtgtataagatgcaaaccatgttatttccatatgtgcatctatttgatggcaatttctgttgtcgctttaacaatttagattgagagttactactagttaaggattttataggttagatggtttaaattttacattgagcagtttggaacatgttattatggtaattgatttttgttttaaattgttgccatatgatatgttcatgtatcctttcaagtttgaataatcagaatgttaatgtgtttcctgtaagtctacaatttgttctctatttttaaattttcacagatcacctttgattgccccacagtgtggaactttattgcagattcagtgtatgcataaatctatttgtgcagatgttttgaatt

SEQ ID NO: 42675 - DNA, 1189 bp, Glycine max
  Clone ID: PAT_MRT3847_138536C.1
cggctcgagctcgagccgattcggctcgagtagtcattcctgtttcatatacttcattacattggtcactagtaatcacttgctgcattttctttcctactcttcacccttgagaatttgtcattccgacatggaacttagttttaagcaccattttggccttgcttgtgtcttactacttttagctgctctgtgtagctcacaggactctttcactgactcgagagcaacatattatggtagccctgattgctatgggaatccaaggggagcttgtggctttggcgaatatggaagaactgtgaatgatggaagtgtggcaggagtgtctaggctatggaggaatggaagtggctgtggtgcatgctatcaagcaaggtgcaaaataccacaatattgtgatgagaatggagcatatgtggtggtaacagactatggtgagggagatagaacagatttcatcatgagcccacgtgccttctcgagattgggaggcaatgcagatgcatctgcagagttgttcaaatatggtgtagtggatattgaatacagaagggtcccctgcagttacactggctataatgcgtgtgtttaaggttcatgaacacagcagtaaccctgactactttgctgatgtcactgctgttgaggttgtttcagcaagattgccaagaatggaagccaatgcgcagggcatttggggcaatgtttgactatagcaacccaccaaacggtgagatctacttgaggttccaagtgagtggcagtgcagggctttattgggtacagtccaagaatgctatctctggtgattggaaggccggagcaacatatgacaccaatgttcagcttaattaggaaggaaagaagcactttgagatcccttgaacggattagaaatagataggcactagtattcaatttgtttctgtttagtttcactctaagaatgtttgtgtgtagtgtgtactgttgtgtgtctcttttgttgaagactaaaataatggggattcatgtacttccatcttagattacatgaatttgaataaaataaacatggtacccttttcctacattggtataacagtaaaggcaagtttccatcttgatcaaggttacatgaatttgaaaaggaaaaactccctttttttctggcccaaaaaaaaaaaaaaaaaaaaaaaaaccaaaa

SEQ ID NO: 42676 - DNA, 311 bp, Glycine max
  unsure (1)..(311): unsure at all n locations
  Clone ID: PAT_MRT3847_138537C.1
tccnnnngggngggaaagcagaggcncacaacannnnacannggaagncnncnanggcgccggnggaccaacaaggnanacacanagnananannncnncatacaaaacnnccnaagaagaaaaagggaaaggcacaccancacanagacaacctttttatacaaaccgggggaaancaccggcnaacaacacagncnccaacaaaaccaaaaagaagcaagagggagaaagaaaaccaccggcaagnagaccncnnaancaccancggggaaaaaaaannnggggaaggagaanggccccnnnaaaacaa

SEQ ID NO: 42677 - DNA, 488 bp, Glycine max
  Clone ID: PAT_MRT3847_138538C.1
cagaggtttacctttgacaatgcttgctgtatggcgtttggatatgatcctaattgccttccaaacaagttcagtactaagctctcacactttgcttatcagaaagctttaattgtgcttgaggatgtagcattccacaggcacatcacaccaagatgtttgtggaagctgcaggagtggcttcaaattggtaaagaaaagaagtttaaggaggccatagaagcttttgataagttcttgtttgaacgtattgcatctaaacgcgaagagcaaagtagatgcaataatcacaccaaaaaagaagatgacaatactcattctgacctgataagggtgctaatggaggaaggagctgaaaaagggaaaataatggatgacaagtatcttagagacactgcatttacccttgtttctgctggaagtggcacagttagtgcaggtctcagttggttcttttggctcgtttcaactcatccagatgtggaagc

SEQ ID NO: 42678 - DNA, 398 bp, Glycine max
  Clone ID: PAT_MRT3847_138539C.1
atataatgtcacaagatggaatcgtgcaccatagctcctgttgaactcggttgattacactgcactaatagatgtatgggctcgtaagttgtatttctcatggaactgatggatcgcaagcctttgtttgactggcaaagatcattgtcatcagttgcgactacttatggagctgataggcacatcattaaaggctgatttgcggtagctgaatgaaaatgctaacagatacattaggcaactacctatttaccgctgtcaatctatccaggaaaagtgcacacatgtacatcctgaagctatatatcttgttcgatagatggtaacttttgatcctcagcagaggattactgttgaagatgcactggcccatctgtactcgacatctctgcatgaca

SEQ ID NO: 42679 - DNA, 362 bp, Glycine max
  Clone ID: PAT_MRT3847_13853C.1
gagagaggtagggctactgggtggaagcctgaccctattactttctctgtgttggggaagatgtttggggaggctggggactatgatggcattaggtatgtgtttcaggaaatggagtctgttggggtgcagcctaatttggttgtgtacaacaccttgttggaggcaatgggaaaggccgggaagccggtgttcgccagggggttgtttgaggaaatgattgagttgggaattgtgccaaacgagaagaccctgacggcggttattaagatatacggcaaggcgaggtggtcgcgagacgcattggagttgtggcaacggatgaaggagaacggctggccaatggattttatcttgtataa

SEQ ID NO: 42680 - DNA, 397 bp, Glycine max
  Clone ID: PAT_MRT3847_138540C.1
aattcggctcgagaaaagtagagttgttaaactaacatgttagaatttaattgtatgcaacacattttatacaggcagagggaacaattgggtgagggaattgggtatgggtggattgatggccttaaaactcatgctgagaaacatgtaaaacatgatagaaaccttttattctgtaatcgcatgatttctcttgttggcaattatcatgcaagacatctgatatgagtaattatcggcctaggaaatgttcctataggcgactgatttaatgttgcttattgctgcttacatgtttcccttcaacacaccaaccagcagagaagcatactactatagaatgaaattggagaggaatttccgtcaggtacattgaatcaaacatgcctagatttta

SEQ ID NO: 42681 - DNA, 333 bp, Glycine max
  Clone ID: PAT_MRT3847_138541C.1
cttattattattcctaaatcttaattttttttttttttttattttttggcgaaaacaacccaacgtgtgggaccaattttaagtgtgactaacacctacaaatattttaaacaactaaacatcttaaacaaatcaatcactactttgtactcaaaccaaaacgggtaaaaattcaacttttcacctaactttttaataactacactctgacataaacatgcttatccctttccatacactcaaatacctaaaaaaccaactaaaaaccctaattaaacgcctccctttaaaatttctaaactaccttttactaaaattttattaaataaccaa

SEQ ID NO: 42682 - DNA, 1552 bp, Glycine max
  Clone ID: PAT_MRT3847_138542C.1
ccacgcgtccgaaaaattgagaactgtccacctttttcgtttttctccttattacagaccccccttaattgatggtgctctgtatcccctttttcttctgcaagaactacaccaactaaaaccttctttttctttttttttttttggtgtgtttttcttcttcttcttcttcttccaatccttaaggaaaaaagaaactaaagaaaaaaagtgagccatgtcaggcttgtataatcccaacttctctcctgctagagctgcttctcctcagattaggagcaatccagaagtggacagccagtacctatcagagttgctggcagaacatcagaagcttggacccttcatgcaagtgcttcccatatgcagccgcctcctaaatcaagaaatattaagagtttctggaatgttgtccaatcaaggttttggtgactttgatagactgcgacatagaagccctagtcctatggcttcttcaaaccttatgtccaatgtaagtgggacagggttgggtggatggaatagtcttcagcaagagagattatgtggagcccctggaatgacaatggactggcaaagtgcacctgcaagtcctagttcgttcactgttaagagaatcttgcgcttggaaattccagtagatacatatcccaatttcaattgtgatgggtgaacttttaggtcttaaatggacttaagaggaagaccaggctatgagcatctcaatgagcaactccatattttgattgaggctgatttacctgctaatattgttgacataaggctccggcaggctcaggaaattatagaagaactactcaaacctgtggaagagtctgaggactatattaagaggcagcagttgcgtgaattggctatgctgaattcaaatttcagagaagagagtcccggaccaagtggaagtgtatctccattcaattccagtggaatgaaacgagctaaaactggccgatgaaaggtttccttattacttgtagatggtgctattgttttggagctatctcaatcaaagcatatctatgaaagaaagactaacaattattattgctggctagcattctgggggttttaaatcctcgccttttatcctacattttttcttctaaaacaacaggagtcaaagctaggaagatttttagaaagaaaaaaatgataatataattgagtattgagaataggtgtgttcaaatgagtctttttcttgcacacatttcatacatttattatttaatttattcttgtgtcagtaacttgtgagaagatggaatacacatgtgatgggtgaagttttaggtcttaaatggatcaaattttgtgggcatgtgacatgccaggtctcacaaagattagttatagcataggttgaattttttttagttgtttgtctcaaacatttgtattttatttcctgtgttacagttgttgaacgatacatgccatgtaacagatatcttaccatgtatcgccgaaggaaaaactagtatttttttatatagaatatagtatatactatatttgttttagatttaaa

SEQ ID NO: 42683 - DNA, 307 bp, Glycine max
  Clone ID: PAT_MRT3847_138543C.1
ggctcgagacaactatattgagctgtgatctgcttgagatgcagcttcatatggctcgtgggcggagcccgggccactaggaccccgagcttactgactcgaagccctctcatggggattcggatcctcgagactacccatgatgtactcagctgcaggtgcatcattcagaatgcatgtcacgggccatggatgacacatgggacccatttggcttgcaacttatggcgcggtacctgctaggacgacatcaggtggattgcctaactggattacgggagagcgatctaccgcttggccttcgcta

SEQ ID NO: 42684 - DNA, 381 bp, Glycine max
  Clone ID: PAT_MRT3847_138544C.1
atccgcacacagagaaggcatcatacttttttggatttgtaaacatcaccacctgtttaaaaaatcccagcaccaacaagtgatgaaaagaaatcaattattattaagcccaccggcgcccagaggcgctcgcttcctccctatttgttcattcacaaaaataattttttgcggggccctagcaaaaccctgaaaaaatttattttgaactttacaaaaattttcaaaaaggcccattgatgtggggtccccaatacaaaccttggccatgttataaaacacccaaacccttaagaaggttctgaaggtaagaatcacctaactggacgggcggtataaggccccagaagacgaatagcacacggaaagttttccattgag

SEQ ID NO: 42685 - DNA, 252 bp, Glycine max
  Clone ID: PAT_MRT3847_138545C.1
ttccaggggtgagccttgccgtcgcttttctgtgggagaatctgtttaatagcgagatgttggctgtgggtatgatgcatgtccaattccaaatgaatggggggattggttgttgtccagggagggcattacaaacacattggggggttccatgttgttgggatccaaggaagacagggatatggttgattgataccataaagtgtgccagttctgcaagctcaaagaggtggagtttactttgactttttt

SEQ ID NO: 42686 - DNA, 124 bp, Glycine max
  unsure (1)..(124): unsure at all n locations
  Clone ID: PAT_MRT3847_138546C.1
catctgaccggaacgaaacgaccttgccgttgcccccttcatgtttgccttgtcttcaactgagagaacgaggcactatgttttcaagagagangtacactgcttgaagctctctgtctatctc

SEQ ID NO: 42687 - DNA, 466 bp, Glycine max
  Clone ID: PAT_MRT3847_138547C.1
gtacggaacagggaacaaaatcaatcttttgttgcacgtgatgatcacgtgataaacatggtgactgtctccgatatacaagacatcatttgtttgttgttcctcctcatttcaaaattttaaaccacacactcctttccttggctgagggagcttcctgttgttttccttctcttgggttccaagcgtttttgccctttgacttgaaggaactattactagctggtggctctgctatgttaccactttacaatgatttggaaattgcaaatgacccaaaaagagcaactcaaatgagcacatttgtccttctgagagctagaaaatgatatgaggaagtctcttttcaggtacgaacgatgtcaaacactcccaattcaaaatctataagcttgtgaagtctgcagtttgaccaatcacctctctggctagtggctagtggccaaagccctcatcagtgaggcag

SEQ ID NO: 42688 - DNA, 415 bp, Glycine max
  Clone ID: PAT_MRT3847_138548C.1
ggaccagggtatttggtattatttattgtcaaaaaaagattcagtgggaattcccaaatggattgggggccaaccatggaaaaaggaaatgttttttctttaatggccactagtcttccgggggccttgattggtttttttccactgggaaaacctgaaaaaaaaattccttagccccttttaattctggcattccaaagttttgttggctacccgtttccagcttatttggccctgctaaaatcccactgtagcacttttagccttgggggcagcagaataatctgagactccggctgtgttggcggcggcagttgcaccatcagtagcagcaaatgccgggttgttaaatgatggaggcactgtgttgaattgaaaactgttctgagcttcaagtgttaggggctgctgctgc

SEQ ID NO: 42689 - DNA, 852 bp, Glycine max
  Clone ID: PAT_MRT3847_138549C.1
acgagtgaatgagtgtagagttgaaactcgggatgggataagggatttgcagccaactgttgttacgtggacgacattaattgctgcgtactgtaagcaccgaggaattgatgattccttttctctttatgagcaaatgattatgagtggaatcatgcctgatgtggttacttgtagttctattctctatgggctttgcagacatggtaaattagctgaagcggcaatgttgccgagagagatgcataatatgggtttagatccgaatcatgtctcatacactacaattattagtgttgggttacaagtgtgaggtgaaatcccacatcgggtgaaaaagtggagcaccatataagtaaggagaagatccataaacctgagtcttaaggtttttgggttaatgtgtggtatcaagttcacttatgtggtggctcgtgatccactgatgtaaatctatttcgtgtttactcccctccacattgacataaggtatcattggatctgagatgtcctcgaggaaaaaaaagtacatcttgacaaggtttacacagacgagaactggtcagacatgatgacaaaaatactaccgacaaagaagtttgaagattgctgtcaaggagggggagatttgttgggatccgtccttaattggagaggttctagaaaattctagagccttctagaaaaatatattcctaaccatccaagacaagagtgaatccacttcttagagtgagaaagctagaaagttagagaacctctttgagagagaagataaatagcttggaaagtctctattctcaagcttgagtgtgagcctccataaagtgagtcaattttgtaagcacgtcc

SEQ ID NO: 42690 - DNA, 586 bp, Glycine max
  unsure (1)..(586): unsure at all n locations
  Clone ID: PAT_MRT3847_13854C.1
agcggccgcccaaaggncccgggggggagaaaaacgggcnganagaaaggaacaaannacaggcnnnnnaaagcacaannggcacanaggaaaaaanggacgcannaaaaaanaaggganagacnaaannggcgggggaacnanccanaaccaacaaaaccnnaaaagcgggggggagaagaacgttttttttttaaanganngnaaanccnnaccaccaaacnggagggggggaacagggaaaacccccgaanaanccnaaaannaaaanncancnaggcagcnggaagccncaannaanncnagggnnngggncgccngggccncaanaccananaaaggcacccnagaacaancaagaaagcaggaangggcgncanancaaacaccanangnannnnncncnncncnggggcagnnaannggganggagaagggcangagncacannaacnngancaacaaaccnnngggangcanccnccaagggggggagnagccncaaggcancacgggagcgcaanncncccgggacagnggacacccnnnnccaaaggcnaacaacanaaagggacnggggaacaag

SEQ ID NO: 42691 - DNA, 277 bp, Glycine max
  Clone ID: PAT_MRT3847_138550C.1
gaaaatataattttttacaagaaccaaccactatataaggcgggcctctttttaaagagaggtggaaacagatcaaccattttgtgtacaacttgaagatagcacagacaaagccattgatacagcgtaaaacccatcgagtaagtcagatttggcagcaatttacttgtgtaaatatcaattaaacgggttccaatatcactatggggtattgagtggatgggaaacattcataaataaaacttcacaaaatttgctttttttttaaaccgcgttt

SEQ ID NO: 42692 - DNA, 392 bp, Glycine max
  Clone ID: PAT_MRT3847_138551C.1
cccacgcgtccgcccacgcgtccgcccaattccatagctgcctcagtaattgggacctgaaaaactttctcttttaatcactgaggcatacaaggatgcacaccaaaagagtgtccaggccatgaaggaaaggatgaatgatcttgcacagagcttatgaatgccaccagggcttagtgaaggattgaagtgatgaatacttttattctagacttaggacttgggcctcaggtttgcacaaacatggcaggatagacttatttgttttcttcatttactatggctgttaatttgcaatcttggttattaagaaagaaatgtaatcctggaattatttgaaatggtggtggagcttcaattttttcacattttactcgtgttatttttgtttg

SEQ ID NO: 42693 - DNA, 479 bp, Glycine max
  unsure (1)..(479): unsure at all n locations
  Clone ID: PAT_MRT3847_138552C.1
taagacccctcatttgggctatcagggaagnaggtccttccgaagaattagcaganttttttcaggaatatggatttgaggaaaggaccaacgctcgaagccttcccattcccgggctgggcgcctcacctcttaatattctctcaccctgctcctggcgggcccctaacaccctctcgccggcacctcccctcccaacccaaccttgcccctggccccccatccctcccccccccaccctcctccggcccctctccttcccccccctccacctttccccccccctctctcccctccgccttatcccctctccccctttccctccccctccatccccctcctctcccccccctcctcctctcccccaccctcctttctccctctctcctctcccccccaccccctcttgcccccccacccaccacaccctccctcatcctcccccccccccacccccccactcctacatccctcccccc

SEQ ID NO: 42694 - DNA, 224 bp, Glycine max
  Clone ID: PAT_MRT3847_138553C.1
cggacgcgtgggcggacgcgtggggtttgcagtagttttggtagcaagactttgtattttgcgtggatttagcttactatatgcaggagcagctatctctgtaatcttatatccatctcctgttgcttgtatcgagccgatgggtgtcctgatgtatagagattgcaaatgatgggcgaagtatcttatctgtggtcacaattcttggatcctccaatacgttc

SEQ ID NO: 42695 - DNA, 194 bp, Glycine max
  Clone ID: PAT_MRT3847_138554C.1
ctgccccgccccacctcgaatttgctcgtgctagaagacattctctaagtcgactgttggaattacaggggcgctgacttgaaggggaacaccctgtagaaggatgcccactatgctatgtctctgaaattttaagatcttctcacccacggctggcgctttctagactatcacgctgcaattcaaccttgttg

SEQ ID NO: 42696 - DNA, 149 bp, Glycine max
  Clone ID: PAT_MRT3847_138555C.1
attcctttatcaccatggggaagtaccttcctggtgcggcgggttttttcttaactttgggcatttcctttattttggcttggaagacaccctcccttgattaattctttagttgcgggcaagatttactggggaccttgccacttttt

SEQ ID NO: 42697 - DNA, 717 bp, Glycine max
  unsure (1)..(717): unsure at all n locations
  Clone ID: PAT_MRT3847_138556C.1
tggtgtggtacccagtgacatctgctatgggcaaggcatcatttgatggacctgagtgcataaagnagattcaagtaaaagcccaagggaacacttcaatctctatgttcttttcaaaaaaaggagatgaaagtaaagactcaaagccagaacagaaagcatcatgtcctgaagttgtcaaaactgaacatacagaagacctgactgaaagtaaagacacaaagccagagcagaaaacatcaagtcatgaatttgtcaagactgaacctacagaagacttgagagaaagagctaaaactgaggagggaggcaatgacttaaaattccatggttcttcccattctcaaaatgtttctatgctcccaattaagcgtgagtatgagacattttcggctgctgattcaaagccagcattggcaaatcatgatcagataagtccaaaccctgcaaagaaaaaggaaaaagcaaagactgctaatgataaacaaccaaccctgttttcatactttggaaaaagtaaccactaaactaactggttttggttttgcattaacatgaggattgctatgtttgtattggtgtaaattacacatgcattttcttttagcttgtgtatttccatgtaggccttgttttatatgcacattttcaatctctactcttgttggaaggtctttctttagtccatggttcatgttcaagaggagctttataatt

SEQ ID NO: 42698 - DNA, 524 bp, Glycine max
  unsure (1)..(524): unsure at all n locations
  Clone ID: PAT_MRT3847_138557C.1
cggtccggnaattcccggngtcgacccacgccgtccggtaaaataactggtgcggggacacagggaggttttgcgggatcccaagacctaatctgggttcaatttacgaaacgagaatagtagaggaacaacaccacccgtcgttgaatcttgaagctgaatcaaatgatatttagagagacagagagagacccggataggaaaatcgcgtttaaagagataaaggtgaagtgatgttgtctaaagtttgggtcttggagggtgaaagggaaagatgaccgctgtggtactgcatatattccatgctactaatacagtatccgagaaaaccaacaacaccattgttcagatcatcaagatcttgatggatggtattgttcttggtggccttttccacagcgccgtgcatgtttttgcagatgatgaatggtacatttgctgttctgcgagcaaggtactgctgtttttagactgcccttgtccatggaatccactgtttacatatatggaatccattgtcttag

SEQ ID NO: 42699 - DNA, 436 bp, Glycine max
  Clone ID: PAT_MRT3847_138558C.1
acggctgcaagaagacgacagaaggggtgcctattcacacattattaatgctcgaagtcaatgctgccaaccacgctgtactactgcaaagctaatagagttgctagattcaaatcctctcacaatcaccaacttcattactgtccatattccatattacatcgcttctataacatctattttacattatttgccaaacacttctacacctttgattccaagattcgttcttaaccataaaatctacgatttctgattcaactatccatattataaaacttatcactaacatcctatcatcctaatcaattactatcatttctatcaacatccacaaaccataacacacactttagattgtttatagtatcaattttattcactgtttctatcgtacctctattatctgaaatatctacttttaactttcttttta

SEQ ID NO: 42700 - DNA, 358 bp, Glycine max
  Clone ID: PAT_MRT3847_138559C.1
gggggcgtcctaaaccgatttttcatatattcataattgacacacctttgattggtggaattcaacacattaaaccaaacttttcatcaaaagaaaaatcattacataattcaagattttcatagacagtctggaaagatttcaaatgagacgttgttcactgtgtaagctgtttttggataggaaaaagctcgatcaggtaccagagaaatttgcagtggtaccatggatatataaggggcttggattaggcaagaatttatcttccagacccaaagacttacaaaaatactctaccactttttaactgaagaaatggcggggggaaccatggggacagaacaggccaagatgggag

SEQ ID NO: 42701 - DNA, 155 bp, Glycine max
  Clone ID: PAT_MRT3847_13855C.1
tgccctttgacccccaagatactcatcagtcaaggttctacttgagcaagaaaaagtgggtaatggtgcccatgatgagtttgcatcacctgactataccttacttccgggacgaggagctgtcctgcaccgtggtggagctgaagtacacaggc

SEQ ID NO: 42702 - DNA, 244 bp, Glycine max
  unsure (1)..(244): unsure at all n locations
  Clone ID: PAT_MRT3847_138560C.1
cccatttccatacattctgcgcagtaaactngnaataaaaaaaccaatcttgctcacctcggagagagaaactaatagaatgaccggagtggtcatggtgactaatggcggtagatcncacggaagcgggaagctgactaagtctgcgcgaaccgacgaggaaggagaagagcatcagaaccagctgtcgctagtcgctcatctcttggcggccatctgaacatcgatggtgtcgagcatggta

SEQ ID NO: 42703 - DNA, 707 bp, Glycine max
  Clone ID: PAT_MRT3847_138561C.1
gggaaaaacctccacgcgtccgcttaactgagcaatcaccatcatcttcgcatcttccagaaaattgggtggaggcaatggatgaaacaacaggtcataagtattattacaatacaaaaactcatgtatcacaatgggagcgtcctaatttagttcaggaagttgtttcaaatcactcagacttgtctgctggtggtgggtatgatcaatcatctaattttccgcagtgcatgggatgcggtggttggggtgttggccttgttcaagcatggggttactgcaatcattgcacaagagttctgaatcttccacaatgtcaatatttgtcctcaagtttgaataatcagcaaagcagtgctgcacatccctgtgaaagtttggataaaaagactagcaaacagaggtccagttcgaaacctccatttgataagggaggtagaaaagggggcaagaaacgtacttatgcagaggatgatgagttggatcccatggatcctagctcctattctgatgctcctcgtggtggatgggttgtgggtctgaaaggggtgcgcgcacgagcagctgacacaacagcaacaggtcctctctttcacaacgaccatatccatcacctggagctgttttgcgaaagaatgctgaaaatgcttctcacaagaggaaaccacattcaaattttacctcccatatccaaaaggggtaatggg

SEQ ID NO: 42704 - DNA, 723 bp, Glycine max
  unsure (1)..(723): unsure at all n locations
  Clone ID: PAT_MRT3847_138562C.1
tggtaccgcctgcaggtacccggtcggaactccgggtcgaccaagcgtgtttccgtccgcggaaaaaacacagcctgaagactgaacgctgaaacaccgaactcgaaccctagccatccgccgctgtcggcgccgtcgaacgcacctccggctgcttgtagaaccaccgcacgcacgctcctcgcctttgtcgcacgatctgcgccctcgcaccaaccacgccgccgcacgcagtcgcgtgggaagaaaggttcaccgtgcacccccttcttcttggacctttcttttgcttctgcccgcaacagtctctgcatcgagtgtctgttttgggttttacggaggagtccatggagacacaatcagatggtaatgaggacaccatagctgccattaaagatatgaggcagcagcttgaagctcgcatagagtcgcaacacaaggctcacatggagatgcttgcttctatgcaaactgtaatacctaatcttgtttcatcgcttgacctttctctgaagggttgtgtcttctttcaatcatcgtccttttgctcctacaccttctctgcctcagcctgatccaaaattgaatccncagaaaactggttgaactaactcatcgttccaatgctgaaaccttcactgatggctctattgaggcagacttgacaaatcccaagaatcaaaaacccaaaacatctatggattcaaactcagcatgtcaagt

SEQ ID NO: 42705 - DNA, 2811 bp, Glycine max
  Clone ID: PAT_MRT3847_138563C.1
gatactaaacgatggtaacatcaggataatgcaattcggctcgaggcctaaacttccctgcaaaatcagctttggttttcttctgtcactgctctaacctttaaacctctctcattcattgttctttctccaccgtcgaaaatccctaagttcctgctagtttcaaccttcgagtgctctctggaagattcggtatctcataccgttgggttcaagttctccctctttgttctagttttgggtcttcgggaggaatctatggagacacaatcagatggtaatgaggacaacatagctgccattaaaaatatgaggcagcagcttgaaactcgcatagagtcgcaacacaaggctcacatggagatgcttgcttctatgcaaactgtaatacctaatcttgtttcatcccttgacctttctctcaaggttgtgtcttctttcaaccgtcgtccttttgctcctacaccttctctgcctcagcctgatccaaaattgagtcccaaaaaaccggttgaactaactcaccgtttcaatgcggaaacctgtgctgatggctctattgaggcaaacttgacaaatcccaagaatcaaaagcccaaaacatctatgcattcaaactcagcatttcaagtagagtctgagaaggttagtccattagcggtggttcgatcaatggtcactgtttgtctattagggcgagtacccttctcaccgattgattcttccaccgtgtcaaggaaattggaaaatgatcagatggtgacaccaacagagaaggcagcacttcaggaacttggaggggattcgggggcaacacttgcagtggagatagctttaagggcaatggcagatgataatggtggtgttgaagtggaggagtttgtggtgagtggcaaggcaagaattatggttttaaatgtagaccggactcggcttctgagagaattgccagaaagtgtgcagtatcagcaacttgaatcaagttctggagatgggaatgcgaatcaaaatcaagttcagcaaatcactcatagtggtcctaatgtgaatggtagtttgcttgggatgggaaggccagttctgaggccaatgtctgatatgtggataccccatggagacccccatatgtcagcattgcagccaatgttttcaggaggaccaaggggagcacccagactaatgggcatgatgggggcacatagaggtataagtattccttcaatgcatagactcccattggggcctaatgcaccagggagtagtcctaatgcaatgccacaaaaaccaagaagttttgatgatgatatgaaggatcttgaggcattgttgaataagaaatcatttagggagatgcaaaaatcgaaaactggtgaggagcttttggacctaattcaccgaccaactgcaaaggagactgctgtagccgctaagttcaaaacaaaaggtggttctcaggtgaggcaatactgtgacttactgacaaaagaggattgtcgacgtcaatctggttcctttatagcatgtgaaaaggttcattttagacggatcattgcacctcatactgacatcaatttaggagattgttcttttcttgatacctgccgacacatgaagacatgcaagtatgtgcactatgagtatgaccctacacctgatgtgtctccaacaatgatgggcgcccctcctcctccaaaaccgctaaagcctcagcgtgctgaatactgttctgaagtggaacttggtgaaccacaatggatcaactgtgatatacgtaactttagaatggacattttaggtcaatttggagtaataatggcagatccaccatgggacattcacatggaactgccttatggaacaatggctgatgatgaaatgcgcagtcttaatgtccctgctttgcaaactgatggtcttatttttctatgggtcactggacgtgcaatggaacttgggcgggaatgcttggacctttggggatataaacgtgttgaggagatcatttgggtcaaaacaaatcaacttcagcgaataatcagaactgggcgtacaggtcactggctcaatcacagtaaggaacattgtcttgttggaataaagggcaatcctgaagtaaacaggaacattgacactgatgttattgttgctgaggtccgggaaacaagtcgcaaaccagatgagatgtatcctttgctggagaggataagtccaagaacaagaaagctagaactatttgctcgcatgcacaatactcatgcaggatggatgtctcttggtaatcaattgagtggtgtaaggttggtggatgaggggctgcgagcaaggtttaaggctgcttatccagatgtggaggtgcagccactatcacctcccagagcttctgctatggaagtagacactagtattgctcctcacacgaggagtccatttgcagccactgaatcagagtccacttcggcgcagtttgcggagcctgcagccgctccagaaagtaactttgtttcagaggagaaatcaatggccattgatgtggacattggctaagtttccacttttgatcatgattggtaggagcaatgccttgataaagctaaagggaaaacagcattttgacctttgtaccattgttattttgtactctttcacatttcttttcttttttttttctttttttaaaaaaagattagagtgacaaggtatctgggaaaagaatacaggatgctttgtaaattaaataattgtgtaatagtctcattctagttgtacttgattacatttttctttaatgttgaagcatcaattttgttttgg

SEQ ID NO: 42706 - DNA, 1423 bp, Glycine max
  Clone ID: PAT_MRT3847_138564C.1
acagaggccaccacgcccatactatcccaatattctcttctttttggtggcagaagagaagagaaacaagaccacatccgcattcatcatacccaccttaatttcccctttccctttggcatagactatagactaaagtgtgtcaaactcactatgatactgacactactgcctcctccaaaatcaccattcttgaatacccttttgctcctctgcactactctcctcctcccaccttgctacctggctctccctgaccctgatgctgatgcggttcagccaatcatcccaaacccctcatcttcaacaggaacaatccctgcattcccagaacaagctgatgctgcagggtgccctctcagcctctcagatgagcactacgaaggcataaagagtgcatgtggctccaacaaacatgctgcagatgatgatgatgacctccaccgtagcagatgctgtcctgtgctggcagcgtggctctattctgcatactcagccactgcccttagtggtggaatgcaacatgaacgtgcctcaaagggccataccacatcctatgacatgcccttgttgcctgatgattcagaaacatgtgtgagtgacttggggaaggccttgaaaattagaggaatccagctttttcagcccaatgagacttgtgatctggtctattgctactgtggcattaggcttcaccctttgacctgtcctgagtcattctcagttactccaagtggaactcttgttgtcaatcaaagtgtgaaaagattggagagggattgcttcagtagcagcaccaatgtcaataagtttcccggcctgggaggatgctccaagtgcttgcatagtctctattcgcttaggaagaattcttcaaattcaagcaagtcagaagataggaccaccaagatccataacaaagattgtgaactaatgggcctgacatggcttctggctaagaatagaacagcttacattcacacagtttctggggttcttcgagctttgatgttgagcactgaaggctctgacccacaatcatgcactctaaacagtgatggaatgcctcttgccgttgattcctctgaaatgtcagatgaatcttcatcaaccaacctacaagcaccaattttcctctctttgttactatttctacattatttcactctattatggcacctaactgaaaacgagtgcaaagagattgatccccattccccaacatggcatttgtaaatttgaatctgtgctttggtgcttaggagtgtatttttattttctttcttgggtgttaatttgtttgaaagaaaattcataatggttttgttttggtggtcctggattgccatgtgctaatagcgaccggtgtttcgtttcggagggacaaaaaaaataaaaaatgataagtgggggtggtgggttg

SEQ ID NO: 42707 - DNA, 490 bp, Glycine max
  Clone ID: PAT_MRT3847_138565C.1
gaattcggcaccagatcatttgaatgttccaccttttatcactgttaatactacacttttatcgggatttgtattgcgtagaagttatcaacttagataattgcaattacattctgtgtaccaatagaaaatgtcatctatgcttgaaaagtgaaaaatgacaagcgtcataataaagggaaacgatagaataatccagcgtttataggccaaacttcgcattcagcttaacggggaagtaaaatatttaagtaatcctcatttattagtgaatgattcacagaaaattgtgaattttatgttttatgcggttcatttcgttactgattgccctcaatttctcttttttgaaagaaacgcttaaatatagttgtttagaaatttaaattactattatttttgttatctaaatgtaaatttgttttttaatctttcaattttgaaaaatgttgttttagccacttccgtagtaaaaaatgcattcgaactg

SEQ ID NO: 42708 - DNA, 283 bp, Glycine max
  Clone ID: PAT_MRT3847_138566C.1
tttcgttttgacccgaagtgcaagcccatgtgttgccaatagaaatgcacttcatcgaaggcgctaaagtttctcctactgatatacgcaggctataagacactcattgaccaaatatttgtaactcttacgatttgatgaacttgatggatcataatacaatgcggccctagaagacagacattaatctgaactccataaagaggagcctgaatacgctgtggaatatgattatgatcttttatgacaactgttgtgattacctttaccaagagcattccta

SEQ ID NO: 42709 - DNA, 158 bp, Glycine max
  Clone ID: PAT_MRT3847_138567C.1
ctttattttactctgaattatgcaaaccaccaagcatttttatccttccctattaaaaccattatattttactagcaaaggaaaggcactcctcagcaaagcgatctacatctgcaaccggatgctggaccttaacaacttaagcaatagcctgggtc

SEQ ID NO: 42710 - DNA, 297 bp, Glycine max
  Clone ID: PAT_MRT3847_138568C.1
ccaaaagaccacagaaaggggtcccctcaaagaatttaattttaattcctggggtgggggttccaacgcttttccccttcaacaatggcaaccggaacaatactccaattgccaaacaaaattggccaaaacttaagggccttttgagtgggttgaaacggaaagtccccactccttcaccgaaccaatttttccccccccaaagttgcatccttttgtgtgggcctaaaccccctggctgtgtccttcagtggtaagctccttggtgggtttagtttaattttgactgaacgaatg

SEQ ID NO: 42711 - DNA, 462 bp, Glycine max
  Clone ID: PAT_MRT3847_138569C.1
cgtccttaattcccgcgtcgacggacgcgtccgaccacgcttacgtccacgcgatcgatgctatcaccttctaaagcttccacttcacatgtcatcagtgcgtgtcactcatattgacatctgggcctactaagataaacctccattctgtatcaaccactatgacccttttatgctatcacatcaatcaacataccttttacttttctctacccttattcacctccgctacccttcattctgcacagactaacagaacgaataaatcaagcatatgcgaaaaatactgtacccgatatggtagctactctgctgacacagattctcactatcgaatctaatcagaataactcatactcttgcgaactctgcggaaagaatcactatgaaaagagaaagctgtagcaatatgtagatgcattgattgctgatatattaaatctggctatacctacactttca

SEQ ID NO: 42712 - DNA, 538 bp, Glycine max
  Clone ID: PAT_MRT3847_13856C.1
taacactcagtgactgccatgaagaagaagacagagctccaacaacatccaagactttgaagttcttgaaagctgttgcacaggcaatggtaccagccactccggcatcttgcaaagcccatgagcggaatttgaagcacacgagaagaaacttcagaggcaagccttcaaggtttaagcttgaagcattgaacaagccacaagcttcttcttacagttcttcggacacttctacttactgggattttcagcagtcactttgggactcctatgagcttgtcacagtgtcaaggtttaatgagactgggttgactttggatcacccttttgatgcttctagggacactcctactatttaccggaagcgccagcaggcgctttgggactcctatgagcttgtcacagtgtccagaaggattgagactgggttaactttggataacccttttgatgagttgtgtggttccgcttcaatccaacataagcgcaagcctgagagtaagaatagcctcaggaacctgttcaatcttatgtcttc

SEQ ID NO: 42713 - DNA, 1509 bp, Glycine max
  Clone ID: PAT_MRT3847_138570C.1
cggaattcccgggtcgacccacgcgtccggctgcgagaagacagaagggggtgtagaggcagctaaaaacaaagagtgtgatagtaagagtagtagaagagcggtctggtccaagtgctgcaatatgcaaggcaaagaaatggaagggttgtcgtcttcatcggcgatcgcgcagaaaacatgggaactcgagaacaacatcatcccgatggacactccgggcggcgccgctatctcctccaccgctaccaccacgacaagcgccgacgactcgatcttctactacgacgaggcggggcagaacgagttccagcgcgacaagccctgggccaacgacccccactacttcaagcgcgtgaagatctccgcactcgcgctcctcaagatggtcgtccacgcgcgctccggcggcaccatcgaggtcatgggcctcatgcagggcaagaccgacgccgacgccatcatcgtcatggacgccttcgccctcccagtcgaaggcaccgagactcgcgtcaatgcccaggccgatgcctacgagtacatggtcgattattcccagaccaacaaacaggctgggcggttggagaatgttgtgggatggtatcactctcatcctggttacggttgctggctgtcggggatcgatgtttcgacgcagatgctgaatcagcagtttcaagagccgtttctagcggttgtgattgacccgacgaggactgtttcggcggggaaggttgagattggggctttcaggacttatcctgaagggtataagcctccggatgagcctatttctgagtaccagactattcctcttaataagattgaggattttggtgttcactgtaaacagtattatgccttggatattacttactttaagtcctctcttgattcacacctcttggacctgctgtggaacaagtattgggtgaatacactgtcgtcttctcctctgttgggtaatggagattatgttgctggacaaatctctgatttagctgagaagctagaacaggcagagaatcagttggcacactcacgctttgggccactaatagcacccacgcctagaaagaaagaggaggaatctccacttgctaagattactcgtgacagcgcaaaaataactgtggagcaagtgcatggtctaatgtcgcaggtcatcaaggacattctgtttaactccgttcatcaagcaaacagaactcgcacagaaccatctggtcccgaaccaatgattgaaagttgattctggctcagctagacatgcgtttatatattctttcctttttttggatatgtcctcattatcggccaactcttaacagtaaatctagccttgtattttgcctctttttttccctcgcgctgtgcatattcttgttttatttcacaagagtatgcatgtactgtcaaccatgcagtggaattcatctaacagaaacaaaaccgttggcaaatactaagttaacaaatacaattgtctgtgctttaatattttaaaaa

SEQ ID NO: 42714 - DNA, 528 bp, Glycine max
  Clone ID: PAT_MRT3847_138571C.1
gggctgctctaacgaagggtcatcaaagggagtgccaaagaaccttgcaatgacacccttgccgtcgaatatgctattttcgctccagtcaccctgacacacagggcatccgacagctacaacactgaccgaatgggcggcaaggagacctaaaccacgggcacagggcgtgcgagcgtccctccttaataagccgaactggcagaagaccttgcccaagcccactaggcaaagaacccactcgaagaaaaaaatgctcggcagcaggcacacctcaccctactggaggaagagctggaggacgagcagatccctatgcagacccatgaactacctgctccgcgagcaccacatcttgcccatcctcttaggaatgatcagggcatacaccttattcatgcatcaaaacaatgtatatgccgctggagcaccatccagaggcgagaacacaggatttcttgcaccaaactggactagaccgagggggccgcccagggcacctgcacggcccccattcctgtcctgaac

SEQ ID NO: 42715 - DNA, 280 bp, Glycine max
  Clone ID: PAT_MRT3847_138572C.1
caaaatctatgttgaaggaagtaactcctgctcatgcaataaaaaagttaagatccccaattagggaaatgtctttgaaatgtcatttggtggttgaatcccaactaatatttctaacaaaattaacaaattaatatttgtgttaaaaaaaatgtaaaaagtttcactttatatatcaaaggcaagttacttaccttgcattctagagaggtgtttcctcaccttcccttcacagcctttgcaatgcaaagataccctcaatactacaacctgctaaaaa

SEQ ID NO: 42716 - DNA, 201 bp, Glycine max
  Clone ID: PAT_MRT3847_138573C.1
gaggtgttttttgctgtttctgtttcttgttttatttgttgctttttttattgttttttctggaagtattgatgttttgatgccaccacaagagagaccctccaccagatactattgggtgcaggaccaaagctagtggcatctgaaccccgatactgagactggaggaccgtactgtggctccctggaaataagtgtgtc

SEQ ID NO: 42717 - DNA, 1252 bp, Glycine max
  unsure (1)..(1252): unsure at all n locations
  Clone ID: PAT_MRT3847_138574C.1
gacccgaaggaatgagaaccacatgaagcagataagagctatcccattcctataatgaggagccacaagaatgccagcatggacgaccaactcaaccagaatccaccactagattattgtgtctcggacttggattgcatcccttctcgtgattggaaccaaaaggaagacgtaaattaaattttgcatccatataacacgacaaacaagtgccctgttatgtagaacagcacatgggtatggcagtgcaagccaggttaggggcatgcaacccaattcgaataccacaatgttccggtgatcgtgacgatggagggcggcctccggcggaggaatttgcaccattagccaccaaatttcagaggcggcttcttgtgggggttgggtcagcttcactagtggctgtgggtgcaaactttggtggcatcaccagttttcttctcggtttgtcgccacaaagtgggcgtaatctcaagctggacgtgctttatcccattggaggttacagccgctgcgttgacacaaaggaaggattcgaattcatatacccagcaaattgggtgggagatcagacgctgctgtatcgagctgctaagaaaagagagatggaacgatcattggatcctcctccgctgaatgaacggcggcgttctaacatcaatgaaccggttgttgcatttggtcctcccggttccactggagaactcaatgttagtgtcattgtttcatctgttgctccagaattctcgattgaagcatttggggggccagatgaggtgggtgaagcagtggttcgaagcataacaggatcagggcaacgccctgacgttaaggggacattaataaaatcaagtttgagagaggattccgttacaaatgtcaaatactacgaactggagttcagagttgagagtccctcgtttaggcgacacaacgtttccgtttgctgcgctcgtgatggcaggctttttacattaaatgctcaggcacctgaatcagagtggccaggattgaagtcagaattctataggattgctaattcatttagcctcacaatttaagtggttcaaaacgaagcttcattgccaaataaggtcacaagccaagacccaaaaaaaaggcttctcttaggtcgaccttgtaactccttggtttccgaagctatgtttttgaattgcatggctagagaatgtcctctaaaccgaaccaatttcaattttttgggtgcgtctgttaccatttcaatgnnnaa

SEQ ID NO: 42718 - DNA, 185 bp, Glycine max
  unsure (1)..(185): unsure at all n locations
  Clone ID: PAT_MRT3847_138575C.1
ttttaatgttcttgcgtaaaattcgtttatgttattccataaatgaggtcgagatttaaggactcgcctattggtaaaaaaaaaaaaaaaaaaaaaaataaaaaacntacgaacactctaaaggatgacaaaaaaacttacgcagacaaaaaaaaatcaaatttcttgggggggccgctctaaag

SEQ ID NO: 42719 - DNA, 736 bp, Glycine max
  unsure (1)..(736): unsure at all n locations
  Clone ID: PAT_MRT3847_138576C.1
ttattggcacttaccttggcacgtttanccgagaactctcttattcgaccgagtatggtcgggtaacaagaatcgtgctacatttcttagcagatgtttgtttttggggatttcaacaacctatcgtcaaggatagagcatcttgttctgttatgttgacttctcagttctcaccaacctaggatgacaaaatctttgaaaggttctagtagtgtacgctttcgtgttaaacgcttgctgttagaaataggcatggtggatttgagtgtggaatcaaattactctaatgttacgtcgaggattggtggccattggagtgcattcattacatccaattaagaatgacacagttcataggatttccgcgattgttaagatatttggtttctgatatcggataaaatgaagtcaaatggcaaaagctacaatttagatgtggaaaattacgtccaccgcatgaccagacacgtaattcttctggttttctttttttgattcctgatttgagtgagtgttgcatttaattgcatattaatggtttctcaaaagtgtactgcaactgaggtaatgttattgtttgagggaaaaaaattgctccataagaaagctattagattttagaagactgcaattttttttattatttggaaaatcaatgtcctttatttgattccaattaagatacagtcactaatcattttctctagcaattatattcaaattcatagttattcgt

SEQ ID NO: 42720 - DNA, 484 bp, Glycine max
  Clone ID: PAT_MRT3847_138577C.1
caacttgaattttcttgcaattgtggaagggatttcttttttgcagatgatggccattattattgttgtttaaaaaatttcatgcacattgttttaagcagtgttgttaaatagccgcaatagtggcgctatagtgctattgcattgcgaaattccctggatccgcgattgcaactctggtccactattgtggctgctataggtgttgtggttgcagcatgcgtgctgcatcctcttgttatctctgtcaagtttcctgccaattggacttttgagttaatattatgccaattcttattcattttgtttttatttgcatacaactttcttttttattcatatataattgatatgtatcatatatttcaaccattatgtgacttctgctatttggccacgatgctatccgctatctgatattgcgaattattggctttccaccattttctgtaatctgcaattgataacactggttttaaaagca

SEQ ID NO: 42721 - DNA, 326 bp, Glycine max
  Clone ID: PAT_MRT3847_138578C.1
agcccgccctctgattctaatagcaattggatactttacaataaaccattggaatgctgggaacgaatacaagaaatataaacggagttctggcgatcctggaaatacagattctaactggggcagcaaaaataattgcatttatggatctgatgatattagtaccccaccgcgagtacaagctttcgtacccgggccagtgaaaatgcctcaagcgattagggtcatgtaagttcaaatcaatggcctgatgtatacaacggtgggaatgggaaaagcggggagataccccacttaataaccatgctaggaatcctccttatcgc

SEQ ID NO: 42722 - DNA, 228 bp, Glycine max
  unsure (1)..(228): unsure at all n locations
  Clone ID: PAT_MRT3847_138579C.1
cagagttttcagaggagctcttttttntatttaanntcaaaaancaaaangcacgcacttgcggaagtnantttacggtttncccttctnctggngnntcgganaggaantgtccgtagnncaacaacatcgtatcgacatggcngtgttggttggttcgncggtcnngcgcatccgggngtgtntctncgtgtgtcgcgncgcgcgcatatctcctttccgggacag

SEQ ID NO: 42723 - DNA, 366 bp, Glycine max
  Clone ID: PAT_MRT3847_13857C.1
aaagcctgcaacttttgcaccacaaccttcgtatcctcaccgtacctcgccaccgatttcatgtaatcggatggagaatcgggtaactgattagaaaggggaacatcattttctatgctccgaaggttgcgttgggtttgatcaataattgagtctaaggtgttcgacgaaatgtcaaaccgagtttgcataaaaaaggggttgttgacactaatgggtgcgaagtttgtgggcaaacaagggcacccaactcgtttttccatgtgtcttcgatccaaaactacgtctgcgcagtatgtagcaacaagatttcgagaccccacgtttgagaaactcatggacaactacaagaaccttgtcaaagtc

SEQ ID NO: 42724 - DNA, 573 bp, Glycine max
  Clone ID: PAT_MRT3847_138580C.1
gtgtaaggcaaaccaacccaaccaaattaccaaagttacaaacttcccaagagaagaaaacaaaaataaaaaataaaaaataaaacgtgtttttgttcactaaacatcaaagaaaaaaaaaatgcttcttaaccacattggcgccggattctactggatcgacccgccacgacccgatccgaaacgtcaaacccgaatactctcctctagtttaaaccgccggcgggcgtcgccgccgtttccggcgaggcatgcggctttccacggcgtgcgaatggagaagaaaggcgataagcggcggtcgatatgcaccgccgacgagcttcaccgcgtcgcggtttcgaactccgattggaagctcgctctgtggcgctaccgtccttctcctgaggccccgtcgaggaatcacccgcttttgttgttgtcaggggttgcaaccaatgcaataggctatgatctctctcctgagtcttcatttgctcggtacatgtcagcacaaggtttcgatacatggattcttgaggttcgaggtgctgggttgagcacacttggagatagcttggagggaagatg

SEQ ID NO: 42725 - DNA, 571 bp, Glycine max
  Clone ID: PAT_MRT3847_138581C.1
ggaccacacagtgacctgaatttccacttgtgttgtaagctacaacagaaattcatactacataagacaacacaggtcttagcagcttactgatcctatgccgaaataataaaaccagccccaaatgaaaaattccgctacattaataactatacaaactaccgttagacgagtacaacatcccaaccacaatgaggcatatatttgaatttaaggcctcggacggatatataacaacctcagtatgagaccatggaatctactgcacacacatttgaacctctgaagaacttgcaaaatccattatctccccaactatcgccccacgaattcttaatgacccagaaaagttcggtcttaaaacgaaagggaaaatatgccccttgcccataaccaactaaaagaaccccaggatccaaatgcttcccacagatgtaagggcatgagacgccaccaacataggtcagcataaaaactgcattggtagcaactgaaagagggccattctttactaggtgcgcagaaatttgctcttcatcaagggaaaccacactggaatcagatacaggag

SEQ ID NO: 42726 - DNA, 352 bp, Glycine max
  Clone ID: PAT_MRT3847_138582C.1
ctcagacatgccaacaccatcaacaactggttaatgcacatctgaagaccataacccacggcttttagcggtacacttatcacacagagttgctagaggatcatcacagattctatgcgcttttgtttacaacgtgcctatggaaacagtcggaaagccataaagcaggctctgtccttgtatcaagaagccaaagcgcttgacgagcaataagtctgaacgcgcgccaaagtttgggacttgggacaaaatttgggcgaggactgggcgtatctgaccggaaccacattaaggatctgtgcattgtgggcctagccaaccaggctagcgccactagcggggaatgcactga

SEQ ID NO: 42727 - DNA, 1731 bp, Glycine max
  Clone ID: PAT_MRT3847_138583C.1
ctcgagccgaatcggctcgagaccttacctctgttactacaactcttcaatggcttctagctttcaaagttcaccaatggcttccaactacagaagccataataagaaaagccacgacaatgacatgttccatccaacccaagtggtggtggttgtggtgcctttcccagcacaagggcacctcaaccagcttctcaacctctctcgcctcatcttggcacacaacatacccgtccattttgtaggttcgcccacccacaatcgccaagtcatagttcgtgcccaaggttgggacccaaacttcatttacaacattcagattcacgacttcaatgtttctccttttgtttcccctgcccccaacccaaatgctgaaacaaggttcccctcacatcttttaccctcctttgaggcctccacgagtctccgagtccccgtgtatgcactcttgcaatccctttcatctgtagccagaagggtcgttgtcatctatgactccctcatggcatctgtggtgcaagatgctattcatgtgcccaattgtgagagttacactttccacagtgtttctgccttcactatgttcctgtacttttgggatgcaatggggagacccccagtagaaaaagtgtcccacgtcatccctgaagttccttcccttgaagggtgcttcacaacccaattcatagatttcatcacttcacagtatgagttccacaagttcagcaaagggactatatacaacaccacaagggtaattgagagtccttacttggagttaataaagaggatcattagtagcaagactcattgggccttggggcccttcaaccctttgtccattgagaagggagtctataacacaaagcacttcagtgttgagtggcttgacaagcaagaagcatgatcagttttgtatgtgtcgtttgggacaacaacatgcttctctgacgagcaaatcaaggaggttgcaaatgggttggaaaaaagcaagcaaaagttcatatgggtggtgagggatgctgacaagggagatgtgttcattgaggatggtgtgagaacttctgagcttccaaaggggtttgaagagagagtgaaaggcacggggttggttgtgagagactgggcaccccaattggagattctaagccacagttcaactggtgggtttatgagtcactgtggatggaactcttgcatggagagcatcacaatgggggtgccaatagcagcatggcctatgcactctgaccagccgaggaacagggttttggtgaccgaagtgctcaagattggggtggttgtgaaggactgggaccacagggatgagttggtgacagcatcagatgttgagaatgccgtgaggagattgatggcaacaaaaaaaggtgatgagatgagccaaagggcaatgaccctaaaaaatgctattcgcaggtccagggatgaagggggtgtttctcgcgtggaactggatgatttcattgcgcacatcactagatagtttggtccaaatccatgtcatttacaaaccaggcgtttgtttttgatgatgaagataataataataataatataaaaatatattgttagtggattggagtataaagactacattaagtgaatggaaagatatcattgttagtttgggatttcgaatattgtatagttacttaagttagatttatgaaataagaaattgtttatttttaatttagtcagggtttaatt

SEQ ID NO: 42728 - DNA, 552 bp, Glycine max
  Clone ID: PAT_MRT3847_138584C.1
gcattcgagcagttctctatcgtcgtgagctcaatcgaactgccaccatcacaattcaccaacaccgtgttctccatcgcttcccagtatcgaagatcctccgtcgacgcagagaatcgaagatcctccttctgcaggttctcgtccctagatctgaaatacgttttgttttcatccttgttacttatttgtccttgacaagaaggattgaggattgaaaacgcaatgaatctgtgcggttcggctttaggggttttgaggtttggggaatatgaaaagagaaaagggcctgggcaatttgtggcgatcaaatactacccataatttataagtttgaaagtatatagttatattatttttttacattttaaaaattataaaccctaacctaaactatctgtcaaatgagtgaatgatcagagcaaagacccctaatttaatcgcacgtcgtcgttcctgctagcagaggacagaggccacccgcgtgtgttcttcaatctgagcaatgggtggtggacagcattttggagcacccatatcagacgatatact

SEQ ID NO: 42729 - DNA, 200 bp, Glycine max
  Clone ID: PAT_MRT3847_138585C.1
gatggcgcaaaattcaatgacgctttggctgtgtgcttcaatcgcattcactggcatacggaatcacgaaattagccgggaccatgcgatcacatgtttgggccctctactggcatcccgctcatcttacacgctgagccacgtctttccgttatcgccaacggtcatcacaccactcaaaggccgtaatactgatatcc

SEQ ID NO: 42730 - DNA, 366 bp, Glycine max
  Clone ID: PAT_MRT3847_138586C.1
gggcggtaaaaggtctcccaatttcccactacgttttcattttacggcatggcgaaacctggtttgctttgtgcaatgtgtggaggggaaaattgtacccctaagcattcccaagggatggcctcaaaagcccggcttggtggacctagaacactgaaccctgttgccgctttgggacaaggggaaaaaccggtggagggcaattggttcgctggtgatccttgatccatgcctctagccggaaaaacgattggccgccactaagggttggcagctttaaggcccccttgggccaaaaacggatggacatgagacccaagtccggcaggggatccttctgcacctgggtctaaagccctttggggt

SEQ ID NO: 42731 - DNA, 206 bp, Glycine max
  Clone ID: PAT_MRT3847_138587C.1
ggctcgaggttctatgctagagcctagaggggctaaagagacctgcacaaaagaatgcttaatttgtgtttctatgcaagagggctacaaataccatttaaaactacggtttctgactctgcattagatgtagttttacgtgttctgaatttcaatttttgacaggttatcttgctgcaatgtcaaagttttacgggattggtcat

SEQ ID NO: 42732 - DNA, 343 bp, Glycine max
  Clone ID: PAT_MRT3847_138588C.1
cggaatccccgggacgatcccacgcgaccttttcgcgtccgcccacgcgtccgccttgctcctgaaacatttaaatgggggcgccacctattacaacatcgaccgcaaccatgaccatggctgagatcgtgctcgtgtacacggtataagccgagacctccgccctagacatgtcgataatatggtacgacaacacccacgcggacaagggcgccacgttgcgcaccgaggaggagctgatgaccatgtacgagccactgtgaaaaaatgagagaaggagattgggcactgcagaacagttaaaaggaagtgtgcaaattgatcatagggtattggagggtca

SEQ ID NO: 42733 - DNA, 350 bp, Glycine max
  Clone ID: PAT_MRT3847_138589C.1
gacatttggagggctatgtgactgcattaacccccggtactttgcggatcaatcctgacgagatacaaagccatgctagctgggataaacgacatcaatcattgttataggagataacaacatgttgtgataacggagtagccagccgctaggccttatatgctattattgatacatgttctgcacttgacaacattacacaagctgcttagaaatacagaaacgtattcaatcaggaacatgttgagcctaggataagcagggtagcattatatggatgtgctgcataattgtaacggtacttacgacttattgctgtcgcaccatatcttgcaagttaaggatctgat

SEQ ID NO: 42734 - DNA, 309 bp, Glycine max
  Clone ID: PAT_MRT3847_13858C.1
ttccagcaatgagatgagtaaggcattctgcagataagtgtaccattgtaaatatcaaccgtatcagaagatatagaaagagattggaggtccatcagcactgttctatgctgccacctcaatatgctatagaaacagatgaaggagaaatttttaactacaaaatttcatattcgccatatgattaccacaggatgagatcagggcagtgatcttgtgcctgcaactgtatactgccgatgtggtgcctttgaatgagatccttgaagaaaagacaatgatacatgtgcctagcagcttttcaggctc

SEQ ID NO: 42735 - DNA, 1097 bp, Glycine max
  Clone ID: PAT_MRT3847_138590C.1
tatggctggcgtggtcgtggccgaacacaaaccacaaaaaagggtgagacacaatctctctctaaacccacaagaatccctccctttctggctttctctctctaaaactatcatgtcctccaccgcggctcccgtccttcccatatccaacccccaaaccaccgccgcaggcggcggcgccatcgaggctccggcgaacaacccggccttccgcgccttcatcaacaacctctccgcctccctccgacacggcctcgaccagcgccgcccgtggtcggagctcgcggaccgctccgcgttctcgaagcccgagtccttctccgaagccaccctccgcgtccgcaagaacttctcctacttccgcgtcaactactacgccgtcgtttcactcattctcgcagtctctctcctcaccaatcctttctctctcatcctcctcgtcggcctcctcgcctcttggaccttcctctacctccttccgtccctcagatcaacctctcgttattctcggccgaacattttcagacttcgaaaccctagccctcctctccgccttcaccgtcttcgtcgtcttcctcaccagcgttggatctgtcctcgtttccgctctcatgcttggcggtcgcccgtcgtttgcctccacggcgcgttccgcgtgccggaggatctgttccttgacgatcaggagaactctcaggctaccggattcctctccttcctccgcggcccttgccgccgccgccgccgctgttcccaccgttgcctcacgcgtttaggtaaaaaaaaaaaaatctcagtgaaatcgtcagatctggtgatgtttctccccgatctgatgagttttgacgcatggaggaagaatgaatcttgaaatgtagtttgtattttgttttcggtttttaaaattcctttatctgtctaaacgaattttattatacgtaggctgaataagaattatgattacattttgtatgcgtctctgttattttgatattgttatatacagggatctgcaaatctcgctgatgaatctatgtgaattttctctcatgatctcttgatttcagaattatattgttcgggggcggccccccttt

SEQ ID NO: 42736 - DNA, 782 bp, Glycine max
  Clone ID: PAT_MRT3847_138591C.1
ggctcgagataaattacaaaatccccctccattctctctctaaaaccatcatgtcctccaccgcgcctcccgtcctccccatctccaacccccaaacaaccgcgggaaccaccggtgcaggcggcggcgccatcgaggctccggccaacaacccggccttccgcgccttcatcaacaacctctccaactccctccgacacggcctcgaccagcgccgcccctggtcggagctcgcggaccgctccgcgttctcaaagcccgagtccttctccgaagccaccctccgcgtccgcaaaaacttctcctacttccgcgtcaactactacgccgtcgtttcactcatcctcgcagtctctctcctcaccaatcctttctctctcatcctcctcgtcggcctcctcgcctcctggaccttcctctccttcctccgcggccctgccgcctccgccaccgctgttcccaccgttgccgcacgcgtttaagtaaacaaaaaaaaaagatctcagcgaaatcctcagatctggggatgtttctcccgatctgatgagttttggtgcctggaagcagaatgaatcttgaaatgtagtttctcttttatttttggtttttaaattcctttatctgtctaaacgaattctattatacataggatgaataagaattatgattacattttgtatgggtctctgttattttgatattgttatatacagggatctgcaaatctcgctgatgaatctatgtgaattttctcaattttattcacgcgatttgttcaaaaa

SEQ ID NO: 42737 - DNA, 946 bp, Glycine max
  Clone ID: PAT_MRT3847_138592C.1
gttaaggcttgtcattcattaatctttgttaaggccaattggaacaataacagccatttaatggcaagagatgaaatgaaaaggaagaaataaaaggcccattgaagcaacaactttctttctttctttcattgagactattcattagttatttggattgtatcaggtgtgggaagatcctttatttgcatttgtttgtacatccagtggcgattctccagcgtgacttggccgccaagagagcgaataacagacccaccactgcatgctcccactttgcagcactcttcaagagacagacctttgatcactccatacaaaaatccacttgcaaaaagatcccctgcccctgttgcatcaattgccttggcttcgcctatggccgggacccgtgcaatctcgtttccatgtttagcaatgcatccattaggacccagggttactacggcccattggcagtatttggcaagaaattctacatcagttgctggatcagcattttgttctccccttactggatcagcattttgttcgcccctggcaagccctgttgcctcatcctcattggcaaagcaaaggtctatattcccagactccagtagcttcagaagtgggtggttgaaattcctaaccatctcaaagctggccaagtccaaggaaacaagaagaccttcctggtttgctaaaagaatggctgctttaataacttccaaattaagtattgcatatcttaacaccaaccacttggagcctttaaaatcctctttggtcaattcctctgcctgaactttcacagcattagagagacagggtcgcatggtacggtttcccaagtcatcaaccaaacaaacacactgtgctgtgtgtcctttcttctttctgagtctagagaggtcaactccattggagctcatgttatggtcaaacaacttacctttctcctcgt

SEQ ID NO: 42738 - DNA, 177 bp, Glycine max
  Clone ID: PAT_MRT3847_138593C.1
atactacaatctcaaactcttctactctcctttaacaatctctatcattacttacctttatattttcaaaatttatcctcttaatattccaatcatccttatattcttcaacttcacccatcataccctttctatttaactaatattaaatacattcccccatttttaataaaaatt

SEQ ID NO: 42739 - DNA, 435 bp, Glycine max
  Clone ID: PAT_MRT3847_138594C.1
cgagggcggaaacttgaactgagccataagggagaaaacgacgtggtgaatactcttacagcactggtgtacgcacagctgaccctaattaggacgaattttgtgcctctatcttcacgcatgccactacttacacatctgattggaaccgcgcgagattgcttcgaggtctaggtattactgtgtcctatacaagggatgaggcagtttctaggtcctgcacacccctctgtggactgcgaggagagcgctccattggtcccccatgatgccaactatgttgtatccttgccttagcaagggctattgtgaggactgttctgtatgaaacggcattagactggtgatgttcgcgggggtcatatgaacccacctttgtctatgggacggatccagcctcctatgctttctcttacgaaagcgtgtgtttacata

SEQ ID NO: 42740 - DNA, 436 bp, Glycine max
  Clone ID: PAT_MRT3847_138595C.1
ggctcgagataaccactattaccatgtacacgggtcgtaaactaaacttcacattaacacgagctcgtacatgcactgatcacttgacaccactgtctcgagattttggtgttcaccttattcaagttaatggcaggctcttatgccttcgacctgggatgattatactctttgctatggacactgctgattatcaagggaaagtgctagaactactataggattcagatcctgctgataggcaagatgtaccatattgcctgatagacctgagagagaagaggtgaatggctgaactggaccttgaatctctgcaagaactgtaagcattctattatgacggaatggctatgatgtcaaacgtagagtacgatgatttgaatgaataactcatgaagaaaggaagcagcgctgtgatgctatgcactgatgagca

SEQ ID NO: 42741 - DNA, 443 bp, Glycine max
  unsure (1)..(443): unsure at all n locations
  Clone ID: PAT_MRT3847_138596C.1
aacggaaaaaactccatattcaaacggaaaaacgggagcacagngcacggggccggggcacacagaaacaaaagagccccccaccccaacaagggcggggaagccgangagagaaacaccccgcgcggaagacagcgcaggacccgnaccgcggaccaccgacaacggaagcagccaaagggcgggccnccgcggaacacggaagcaaggacgggccccgaggcgagcagcggaacaggcaaccaaccccaaggagaagcaggaggcagccagcccccacccaagccggaggaacgaaccaaggggcagccaaagaaccgcaccgacagcgacaccaggaagaacagggcaggaccgaccacagcggaagcgccgcggggcaacaagagcggacggaccccgggagaggccnacgcagccagggcaggagcaaagcaggcaga

SEQ ID NO: 42742 - DNA, 385 bp, Glycine max
  Clone ID: PAT_MRT3847_138597C.1
aattcggctcgaggccgtttagagccgtcatagttcgactcctcaagttcctttcttttcctcattttccaattccgcaatgcaaagggtgtctccaacctccacaatttggaggaccatagtctccaaggccagaaaaaacgtgtttttcatcaacgacccttttgctgcgcgctccttctctgcggttcccgtcgtggcagccgccaagaaattgcatcaaccagagattccaagcgatttccagaaatggggttcggttggattctgcagaacgtcgaaatttgcctctgggttcaatccacttcaaccgaagccgttggattctattgtagatgtccacagattgaaagatcggtatcctgaagacattgcttctgtttgg

SEQ ID NO: 42743 - DNA, 970 bp, Glycine max
  Clone ID: PAT_MRT3847_138598C.1
ggttaatttttggctaatcatattattataccatacttatctatgccattatgtgtgcttgattgaggagattaggagaaagagataggaaagaaatagaataggatgtcattaaaaaatttgtattctaattcatccttgccccccacattttctcaccattcaaacaagttaaggatagagattttggtagctttcttttatttttatttgtatattgtgcagcaggaggactggaacttttttttcttctaatttctatgatgttaacatgtttgttggtttataattatgctctatcatgaaaatataaatggggaattgggaatgattccactaattcgtttccacaaaactctaaatgttttcactttggttcaggaaataaattcttttgatagcatgttactatttaattgtgataaattaagggttttttttctataagttttcgttggtacttggtagccaaatgaaatagaaagggggaaaaatagaactatagtagttgcattatgacaggttctgttctcaattttcatccagaagagtgtatcgcatgcaccatatcattgaatttaatatgttaactagtacaatttagaaaaaataaaatatcaactgttcgagaatcaatagcctgcttggtgtcattcatagtcaaatttagtgttgtgaagctttagtttgttgcttcaaacaagttgcatgaatatgaagatgaattgttccggtatcaaatgtccttcacaggaaaatgctcaacatttgatgcataaaaaacaagtttcgtgtgggaagcctaggtagttgtactactttgaagccccatttagaaggtaatggcaaaaagacttgtttgatgtggtttggaagttaagggttgaaaaataaagcactccttgttaggtataaatgcatattaaccttgtgctttcacaaagatatttgcctatgaattgtttgggta

SEQ ID NO: 42744 - DNA, 156 bp, Glycine max
  Clone ID: PAT_MRT3847_138599C.1
attcacacaagcgtatttcacagtggaaatgcggctcaccccgcattacctataccctcgaagtactattcatcctaaccactccaactgagactggcaacactaaacaaacaacaccgcacatcacgcaacgctgcttgaagctattagtgttga

SEQ ID NO: 42745 - DNA, 219 bp, Glycine max
  Clone ID: PAT_MRT3847_13859C.1
gcgaaccacaacggaccgggtattctacaccgggtcactgaacccttgcattactatatcaacactctcaactcgatggatggcccttctatttcctggaccgggattctctcacctaccaggatctgttagaacaccgactagtaccttgagagacagatactcaacgtggaagcttactaatgccctgacacaagtcgagcgatacgagactgtgac

SEQ ID NO: 42746 - DNA, 1519 bp, Glycine max
  Clone ID: PAT_MRT3847_1385C.1
ccggggaattcccgggtaaacaaaaaccatcagcaacataaaaaaaaaaaatagaaagaaaaatgatgctcggagaacaccatcgcgggaatccgacggtcctcgtgccaccgtggccagcccacgacgatccgacggctgagatgtactccgcgttcttaacaaacgacgtcaatgctggtgagtactctccgtaccatcttcaagaagcactaacggcgctgcagcgttttctgccgtcaaacgaaacggacgcagactcggactcctcggaggcggctcagcccgacgcggcggtggacgcgtacacgtgcgaccatttccgcatgtacgagttcaaggtccgtcgatgcgcacgtggcaggtcacacgactggacggagtgtccgtacgcgcatcccggcgagaaggcccgccgccgtgacccgcggaggttccactactctggcgtggcgtgcccggagttccgcaagggaaactgcaggaaaggcgacgcgtgcgagttcgcgcacggcgttttcgagtgctggctccatccggcgcgctaccggactcagccatgcaaggacggcacgagctgccggcggcgcgtgtgcttcttcgcgcacacgccggagcagctgcgcgtcctgccgatgcagagtccgcgtagcgtggcaaactcatcggagtcctacgacgggtctccgatgaggcaggtttcgttgtcgtcggcggcggcggcggcgttcatgtcttctccggcggcttctctctctccgccagagtcgccgccatcggtgaacgagatggtggcttctctgcgtaatttgcagcttgggaaaatgaaatcgatgcctcataatagaaacgtgtcggtcgggtcgccgaggggatcggtactccgaccgggttttttaagccttccaacaacgccaactcagcaaccggttcggtctggggtgaagtgttttgatgtttgggatgagagttttgaggaggaaccggttatggagagggtggagtcagggaggggaataagggctaagatgtttgagaagctcagcaaggagaattcactcgacgcctcggcttcgcctccggatcttgggtgggtctcggagcttgttaagtgagaagccagtccttgtaaatatggcatggctgaagagaagaagacaagaagacaagaatctcttttttgtatagttagcttactattattattatcatcatcatggttttaaacagcattcctcaacgcaatcaaggtatttggattcactgtaatacacaatctgtaattgaggctgcgtcagtcgcaattacctaccatttatataaaggttttcacccttgtgcgagtccgatcgcaatcctaatttaaaactaggtttttacttaaattaactcttgcatgtgttattttcagtactactttcacttactagctaatctcatcttattgatgtacaaatgtataaatactgctatttaggatccaagggcccaaaatgtaggatcccagaggcatctttct

SEQ ID NO: 42747 - DNA, 613 bp, Glycine max
  Clone ID: PAT_MRT3847_138600C.1
ccacgcgtccgaaaaaatctagagttctgaataacaaaattccctcttcgttttttgttttctttctctttcaactttttccttcccaccaaacacacaccattcccgctcctccattctttcattccaagaaagtcaggattcaactgttctcagattggcaacaacttcgaggtgttttgcctgatttgttgatcctgcggagaaggtgcttggaaagagggaagggaaggcagagggaatgttataataaatcccaaatttccaattgatgaaatttttatgttagttgatttcttttatttggtgaaacgttgttggtgatttcaagttgtttgagggttttgaatgcattttgatctatggcttcggaagtagccccatcttccgggggatttgttgaaaggttgcaactgtggatgcggttgctccttggtagctcattcttcggggacatggatgcgaacccgttaaacggaagcttgatgagttcaaaatggacggccaattacccattcctgcagatgcgcggattgaagttgagaatgaatggggtggccttacgcgagatggtcagcatgccgcaagaaaaccattcagggatttgaatgct

SEQ ID NO: 42748 - DNA, 433 bp, Glycine max
  Clone ID: PAT_MRT3847_138601C.1
aaaggcattaacagggactggaacccccgattttgggaaaatttggcaacaggggaaaaagccattaggaaaaggttaaaaaataaaacccgaagtaaatcaggaagggttatagtatttgggggggccaaagggcatttttggaaccaccccttaatgggggttccccccaaaaaaaatctttactttgggggctgccttgggcaaaccaaatttcacatatcccagggctatgttctttggggggcaaggaccgaatcccccacgggggaattccccaaggggggggcccccttaatctggaaactcactggggcttttgggagggggccccaaaaaaaagaaacccacccccccgattttaggacccttttaaagctggttcaggaaaacaatagctcctaaaaaaccacctttgggtttcccccttttc

SEQ ID NO: 42749 - DNA, 1117 bp, Glycine max
  Clone ID: PAT_MRT3847_138602C.1
cggctcgagcttttctgtccttctctctttctctctcttcggggagcgagatcaggctcgagcagcttcttcccccccacaaaaaccaaaaatcagataacccagataaaacaaacatcccaaaaatcaatgaacacacacaaaaaaataatctagggtttctgaataataaattcgctcttgcgttttttcgtttttcgtttttttttctctttcaactttttcctttccaccaaacaaacaccattcccgctcctccattctttcattccaagaaagtgaggattcaactgttctcagattggtaccagctggtgcaccttttttttttcttcaatttttttcgaattttttttggttcctaattttatccggagaagctaaattttccgggaaaatttgtgttttttttttctcctccttgcgaccttcgccgccggctgctattgatttgtcaaaggcaacaacttcgaggtgttttgcctgatttgttgatcctgcggagaaggtgcttggaaagagggaagggaaggcagagggaatgttataataaatcccaaatttccaattgatgaaatttttatgttagttgatttcttttatttggtgaaacgttgttggtgatttcaagttgtttgagggttttgaatgcattttgatctatggcttcggaagtagccccatcttccggggatttgttgaaatgttgcaactgtggatgcggttgctccttggtagctcattcttcggggacatggatgcgatccgttaaacggaagcttgatgagttcaaaatggacggccaattacccattcctgcgattgcgcggattgaagttgagaatgaatgtgtggccttacgcgagatggtcagcatgcagcagagaaccattcaggatttgaatgctgagttggaggaggagagaaattcttcatccacagcggccaacgaggccatgtcgatgatattgaggctgcagagggagaaggcggaggttcaaatggaggctcgccaattcaagcgttttgcggaggagaagatgacgcatgatcaggaggagcttctatctttggaagatttgctctataagagagaacagataattcagtcacttac

SEQ ID NO: 42750 - DNA, 389 bp, Glycine max
  Clone ID: PAT_MRT3847_138603C.1
gctttctgctacttaatcatcacagacctggaatttcccttggtgacaaaccaagactaacacacacagaacataacttgtgttgttgaggtgagaagattaccatagaatggcctttgcaggaacaacacagacttgtatggcctgtgacaaaaccgattatctggttgatcagttgacccccgataaccgagctttccacaaagcttgcttgagacgccattattgcataggaaccctgaggctgagcaactacaactgttttgacggagttctttattgtaagccacactctgaccaactgttcaaaagagcagggagtccttgacaaaagctgtcaaggagcaccaagaattgccaagccacataaaaatctgtaagagaaacct

SEQ ID NO: 42751 - DNA, 251 bp, Glycine max
  Clone ID: PAT_MRT3847_138604C.1
cggctcgagattaaaaatttcacttttatatccatgtaaattgcatggaggccatgtgtttatttataagaactaattctattgttaaaaaatcaatacatctttagtaaattaatgtaattcacaattatatataaaattcaaaattagtgtcattactataactgttcaatcaaaatatctatcaaaagttaaaagcgaatagaatggataatcttcaatttttctatggctaaaaattcaattatacc

SEQ ID NO: 42752 - DNA, 886 bp, Glycine max
  Clone ID: PAT_MRT3847_138605C.1
ggaacaaggaagtaacttagatcgcgatttggttgcaatctcaagtccagatatggttgcatggatgatcaaggaggcactctcaaaagattttagcactaaggaaagttcgcttgctctaagtaagaatcctgcttcaatgagaaacaggaaatttgccagtgatgtgaaatttgattcaaagtgccttcaagctaccaaagtggttgatcaagaatgcactcttggatctagtgaggatcctagtaatttggctagctcaaaggtggtgggtgacacaaagatcaacttagaaattcaattgcggatgaagttgagccatggaaagacttcaaatgcaagctcttcaaagcttcctcttgcccttccttcaccaaaagctccttcagagtcttggcttaagcgcacattaccaacagttccctcgaagagtatatctttacggtctaatcttgctacctacttccatgcacctgttaaaacttctgaagttaatcatgggcatcttcagtttgctcaggaactactcccacccattccagaagcatgaattttccggagatatcaggccattggttatttgatttgcttggtgaaatgtgccacgttttcttagtgtaattatttgttcttaggattctcattctacagcttggtcccccttttgcttttttatatatatacatgagacagtatactactcaaaagtgtaaatcacagttgccctttttgtcttgtaaatgtaataagttgtttcaactaaaatttatcactataaatcacaacaactttaaggtgatttgttcatgtaataatatcagggcaaaagaccttttgcttaaaaaattgttgtttctgagatactgctaagaataaatttgtaatg

SEQ ID NO: 42753 - DNA, 411 bp, Glycine max
  Clone ID: PAT_MRT3847_138606C.1
gacggctgtgagagaacaacggagggatcaccgatgtgtggagagtccataattgagtgcaggagctgagattttctatcactgcccagcgtgcagttcttatctattacttgaaagagcacggataaattggtagcataaatgacgtgcaccacagagtttttgcagcgtgacagaacgagtcctgcgagaagctgaagagacgcagggccagctaaagttgtgtatattgaggagaaggaatgaaattatactgacaaggaggtaatgtgaggcattcaacaaaggcagaactccttccataatgcatgttggaaacttttaatatctaagaggccttgtctcgttagatgagacatcaacagaaggttcatgcgagtcggtgctttgatgattacgatttgaaatagg

SEQ ID NO: 42754 - DNA, 119 bp, Glycine max
  Clone ID: PAT_MRT3847_138607C.1
ggctcgagcgcaaactctgcttgcaattgtatatattgttttcgcaacgtaacaaaagggcggggatgaatgttgagacgcttggaataataacattactgggaatgagattcctttac

SEQ ID NO: 42755 - DNA, 313 bp, Glycine max
  Clone ID: PAT_MRT3847_138608C.1
gacattcgcatacatgggacaatctctcattctctcggacttggtccttttgagttgtggcaatcttaacggtcgcctgagtggttttgatgtacatgactgtgctatgtgcacctctgatgacgcaagcagcgacatgcaaacagctatttgtaaacatctcaccacgcctaacttacgtgatgctggttgcacatactgcaaacttgcactgatacgcattgaccaacgtcaacggatcatccattatctagttggtgaaacagacagtgagagactgactgccgatgctgactaataactatgacatgac

SEQ ID NO: 42756 - DNA, 386 bp, Glycine max
  Clone ID: PAT_MRT3847_138609C.1
agctcgagccgtggaacccggctcgttgcttcattaaacaatgtctcttttgtgatgcaccaaactgcacttctccaagctcactacttcagtatctggggggttttcaggactgattttccagaccgccctccatcccctttcaactttactggtgcgcccctaactgccaatcttgccactttaactggcactagagttagcaagattgctttcaattccacagtggagctagttttgcaggataccaatctcctctctgttgagtcacatccattccatcttcatggctataacttttttgttgttggaaccgggattggtcactttgatccatctaaaaaccctgctaagaacaacttgatagatcctattgagaggaacac

SEQ ID NO: 42757 - DNA, 741 bp, Glycine max
  Clone ID: PAT_MRT3847_13860C.1
aaaatggtcttattcaaatatgtttggaaccaaaaaagttaaaagtaagagaagatcgaggaatgatatatatcagtgatagaaaatccaatatgtcattggacaaccaacattattattataacattatggagatgcagatcatcatcatcctagtataaagtatactccctagtgggatccagacaatggaagaaattaaaccatctttattctctctttgctgattattactgcgaaacaagtttaaagtcaacaagcataaaccctcgtgcaactgctcagtgctttaccgtgttgcaatcaatggtgggggatatcttgtagggcaagttgaccccgcatttgctagggagagctgcaagggttgcaaggttgagtccaggcaagctcaaagcagtggttttgaggcacctacacaccccttgacgatctggggtggttttggcttccttgtttatgctcctaaccccattgcagcatgctgcagggacacctccaccaggaccccttaggtaccctatgcatggagccactgtgatttgcaccctgccacatggaatttcagcttctgccaagggaattatgtgtccaaaactaaccatcaacaccgcaaccatgcagcttgtaaccttcatgacaagcagtgagctagccatgatttggaagagttagaggatgaaattgcacttcttcaagggtgagctatagtgactagtgagtatgaagcgcgcgcctggg

SEQ ID NO: 42758 - DNA, 230 bp, Glycine max
  Clone ID: PAT_MRT3847_138610C.1
aaaattgtctttctgataacagcacaattttcacaaaacttaatagtaaagtgggaagaaacgtactattaagttgtgtgaaaattgtgctgttgatcagaaagacaatactaaagaactgggatgttgtggtagcagatttctccactgtaatatgacgaagtatgcaaattgtacattttgatacgacttgtgcatcttttgttgaaatttttatgaaaattgatttt

SEQ ID NO: 42759 - DNA, 707 bp, Glycine max
  Clone ID: PAT_MRT3847_138611C.1
tcggctgcgagaagactacagaaggggggaggagagagggtttgttttgggcgtattgttcgtgtgattgagaagaacagagcgtgaatgagaagaagagagaggaatgggttcaccgacatcaaggattgtgttccgtattgtggtggtggcgcttctgcttcttcttctcttctacattggtcgccctctgtattggaaaatctccgccaccgtccacgacatccgcaacaacaagcaaactgtcagacaaggtctttcccaaatcgtcattgaggctcagaaatcggtcggttggtatcacgatgagtccgactcaggggttcgtgctaactaccgaaaactgcttcttcataagcccatttccacagtttttgcttagttatagttagataaatacatgtcactcaagattttctttctgttctttttttttctcctcacgattctgtgatttgcatatctggtttttgtcttatatggacaataatgaggtagacgaatcttatcttattcaattgcataatgaccatcatattctagatttaggggcttttctctgggtgtatttttaagtgggtgggaaggttaatgacgtgcttgtgttataatttatcctttttgaaggggggaaaagggttgattatgtgtgctctataagtaaggtgggtgaataatttggattggtaatgaatcaatgaaaaagt

SEQ ID NO: 42760 - DNA, 195 bp, Glycine max
  unsure (1)..(195): unsure at all n locations
  Clone ID: PAT_MRT3847_138612C.1
ctgacagtaaacgacgacgtggaggaaggtgaacctcgtcgtagcatccgcttcctccacttcctccactgcccttgccttcccatttcattcctttcctgccacactccataagacagactaanaaatgtcnaagctgctnctgctgcccagtcctcccctgaccacctccattcaccgcttccagacaacata

SEQ ID NO: 42761 - DNA, 241 bp, Glycine max
  unsure (1)..(241): unsure at all n locations
  Clone ID: PAT_MRT3847_138613C.1
ggacgggccggaggcccggtcgacccacgcgcccgggcatattacggacgccaggcggacagacccgagggggncgggtaaagggagaggagcgacacgaaccagccccaagcggggagtcaccgccgaagccgccaacgccaggggagaacagacgaccgaccaaacccagcggccggatcaggggaagcggaagcaggacccggaccgaaagccacggcgcaggaagcagaggaagaaa

SEQ ID NO: 42762 - DNA, 444 bp, Glycine max
  Clone ID: PAT_MRT3847_138614C.1
cccacgcgtccgtttgccacatgtggcaaaagcaaaagggtctgtatatgatgtctgtttacatatcaagaggatattatggacaaacacaattatcccaaaaaagtaaatccctctactcatatgtggcaacaccagatacagagaaacaaaggaaaacacgaccctccacacactttaacaatcataaaaaagtaaagggttaaaaaagtttgaaccacaatctgagataaactgtttatcatgtggccatatttttcacaaattgtgcatggataagtggttggactattggaacattacatacccactttgcaggacttccttgatgcctgaagatgacgcatcttgcttttgttaaataaacatttacatataaaataaaagagatatatttatgtacagtatatatcgtatgtacatatttttgccaaatattgatgt

SEQ ID NO: 42763 - DNA, 462 bp, Glycine max
  Clone ID: PAT_MRT3847_138615C.1
ggccccttattttaataatattaatattaatattaatattaacattaatatctagtctagttacaacttaagacaactgtctgaaaattccacactctggattctctgtctcatagttttctttgcagaagaaaagaaaagcaatagctcaattctctattttccagaagatacacttttttctcacacaaaccaagggaagaaaaaaaagatcattcctcaatctgaagcataattgtaacacataatcaggtgggagacttggtttctttttctcatttcttaatttggtttctttgatggggggcacaaattttcactccatgatgttgattccatgaattgtactgattctgcagaatgaaggttgaaattgaaggcagccacagtgattatgctgaatctgtttccagacaaccagaaaatagaggaagattggaatccaagaagaaactgaagaaa

SEQ ID NO: 42764 - DNA, 195 bp, Glycine max
  Clone ID: PAT_MRT3847_138616C.1
ataatggatatggttgtcgatgggtaaggaaaaaaaaaatcagttaaaagccccgtacagttgtgaatattgagtgcatcgttactctgtatactatgtgtgatcttgacattcatatttatacagaaggacaatggaaattggaggcagataaatagaatgtataaactattttttcttcaataaataataagt

SEQ ID NO: 42765 - DNA, 264 bp, Glycine max
  Clone ID: PAT_MRT3847_138617C.1
ccgggcgacccacctcgtcactctacactcgggccttacacttcattctcggcgtccattcacatacactctcttccagctcgtcagtcattacaatactcactcggtatattgcttccactcactatctacagtagccaaatggagcccatcagagatatgctatttcatgggataaggcagcttatttggccaaggacattatcttctgctagtcttgaataagctgatgtgtattctatctcaagtatgatcaacagtgat

SEQ ID NO: 42766 - DNA, 277 bp, Glycine max
  Clone ID: PAT_MRT3847_138618C.1
aatcaccaacctttttataaattatcaaacaaaataaaccttcgtcgattttctaaaactgcgctcacacacaaaaattctatcattaaaacttttcaatgaattatcctctaccaattcttttccataacatatatccttccagccaattactctacaaaaccttcatcttaaatgatacattgtacaacatatcatgatatccttacccactccttcttacattacttttgcagtctataatccctcctcaaatttaaataatattattcttaca

SEQ ID NO: 42767 - DNA, 1089 bp, Glycine max
  Clone ID: PAT_MRT3847_138619C.1
ggggggaaaaaggggaaaaattgaacatctaacttattcttactttctttgcattattgtctttccagatttttgccctcaaacctgccgtccaccaggcattcctgaattttgtacctaggaaagtatgttgaaaatcagtgaagtatttattatttatctttgataataatttgtgtgaaataatcttgcactttgcttactaaaactatttctttttctccccatggtctccaaattcaagatgaatgaggtagatttctggaataaatacttcaaagctgagtatctccatagcaccaaaaatgctgttgcagcagctgctgaggctgctgaagatgaggatcttgctgtttttctgaaagatgatgagatattggaaattgaagctcgaaagaaggtctttgtcttctttctctttaattccgattctcaatgaagatcttttatctgcattctctattccatttatatcattatgtctgtttgcaggttcgacgggttgatccaactttagacatggaagcagaccaaggagatgattacacacatcttcctgtatggtgaatgaaactattcctcaatctcatataggaggttctttcacagcatgttttttcatattttatgcaaattcaccttttatagtgtaaaattgcaacttgtattactctttgcatgaaatagtgatagtgtaacttgttacattttgttaactattttggtaagacaataactgcccttctgtcgtcttctgcagccgtctcgaggattagacttcgttcttcagtggtatggcataataaacccagctgtgagagagaaagcgtactccaaagtctgaacagagagagagaacgcactctcggcgagaatgaggaaacatgatttgctagtcgcgttagagccaaaggcgaagcaatttgttgagtctctgagtggtgatccgcacaagaaaggaagaatttgtggattatgaattgagttgaagcgtttggatgaaaggagatagaatagtaaaatggaacgaaaatataaatacctattttcagtattttggtcggtctctcaaagtgtgagacgctttca

SEQ ID NO: 42768 - DNA, 327 bp, Glycine max
  Clone ID: PAT_MRT3847_13861C.1
aaaaagaacaatttgcatccgggggatacaaatttttttttcatataaaacttttaattttttcaatgaaaaacttgtttagagcaaaccctaaaaaaatttcggtttttttagaaactggggcccccaaatgtccaaaaaaaaggttgggctttttattatgggggtcccccatccatccaaccagggggggggggtcccccccaatccacattccccaaagtttttgaataaccaaagagaaaggctttttcaattcaggcttttaacctcagacttggaacaacagttaacccccaaagtaattggtgttaaagcctccttggc

SEQ ID NO: 42769 - DNA, 397 bp, Glycine max
  Clone ID: PAT_MRT3847_138620C.1
acgaggtagggcgtgtattgatgctgctcaatgagggcattagtccatcaaacattcttgcaatgacatttactacagcagctgcttctgaaatgagagaacgtataggagctatagctgggaaggcaacagctaaagaacttactatcagtacttttcattcattttccttgcagctttgtcgttcacatggagaaaagttaggtcgtacatctgaattcttaatatatggacaggggcaacagcgaaatgcaattattgaggccatccgattattagaaattggaaagagtgaaaataaagatggtgcattattaattggtgaattgtccaatagtctaaataatcctaaacagttcaaggataaggcaaagaaatggcaaaagtttgtggctca

SEQ ID NO: 42770 - DNA, 298 bp, Glycine max
  Clone ID: PAT_MRT3847_138621C.1
ggctagtggttatggaaatttgtacagccaatgctatggaaccaacactgcatcactcaccactgctctattcaacaatggcgtgaactgcgggtcttgctatgagatgaaatgtgacactgaccccatatggtgcctctccggtagcataatcgttactgccacgaacttatgcccccctaactttgcattggctagtaacaattgtggttggtgcacccctcctttgcaacacttcgaacttgctgagtctgctgtattgcatattgcttagtacaaagctggaatggttcctgta

SEQ ID NO: 42771 - DNA, 209 bp, Glycine max
  Clone ID: PAT_MRT3847_138622C.1
acccagacgtacgcgtacgcttagccgttcgagaagtccttttagattttaacagatactcaacatgaagacgatctgggtcctatgataccatgaatgtgccctacagcatgagcatcattgtttacgcttatgttattgatgtatgaagccccctactgaaaacttctgcgatacttccaccattttaacttgtacttacaacttat

SEQ ID NO: 42772 - DNA, 360 bp, Glycine max
  Clone ID: PAT_MRT3847_138623C.1
accacctacaccctctttggactgattttcataactgggtttgggtttgtgcccgtcatgacctaactgaattatctctgacttgagttgatccttttgttgtgattcaaaacaacaatgttgtagttcttttagttacgatgaacatgatcattatgatcggattctagagtatacacttattgtaagtgaggacccttcaagtgtttcattttattagaccaaggaagatgcttctaccctatcctaaagagtgaaacttgcagaatttctgaacatgtacatttctttaccagagttctgtggacatatgggatacaggaatcatccaattcaacctgatagttatggtcaaggaaa

SEQ ID NO: 42773 - DNA, 2187 bp, Glycine max
  Clone ID: PAT_MRT3847_138624C.1
ccacgcgtccggtggcagagaatcgaggaggcgcaagagtaggacgcggggaatcctgaacgccaaagactgaggcgaatatttagctgaaaataaattcacaccacaacccaacacaaacactttctctttctttctctcttcaatcttgatcccattttttttcttctctcttccttcctttggaattgaattcagcatcagcatgaacagcaggtctcaggatcaacgctcaagacctgccaagccagccacaatccatggctgcgccctctccggcgacctcgttggactccagaggctacttcgagacaacccttctcttctcaacgagagaaaccctgttatggcacagacaccacttcatgtctctgctggtcacaataggactgagatagttaaatttcttcttgattggcaagggacagataaggttgagatggaggccaagaatatgtatggagaaactccattgcacatggcagctaagaatgggtgcaatgaagccgcacaattacttcttgcttgtggtgctactgttgaagccagagcaaataacggtatgacacctttacatcttgctgtttggtactcactacgagcagaagaattcttaactgtgaaaacattgcttgagtacaatgctgattgcagtgccaaggacgatgagggaatgactcctttaaatcatctatcccaaggcccgggaactgagaaacttagggaactattactctggcatcttgaagaacaaaggaagcagcgagccattgaggcatgcagtgaaaccaaagctaaaatggatgagcttgagaaggaactatcaaatattgtcggtcttaatgatctaaaagtacaacttcgcaagtgggcaaagggcatgcttttggatgagaaacgtagatctcttggtctgcatgttggcaggagaagaccacctcatatggcctttctaggcaaccctggaacaggtaaaactatggtagcacggattcttggaaaattactccatatggtgggaattctacccactgataaagtgacagaagtacagcggactgatttagttggtgaatttgttgggcacactggtccaaaaacaaggaggaagatcaaggaagcagaggggggaattctttttgttgatgaagcctatagattgataccaatgcaaaagtccgacgataaggactacgggttggaagccttagaggagattatgtctgtcatggacagtggaaagattgtcgtaatatttgctggctacagcaagccaatgaagcgagtcattgcttctaacgaaggtttctgtagacgggtgaccaagttttttcaatttaatgatttcaactcagaagaactagcgcaaatccttcacatcaagatgaataatttagctgaagatagtttgctatatggatttatgttgcatcccgattgctgtataaaagccttagcagcattgatagagagggaaacaacagaaaagcaacgtaaagagacaaatggaggtttggtagataccatgttggttaatgctagagaaaatttagacctaaggctcagctttgactgtatggatacagaagaacttcttaccatcacattggtagatttagaagcaggccttcagcaattaacacagtaatcattctttgcaatctagtagatattttggagagattcatttcagcttacctcaattttcacacaagtttgacatctgcacaatgaggaacatatcatgaataagtttggtacaataggttgattcttttgggagttcttttccttgtattttgtaattgataatattatataggcttcattcatgtactttgctatatttttttttatctgaataatgatttgtagacacctaatgcaaatctataccttgagagaaagaactagaagagagagaagtgattatttgatgagtgatatgatgtgattaagaagggagaggaagatagggagaaatgaagggtcaaatgaaatgagtgtttaggtagctatgtatcattgttgtttttatctgcctttcatttgtattcattgtatgttattattcattattgtgggggagtaacgaaatcttcttttatttgtggctgtcccaaaatattttcattattattaaccattaatgttaattggtgatgctttttaaaaaaagggaaaaca

SEQ ID NO: 42774 - DNA, 2005 bp, Glycine max
  Clone ID: PAT_MRT3847_138625C.1
tcggttggagggtcacaataggactgagatagttaaatttcttcttgattggcaaggggcagataaggttgagatggaggccaagaatatggtgggtacaacgtccattttttactgaagttattctttgaatataaatatgtataatctagacttccagttattgtcttgtaattctgaaaaggtttctttgtatactattgcagtatggagaaactccattgcacatggcagctaagaatgggtgcaataaagccgcacaattgcttcttgctcgtggtgctattgttgaagccagagcaaatgtgattatttttgtcatttcatctttcatttaatcttgtttaaatctagcaagaattgtttttattgttttataatgcatataaaagtttgttcccaactttttcttgcagaacggtatgacacctttacatcttgctgtttggtactcactacgagcagaagagttcttaactgtgaaaacattgcttgagtacaatgctgattgcagtgctaaggatgatgtaatgaacttaatttcctgttttttttcctgttattttaacattttcggtgaaattgtcatagatgctcaagactatgaattgcaggagggaatgactcctttaaatcatctatcccaaggccctggaactgagaaacttagggaactattactttggcatcttgaagagcaaaggaagcagcgagccattgaggcatgcagtgaaaccaaagctaaaatggatgagcttgagaagcaactatcaaatattgtgggtcttaatgatctaaaagtacaactacgcaagtgggcaaagggcatgcttttggatgagaaacgtagatctcttggtctgcatgttggaaggagaagaccacctcatatggcctttcttggcaaccctggaacaggtaaaactatggtagcacggattcttggaaaattactccatacggtgggaattctacctactgataaagtgacagaagtacagcggaccgatttagtcggtgagtttgttggtcacactggtccaaaaaccaggaggaagatcaaggaagcagaggggggaattctttttgttgatgaagcttatagattgataccaatgcaaaagtccgatgataaggactacgggttggaagccttagaggagattatgtctgtcatggacagtggaaagattgtcgtaatatttgctggctacagcaagccaatgaagcgagtaatcacttctaacgaaggtttctgtagacgtgtgaccaagttttttcaatttaatgatttcaactcagaagaactagcacaaatccttcacattaagatgaataatttagcagaagatagtttgctatatggatttaagttgcataccgattgcagtataaaatccttagcagcattgatagagagggaaacaacagaaaagcagcgccaagagacaaatggaggtttggtagataccatgttggtcaatgctagagaaaatttggacctaaggctaagctttgactgtatggatacagaagaacttcttaccatcacattggtagatttagaagcaggccttcagttattaacacagtaatcattctttggcaatctagtagatattttggagacaagattcatttcaacttacctcaattttcaccattggatacacaggttttacatctgcacaatgagcatgtcatgaataagtttgctacaataggtcgattcttttgggaaaatttttccgtgtattttgtaatcgataatgttatatataggctttattcatgcactttttttttatctgaataatgatttgtagacacctaatgcaaatctataccttgagagagagaaatagaagagagataatttgatgagtgacatgatgttataaagaagagagagagagagagagagggagggagaaatgaggtgtcaaatgaaatgagtgtttataatgtttaagtagttatatatatcattgtttatctgcctttc

SEQ ID NO: 42775 - DNA, 580 bp, Glycine max
  Clone ID: PAT_MRT3847_138626C.1
ttttaattttaaggaataaatccttagacatacgtctattaaaattcaaacaaatgaatattttggacaagtagaagacaatgtgcatggaatttttttatatgcagatgtagtgggacaaaggaatagaagggggtgggggaacgaagctaaaactacggttttacgcaatacagagacttttgtttccatcagttacacttgcttaagaagcaagggcaaagaaaattgattagtcaatatgacacagtatcatgagagcaaagtaccttgtgagtaaattaacatgtggacactacgaatgaacaattgaagagactgatgctttgtcactaatagaagaacttctcttgtgctttacatgtctttccttcaacttctcaaccgtattatttgcattgttctggttgctaacagacccttcttgagcactacacatctgagactttaacttaaacccaagtttcttagacacagttccccaagcgctcgatcccttcacccgacccaatttctcaatctcctgcctcatgtttgagcactccttctcaagctcagacaccctcatcctcatgttatc

SEQ ID NO: 42776 - DNA, 1202 bp, Glycine max
  Clone ID: PAT_MRT3847_138627C.1
gtaagctcggaattcggctcgagcatcctgcggaaacaacaccccctgcaccctttgacgggtgaaaacattgaaaaaacctccacgcgtccgacggctgcgtgccgacgctgcgtgggcgatgaacacgtactagtacatagcatacctcaccaaaacccagcgtttcacattatcttcttttttatttctccaatgggacaagcaccgtccacgccggtttcttcgacggacctgagtcaccgggatattttcaccaccgacgaatccatcggccgcgactacaccgccgacatccccgacgagtgcctcgccggaatcttccagtttctaagctccgtcgaccggaaaacctgctccgccgtgtgtcggcggtggctgcgcgtggacggcgagaaccgccagcgcctctccctgaacgcgaaggcgagcctggttgacttcgttccgtcgctcttctcgcggtttgactcggtcacgaagctcgccctgcggtgcgaccgcaagtccacgagcgtaaacgacgacgctttggtcctgatctcgctgcggtgcaggaatctggtgcggctgaagctgcgcgggtgcagggaagtcaccgagcacggaatggccggcgtggcgaagaactgcacgaatctgaagaagctctcgtgcggttcgtgcgcgttcggcgcaaagggcgtttacgctttcgttaacaactccatcgttcttgaagaggtttccatcaagaggcttcgaggggttgaaaaagataataacgatggcgttgacggcgccgaatcgcttcctctttccgttacttcctcttcgttgagatcgatttgcctcaaggagctcgttaacggccactgtttcgcgccgttaatagttaattcgaagaagcttgaaacgctgaagctgattcggtgtttgggggattgggatgtgactctggaaagtgttggaaagttgaattccgggttggttgagattcatttagagaaggttcaggttagcgatgtgggacttttgggggtttctaagtgtttgaagttggagtctttgcaccttgtgaaaacacccgagtgttccgacgtgggactttgcgaagttgcggagaggtgtaagatgctgaagaagcttcacattgatgggtggaagaccaacaggattggggattgtcgcttgatgtctgttgccaaacaaatggtccacat

SEQ ID NO: 42777 - DNA, 340 bp, Glycine max
  Clone ID: PAT_MRT3847_138628C.1
gagcacgggcctaaaaaaataggttagtacctttcttaaacacaatggctggtgataaggaggggctctttaacagacggaaggcattcataggtataatcttattacattctgaatctgctggtgtggatattctatacaaagcaagcactgaacatgggaaatgactacttcaaaatgtgtcctctacctacatgaaaatgcctttgttgacatagccccttttgcacagatttaccttaacaaagttaaagtactagatgacattttcaatcttcatgaagataatggttctcaacattcttgaacccggtattggccccaaattgtattttttggg

SEQ ID NO: 42778 - DNA, 164 bp, Glycine max
  Clone ID: PAT_MRT3847_138629C.1
gttatgcgtcggttcactggttctgtttgacgatggtgaggagaatatggacctgagagtgagctgtgaagcatcattagcactagtagcatagccatgccgtggtgcaagctactcgattggagccaccccgaatctgaactggctatagagaaccttcctta

SEQ ID NO: 42779 - DNA, 168 bp, Glycine max
  unsure (1)..(168): unsure at all n locations
  Clone ID: PAT_MRT3847_13862C.1
agttcgtatttatacatcttctctggtctagcaatgagttctcaacatgcgccgagatatcgcgtgttcgccgcagaacggagcagttaggaaactattcgggagnaacgcacgcanacagctcaggttctatcatngngtagggcgttcacatgcgagcgatagaca

SEQ ID NO: 42780 - DNA, 232 bp, Glycine max
  Clone ID: PAT_MRT3847_138630C.1
atgcgttcggtccgattatgtaccgtaaatgaaggagataacgaacgtgatgaacataatctatcgtggactatgtagaccaaacacaagggggcgaccggtgtataggagaccggctcatgtacgcgtgcctgctactgcctatacgtgtgttagtattggcaaccttggatgtaaatcataggtggatcagttgttttactgcgtgaaagacgtgataaaatcatgatgt

SEQ ID NO: 42781 - DNA, 577 bp, Glycine max
  unsure (1)..(577): unsure at all n locations
  Clone ID: PAT_MRT3847_138631C.1
ttctcctttgtttgaacttggttggcaaaaagacagagggtgaatcgtggagtatattgcatggatgtcttacatagctcatcatcgtaatcacctccactataaatattttccggagggccatttctcctgtgatattaattcttgttctatattggaaaaagtttcttctacactccctcatgctgttattggaatgaccttcaaatatgatctcattggtgctggaactcattcttcacatgattctcctgaaaaggaatatcatgatgaacctctaaagattgtggccagattgagacaaagaatagagatctcagtactttgtcgttcatgcttatatggaaacaaattgtttaaattgtctcttgatgatgttgaatcttctattggttccatgtaggatcatagggatggtccatctgatatgtgtcttctccattatcttaagggtaagaactattctgacatattatattcatgagagaattatgtgtcttacgatagttgtacatctatatatcatctagtgcgcactcatatcgttacaggattactntgaatggttattgcacta

SEQ ID NO: 42782 - DNA, 277 bp, Glycine max
  Clone ID: PAT_MRT3847_138632C.1
ctcgagccggactagttctagatcgcgagcggccgccctttttgtttttttttttgatcggggaaaaacaagtcccaatttgcaaaaagctaggacccgaatatgatatatatgagatagggatgtaataggatatgaactgggaaatccggcaattttttaaaaatgggttaaattattgacctttgggttcctacattttaaaaaaaaaaaaaccgcaaaaaaaaaaaatcaatccaaataattaagaaaaaaagaagttaaaaagggggggggg

SEQ ID NO: 42783 - DNA, 263 bp, Glycine max
  Clone ID: PAT_MRT3847_138633C.1
ggtatacttgtactatcaacaacgattttgttcttgttgctggaggcacaggcaggagctctatactttacgggacgcaaatatattgtggagtgctgatgtcaaaacacaaaaagattggcgagatgctaatgagtcggcggctgacatactgcttttataaaagggcgacatgttagccccgaggggggcggactttaatacattgtatgctgtactgtgttgaacgcatagaatgaaaggaggggcaggttacatttcat

SEQ ID NO: 42784 - DNA, 233 bp, Glycine max
  Clone ID: PAT_MRT3847_138634C.1
ccgggccgggaatcccgggtcgacccacgcgcgcgtttgggaagatccatacgcaagtaaccccaccctctttggcatgaaggttttgggggtcctgtaccacgtgaacctcgtaagcttatgacaaacgataacaagatcctatggattcatactttactttgatcgccgatctggtgctgtcgggatagtatctctcaagggagggcatctatgtgggcagccgatctttt

SEQ ID NO: 42785 - DNA, 322 bp, Glycine max
  Clone ID: PAT_MRT3847_138635C.1
aaaattgttgaggaaaatgaactgatgagcttcatgctcatgctttatgtaaataccggaaaagtgttgatgtggctgtgtgtgatatgcacgatcatgtgttggatataaggggggtcaccagctttggagggatcgttcaccaaggtttatgcttgatcggcagcggagtggatgcacttactttctatggcacgaaaatttacatccagtcgattagtggtaccaaggctgatggtgggtaaggaagaattggaatgagtacaaatctcagaggacagatcgcattcacaaccttgggagctggcgaacacgaatacga

SEQ ID NO: 42786 - DNA, 566 bp, Glycine max
  Clone ID: PAT_MRT3847_138636C.1
tagggaatttggccctcgaggccaagaattcaagccaacagttgaggcaatattaactatttatagaggtcatatttactatttatgaaaaaaatagaggtcatcataaaaaaaatagaggtcatattaggtattggccaagcgacaaaaaatagatgtaataagtaatgttcatgtattatattaataaataatttgttcatgtagatatattaagaaatttatataagttttcaataataaattgttcatgtagatattaaagtaaatttatattaagaatacgatatattatattaataaataattttattaattatataaaatattaatatatattatcaatctattaacattaatttagtgtagactttcaaaatctatattttaaaaatggcatttcttaatgattagaaagtactacaaagatatttttatatactaaattggcatttttgttttcaaagggcacgaagaaagggttagaaaaaaaaacttagcaatccacattcatatttttctttcgttgaaattaaattcatgtggatattattaaataataaaga

SEQ ID NO: 42787 - DNA, 490 bp, Glycine max
  unsure (1)..(490): unsure at all n locations
  Clone ID: PAT_MRT3847_138637C.1
ggccgccctnnannanngatctttgggccctgcaaangcaancnnaaanaaaacaaaagggcgcccggggtgacccgggccaagggaaaaaatgaaaacgaccatgacaaagatccgacaccagccgaggccgaaagcaagggcaaacgaaaaagcaggaccatagaccacacgaacggacccacattggacacgccagagggaaaaagcataactggcaccctcgaagaacagcactgaaatacccccaccaccgtacaagagaataaggacccgcaaacccaaacctagaacgctaatacaccggcaagtcatccccaaactatggatagcacctacaagaaccccaagggaaggcccccaccccaagcagcgtcaacggaaatagattggagaaaagtcggtcgcccgagcccttgaaaaatagcaccaagggacccagacgaggaatcaccagggcccctattttcttggattcgccgaaaaggca

SEQ ID NO: 42788 - DNA, 464 bp, Glycine max
  Clone ID: PAT_MRT3847_138638C.1
gttaactaaaattaaaattgaaaagatcaaaatccagattacggcaagtacatggaagtgataactagataacaacatgttaaacccatgataataatgagaaaaatgagtaccggaaagaaacaaggtggcggcggaggtttttgtttttcaatttccaaatgaaacgaatccctaaccagagttttgatcttgcttgtgatggggctttctgcataggatcatgtgcataggagagaaaagcctacagtcaccccgtctggtcaaagcttcagtggctttgaatagcatcttatgaacattgacgggccccttaagcgcgattcccaaaacggcgagaacagtgaccacgatatggctccttcagttcgcgatcctacccatgtttaatagctccaccagggaagagccggcggcttacacgatacctctgcttcacaacagtaaaccctacgttacgcgcc

SEQ ID NO: 42789 - DNA, 394 bp, Glycine max
  Clone ID: PAT_MRT3847_138639C.1
cccacgcgtacggacacatatatcgctttactggttttgatgtacgcagcattttctctcttcctgctaaattctactatcacggcgcacgtcccagcgccaccatgtacttctacaattccatcctcaatgtctcctttggcaccttctacaccaccaccgtcccggactcttcctgctcctatcaacgtctcttacgccgccacttccatctacagattccgctcccactcctccaccacctattggatttggaggaggaggtggaagtggaattggaaaaggtggtggtggctcaagcgttggaacaggctcatgaagtgttagtggtggcgtacatggaagtataggacacagacctgatgcccatatatgtagtggcgttggcagcggt

SEQ ID NO: 42790 - DNA, 324 bp, Glycine max
  Clone ID: PAT_MRT3847_13863C.1
caaagggcttgtgaatgtccaccgggtgtcattgacctaatagtcaataggggtccttattttgcactcaaattcttattgaacgtaattgctaacttcttttcaagatggcatgctgctttctgggtgtcttttcttccactactggtgagcagatatatcttcagtgccaattgcgcgtgtgtatttcagtttagactaataattaattgattaacttgaaagtgattctggccgttggaacaaagcttcaaggaattataactcgaatggcacttgacatatcaaaaaggcatgctgtagtgcaagggatccctcttgtgc

SEQ ID NO: 42791 - DNA, 215 bp, Glycine max
  Clone ID: PAT_MRT3847_138640C.1
ggtgtgttgaaggagtatcagtccagaatgtgatgcacaaaagtggccgctccaaaggatccatgcttaggtgcgcatggatgagaggtcacaactcttctacactgtcacatgagatcagttcactgctcttccttttagaacttcatacctgggaaaagcttggcgttactcaacagaatcacgttgtctcagatcaccctttccccatctgg

SEQ ID NO: 42792 - DNA, 476 bp, Glycine max
  Clone ID: PAT_MRT3847_138641C.1
agctacagggcatatcaaaaacttgaaccttgggtaatatctagagtccctgctagctcggcacatgggagataatcaaaatgcatcctgagcagagggttatgtatggaccaactttatgtgtgatgataagcagtgctcttcttcataaagctactcgctgaacatgtcacgaactgtatgaaaccgaaggagcaaaaggccatactggggagactactgaaggacccatcgtacgctgaggactcctatgttgctgcccacaatccacttgggagagaatgatttttcacattcttggactaaattacagagtgctgtgaaaggccggtgattgattagttcctgggctcgatgtacagttatctaaacatttctctaggtaagacatctggggcgatgaaatcaagggaagagaaagtcattattcattccctatgactgtttttgagtttcacactaatacactggatcat

SEQ ID NO: 42793 - DNA, 175 bp, Glycine max
  Clone ID: PAT_MRT3847_138642C.1
atccattgagcagttagatgttgtccgctttggtgtcttcttgtgggatatcgcgaccttgcgacagtgttggggtaattcgaattcaccacaggttgtgacatttgttggctttctgggaaagatacttgagatacctggttatgtatgtcctcatttgttggctataataaat

SEQ ID NO: 42794 - DNA, 136 bp, Glycine max
  Clone ID: PAT_MRT3847_138643C.1
tgcgatagagaaataccactacttttaacgctattttacttattccgtgaatcggaagcggtgcactgaccctctttttggacctaaggtcggctctcaccgcgcgatccagcactcaagacattgtcacgtggga

SEQ ID NO: 42795 - DNA, 516 bp, Glycine max
  Clone ID: PAT_MRT3847_138644C.1
aagtgtaattgactaattgatatcatcatataatattatttatttagattgaaacttgtcaattgtgattaatgcgaagattacattctgcatcattgagcgttcaataattagtctctggttgattgaataatacttaaaagaaatatcacattattacgatcgttgtacaatgagaggatccttgcaaaaagagtagaggtacaacggtacaaggaatcaaacgattcaaaccactaatgacatcattacaaacagactacatttatcataccaaaaaaacaaacaaactacattttcgtaatttattctggagactgctctctctgttctttgatgttcttgaacatcttagaactcttgtcaaaaatctttgctcttctgttataatctttatggtccttcccatcatcagcccccatgatagctttcttcttaaggtaatcaacaggagcctgatctctctgatcatttaagttcttgaagatcttaaaactctcgtcaaaatctttggtc

SEQ ID NO: 42796 - DNA, 204 bp, Glycine max
  Clone ID: PAT_MRT3847_138645C.1
ggcacagaaaaatgaatcgattgccttttctggcataattattttttcaaacaaaacctattttgggttccaaaaagaaaactagttattacctttcaactcaaatgcattgtccttcatgcacatttgctctgtgagcaaatttcactattctttgtgcacgcctggttttgatctttttattgttggcagagaaatgcaaac

SEQ ID NO: 42797 - DNA, 506 bp, Glycine max
  unsure (1)..(506): unsure at all n locations
  Clone ID: PAT_MRT3847_138646C.1
tccgttccaggaaggtttcccgtcatcactgtatgacgtcctccttctttgggggggggggggggcaagaaacggcacatgacgggaaaaatgcgaggaaataaggtgctgagggtaaaccactaggataaggcatgactagagtagcgtgcgtaggggagctagttggttagacagtgantgagcctgcacgagggccgtgatcacacaaatttcgatgggaaaggagtgaagttaagaatataggtgctggtaccacaagggatcagtaggtgtcaaccgctggccgtatccgtataatagtggcttggtggcccgcgttggggttggagaagacaaccaataggtgtagaccgtagcgtgaacgggtggagtaaacgggtcnccggcagcgtcttgcgcgtaggtggcacgagacatcggcccccacgataattcggaggcgacgtataggttaagcttagcgcgcgggggccatggacataggtatgcaaggtagtgatatg

SEQ ID NO: 42798 - DNA, 172 bp, Glycine max
  Clone ID: PAT_MRT3847_138647C.1
tcatctccaagacattaacaatgaaataaatgctgatgggaatggcccctttgacttccctgacttcttgaacctaatggctataaagatgaacgacactgattctgaagacgatctgaaggaggcgttaccagtgcttgacaaagacccaaatgggatcatttctgctgct

SEQ ID NO: 42799 - DNA, 844 bp, Glycine max
  unsure (1)..(844): unsure at all n locations
  Clone ID: PAT_MRT3847_138648C.1
tacggctgcgagaagacgacagaagggggaggaagaaacgggagcttttagtagtagtaataatcaagtgacgctttcgccccttattcaatgctttaccaaactccctatcctcaaccctttcaatttcatcatcctttgccttcttccttctcccctctccttgcagttccaaccacaccacctcctctctatctccctttccctcaggccgaaaaagaaatggagtgcgtggaggcagcgttgaagagcaattataggaaagaaatgaccttaaaactgagcccacaaaccttcacggaagaggttagtgtccaaaacggcacaacctgcgacgactttttcgttaacgacctccttgacttctctcacgtcgaagaagaacccgaacaacaagaagacactccttgtgtctcccttcagcatgaaaacccaagccacgagccctgtactttcaaagacgattatgcctctgtgcccactagcgagcttagcgtcttggcggatgacttggcggacttggagtggctgtctcatttcgtggaggattccttctcggaattctctgcggccttccccaccgtaacggagaacccaacagcatgccttaaagaggcagagcctgaaccggaaatcccggttttctctttcaaaaccccggttcagaccaaagcaagaagcaagcgaaccagaaacggtcttcgtgtttggccattcggttcaccttccttcaccgattcttcctcaagctccaccacctcttcctcttcctcttcttcaccctctagccccttgctaatttacacccaaagcctcgaccacctgtgctccgagcccnttcccc

SEQ ID NO: 42800 - DNA, 254 bp, Glycine max
  Clone ID: PAT_MRT3847_138649C.1
tgaaatggctcccaagggattaatctttctagctgtgttaatatgcgtttcagcactgtcactgagtccttctgttacgggggaatggcaaaatcatggccttgttatgaactactacaaagaatcatgccctcaggctgaagacctactcacagaacaagtcatgcttctctacaagcgccacaagaacactgctttctcctggtacaggtacatcttatatgactgtgctgttccaagttgtgatgcatcac

SEQ ID NO: 42801 - DNA, 1772 bp, Glycine max
  Clone ID: PAT_MRT3847_13864C.1
gtgccaagtaccacaacgcagaaatgctgcaaaacccaagagtattgcgatattccgctcagccattcaatcctccaactcgcacggcagcatcatcactttctccattccaattaatacccacttctccatcttttccaatcctcaaacagcaatgcagattctcacgtagagagctcacaatctttagcaactcttgcttgctactactcttgggttctcaggcagtggatggatccagagcaagagcagaagaagacgttggtaacacaagtaacattgatcaactagaagagaatctggcttttgctgaagaagatgctgctaacataagcagcagtgatcaaccagaagaggatttgactttggcagaagatgatgttggtaacacaaggaacagtgatcaactagaagagaatctgattttgcgaaacgttgttgctaactcacgtagtgataaaccagaagagaatgtggctaccactcccagctgcactgaaagaaaacctaccaaacaagcattcttagacgtatctattgacggcgaacctgttggtcgcgttactatagggctctatggagatgatgtccctgcaggagttgataggtttagtaagattgcaagcggtgctgctggtattagctacagaagaaaggagtttgtcaaaataatgcccaattacgtccaacatggcggcctgagatcctatggggtggatgttgaacttgcttcgaagacaggtagcaacttgggagctagtagacttgttgaggaatgggagagggagtatgagagatgtcctgggactaaaaatgtggctggaagtgtagggattattgtgagaaacccatcaaaaccgcctccaaagttgaagcttattgcaaaacaagggaagctggagattgatcaagaagaagtaggaactgatcccaatgggacagaatttgtcatagctacaaaggattcaccagaattggatgcatccactctggtaattggaagagtaataggagggatggaggttgtgcagaggatcggtctggttaaaacctgtacaagagaatacaggatctccatactttagggtggcaaagctaataggagacaagagagctgttgtagcagaaagaggattcaaccgcccttattcaaaggtcattgttacaaactgcggtttaatggagtaacacaaaatcgtattcactccccttttctagttgatttcctgtgtacgtattagagaacatatatcacattcataacaatctccattgtcattcgaccctatgtaacgtctaccatttgtattacaaatgaggaaaaaaatattacagctgggttccagatggcaaagtaatcgtcaatcacaggtatcaaggtgcaacaaattacttgcttttgttaggagcaggattgaaccccatgtatcttcagtaaaaaagcaattaaacctttgatacaacaattacaaggtttttaaatagaataatatgccgcgaaaaaagacagtatacacaacatctagctggaggaaggggaagtgttctttgattagggacccatcatatcccctgggttcaagaggttatgtattttggcctgtaatatgagtggactttaatctttttgttggtggagacatgaaaagctttctaatggaacctacaggatcatccaccttaacaatgggcatagatgatggagatctatttggcgaatgtggcaaatgatttttctgatgatacagagcagataatgtttgcttccaccc

SEQ ID NO: 42802 - DNA, 276 bp, Glycine max
  unsure (1)..(276): unsure at all n locations
  Clone ID: PAT_MRT3847_138650C.1
gttcnngacaagttgncacaccaggtgaagaagatgtcnaaatagtcatgcncaatggctganagaagcagtatctggtacangntagggntccatatactgnttttacaaaccgtgtanaggagnttnactatggaaactcttatttcttccggcctattagaaaaagtgacttacaaaaggttgatccacggaaagcttgtgaattcttcagtacatgtttcanagatccatcaggcatcttantgttgtgattgttggnnacattgaccccac

SEQ ID NO: 42803 - DNA, 203 bp, Glycine max
  Clone ID: PAT_MRT3847_138651C.1
agcaaaatccatttttttaaaacaagggtaaagaaagaaaaggataagtgttttaacagttacttaatactatttaattttatttagtaacaaccacaatagcagaagaataaaacataaatagagccctatgttaaatgataattgaaggatgatcaccttatatcttatgatcatgttcttgcagatctgtaatagaaaag

SEQ ID NO: 42804 - DNA, 895 bp, Glycine max
  unsure (1)..(895): unsure at all n locations
  Clone ID: PAT_MRT3847_138652C.1
gtctgcttatgaagtctctcgaagcatctttctttctcttcctgcagaagctatccgtgttacttgttcccaagtctccaacaagcaaagtacatggttgatttggaaatccaggtccccagcgcattcgacccgtttgccgaggcgagagaatcagatgcccccggggcaaaggagtatgtgcacatacgaattcagcagaggaatggaaagaagagtctgacaacagtgcaagggctgaagaaggagttcagctacgagaagatcctcaaggacctcaagaaggacttctgctgcaacgggactgtggtgcaggacaaggagcttggcaagattatccaactccaaggcgaccagcgcaagaacgtatcccatttcctcgttcaggccggtcttgtccggaaggaccaggtcaagattcatggtttttgatttaacgattggtcttgtttatgttgtggtagtagtagtagtaatttgaagttgttgagttttgaaaagtttggattgtttcttttgtttgatgagtggtgttggaataagtttggtttggttttccaatttttaatgattggatttcatggatgttgttagtgaacttgaattgctcaagagcaagttgaatataataaatgatgatttggtttttcagaaaaaaaaaaaaaaaaaaaaaaaaaaaaaaaaaaaaaaaagggnggncgacaaactaaagaactaaaaaaacccggaaataaattacaaaaccgaaacgggggggccccccatttttgggttttttgaccccggaaataatttggggccgggaccgtgaggggtaccaattttccctaatggggagccgtttaaaatttggggcaaaatagggccataattttttctgtggaaaaattgtttt

SEQ ID NO: 42805 - DNA, 1861 bp, Glycine max
  Clone ID: PAT_MRT3847_138653C.1
ctcggctcaagatgaggcaaaaaaacagagaaggtctgctctgatgaggtagaaggcctgttacaggatttgctgccattggtggtgcctgttgcccttgactgcaacaacataggcttgttcattctcttcaaagcagccacactgcaagggatgagtaaccatgtctttgtcacccatgctcattctgttgcccttcttgtaccacctcctgtcaccttttttctaaagaaggttttgctgctgaaaatctaaacctaaaaaaacatgtttctgagttctaatttttgaagttacaatttaattaatggtttgtttaaccatgtctctttgtagatcaagagtggttcctccactcactttttccatcctatccaaaattgcccttcttggagtgatagggtgttcatctcagatcttggggtatgctggcatcaggtatagttctcccacactttcctctgcaatcagcaacctcactcctgctttcaccttcgtgcttgcagtcatttgcaggcacattcttgttttgttttttcttgtcctattaccaccacaaattaaggatggaaaagatagctgtaaaacgtagaacaacccaagctaagatattgggcagcataatatcagtattaggtgcatttgttgtgactttctacaaaggccaatcggtcatcatagctgataattccccttccattcaacttccacaatcaaatggcattcttacttcagtggatagaaattgggtcattggtggccttctgctcacagcttgcaatatactacttactgtatggttcgtttaccaggttgaaatcttgaaggagttcccggatgaactatctatggtcttcttttacaacttgtgtgcagccattgtagcatcaattgtaggcttattaggggagaaaaattcaagtgcatggaaaataagaccagatatatcactgatctctattgtttgcactgtaatatacccctgaatttttttcttcactttcacctaaaaaatacacttgagttaatacaacttgctgatgatgcatttttttaaattagggaatatttaacaagttcctgagtagtgcaatatatgcttggggaatacacttaaaagggcctgtgtatgtagcaatgttcaagcctctctcaattgttattgcggttgccatgggtgttatgttccttggtgattctctatatgttggaagtataattggagccacaataatatcaattgggttttatactgttatgtggggcaaagcaactgaacagaaggaagaggagggggaggaggaaaatgttggtagccaggaatcatcaattactgagaacgttcctcttttgcaaagctatataactgtaaattctacgaagaaaatagatggaagtgtatagacagctgaaatgagaagtttcctcttctgcaaaaccaaaaaatttgtaaattctgaatagaagacaggtggaagtgtatagaagacaaatataaactgtttgcacctctttagtcttgacattgtagaaaatcatagagaccattttttgtcacagaacagcacattgtaactttcagtaatttatgaaaatacaattctcccatacttactataggttctagttgcagaagcagcctagacaatgggagcatcatgtacctttatacttcagatacaatagtcaatatttctaaggaatgaagccccaaagaagtatcataagttcataatttcttttcaaaacatgaaaggagtagattctgattggggaaaaaagaaacagatgtgaaatgttgaggtttagtgatttcaagaatggaagtgaatgaaacttaaaataaggactaaagaaagtg

SEQ ID NO: 42806 - DNA, 1838 bp, Glycine max
  Clone ID: PAT_MRT3847_138654C.1
ctttgtttgcttctcaagtctctcgaagcctctttctctctcttctaggttcgtttctctctcctcctcgttcttgtttcttcggtgattttatgtgtgtgtttgtgtataacggtggtcgtgtgttttgagtagcttgaaacacgtttgacgaacgatgttttactacgttgttgtgtcttgtttattttaaatcatagtcttgtaagttcgtagatcgtgaatttgcttatgatttatttcttagatataaaaaattatggggttttgttggggattttatcatgataaaataaaagctttctcttttcttgaatgaaattggctttttttgtaacttttgttctgttttgttatgattttttgtttagcaccttcctattgattcctgattccgggagtttgatgattggccttcattaggtattataatttgtggatttgattataaatatgatgaacttagataccgtttatattcttaggtgcttttttggtactgttttttcaatcataattggtgttcacacactggtaatctagataattagggttgcaaaattaattttgataccgagttgaaactctaattctgatcagagaacaatacttgaagaattgtttcttagttttgttcatgtgtttcaagtttgatgcatgattcattggttccccaatatggtggatgactatagccaatttatgaactctttgatttcttcttgtattgtaaaattgacatggaattttggtggtttgttcctttgcagaagctatctgtgtttggtgttactaagtctccaacaagcaaagtacatggttgatttggaaatccaggtccccaccccattcgacccgtttgccgaggcgagagaatcggatgcccccggagcaaaggagtatgtgcatattcgaattcagcagaggaatgggaagaagagtctgaccacagtgcaagggctgaagaaggagttcagctacgagaagatcctcaaggacctcaagaaggagttctgctgcaacggaaccgtggtgcaggacaaggagcttggcaagatcatccaactccaaggcgaccagcgtaagaacgtctcccacttcctcgttcaggctggccttgtcaggaaggaccagatcaagattcatggtttttgaccaattggtcttgtttttgttagtagtaatttcaagttgttcttgagtttgtgagttttgaaagtttggattgtttttctgtttgatgagtggtgttgcaataagtttggtttggtttggtttggtttggttttccaatttttaatgattggatttcatggatgttgttagtgaacttgaattgttccaaagcaagttacagttaataaatgataattcggttttcagaaaaaaaaaaaaaaaaaaaaaaaaaaaaaaaaaaaaaaaaaaaaaaaaaaaaaaaaaaaaaaaaaaaaaaaaaaaaaaaaaaaaaaaaaaaaaaaaaaaaaaaaaaaaaaaaaaaaaaaggggggcccattttaaaataaaaaaaacttaaaaaaagggggggggcgcctttaaaagtccctttttttccccccccgtttccgcccttgggcctttttttttttggcccccaaaaggaaaaaccggggggggccctaaaaaaagggctttggggaaaaaccccttttttccccccttttattttccttgaaaagccccccctttttcccctttgaaaaaatggaaaaaacgccccgggaaatcgccccccccccctattggccccactaaaaggggattggggtcccccccttgcttgggctaaataaaccgggggtttgggggtttacccccaa

SEQ ID NO: 42807 - DNA, 504 bp, Glycine max
  Clone ID: PAT_MRT3847_138655C.1
ttttctcttaattcaatgtatctcttaattgaaaataagtactaattcttcaacatattataattagttgaaggatatttgacctatcctaaaaaatatttttctatacacaagagtttgtacactacgtgacccaagttatatgttccttatacttctgcaggagactgatatgaacatttaaccgaacctttggtttgttgatctattggactttcacagactagtggtcggttgatttcttcggaatttttagaagtaagccctttcttgttgtcagggtacattacataatgttgacacattaaaatagaatcatagaatatggatacctgcggaaaatatttgatgaggatcataactgcttgaattgtgttgaagatggagattagccaaagccaagattggctatgcaatgctatgaaaaaacaaacagcaacactaaaccacactacaacaactattgcaatggcatagttggagaacttctgatttcctcgctgc

SEQ ID NO: 42808 - DNA, 876 bp, Glycine max
  Clone ID: PAT_MRT3847_138656C.1
aggctcaagggagatgatctagttctcattttcattcctcttaatcattttctgatatcttttttttttctgtgatttgattgatggttggctgtctgaggttaacgtaacttgtgcaggttttgaagcatatgctaggaaggagcgttcaaaactttatttgtgttgcattactgaattaattcttatgatataaaattgttctatgtttgaatatcaattattgataaatgtcttgttttcatgaatgaatgcaggcattgcaacttctgctcgagtttttctttgctgaagtttggacaagccaactgttacgggactacaaagagttttaaagactaagtaggaaatcctaattagtagggatgcctaaacaaagaacatttatgatactgtacagatacgacagacactattcaaagatgaaaaagtagggatgcctaatcttaattatcaatatactttgaaattgtggttgatttcctttatatgatttatttacttgtgtttgtagatgtgaggtgacaagggcaaataaagggggaccttattagggatacttatcagcacaagcaccagcagcatcaatctttctaacatgcatattgttcctctttgtattcattgtattcaaagattgaaaatgaattctctcctaatagccatgttactgttttctgcaaaattttgtacttgtaatatgttctaggcagatgtgatcaatctaatcttgtatcggtttatataggctgatgaaggtttttattttgaatttatggtatttgtgaagctagaggtttgtaatgtttcattttctaacttttgacttgtgattattattattaagctaaatatgtaattaggcttgtaattggt

SEQ ID NO: 42809 - DNA, 449 bp, Glycine max
  Clone ID: PAT_MRT3847_138657C.1
ccaaggtatgatgctctgcatggagaatcgtccgctattctatgactgcgttgcacgagaaagagtctctggacaccttggatctgttatcaccgttcttgtgctctgaccactccgacgaacagttcgatatggatcttatcatacgcttcatgatagcgaagagggacagtacctacgcggcgctaacgtaggtcttctggctgattccaagcaccctaaactggaggaggaggtggttatggaggttatgcagaaatacgcttcctacacacacgtgtatgatgaggtgaaggacatggtatacacgcacgtcggtggtgtccgacagcatgaagctagacccggcggagccgcacgataccaatgaggcaggggaagactactctttccctgatggtacataagtgaagagaaggttgagagtgagcgttcatatttacacgatg

SEQ ID NO: 42810 - DNA, 354 bp, Glycine max
  Clone ID: PAT_MRT3847_138658C.1
tcgcggtttcgtgggggaaactcaagtgccatgaagtttgatttgtccactcagtctacagtttttgacattcttttgggaatttcccaagattttgaaattgctggtgatactcttatgccagctttttttgtttcacaggcttctgccagatcttttgaaaatgcggaattctttgcatgatctggaatttgtattttctttcgttagttcgtttgtttaattaaataaaggaaatttggccttacccttttgttgagtatgcttttgccttttgaaaatttccaacccttttttattgtcttataattttgaaagtgtgtttttttttataaataactttatattttatta

SEQ ID NO: 42811 - DNA, 371 bp, Glycine max
  Clone ID: PAT_MRT3847_138659C.1
tttttttttttttgcaacattaaccttaccgaaacctttacataaacggggttcctttactcaaaacaacggtgctcgatctatattaaagtccttataaccccaaaacttactatttctcgcacaaactataattaagtttactgaaggctttccaaattccaacataaacaaattacaaactttctccctttaaccactttttgtttaccactctcaaaatataagaacggactctcaacaaatttggactgtccatatatagggaggaaaatcattttaacacactttaaaaccctccttaaccccctttttctccttagaccattttggacccccacaaaaactaaattccttaatggaatttctac

SEQ ID NO: 42812 - DNA, 671 bp, Glycine max
  Clone ID: PAT_MRT3847_13865C.1
ccacgcgtccgcggacgcgtgggccagagactcaacatgaccacaaatcaatctccacttcctatgcttccatggacctgaatatagggccctaataactcgtcgtgcgtgcataggtgtatgagccatgtgtgtataaacaagtatttataaacatgcatgtaataagtaaaacagctgcacgaaaaagcatcgcaaaaagttatatgaacacaggaacataaaagaaagaaagggaaacataacataaaggaattcatgataaatattgcacatagattaaatggcttaactctaaaaaaaaatccctaatggagtcgccaactgtcacaacctacccttcagcgggaaggtgaggcgagactcaagggtgtgtcttcctaaaaagaaaatgcgcgagagtcgccaccaaaatttattcaaggaaaacattagaaaaaaccaaaaagggatctacgaattttaagaataaatgttcgagagtagtttacgtgtgaggaaggtattagcaccccacacgtccgtcacaagggacaacatccttcaatcaagtgtgcaaaataatgacttcaatatttattatactatcccttttttatgttttttactttttgggtcaacaagagtgtgacccttgctcctacgtatcctcaagtgcgataaggaactca

SEQ ID NO: 42813 - DNA, 347 bp, Glycine max
  Clone ID: PAT_MRT3847_138660C.1
gtgttgggttttttccccccaaaaaaaaggggtttcccctcccttaatgggggaaaagttttcaccaattctttttttcccccccccggggaaaaagttttacaaaatccttctatccccccccggggccaaagggtttacaaaaatttcttacccccccccccccctttttaaacggtccccccctggccctttaaccgttttttattccccccaaaacccccggggttttaaatcccccgagccttttataaaacccaggggtgtttgaaatgaccgtgcccccaggatgtcctttttggcaccggggcccccctcttattttgggggtaattttccccccgggg

SEQ ID NO: 42814 - DNA, 592 bp, Glycine max
  unsure (1)..(592): unsure at all n locations
  Clone ID: PAT_MRT3847_138661C.1
tataagtaacacttatgtaaatagttacaatattcacggatacacaactcaaaattgaattgaaacttaagtagcaactaggcatatgctggtaatactagctagctagctaggataggatgattgcgagggcgaggaagaggcacacagaaatagttcatggtattgggtaagatttattatcacacatgcatctannngacatagggcatgactcagattcgtccgtgagtgaggcacaagcaaagctaaccgttactaatctacaaggggagcatgagccacaagcgtgcatgcaatctggtaatcttgaacctgcaatttgaagtgttctgcccctcctacttccaatattgtccattgtgcttgaatgtttaagttgatcgtgatcatggtgatgatcagctatgccaactgccaaacataaaaatgttacaatcaatgtgaataagagatatgcagtatattacgagtctgaaagccaacaatatataccaattaaaaagaaaagaaaagttacactttatttttcattctcatnntcttatttttaaaaacttgatgatcaccttaattatgtgtcaatctaaac

SEQ ID NO: 42815 - DNA, 187 bp, Glycine max
  Clone ID: PAT_MRT3847_138662C.1
aatagtggaaaccaactaagaaggcagtcagattttgtgcctcccaagatagcaaggaaccgtcctcaagcattcctcttagtttgccaagaattttcaaaagttaaatcagacccttcataattttaaacaggtcacatcacttctgcgaatgaagctgaagacaatgatgatgatgatgacattg

SEQ ID NO: 42816 - DNA, 372 bp, Glycine max
  Clone ID: PAT_MRT3847_138663C.1
ggaaaaaaaaagtcttttttatgttaagtttcactcactccaaccccatgaggtttcccagttccaaaaaggaacctccggggtgacagaggcaaaaaagcaaaccttggagtagtagcagccgggtttactgggacaggggggggcacatatggggggcatccatgaaatctcaaatccataaactacccccgggggcatggcaaaataggaataattgttgggttccaaaccccaccaagatggcagagcaaccagttttacgggacaaccaactgggaagccctttgtttttaagccaccagcaataggggatatgtacttggctttggagccccagttgacgtatgaagcattatcccggacgcgggg

SEQ ID NO: 42817 - DNA, 176 bp, Glycine max
  Clone ID: PAT_MRT3847_138664C.1
ccaacgcgtccgacaacgcggccgttcttattgggtggatgaactccccaaaaaggcaccttgtttattttccaaggggtcctttttgggaggtttagtttccaagggttaaggcttgaaaaagggtggtatggtgaatgggaaagggggccaaggatttgtttttggttcaaaag

SEQ ID NO: 42818 - DNA, 186 bp, Glycine max
  Clone ID: PAT_MRT3847_138665C.1
atgggagggaaggatgtggttcatataaattagacaaaaaatttaaaattaaaagcgggcccaaactgcaaaaattgttaaaccagttagctgatgaaaggttttttaaggtttaaaatcatagttttaatgtaaatcctgttgacaaatcaagaaaagtaagggataatcgccctaaaatgtggg

SEQ ID NO: 42819 - DNA, 345 bp, Glycine max
  Clone ID: PAT_MRT3847_138666C.1
cgaacactgacaaatggttgaggtgagattgtaatacatgctaaaactaatggaacacttttacatatcggaacgggcttggtatcaccctctgagtaaatatttaacaaaggcgggaaagacgaggaaacagatgcacataatctgaaagccctattgatgaatcagttgctcaaatcggatggtgtaatggctgacggggaggtgaaactaccaaggaagaaacctgttatgatggagacttcagggccttttactaaatcccgggtcattacttattaacacatccgaaactgcatttggtcatgcactcccggacctaatggccattaaacaatcattttg

SEQ ID NO: 42820 - DNA, 628 bp, Glycine max
  Clone ID: PAT_MRT3847_138667C.1
accggcttttccttgctattatatgcttggatccacttgatcactgtgaatctctataattaatcatttccagatttctgaggatgggttactattgctataaacgcaattatagtactcatacatcagatgttattgtgatgttggcggtggccttgatgcttcttggcataccttggctctttacgcgtgaacaagtggtggtagttgaagaaaagaagacgaattggtcagctttgatcacaccaatactagtactactcatcttgcttttgctgtcactgattggaactcccaggagggtttatgcaaagccaacgtgctatcggtgtaagcatgtctgctactgttactgctagtgtcagtccaacacctgctagtgttcagtgctctatgattatctcatatctttggtcactaagtaaaatattgtatttggaatattatgatcgtgtaaattatgtgcttgtttcattgtttgttacgaaaactaaaaggcagggtcaggggtgtgttactaatttatatataatcccaaagagaaccatatttttgttattaattaaatgttttggggtgggtccatatgttacccaaaattaagaaaaaaataggacccttttttagg

SEQ ID NO: 42821 - DNA, 169 bp, Glycine max
  Clone ID: PAT_MRT3847_138668C.1
tctcattcttgttgtctggggaggcaggggacaaggaccatcttttcaatgtgagcttgcctttgtctatattggaatcaaccccatcctgatcagtgctggatagttggaaactggacttgcaagagagccagcagaactgatcatgcttacataccgcgatgctgca

SEQ ID NO: 42822 - DNA, 692 bp, Glycine max
  Clone ID: PAT_MRT3847_138669C.1
gcgggcaattagccattagcttgaaatagccaattaaaatcatgaacgatatcgccactaaatgtgtataaaaaaaaagttattaacaactactataattaggacacttatatactcaccaaaaaaaaagagacacttatgtgacacatatatcaaaccctgtaccccctaaaaaaggcctaccttgcctgcccaaaaaataaacaggttttgtataccctggttcaaaatacaaaagcatgtttgtacaagcaactactgggtagcaccctgagtatcaacttctgtaggtatacgcacatcctcttctgatttcctctcattagtttgtctgtcatttcttctccagcaatgtttagaaagatgccccctcttgccacatacagtacagggtacgctcctcgcaataatttctggcctattcctacacattccgagtgccggcttatagtcagctctcctatgtccacctttataggcctggtgatatcctcccatactgtaagaatattcgaccactcgttttactccatagcgatattcttcctctatctgtatacgttccattaactttccgtaaggtagatactcctcacgcattaacttgatgcagaagtccttccaggatggcggaagctttgaaatgatggcactaacatgaaaattgtcatcaataaaaattccagcagcag

SEQ ID NO: 42823 - DNA, 318 bp, Glycine max
  Clone ID: PAT_MRT3847_13866C.1
ctgccatgaccattgcaggctgtttctgaattcaccttgatatgatcgtgtgatcttatgcatacgcaatctaattctatggcgctcacgggtagcgagcatggcttctctcttagatgaatgctagtatggaggcgatatggatacgagagatgtgctatggaaaggcgatacccagactcctgatacggaatctgagcagagattcggaggaaaccattcccatactgcaaggcataaacattgagatcccaaagggtgtgatcgtaggatttcaaggctccttgggccggagtatgctaactgcattgaagtacc

SEQ ID NO: 42824 - DNA, 546 bp, Glycine max
  Clone ID: PAT_MRT3847_138670C.1
tgagcatcgtctagctatctcgatcgaactgtccaaggtcctgtcaccgctatgcaagagaagcacatgaggaacgataagccgagttttgaagtaagggtagggagggagggagcgggggggcgaggcgtggtgcggtgtgtggggagtggatgaggcaaccggttgccgcgtaagccgtagtaaaccagggcagagccgagtaaacgggcgtaatatgtgcaccatgggaaaatagcgagcgcgatttgaagggaaagagcggggtgcgcaaacagaaacaatatgttgtagataggatggggtgtaagggcgaggaacaagagattgtgcgagacgggatgatgagaagggacaaggttgatgcggagcaagcggggaacgcgaccacggagccatatggaaagagggagccggaaggggcgtagtcagggtaaagtaagaccgacaaggaggagtaaggcgtactgataaagggtggcgagggggaacaaatagtaggcaaagggcagcggggttaatagcgcatatagcatgggctaggtg

SEQ ID NO: 42825 - DNA, 289 bp, Glycine max
  unsure (1)..(289): unsure at all n locations
  Clone ID: PAT_MRT3847_138671C.1
aaccactcatcggggagtgcactgcgaaccgggcgctccaaactattccaacaccaccgcgctgcgtgcgtgtcccacaactgaacccgggccctaatggggctcggctcccgaaacaacaaatccnttaaatcttccaggggggggggcaactcctcnanctctctcaanctctnagcgatttctccggctggaggancnatatctccgggggggtccananggtcnccaccggttcctcctcccaacctccggggggtggtcctcacggcnacgggcaaccccaacc

SEQ ID NO: 42826 - DNA, 300 bp, Glycine max
  Clone ID: PAT_MRT3847_138672C.1
ctagagcagattcggttggcgctagtgaacacaaggagcgacatgacagggggaacaaagcagaccaagattgtaacataggcaaggatgggtgaaacagacggctgaaaaaatgagacgagctccttagagtgcatgattgcgctaaacactttacgagtggaagaaatgggagctgattatggggcatatgctggattctaaatgatgaacaacaacggactatagtgtgaccctaggaaagacgaattatgaagctttctcagaggactaagcaagatatgtaccaccagatcgtaa

SEQ ID NO: 42827 - DNA, 343 bp, Glycine max
  Clone ID: PAT_MRT3847_138673C.1
tttgggggtttttcttttctgtttcacctttcagggctaaaaattttcattgcgcgatgcatgggttcagatactttatgggtctgctacccagcccttcttgcaaatggaaaaggcttccactgagtgttctggcctgcgcaactcatcaggcttcctttcctttactacaaaggcttgggacgatcttctttctgtcgttgccccccatacctatgcggtggctatcactgccggttgctggaagggtgggacagaaactccactgcccgttggcattaacccctttggttggattgccaggcacttcttttagccctggcacgtcccctaacactggcct

SEQ ID NO: 42828 - DNA, 541 bp, Glycine max
  Clone ID: PAT_MRT3847_138674C.1
aaaggttacccactataatattacatagtttgcgagcattcataaagatgtttagaatttaatttgcacaactaaaccattgaatataccacccacaactcacattgtggggataccattgatcacagccatgaagatggaagaattttattctttaggacatagacagactaccaaggtgtctattgacctcttaacactccgattcaaacttccgagacagaattgcgccggattccctaaacatgaaagccaccgccaccataatcataatccggagagcaccgaagactagcaacttcaccaatttgcactgccaagcacaccttgatgacggtcctttgataacataacctctgcctatttgaaaagtgaaaggcttctgcacagaattctttgagcttcaaaatgagtgagagaggccaccgttgttgcacacaccagtgcagtgaacggttacgttgtgaccgaacataggcttaggaccggcgccagacctgaacagctgcttctccactcccatctgctttgggtctttagc

SEQ ID NO: 42829 - DNA, 130 bp, Glycine max
  unsure (1)..(130): unsure at all n locations
  Clone ID: PAT_MRT3847_138675C.1
cncgcagtnatattcncanantctcanctgaagncagatcctagctntgatgcgaagtgtcagatatatgcattgggacctcagcagcaccaactttatctnccanacaacatacgagnggncnncncgc

SEQ ID NO: 42830 - DNA, 451 bp, Glycine max
  Clone ID: PAT_MRT3847_138676C.1
tttctttcttttctttcttttctttcttttcttttcttttttttcttttttaaaacaaagaaaagggttaacaaacccacaaaaaacattttcccaaaaaaaaaaaaggaacccgaaggccctggctaaagccttccaaaagcaaaaacccccccttattccttttaacaggtttaaatcttaggaaagaaaattttaaaaaccaccttcaaaagccggaaattttaaaaaaaacaggggtcccaaaaaaaaaggaccggaaaactattgggggggcgctaatttaagctaaaaagccaatttattctaatcccccgaaaaacccattggaattggggaaaggacagaaaaaagggggggggaacccccccaaaaaccaccccaatatgcaaccttttgtgaaaaataattaatccggccaaaggggaaaaaaaccaaagttgtcccgggg

SEQ ID NO: 42831 - DNA, 454 bp, Glycine max
  unsure (1)..(454): unsure at all n locations
  Clone ID: PAT_MRT3847_138677C.1
gggaagccaaaggacccccctttgttttattaaaattaaaaacggttttgggaagaaaacaattggtgttttttgcctaccaaagatccttaaaaaaaacaaacatttacaactaaaaggggggcctgggcgacattcaagcaaacacccaaaccccgttttgaatcagtggggggccccaactccggccccactttggggggcgagcttggtccactgggaataaaaagccccgggggaaacaaccctttaataagggggnnntccgaaaagcccctttgggcctgaacaaggttggccgggacccttgccctccgatgggggtaaaagtaagcaaaacgggcccacattccgggggtccttatcccaggtgaaatgggcaacccaaaaaccttttttaaggaagccgggctttggaccatttcctgggggaactcggggtccactttaaagc

SEQ ID NO: 42832 - DNA, 342 bp, Glycine max
  Clone ID: PAT_MRT3847_138678C.1
aatggccgggacgaccggctcacctagctgcgtgaccgccctgtcgtcctttttttttttttttagtcttgcactttgatcctgagggtctccggtcatgtgttccagggtatcaaaaccttgcatctttgcctgtgaatggaaagatgggtgagttaaacttttacagatacattatacatggtctacaactcgtgaaaaaccatatggctcacccattggacaggttgagaagaaacactctgcgcccaactaccggagagattggctcattcaacatctcatgcatgatacattattattttctgaccaacatactgcctaaagggcggtgcgaggaag

SEQ ID NO: 42833 - DNA, 762 bp, Glycine max
  Clone ID: PAT_MRT3847_138679C.1
tcgtctcgcgtccgtacggctgcgagaagacgacagaaggggacatcgcacatcaattattctttcgcaccttcgaaaatcaattttctgtcttctctgcgtcttcttcctctatcaatcgttttccatggctcgtaccaagcaaaccgctcgcaaatccaccggtggaaaggctcctaggaagcaactcgccaccaaggctgcaaggaaatctgcaccgacaaccggtggagtcaagaagcctcatcgctatcgccctggaactgttgctcttcgtgagatccgaaaataccaaaagagcacagagcttctgatccgcaagctccccttccagcgtcttgttcgtgaaattgcgcaagacttcaagaccgatttgaggttccagagtcacgctgttcttgcgcttcaggaagctgcggaggcttacttggtgggtttgtttgaggacaccaacttgtgtgcgattcacgccaagagggtgaccatcatgccaaaggacattcaactcgcacgccgcatccgtggagaacgtgcttaggctaataataagagtaataacgtagttgctgctgctttttttcgttttgcaatacatttcttgttttagggttatttttagtgttatgttccggtttgtctgttatgggatgtatagaagatagatatatcaatcaacaacttagcatttgtaatgatcctaaactgaaatatttgaataattagattcactttgggtaaaaaaaaaaaaaaaaagggccccta

SEQ ID NO: 42834 - DNA, 481 bp, Glycine max
  unsure (1)..(481): unsure at all n locations
  Clone ID: PAT_MRT3847_13867C.1
gcgcaattttcttacccgcccatcttttcgccttcttgtcgatgaagatctcgtacgcaatgagggcgaggtcagaattggggaggcttggtgagctggtcgagcagagaagggaggtcgtctgtgacggagacgacgacaggattcggaggcattatcgacgatggtgttggcattgactctcttggagtggcccgatgagagatgtgtgaagagatgagcctgtcagtatggtgaccaaaatgcatagaattcatggttgtgatgaaactcaattcgaaacatacaaattgatcgaagggaatcgaacccatgactgagactcaattatggttaaccattgagctactgtacttagttggtatatagacgtgagaaataaaatatatagntattggaatttttattgttattttacacgtctttatatgttttaattaatgactcaccggttgcaggattgggtccttaaacagcacgt

SEQ ID NO: 42835 - DNA, 664 bp, Glycine max
  Clone ID: PAT_MRT3847_138680C.1
ggatggctctgccatccgagcctcaccgtcgtcgccgccacaaccacatctccaccttcctccaatccaccgcctccaacttcgcctctctcttcaaccccccaaaccctccctctctagcactccctcacccgccctcctccttctccctccctctcttcttcgcgccgccgctctcctcctccaccgccgttgactcggcgccaatgggaagggcggcggcgggcctgtgttcgtggggcaggtgttcagcatgtgcgacctctccggtacgggcctcatggccgtttcgacgcacttcgacattcccttcatttcgaaaagaacccctgagtggttgaaaaaagtatttgcagcaatcaccaagagtgagaggaatggccctgtatttcgcttttttattgatctaggagatgcagtttcatatgtcaagaagctgaatattccaagcggtgtggtgggtgcctgtcgtcttgacctagcatatgaacatttcaaggaaaaacctcacttgttccagtttgttccaaatgagaagcaggtcaaggcagcgaataaactgctgaagacaatatcagagcacggtgagaagaaaaggttgatggggtgcctgtgtttagtgcccagacttagatatagctatagcaactacagatgggattaa

SEQ ID NO: 42836 - DNA, 1971 bp, Glycine max
  Clone ID: PAT_MRT3847_138681C.1
cggctttgaataactcaggaactcccaactctccctccgtcactcgctcacctcaaacccccaaaccttcatccgtcgatgcccactggatggctctgccatccgagcctcaccgtcgtcgccgccacaaccacatctccaccttcctccaatccaccgcctccaacttcgcctctctcttcaaccccccaaaccctccctctctagcactccctcacccgccctcctccttctccctccctctcttcttcgcgccgccgctctcctcctcctccgccgtggactcagccactgccgagcccgctcacccccccgcaaaatcggtccgcatcgcgcggcttggtgccaatggaaaaggcggcggcgggcctgtcttcttgggggaggtgttcagcttgtgcgacctctccggaacggggctcattgccgcttccaagcacttcggcattcccttcatttcggaaagaacccctgagtggctgaaaaaaatatttgcaccgatcaccaagagtgagaggaatggtcctgtatttcgcttttttattgatctagaagatgcagtttcatatgttgaaaagctgaatattccaagttgcgtggtgggtgcctttcgtcttgatctagcatataaacaattcaaggaaaaacctcacttgttccagtttgttccaaatgagaagcaggtcaaggcagccaataaactgctgaagacaatatcagagcatggtgacaagaaaaaggttgatggggtgcctgtgtttggtgcccagaacttagatattgcaatagcaactacagatggtattaaatggtacactccctacttctttgataaaaacatgcttgataatattcttgaagatgctgttgatcaacatttccataacttaatccaaactcgacacatgcagcggcggcgggatgtggttgatgacaacttagctgcagaagtgattgaggaaatgagcgataggttaggggagcctccagaggttcaggaattgctagatgaaatgggccatcctagtataccactaagtgttatatcaaaagctgcagagctccagtttcagtatactgttgataaagtatttctgggtaataggtggttgcggaaagcaacaggcattcaaccaatatttccatatatggttgactcatttgagagaagaagtgaagcttctctactgagagctacagagtcaagcagctgccttgagaactctaaagtggaagatgataggcaaaatgctgaatgcttagactcttctaattgcagtttggatggtaatactgaagcaatcaaacaatctagtccaagcttaagtctaccatttggtaattggtttcatcacctatggccgaaacagtgtcgtgaaaaagcaagctcatctagaaaaggtgtaaataaggaagaaatgaaaccaagacccattcttccaaaagttacaatggttggtctctctacagaagaagcaggccaaacgagcaaagctaatttaaagaagacaatggacgatttgacaagagagttggagaagacagaactagatattatgacagatggtggcagtaaagagtgcaaagtagaagatagggatccactatttgtggcaaatgggggaaattactattctagtatgaggagaaaaccaggatctggtcgctagtttagagtaggatccaactaaaacctttttgtcacagaatttttcatttgcaggttgttgcggatatttattgatctccgaataaggttcagaatatcgggttatctattaacactcatgttatttagtgttggagctggaaataacctcatttgcggtgtataccgaaagtggatgaataaagctttagattattatttacgatcaatgttgtaaatgattatatatgtaattcatccctgatgcccgttttgattttgctttgggaagtttaataaaactgtgatacataatgcttagt

SEQ ID NO: 42837 - DNA, 382 bp, Glycine max
  Clone ID: PAT_MRT3847_138682C.1
ctcaacccactcgtacggtaaccaactatcactcgctaatccattcttattcctactaactttaactaccatcttccctaataccggcaaccacttactgacgggcgatccctaactatcactctatactactcacactatcacttccatttctataaacacaccttttatcaccctctaatctaacctatcctcacttctctcccataattaccactaatacaacctcatcaactaccttcaatatcatctccactacctcgacgcttacatctcccacatcatctccacactcttccaaacctaacacccataacgataacttactccacaataattcttttcttttcaacaccttcaaaaaacacaccctaaatttctc

SEQ ID NO: 42838 - DNA, 457 bp, Glycine max
  Clone ID: PAT_MRT3847_138683C.1
tcgtttatacgcgtttctgaactgcctattttcttaatgacactgaaatttccattaaaaaaaaaaaaaaaaaaaaaaaaaaaaaaaaaaaaaaaaaaaaaaaaaaaaaaaaaaaaaaaaaaaaaaaaaaagaaaaaaaaaagaaaaaaacaaaaaaaaaaacgcctagcaaaaaaaaaaaactttaaaaaaataaaaaaaaaaaaagggggggccctgtcaaaaaagacaatattaacagccgggcaacccgaatgaaaaatgttttaagccctgtaaaaacaaaataaccgcggccgatgttgaaaaaaccgcacaggggaaaaaccttgggttgcccccaaattaacggcctggcccaaaaaccccctttccacccttggtgaaaaaaataaaaagccccccccgtttagctttaaaaaaaaagctccaccttaaaagggaaaagagagccccc

SEQ ID NO: 42839 - DNA, 1507 bp, Glycine max
  Clone ID: PAT_MRT3847_138684C.1
tcgaggcggccgggccggaatttgctctcacgtcccctaataaacaaagacatagccaatctgtcaacacaggaagctctagaaaggggcaccccaccttctctctcctcctccccctttaatttccttttccttaattgtcttaatttccttgtattctggtataatctagctaaccctttttttccattagccatggtcatcaccatcgccaccttctaggtgggatccagggctcaatatataatatcacactcaacacagttaccagctccaaatctcaacaaatggatagcaagttcagaaaaaagaaccgcaacgttaactcatataccagtgaacaagatcaagacactgatatagctcaagaaaaccttgccgagtcccctccttcttccactgtgttcaacatcgatggcttagtcccctcccccacttcctcatcaaagagaaggagggcaatacagaaaagggtggtgcaaatcccaatgaaggagacagaagggtgtaggctaaaaggagagagcaacaccccaccctcggattcatgggcatggagaaagtacggccagaaacccatcaagggttccccttatcccagagggtactacaggtgtagcagttcgaaggggtgtccggcacggaaacaagtggaaaggagctgcgtggaccccacgatgctagtcgtcacttactcctccgaccacaaccatccctggccaccttctagaaaccacgccaggcccaccaaaaaacctgaaccggttccggacccggtcgaaccggaggagaagttcgcggacgagtccatgataacaaccgcggaagaattggggtggctgggggagatggaagcgacgtcgtccacggttctcgaaagcccgtttatggctacgacgtaccatgctgacgtggcgctgattccgatgagggaggaggacgagtcgctcttcgccgacctcggagagctgccggagtgctcggtagtgttccggcaggggctgctggcggagcggcggcggtacacggcgccgtggtgtgggaccacaagttgagggcaaaaaagtcaacacgaaaagaaaaaaagtagaaaaactagaggtgcctgttagacgcgttcttcgtgcgccacaagagaaaaagataccagcatttttttcctttttagtattgagatattttttattttttttgttttaccgttgttaagacattaattaaaaattaaaagttattgtaaaaattataaaaatattcaaaagaagttataaacaatattattttatgtattttaataaaaaaaatatttttttaatttttttgactaatatcctaaatagcggtagactttacctatattttactttattgagagtagaaaatggaaaagaaaaaaaggaaaataggagaagtagggttgaagaataaaagggcagttagggaagtggttgtaattagcgtaactttccgcgtccatttcaacaacttgcattgcacaatgtttgac

SEQ ID NO: 42840 - DNA, 396 bp, Glycine max
  Clone ID: PAT_MRT3847_138685C.1
cgcatgcgccccacactaccagcgggcaaagcaaagtgcacccatgaatgagtgattcacgaatatggaacccgagcgggagcattgattatggccattgtgcgtgccgcatgtagagaccccacacactgggcctgcccatgagacatgcgtgctgaacagtgtccactaacaatggctgaagggttaaacactgactttcgtacttacggaacgacattacatacttctgccattaggatcttgaaagtgcacgtgccccggagactatctacctacttttgcaatggctacactacctgcatacattattcagagcgtcccttgcaagggctgaagtcacacttgcatgttgttgaaagggggtgacgcgaaagatcgcacatactagagagc
